United States Patent Application Publication US 2015/0052636 A1 - sequence listing, part 14

SEQ ID NO: 47006 - DNA, 807 bp, Manihot esculenta
  Intron number 2 from transcript cassava4.1_021878m (locus cassava4.1_021878m.g) derived from phytozome v7.0 (chr-ID scaffold03750; pos 206405 to 207211)
cattacatatagcaactaggaaaggaagaacacaggtgaatggattctttcccttaatcactaaagacaactttattcttttttcgtggatggcttactattccgagcaacgttctgttctttgtgaactgaacgaatggaacgaatgcttttgctcttatgagttgaataccagttttgaaatgtttgtttatgtcaaatttcttaattatttcatttgcttgccttgaataccttgcctagttactgagcacatgtgataaataagagggtgaagaggactggttcagtttactaaagacgacttaattgggaaaacgtagaacactatgtatgtagtgagattaaatttatacaaatgttggcttcttttattctttgttataatctgcccagttggttgatgaaattgtatgggatgttgacttttgaataagagcttgacatatttgacaacttgatggttgaattgaattgaggggaaataattcaaaattggattctgtagaattgagattatgcttcttcaaaccactataaagcctgaaatttataatctgtaatgtcagcttgcagggtttgctgatttccaaattttacacctcttctagattgttccgtaatttggaaggatttacttttgaacacctgtttcttgaaagctgcttcataaagcacaacagaaccatcttcagtgttacaaaattgtgcacaaatccaaatagcattagtgcttggaaatgaaacagattaattgacatagtagttttctgtttgtgcagattgtgcggttgctactcaggcgcg

SEQ ID NO: 47007 - DNA, 505 bp, Manihot esculenta
  Intron number 1 from transcript cassava4.1_005068m (locus cassava4.1_005068m.g) derived from phytozome v7.0 (chr-ID scaffold04343; pos 17383 to 17887 reverse strand)
tctctttttctgagacgactgattcttgatcacaggtaatactgcaggaaacagaaaagaaaatacaaaatcctccattgtttttgggatttctgttttgcatgtttactgtttgtttatttgttacttaggcaacgattggaataaattaggtgtgatggcttggctgttttttcacttttgctttatccttttctttccttctcaaccttcaaagcttagtcattatgtaatcaccttaagattataaagtaaaagagaggtgggattttggtttggggccagggggcatgaatgttaactgtttttctcttcatttcaattcaatcttctgttcaaactttgattttccgttgcgttgaatccatagtcaagaaagctcccttttctttcttctctcaattcaaaagattagacatttgcaatttgatttaatttttaactatttttttaattattttaatgggcaggagccttcttaagatcaaactcaattaggagttcg

SEQ ID NO: 47008 - DNA, 735 bp, Manihot esculenta
  Intron number 1 from transcript cassava4.1_010638m (locus cassava4.1_010638m.g) derived from phytozome v7.0 (chr-ID scaffold01624; pos 226361 to 227095)
aggccagaaaagaggcaatcgattggataggaaaggtgggtttatgctctttgacatgttttacaaattctatgaagcttttcttgttttcccttttcattttctgattctgctcgtttgaatgcatggtggattttcactcattttctggaaggacgatactttttatttggttttcatatgggggctttcatggttttatcaagatttagttccggattctgtgatggacctgtgtttttcctcagcatttatcgtctgggcaaccattgattgagtttgctttcctctttgttattggtgttcgatgaaatgaccaggccgtgtcccatttagttctttgctctttttgttagaaattgtttttttgccttttcacgttttgttcaatctgaaatgggtttggtgggttctcttctttttctcccttttttggggccgatgctgatttgttaatttgtatttctgtgagttcttttctttttctctgctgtatgaatttgttttttgcatattttatcattgcctttattctctttcctttcattagtctcatatgcatattttgtcttactttgattagtctcatgccaaacatcattaataatatgagttgttatttgcttttctgtttgttttttcctttcctgttctactctattctctcagcaattatttcatgaagcccagttgatggtcaataatgctaatggccttgttggttcttacaggttc

SEQ ID NO: 47009 - DNA, 956 bp, Manihot esculenta
  Intron number 1 from transcript cassava4.1_008237m (locus cassava4.1_008237m.g) derived from phytozome v7.0 (chr-ID scaffold01761; pos 79193 to 80148)
tttagctgtattgctgagtcttgggtttagtacaggttaacactacaccaaaatcacatatttgatctccaattattatttaacatatggcttttgttctggattcttgttctatctgtctctctttcccacctgtccccaccatgtttctatgttccttctttgaagaaaattaacatcatggcgttgaaatacttgaaatttgtatgctctgcatatactcataattttcaaattctagatgactaaaatcatgttactccacaatctacttccatttgtttaatttcaattcaaatgaaagatatctagtgaaatgtttagggaacatggtgtaaaccttagagttatttatttaacatcattcatttcatacacatcatgatatgtctgcttttaaacaacctttgataataactccaaaattttaattggaaatatcagctttgcacgcagccaaggtgcttatcctttacttgatttcctcagattgccttctatgacttggataatcctctgagtttttcggtaacctcaaattatcaaagacaatgttttccttcaaagctattgagcttggcaaagaactagtcagtttaacaacttctctatctagtccaacaaaaaaaaaatagttaaaaaaagaaaaaaaaatcccatttccattattgctgcagctttattgggagaatcaaagttgaattgttcttggttataatgaaacttcagtaaagtatactaacttggctccttcggttcgtcatcgattttcttgccatttatcacttaggcttctatatcaaattctaagtagtgtcttgcttatagtctgagttcatcattgaaattgtgcaagcttttatatccttgtgttcatccacttcttgaattgtttctcttatatgttattgatacataatgcttgttttttggtggacagtcattcatcacttgac

SEQ ID NO: 47010 - DNA, 806 bp, Manihot esculenta
  Intron number 1 from transcript cassava4.1_000227m (locus cassava4.1_000227m.g) derived from phytozome v7.0 (chr-ID scaffold03079; pos 247257 to 248062 reverse strand)
cattcgcggatctcactctctggatccacgcacaggtaacccattgctttcttatttatttctttattatctttaatttttttggcattttggttcttggcattgaaccctttgtttggttccccagaaattttcgacaaagaaaatgtttctgaatcttgtgattcatgcaattctctccattttttcgataatttttggttaattgaaatctggattatttcttgttaatttttgtttctttctgggtttttattggatttctttatacctcttttgctagatcttgtgtagtcagactcttagtagagtgtgcagtaatccgttgtttcttctctctccattatcatatacagtcaacggggtgttatagtcgcctcttgtgtgcatgaatgtgtgcaactaacgctttatttctgaaaattctgattgcaatttttttatgttatgcctgattttgggttagattattcaattagggttttatagctactcattgatgattttaattttgtgggtcaatcaaattcttgaagaggaaggagtggagaatgtccttccaactattatatttgaaataatatataatgtttccctttcccctaaaagaaaatttttaagtacatgagagatgattacgttgatttgtgctcttttaataatttagagtgcatgagcttcatgttgatatgcgtgcttacattatatcatagagcagcatcagggcagacttattcttcttgggctgcttttgacttgtttatggctaatgaacatgtattgattgttttttacaaccatgtagt

SEQ ID NO: 47011 - DNA, 820 bp, Manihot esculenta
  Intron number 3 from transcript cassava4.1_001965m (locus cassava4.1_001965m.g) derived from phytozome v7.0 (chr-ID scaffold07520; pos 2345025 to 2345844 reverse strand)
ctcgtgcagcacgctggcaacatattgccaagattgtaagttcattgtcattttcaaaattttttcttcatgctctttcatgcttgtatggcctgaaaccgtccatacgtgttgtcagaaactatgaagagaacacctaaagaactatgctcacagaacatataagcaagcaattcccttagctctaacattattcaatcatgattcacctgctatgttagatcctcacgattggtcgctcatgctcttgcaaaccaagggtattttcttataacgattattgttacactatattacagttttctgtttttgtgcccaatgtctgcactgacctgttatcagggcgtgaaaatttgataaaaaaaaatggatgcactattggtattaaaagttcttagagccaaccaacaatcttcataaatttagtcattctttgccaattacacgttaattcaaatatgacagcttcattaatttcaatcgactaatataatctagtttttttgtatcactcaactctgatttcatgttttgggatgtagcaaaaaagattgtgcgatgtagatggctttaaatgttaaatagaaataactattaatattcttagtaaataatccacatctaggtaatatattttctaaagaatatatatatacatatctcttagaaggagcattctggttgtgtgttggattgcttaattaagggatttcacttaatataataaatggtacatgtgtcgagtgctaatgctattttgcatcgtactgtgggcaatctttcaggtatctcctctgtactgtaggatctgtgtacataa

SEQ ID NO: 47012 - DNA, 721 bp, Manihot esculenta; identical to SEQ ID NO: 45965
  Intron number 1 from transcript cassava4.1_019093m (locus cassava4.1_019093m.g) derived from phytozome v7.0 (chr-ID scaffold02947; pos 37802 to 38522)

SEQ ID NO: 47013 - DNA, 611 bp, Manihot esculenta
  Intron number 1 from transcript cassava4.1_008392m (locus cassava4.1_008392m.g) derived from phytozome v7.0 (chr-ID scaffold00847; pos 1161508 to 1162118 reverse strand)
tgcaagaggccaccttgcccctcaaaattgatcaggtatatatatgcttccatcgcaaatttgcttgctgtaattaaatatcagctcttaactgggattgtatagctccagctttcagaaatatataccaattcaataaacttatgaatgaacttgatttgcgctttggctatgtttctgttaattgctttttagttaaaagcaggcgtctttagatatatgatgctatgaattttaccagaagaagtacattcattgagttcaaaatcaaatttcaaattccatccaagtttctttggaaaaataggatagaaaataaaatttgagtcttgttggacactaaaggatttattttgcaatctctacaatggatcagaacaataaaaatttatttctaatttataatttaatttatttttaatttataatttaaattaaatctgaacattataattttattatattatctcaataattttatagcagtttactataattatttttttcaacaatttaaattgaaattgaaatttattttacaacagtttccatgttgagatttctctttctttacagaatatagtcactggtggagacaaaaccactagggt

SEQ ID NO: 47014 - DNA, 850 bp, Manihot esculenta
  Intron number 2 from transcript cassava4.1_017266m (locus cassava4.1_017266m.g) derived from phytozome v7.0 (chr-ID scaffold04796; pos 314404 to 315253)
aaggcccctcgcattacttctaaaaatctcatcaggtaacaatccctaggttttctcaatccttgttcaataccatcgttgggtctgcccgggtgttttcttcttcttttgatcctgtaaccctaagtgttaagattccgaattttaaattcaattgatttaacgtctggtttcctgatttccttatctgcctattttatgaattaaactgatgctttaatttataatatatattttttttcctactaataattatgatttcatttcaaagattcatccgcactgcagtttattgaatatgatgaatcttttggactgtggaagttgaagataatccagaacaaattagctgaattggaaactgttattagacctggtgatgacgtgaatggacaaggaagcaaagttctcattctagtaaatttgattttttggaattaacttagctgggactattcagaacattaagaatgaatgaattggcaaagtttttgaagtgtgatttatttgggggaattgacgattccattgaattgtatgtttattgatagttttataggcttagtattaacatgctacgcatttgcttggaagctagatcatccatattgtattctgtaatttcaaattttctggtaaatgctcatatttgtggcattgcaactgcaaagtatgtggttattctgattctgatattttctaaccaggaatgctgatgaatctcatttaatcatctcttagcattttatgtatttcagatattggaatacaagtgaagtgattttaaatagtaatctgattcaatgacctacttttctcagtgtaatcttttgtgaagctgttgctatat

SEQ ID NO: 47015 - DNA, 881 bp, Manihot esculenta
  Intron number 1 from transcript cassava4.1_012327m (locus cassava4.1_012327m.g) derived from phytozome v7.0 (chr-ID scaffold04718; pos 46796 to 47676 reverse strand)
gacagagagcaagagcgagaaagagttgcctatacgtatgacacgtataatttgtcgtatattctgacatttttttggaatccgtaaggatttgtctttgttcattttgttactttgatgtcactggagggatttaatcttctctgaatctgaaatggtgctcgctttgatttctatggtgtaattggctagttgggtctatttctttattgctaatttttcaattttttgagattatggatatatttttatttaaaactaggattacgggtcggattagttgagtctgattgatgctttcttcctacttataattagatgtaaaccagttttggacagagatcatttttttttagtgctggatatcaatcattttggcttttttgtatatgtgcttttatattcatagtgagagatactgtcagttcatgggttcccacgattgtgtatttgtagttttggacttttctccagctcgtttgctcatcttcttatcgctttatctttttgtttctgcttctgctattgtagttgtttccttcttaactctccctgtcctgacctgcttgttgtatgtttctcagatttcatctatggttcctgccgttcagttcaagccctttgtcttctatatcatctattgtgttgtttaacttccattctcactgaccttgttagctgttgtatctctcttccgggttggatttgccccaaatttcgattttgattttgagtgagaaacatttctttcaaaattttccttttggtgcccatttctgtgtagcttactttgcttgatcaataatttaagtggggtaattgaatcttatctgtttttccatgtagtctcctttgttcacgtctgttaatctttgcaatca

SEQ ID NO: 47016 - DNA, 1040 bp, Manihot esculenta
  Intron number 1 from transcript cassava4.1_034234m (locus cassava4.1_034234m.g) derived from phytozome v7.0 (chr-ID scaffold06916; pos 1587811 to 1588850 reverse strand)
acacgttgtgcccggtgtaaagctgtgagatattggtacgttaattttccaactaccaagtggaattactcttctacttcttcttcgtaattttgattttagctcttgatgtttgctggatttaccctttggttacgtagaaatcgagttacttctttggggcatttggttattgattgtgagttggatgactatgctggcatttcctcgcgcgtgttcgaatttcagtgtggaagtgaaatttagtcttgattttaaggttaattttgagataattgtacatttgacggaggagaatctagtttgaattgtaaatttcataagaatccgtatgaagttgtggaactaggtgacaggaaacaggaaacgaatgaaattgtggaactggggaacagaggaagcgaattcaatccgagacaattttctttcaaagtaactggttgggaattttggtcattgcatttgtcctttatttgtctgatcaacgttgtagatacaatgtctgaaattcctaaaagatgggtagtttacatatatgaataggctagtgttttttttatatgaactactttttccatttattaaaaagctataagagccttggattattaaggagcaaaatgttttggacagctattaatgtgaaatctttgagcttgcgtggaatcatggttctctaagtaaacaagaggctgtccaacatatggattaagacagcgaaacctttatgttaatggaaaaatagttgtctctttgaatctgttatgtaaagcagcaatatgatccctacaaacattttatggtagaagctgatttagttcaaatatgtgttgatgaaaaataggactcgttgtttacttcttgtcaattcttacctatgatcaataagatgtttttgttctgtttttttttcttccaccaatcagtgacactgtgaaattagttttggttgtgttctttttccctgcttcagttgtatttatgctgcaatttgatttgtttcagttctggtaagtgtcaaattattcactggcgacaag

SEQ ID NO: 47017 - DNA, 704 bp, Manihot esculenta
  Intron number 1 from transcript cassava4.1_029521m (locus cassava4.1_029521m.g) derived from phytozome v7.0 (chr-ID scaffold06974; pos 67417 to 68120 reverse strand)
cctccgatgtaagattcactttctctttctctccatttcggctttgcttttgtttacatactcgtaattctttcagagattttagtggctatgctgcacattattcctaggttttaagggattctaattaattttaaggcgtacggcatgttggggttttcaaggtgttgtaggaaggtagttggatatggtggacggtcaactagttgactatttcctgttcattttacctgtgaataaatgaattatttgtcttttccattgattttaatcatccaatatttttttgaagtaacatggcagagatggattatttccttattgttaatttattgttgaatccataaactggactttttaactatttatttactgtttcagtcagttagttgtttactgtttcatgataagcctatttttaatattgctcttcgtagatattgagttcatgtatttgtgttttcttcatgccaatttttttcatccttgttggtaaatatgagtttatttatttatattagtggattttgaatgttggattttgtttggttggttaataaattccatgatgttgggtttattagttggttaaccgagtgttgtgaagtttttatttctagtggattgtagttcttatttgctgatgtcattttttgtgcccccttccaggctctagacaaaatcagatttgagagcttaacaga

SEQ ID NO: 47018 - DNA, 631 bp, Manihot esculenta
  Intron number 3 from transcript cassava4.1_017627m (locus cassava4.1_017627m.g) derived from phytozome v7.0 (chr-ID scaffold01945; pos 390224 to 390854)
gaggtaatgaacttgcatattatgttttaaatttgaagattaatttcacaaaattggtatcccctcaagctacttgatgctaagttcatttttgtctgatactccgcttactttgtgtttactttttaaatgcatatttagggttttgatttcttatgaatgctaatgcatactttgatttcaagttttcaactttgtggaatcatatatgttgtagaggtgttgaaagttggcttctcttgtagtatatttgttctgatcttgtttatacataggattcacatttcacagtgcttatcgatacttcatttcagtaaaaaggttaaagcttttgtagctgaaatacattctattactagactccctgctttctgaattgttcttagttttctgaggactgagcgcaataatcaactaatataactgtcttcttaggagtttatgatattttaactttttgataattcggcattatgaaaattatgacatcacaaccaagcagattatctcatacctgtgtttatgattttatggtctttattgattgcttctccaaacatggttgtttaaaccataggcaattctaactaatcttgttcctttcaaggttgagtatcttcccatatcttca

SEQ ID NO: 47019 - DNA, 580 bp, Manihot esculenta
  Intron number 4 from transcript cassava4.1_003745m (locus cassava4.1_003745m.g) derived from phytozome v7.0 (chr-ID scaffold00026; pos 36661 to 37240 reverse strand)
atagttcatttggagcatcacaccacataaagctggtaagattctgccttttcctttttccaattaaaaaaaataaaaataaagaaattattgttttctaaatgaagttcagagaactagcaccagaaacatctcattatcttaagtattgtttttatatctctttctttcacatgttatatgaagactttgagctccaagccaaccagacattacagtatgatgacatgttttgcttcttactatcattattatattccaaatcctttttccctaaattattaatccattagtttgcttagggtgagtaggtaaagttgttaatgatgagcttagtttattagaatcaaatctcctctatggctctaaatagagtttaatggaaaaaaaatattctcgttagttcaatagaaaaaaggttcatgcaattaatcaacagaagtggagttaacttcacaaatccttgcggatgaaccaattcactcagtgaatattaagtcagaatgaacattctcctgggaaataatctttcaattaattccttgttttataacttttgagtatgatccgataataggat

SEQ ID NO: 47020 - DNA, 740 bp, Manihot esculenta
  Intron number 3 from transcript cassava4.1_003745m (locus cassava4.1_003745m.g) derived from phytozome v7.0 (chr-ID scaffold00026; pos 37250 to 37989 reverse strand)
ctgatagtgactcctagacacaagcgttcaaagaggtagcaattaaatcttttgttattttgtaattattgttcttctctgcatatttcagtttacttgtgaggtttaattgatggtttcatccaactggaaatttttctgtttttcggcttattgatgaacatggaaacttgggcattcacagctacacaaagcttgtgttttacgagcacaattgtataaagtctcagtctcctgattgtacactgtcactacttactaactagaaagagccatgaatgatctgtggtcctgaaattaagagcttgaagaaaacgggagaatggggtgttcttttatcaatcgccaagaacttgataatggggtttaagatgatgaatttctttgcgtttctttcaactctcccctagtttttgctctgatctaccattaatgaccaattgattgtgttgaaagtaactgacgattgttttactatgaggcttgggaaaataattgctaagtggacctctagcagacggtaactgtagatttatctgctcatcttttgctctctgatgaagaaaaattgttagcaaacatgtagattttgttcagattttacatgaagtgggcaagaaatttagttgcaggattcagttcttttcttctcgaatccttagccatttgatctaagattttgcttcttttttttttttttccttttggcagcttccctgataagaaaagatttgaggaag

SEQ ID NO: 47021 - DNA, 731 bp, Manihot esculenta
  Intron number 1 from transcript cassava4.1_014378m (locus cassava4.1_014378m.g) derived from phytozome v7.0 (chr-ID scaffold03252; pos 154080 to 154810 reverse strand)
cgctctcctccttatcgcttctcccctccttcaaggttcttcattcccaattttagatctagatctgtacttatgctcaactttaaatatttatatatgttttatgtggttgtgtttatggtctttgatctatagacatgagatctaaatcgatatataattatgtttcttgtgaggtttcggctttgaatttttctttcacaagtattagaacaaggtgacgcggtgtcgtttctctgggttttgggttgtcgggatttagctgatgcttttggttggtttttgaaggctaaatttaacttgatattctctacgtctgtgggaagggggcaagaaaagtgatttaatatatgtggttgtatttgttattttgtttcccttttcgaaagggtgattaatcacgatttttgctatgtgaagtaaaagtatttttctaattaaaagaattactataaacagattaaataccatttaagtaatgtgtactttctgggttctgaattatatgcttttgattgccaatttacattagataggactggagttgtgttgctttgatttttttttttaactccatgcctgtttgtcagtttaatctgtcattttctaatggaaactgccactagaaatgatttctccgggttttgagtatctgagaaaattcatctaaaacttgataattctttcctgttacagtgactaggtgtcaatcagattctgaagcagacgtc

SEQ ID NO: 47022 - DNA, 826 bp, Manihot esculenta
  Intron number 1 from transcript cassava4.1_030688m (locus cassava4.1_030688m.g) derived from phytozome v7.0 (chr-ID scaffold02196; pos 279924 to 280749)
cgtgcggttataaatatataaacacatataattattttaataatttatactctaataatataattttgtatatattatatatatgtaatctatttaagtagaacacacttaaatcaattaactaaatgagctaaataaaataataaaaaatatttaataattaaataatattataattatatatttaattttattaaaatcatatgatatataaaatatattattaaaattataatatcattatacattatttaaaaataaatatatatttctttgtttggattttgattcaatttttataaaaaaattaaaattaaaattaaaactaaataattaaataaatttaatttgatatggttgatttctaccatcagtttttttattttatttcaattcaattcaatttttcattcagattcggaacccagaaaccgtgcacaccccctgttatccgttggcaagattcttggggttttgctgtttctggaactggattttatcacatgatattatggaactagttatggcggcagaagcttttggagcatgttgacttgcgaaaactgattagatgaagaatagggaagctaaaatttggagtggaaattaatatactttaagggtgaaaagcattatattgttggtgttcagggagttggatttttaaatgaagaaggaactggtcagttaaagttgctgcatttggagtgaaaagtttctagtgttttcttgttcttgaggctgaactgtgcttaaaaatggatgaacactgaggatggtccaaggtaccgtccaaacccatgtggtgttaatcactagcaaggtt

SEQ ID NO: 47023 - DNA, 562 bp, Manihot esculenta
  Intron number 2 from transcript cassava4.1_011362m (locus cassava4.1_011362m.g) derived from phytozome v7.0 (chr-ID scaffold07660; pos 128990 to 129551 reverse strand)
ttttactactatactcagtaagccatctctcactgctatttaatagaatatgatgtgaaatttccatgacccgtttcatttgaacctttaaatccaactgtattcacgctatctaaggcaggaattgaaaattttttttcttcataatgtgtagaagtgggcatctatttctatatcaattatgaaatagctttgagctttttttttttaaaaaaaaaaaaattattggcagtagttgtttcttgctatttcaagtaatttgaatgtcatgttattgaactgaagtctgcaatccatcaatccagagttttcctcctggtgaaatgtgatgacataggtgggacgtggcttctgtgacttcattgaatacttgatgacattaactgaacttctttatccagaaccattatccccaaattaaggcatatatgctaatgccatttaaattgtagattgcccctctgattttgaaatgtttttcttaaattccaactcagcttatgtgatgatttttgggtgctgaacaggtggacttttacttctgttaccatttattttgggg

SEQ ID NO: 47024 - DNA, 259 bp, Manihot esculenta
  Intron number 1 from transcript cassava4.1_011362m (locus cassava4.1_011362m.g) derived from phytozome v7.0 (chr-ID scaffold07660; pos 129873 to 130131 reverse strand)
tcactaaacaagcattctttttcatcgtttcctctgtaagtacccattttctcattcatctttggccctaatccattgggttaattgggttgaatcttttgttccaaattacccaatttgtttttgattcttctatctggaatttgggtctttttttctctaattatttagcatttttttccaaaataagaatctatattgtatcgttgattaggaatcaagaaaacgctagaggtaacattgtcatttctttgtcagg

SEQ ID NO: 47025 - DNA, 729 bp, Manihot esculenta
  Intron number 1 from transcript cassava4.1_004872m (locus cassava4.1_004872m.g) derived from phytozome v7.0 (chr-ID scaffold02658; pos 487457 to 488185 reverse strand)
caagagaaggagagaagatatcaagaaggacagtttgtatttccttttaacacttctttgacttttttttttaaaaaaaaaattgtaattgcttataaattatcttcaggaaatttcccacccccccggtttcttttccgggtgttttgaaaaattgaaagcaaattgccaacataatcatctagggtcatttctttgaaggtcctttctgtgattgttggctgtggaagggtattttttttcccctctttttgcggttaacatacattttcaatatagtgtagcgtcttataagattaataaatgagattttctctcttagtgcattgcgagtgatgctatgataataagggatgggagagtagatgtatacagcaaggaattttgaaaaactgtctctccatacgtgtcttgtgcatgtcttacacaggcccttagtatctcctcccatgtgcggttgctgtgttgcgcatgctccaatttggtagaacttcaaatttttaataattttgcttatatatcttcagttctataattcttttttattatgttgtagttttttaattgatttcccggcatgcacacccttctctgactatacgatatcttagaattttcctgtcacgtggcttttcattctagtgtattatttttagcgtttctgatggtgtttaagtttcgcggttgctttcagctgtggaggtctctgtaggcgctgaggagcagatt

SEQ ID NO: 47026 - DNA, 962 bp, Manihot esculenta
  Intron number 1 from transcript cassava4.1_000414m (locus cassava4.1_000414m.g) derived from phytozome v7.0 (chr-ID scaffold06591; pos 192329 to 193290 reverse strand)
ttagctacaatcagctgcagaaggtactagattctttctctctgtctatatttatcttaggattaaatgggattactgtttctttttatccaatttgtattttttatcttggacatggaatctgttgagattaatagaaaattttattgcattacattacattgcagtataccaaattggatctttgctgccaaatttattcagtgatgttggttttattttttgtttggattttgatgtttgggttttctctagcatttctctgtatgtttggattatcagtgttgtttccaccagattcactcaaacaccttgtttatgtatttatatttgcagttaagtgatattagagattatgattctggggcagttacaatgtgtacacagtatcagcttttctgttttggatttagttactggatagtgtctaacgtttttttttttttttgggggggggggaggcggggcgggggaggggttggggttggggtgttaatagaatacacgttgaggcaatggctttccagtgctctgcctggttgaatagaagacaagcattagtttttttattattatgttcggtcattgtaatgataacctgatggaaatatagttgcaaaagtctgccaatgagaattattggtgttaatatgggtacctttttttcctttgggttccatcatcaaattaagtcatttctctctattatgcatgaattttggtccataagtatgcatttacaagttagagcaatttttccaggactgttaaatgcattgagttgtgataggtcaataacaaagttttatgcattggtggcatagttctggagtgagctttcaccacaagcccgacagaagctactgcagattgacaagcaaaccttgtttgagcaagctcgtaagaacatgtactgttctagatgcaatggactattacttgaaggtttcttgcagattgtt

SEQ ID NO: 47027 - DNA, 1018 bp, Manihot esculenta
  Intron number 1 from transcript cassava4.1_006222m (locus cassava4.1_006222m.g) derived from phytozome v7.0 (chr-ID scaffold00847; pos 2199603 to 2200620)
ctgagcttctctcggtacacctaccttctcatatctccttttaaaaaattaatattttgcttttctaattgagggttagggttctttcgttgatatgaagcttgtaatgggtctgggcaatacgattctgatttaggtaacttcccttttgttcggtttgcctgattattttggcatatattgatagggattcgctgaaaaaaaaaaaacatgagtatcaaacttcgtaattattagaaagttgagttcttcatcttttatttgatattttccttgtacttgattaaggagtggacttttctgtcgaaggcttaatttatgatattgttgcgagacagcaaccaatcaaaatttctttattgtttgataagcgacttatgagcaagctaacaaattgaaatctatagttgtcccttgtttttgacttgggagccaacagcgctatcatgcacaaaactgttgattgatttgttagagctttcctacctgacagcaatacttgtttctgaaacaagagtgaaaagtaaaataacgttcttcaatggctaatttcgacggttttcttcctagtgcttatacaacttgtttctgtttgaggaacgccttcttgtggttgagtagatagagtatgcaattttttctaagtatatatgagagtacagatttaccacacgtgcatgcaagcatcatggagatcagttacgtaagaagtgttaaccctcaccatgatgctccccgttatcttgtttcatcttggattcttacaaaatggagaaattagttatgagtggagcttctttgatgctttaaatcgatgctgggttaaaaagagaatgctacatgtagagaggaatgccctcccctcctccccacactctcttcctttcattttgactttccttgatgggtggagttggtgtattaattctttggctacatatgttttgtggtggtttccacatgttgaagttatcttatctctttcaggttcaagaggagcttgtccaggcaattaaag

SEQ ID NO: 47028 - DNA, 875 bp, Manihot esculenta
  Intron number 2 from transcript cassava4.1_002568m (locus cassava4.1_002568m.g) derived from phytozome v7.0 (chr-ID scaffold06683; pos 46551 to 47425)
gtgctacagtttcatagccaagtcgaggtaagctacaatgtacgcattttctcatgtcaattttcttcaatactgttgtccactgagcatttagccttatttgttacttgtttgtcatcctctgcaaatcttttacttgtattacctgatctaaacgggcagagattactgattgatcttgcaccgagtgaaagtaattgatactcgggcgtaatttttttgtttgtttatttttgggcggagggggagaatatgtaagaaggtggaaagcataatttaatgctggagagtatgattggcagagatgatgcttgggactgttatctactgtcaccactgtttataacttttttctaaaacaggcctcgaaggaaaggccttcttgtcagatacagacaaattaagtttaatgatgggaaatgcatgtgctctggaatttattgtttcaactttcaagatcaagtacgtacctcgggaatcttgtggtgcagttggctcttagtggatcattacttatttttggttgaggaatctatattttaattttctagttatatggtaaggcgcaccatcatacctcccccccccccccccaaatttttgtattctcttatatgtgaattgaaaactactatgatataaaacactgtacactttatttgggttcaaagctaacacaaaagatagaggaggaaaaatctcaggaggaaaagcaatggcgagtgtcggagagtaagggttttggtcgcatttgagtttatcatcatatgttgatcccttgcttgacaatattttatttgcaattctttgagatggctaatgattgtcttgtgattgtaggtgggagtgaggattaaggttgtgccaggtacatc

SEQ ID NO: 47029 - DNA, 395 bp, Manihot esculenta
  Intron number 2 from transcript cassava4.1_014117m (locus cassava4.1_014117m.g) derived from phytozome v7.0 (chr-ID scaffold03000; pos 98686 to 99080)
atcctgaggcttttgccaggaacagggctcttgaggttagtcttatatctacaaccttagttttctgacttccttatcttctttgttgaaccttgctgctacatgatttggctaccttgaaacatccaacttcgcaacacttctgtcttttttagtaaattcactactcattcaattaaaacgttttcatattttaggaaatcaaactatttatttcttttataaaaaaaataaaaattaatcaatttgattttacaaaatacagatgttttaatggaatgattttgaaacgcattttccaaaatctaggcagctgataataattcttccgaggacatgaatcctagaaaaaattgttcctttcaagtaattattgtgcgttttttaggtgattc

SEQ ID NO: 47030 - DNA, 1066 bp, Manihot esculenta
  Intron number 1 from transcript cassava4.1_012140m (locus cassava4.1_012140m.g) derived from phytozome v7.0 (chr-ID scaffold06701; pos 148034 to 149099 reverse strand)
caagagaggcaaagcagcgcaggaaaggaaaaagggtacaatactattcttttatctctccttcgttatttgtttgggcgtttttgttgtgagtgctctaatgagaatgaatgatttgatgagatgggtatatgtcagttttttatttgtttttcatctgtgcatgtattggtgtttacaaggtatttgatataggttctgatgaacataagagttgcatggtctacaacttgtttctttttcaatgatttggattcatgcatgtcatattgtattatcatatggttaatgattgatctaagaactctcttctctctaaatttatctgacgttttttaacaaaattgtcttggcgttgggtccacctgatttcagtctttatcaagtcttttatgttcattaactttgaggagaaggttttaatatttttattattattattttgggaaaactaattttacagatttttatagtttttttttcaaattattaaatgaatgaattaaaaaaatatctaaaaaatttttaaatgcttgtaaaacttgtatttctttaaaaaacatgaacaacttcaattatcccttgaagcagagattcgttccccttcttcttcttcttcttttttccgtttttttttccctccttattcacggttgtggcccagctatatcatgatgtcttgtatcccctaataattataccactctatctcatatcaattagaaatagagcacatgtagctaattggattgaagggagcaattatcaatcccaagagtagagatgctagtaatatgactggctttgttctctggcaaaatgggcacgtcccattaatttctgcactacacattcatggtaaatgatgttcaagtacaggttgaggttgtctggtgttgacaacaattaggtagataattccatcaataaaagatagagataaaacttctgaaagtatccatcatttcctctctaataatattaattaatgtgtctggtgacgtcttggactatgctttttctttactcagggaagccctggactgaggaggaacatcaatccttt

SEQ ID NO: 47031 - DNA, 870 bp, Manihot esculenta
  Intron number 2 from transcript cassava4.1_030905m (locus cassava4.1_030905m.g) derived from phytozome v7.0 (chr-ID scaffold10849; pos 34385 to 35254 reverse strand)
aaaagctgggaaataggtttggatttcttcatttactctcatatcatgattcttgattttgtgtgtttcagttttctaatttcttccttttcttctaatgcttttggccaaaaaaaaacccacataaatatattcttggaaagtcttgcagctaattaatcttacgtattatatatgcaatggtcagatgggaaaaaaattatgctaagatctttcgcttcagaaacaaaagaatcttaaaaattgtttttttctaaatgaacatgcaatttctttttaggctttgagactaatctgagttatatctcaattatatgaagaaattgtctaaaattgcaccatgagcacttggagatcatctaaattgagtgaactagggtttccttttgaaattacgtagtggcaggataaattttactattaacttcgaataacatcaaatcatcctccataggagtatatggcattcaaatttaggtctttcatatgattaacatacttataatcattggatcaagccaagttattattcccaagaaaacttgagctgttttcatgggatgggatgagtgaaccatctgacattactagagagaacacaggaaccttgactattatcctcagatgatggaacatttgaggcagctttggccttttagtttaattacctttcttattaatacaaggttaccttttcctttttgagcagtgtattactaaaagaaaaaaaaaaaagatacatatgtgaattcttaatcataaattttattttgatttcattcgagaaatcaccaatattagcgatttgtagttacataattgccaagtatatgatttaatggttccttttcttctttttccttattttag

SEQ ID NO: 47032 - DNA, 543 bp, Manihot esculenta
  Intron number 1 from transcript cassava4.1_006709m (locus cassava4.1_006709m.g) derived from phytozome v7.0 (chr-ID scaffold06877; pos 10546 to 11088)
actagttggttgtacactggtggagttaatatcaagttcagtaacattttcttttctttttctcaaatatcaaagtacccgttatttttgagactgctctattaatttataaccttgtgctttctttttctccaaatcttgtgcttgctcttatgattgaattaggattctggtttcttgtcctcctccgtagtttctgatcattttccatgatttttgttattccagatcttttttacattaatgtcatcattatgtccttctcctgacttttttttttcaattcacttcatgacagaatttcttcataagcacatgatcaaaatctgactgataattggcttcagtcaaataattatttttgagctgttctcagctaagtatgctttacttggaatgttatgttagcaagcgtagccatgtctgttccttattgatattttaacggctacagtagtgatttagtagcttaattcttgaatagcagcagattaaagcttgcttatgacagttttggtgttcttggtaattcatcttgcaggt

SEQ ID NO: 47033 - DNA, 883 bp, Manihot esculenta
  Intron number 1 from transcript cassava4.1_002788m (locus cassava4.1_002788m.g) derived from phytozome v7.0 (chr-ID scaffold02598; pos 4239 to 5121)
ccatatcaaaggtgataaaatggaaataatggttagtttgattacattaatttttgtcaatagtgagctttttttatataattgtaattgtatgtgcttgaaaatagttctgtttctgaaaaaaaaaaaagtataaattactttatttttttattggggaaagtaatattatatgcaggagatggatgttaaaaataattgaatcattatgatatggaaagtgatctaataatatgagtgtgatatggaagacttacctgtccaatttatagttgataagtcacttaaatttgtcatggatcctactaaaagatgccgtaagtgtaaaatcacgaatagttgatttttcttttgttggatgcatatacatttatctgtaggtaagaatttctcctgtgtgatctgattgaaaattttcttcagagactgaggttttgttttcaaaaaattcttctttacggcaaaggcattacactaactcaatctgtaaatgccaagcattgctaaataattaaggtatatgatactcaatcattggcttagattaacatattcaaacacggatccattaatttgctataatgctagtagcataggaaattattatttgtttattttctttaacaacccgtttgattaggatatcttaagagctatatttgtgttaatgtatgcaactggttgtttttagacccgtctgagttactaagtggcatgtgctagaaattgatatagatatcttttattctagtaaatctgaaattagatcaacttgtgtagaatagaagtgattttctgcagtaagtgtgaggtggagaggatgtttagttactatcttctctgaaagtacttgctgcttatgcttaggtcggcgatttttctg

SEQ ID NO: 47034 - DNA, 582 bp, Manihot esculenta
  Intron number 2 from transcript cassava4.1_004213m (locus cassava4.1_004213m.g) derived from phytozome v7.0 (chr-ID scaffold05709; pos 18993 to 19574)
agagtttggcctttgcttccatctgttctcttttggtacttttctttaatttcatccttttatcactttttctttagtcattttgttgaatcccacctcagtttgggacaaggtaatgtatccttacttacaagggtcttatgcacttctcgctcttgagttagttttttagtgagttaaacatgacccaaatttaatatggtatcaaagtctctccacccatatttgacctctcgtaaatatgtcaccctctaatatagttatgagcgtgagcgattatcttaaaccactagattggaagagtgatagactcgaacttggatcaaacgagatatatgcgaaatcgctagattaaactatgctaaatttaaaaagatagtatttgtcgtttcaattattttagtttaaagatttgattttcgatattcttttgaatatctcaaacaaacaagttgattaaataccaatacatggattcaaacttataaatccaatcatagtattagaaattttatttttctattagatgggaaaatatgcctaattgagaatttcttcaacctttttttcattttcaagggg

SEQ ID NO: 47035 - DNA, 679 bp, Manihot esculenta
  Intron number 1 from transcript cassava4.1_023115m (locus cassava4.1_023115m.g) derived from phytozome v7.0 (chr-ID scaffold10689; pos 139155 to 139833)
acgataaaggaagtgaaaaggccattacttctgttgtttctttcccaaattcgtgtaaggcaagctccactttctttgtttcttcttgttccctttttctttgtactggtttttgcagtttataattatcttgaattctcttcccctctattttatataggaaaaattactattttattttattttatagagaaattcattaattgatggtttgattttttaagattttaaaaatcctactaattagctttctattagttttatcccattaagtgttttattatttaatccttctattatgagaaaatttattagttggtctttcaattttataaaaatatatattaattaattcattcgtattaaagatatttcagactttttttaacagttaaaattaataaaagaattaataattagatttttaaaaatttcatgtattttaattaataaatttctcaattctacaagaattaaataattatgttcctttttatatatattttcgataaaaaagtattttatatatagttttcaataatatgcatttattaatttttatttattatcacaaaattttttactataaatttttaagagttattttcacaattaggtacatatgtttatattttctgaggaaattggtgtttgattattcagcctcaaccattagcaa

SEQ ID NO: 47036 - DNA, 689 bp, Manihot esculenta
  Intron number 1 from transcript cassava4.1_008633m (locus cassava4.1_008633m.g) derived from phytozome v7.0 (chr-ID scaffold07318; pos 248842 to 249530)
tctccttcaatctcactctcatcgccgatcatcaggtttcttttccctctctctcttctccgtttatgttcgattcaccgctcgcttttgaattgaatctttttagtttcttttatgattcgtgtagtttatatgctttgtaattatgatttttaagattttcttttcctctttccttagctaacctctttgttactttgggaggtaattgatgcgaggttttgaatttttgttatcaggtagtatgatggatgtggccttctcagttaattttagtttaatttagcattaggtgcaatgcgttcttggattttcgtcgaatttatcttgggaaaaaattgtttcgaagttaagcctctaggggaaagactgggtctttgttctactatgtctatatttgctttttcaattgtgctccactattattctggtatttgattagcaaaattgttctgtttgtgggtagtggcgtagttgtcgttgaaatgggtgtgagtatatgctgtaaattttgcgtttccttcttcttatagaattgagaaattcatctaaattgaattgctaaactggggcatgtgtacacacaaaaattcaccttttttttttcttctttttgaaagctataacggttttctttccttccccccccccccccaacgtatgactaaagtgccactgttattgcagtc

SEQ ID NO: 47037 - DNA, 174 bp, Manihot esculenta
  Intron number 1 from transcript cassava4.1_023526m (locus cassava4.1_023526m.g) derived from phytozome v7.0 (chr-ID scaffold10689; pos 131159 to 131332 reverse strand)
ccacgccttcccgggattcaaaaccttcttctcttgctggtatttttctgttatcttctttgatttggagttcgatttctaggtggttctcaattgggatttctgattttagtttcattatttgtttgttttgttactaatttggccacattattaagctattaggttttggta

SEQ ID NO: 47038 - DNA, 894 bp, Manihot esculenta
  Intron number 1 from transcript cassava4.1_027635m (locus cassava4.1_027635m.g) derived from phytozome v7.0 (chr-ID scaffold07478; pos 350756 to 351649 reverse strand)
ctgctgttgctaccgttgcaactgccattccaactgtaagttaatatatatatatatatcctttctccttttttttttttaaaagtatatcctttctccttttttttttttcacttttaaaaatagataaaaatccaaatcagctcctaaattttttttctcaaagtccaaataagcctaattcaatattttggtctaaataaaaccttgaacattacatttaagtctaaataaatcttgacataataaaatattatttcttataattttaaatatttaaaattatttattattcaattcttgtattcttatctaacaacagaaaataatttattatatttaaaatttcaaagtaatattttaataggttagatacattaggacttaaatgcaaaatttagggttttatttgacttaattaaaggtagagttgggcttatttaaattttgatgagaagttcagggggctgatttagattttttgccatataaaatttgttttgtttcagaagttatacgttgtttttagaagattaaggaatagtaattattattatttttttcaatttttttaaaaaaaattttgaaggcataaataagtgggttccagtgaaagtaatcttgacataataaatataatatttattttaataatttttttataagttttagtttttcttaattattccacatttataatgataatattaataaagagagaactattgaaattataataaatagatgaaataaaacgtaaatttaataaaattaaatagtattttgttaatataaattaaataatttaactgtttttttaattatagcaaaaatctttaattagttaattattgtggcaaaattttggttaatgtgtagctggcaagtgtgagg

SEQ ID NO: 47039 - DNA, 710 bp, Manihot esculenta
  Intron number 3 from transcript cassava4.1_013936m (locus cassava4.1_013936m.g) derived from phytozome v7.0 (chr-ID scaffold09354; pos 9637 to 10346 reverse strand)
cctttgctctacaattacatccagagtcattactggtgcgttcagcttgaaccatgagttatagtttcttgtccctttgttttcctattgttttatagcaatatagccttgttgacattgagtttcaaagcctgaaagacattagaagaagtatcattttaaatgatattagaaaaacaatttggagaaatttgttttgttattttgatgttcttataactaaaacatgtcaaagttaattttaaatcagcttttcacattttccaactagtatatttagaaaggtgcttctttcaatagcttcaataacaatgccaaacggacccatagtgtctctgcactctgcagtatgctaaaatccagtctgagatatcattttaccttttgacaactggatggtctaaaattttctttccttatgaatctttttttttattgtatttgttctcatcaggaatttgttaatctgtagcttatgattagcatgcttcacttatcttctcatatgaagtgattttatccattatattcttgacttcccatggtttttgtatgatttgggattttgtccgttatttcataattcatgcgtggtttgactttcgttcaccagcttcataaatatgtttgaattccgaatttaatttctaacatttgtgggtcttttgatcctaggaaagtaggtttcttgaggtattttcagttgaagc

SEQ ID NO: 47040 - DNA, 287 bp, Manihot esculenta
  Intron number 1 from transcript cassava4.1_002831m (locus cassava4.1_002831m.g) derived from phytozome v7.0 (chr-ID scaffold00847; pos 1861868 to 1862154 reverse strand)
cggtttgtttttcttctttatctcctttttgctttcccaatatttgaattgattaatgtttttttttatgtcttctatcatgttcatctcacatattatcttgtaattttggtcttatttgtcatgatattggctcagtaatttcaaagactaatgttgcattaatgttgtcatctcacttttttgttcttaattttacagaattgatatgctagattcttgttgcaattggtctatgttgatgtttttgcttttcttttctcttactatcctctctttttagaaag

SEQ ID NO: 47041 - DNA, 777 bp, Manihot esculenta
  Intron number 1 from transcript cassava4.1_012523m (locus cassava4.1_012523m.g) derived from phytozome v7.0 (chr-ID scaffold12564; pos 69204 to 69980)
ggcgactacgttggtaagtctcttactattttctattattttgagttggagtgagcttcaatgtctccggaatttatttatttatttatttaaagaacaaaagagtgagcaagcttattgaagagagtatagatttcaaacgtttaggatttgtcaagttatatgctttcaagcttcgtatccagtctttgctattgggtattaacgcccataccgtagaaggtttaggtaaatttctgaaacatgattgactggggatgttagattatggttgcccattgttatggcagttgatgtgagttgtttaattcaacaaatgagaatatgattaaggtggcgtagctaacttagaagtataccttcattctactggaaagttgttaattcgattcaggattagtgtaagcactgtgcatatatgtattgaagtattgtaccgcattttatgataaataaaactaaggattacattaaccttaaaaggggtcatcgcccaagtactccaggagtaaacttgtaatgttctttgcccatgtacgcctcagaagtcttcaagttcctttctcttctgactactttattttctaatatgagcatgcacagttagaatatttgtatattccttttagccattgaagctaaacttgtctgcctctgtaatcatgtcttttcacattttgcatgagaaaaattgtcactgtatttacccctttttttggtttcttcttttgccattctgcagatcgaggatattattcggtggaaactgtgactctt

SEQ ID NO: 47042 - DNA, 584 bp, Manihot esculenta
  Intron number 3 from transcript cassava4.1_030777m (locus cassava4.1_030777m.g) derived from phytozome v7.0 (chr-ID scaffold07520; pos 2653022 to 2653605)
ctcgaggttttgctgtcaagttttacaccagagaggtaacacactaacaggaatccctttttgttcgacggattcgttatttctttctttctcctttttctttaacagttcttttttgggaaaatttttctttagaggaggagcaattgctttcagatcccttttcattttgaaaaagcaaaaggaacacacacacacacacaaaaaagaacttgctttcttttccttttctccatctttctcattgataaactttctcagaagattaatatttcaattcatcagggaaattctatcaacattcctactaggtgtttgtgtattttactggttaacgatttcacctttctctctgatgttgcctctgtatgttccttgattgaattcggcactagttttcttctctttgagtgaattttcacaaagctttgagcttcatgtttctttatcttccttctattctcacctgtttctttgttccggtgcaagcggatattaattgtttcattggaagttattcactaaacaatgtattaattctggtttcagggtaactttgacctggtggcaacaatttccctgta

SEQ ID NO: 47043 - DNA, 779 bp, Manihot esculenta
  Intron number 1 from transcript cassava4.1_000646m (locus cassava4.1_000646m.g) derived from phytozome v7.0 (chr-ID scaffold01945; pos 655566 to 656344)
attcaatcatcttcttctaaggtgtgcatacccacatgctctgtttctctttcgcttccttagctttttccaacttggaaaccactccgttctgtatgataatcttcttcttcttcttcttcttcttattattattattattattactactatttatgatatcaatggcggaagttaaactactaaaattaggggctgtaaggtgcactgaagatgaggtttgtcgaaactagttcagttttaagcttcttgttagctttccattgtatttgagccgtagctggcttatgattattggtttttctctgtcacaccacgtgcttgataaaatgtcacagggagttgagagagagagttctgggatgtagatattatgttctacatttccatctatcatcactatctcttccttttgcttatgagttgcccaattacttcctgtttcttttttaccttttgaagaagtatgagttttccccatagagattaaacttattaattaagaatattccttgtatatgcgatgagtagtgagttctttagggaggttttagtggttggtgtgctgttaaactgagaactggtttaggtatagcttgaaggcaattgtttaagcatgacctactatatttaaaatctccagcattgatattgtggatgctttatcgttaagtttgatcactgtaaattatgcgaagttttttttttttttaaatctcatgctaatggcatgtttgcagttcttactgataaattttgttgttttatgttctcaggtt

SEQ ID NO: 47044 - DNA, 415 bp, Manihot esculenta; identical to SEQ ID NO: 46215
  Intron number 1 from transcript cassava4.1_011312m (locus cassava4.1_011319m.g) derived from phytozome v7.0 (chr-ID scaffold00832; pos 44261 to 44675 reverse strand)

SEQ ID NO: 47045 - DNA, 539 bp, Manihot esculenta
  Intron number 1 from transcript cassava4.1_019080m (locus cassava4.1_019080m.g) derived from phytozome v7.0 (chr-ID scaffold00847; pos 1312883 to 1313421)
aaaaacccctctttttctacgttaatctagccaaggtaccctagttttcctctttctcttactctgcttttcttttagttctgtgatttgttttgtcttctgcgaattagatgtgtgtgtttgtggacgtaatatgcaagttaattgttgttttagggttttctttctttctttgctttcttcctcagcccgcctataccgtagaatctatgaatcaaaattggtggatttttatctttaattatcagttcattgacttagttaggtattttctaattttatacggttttctctctctatttatcagatcagttaagagaaatatttagtaagtagaagttttttatttcatggctcaatcaatgtttttgtcgtttttgggtctttatcggtacaggtttgtactcccattttccagctaatggaaagggaaaatggaatggatttttcagttataaagtcattgtaataagtgtatactcacatttgttttgttaaatagccattgagggtttcatggttctcttttgcagagatac

SEQ ID NO: 47046 - DNA, 936 bp, Manihot esculenta
  Intron number 1 from transcript cassava4.1_014976m (locus cassava4.1_014976m.g) derived from phytozome v7.0 (chr-ID scaffold07087; pos 336526 to 337461)
acttttccagcttcatccggcaactcaatacctatgtaagtctatagagaaaaaaataattattgctggtggtacaaaataataaagacctgctcgtatattaacctttgaccaattcaaataacaaagctttcacgcagtctagtgtatgtgatatttttttttatatatattttaaatattatagaggtgttgtttggaaaaattattgtatacaatgagtaaataattcattataataattgattatgataattttatcatatgaataattaaaacataattttattaataaatattaattacaataataaaatttaagtaaaaaatttaaattgaattaaataatatcgctgttacgattataaataataattttcgcttcgagcatataagttcgaacttttagtttttaggttatcattgattgttgaatgatagaataggttgaatggtactatctaaaccaacccatttgcttttatagttacttggtcttcaatgatgcatcaactaattaaatggttcagtctaaacccttttgctttgatagaataggtcattgttcttggttgatagaataggttattgatgcatcaacgaattaattaattaatttctcaatttttaaatctttttgtgatacatgttagcttaactcagaagcttcaaagttttttacatctcaataattcaacagtcaagtttctttgctttccttttattttttcaaattaaaaaattgataaaaataaaagttgctttgaatttattgatggtaggtcttggcctttgaatatttaacattccatgtatggtaaacttcctaaaattcaaaatgatagacaatttctcaatctttatcatttaacctataatgcatgtgtattacattgtgatgtgggtatagggttttcgtaaagtagcaactagccg

SEQ ID NO: 47047 - DNA, 675 bp, Manihot esculenta
  Intron number 1 from transcript cassava4.1_024062m (locus cassava4.1_024062m.g) derived from phytozome v7.0 (chr-ID scaffold04269; pos 83740 to 84414)
caagtgcaccagcaggtgcactgcaaaatgcgtgcacagggcaagtgcaccagcaattggactcctaaaattcttttttgtttagcaaaaaagaaaacaaatgatgaattttcaagatgaactcatgagaaaaccaacaaatgagccaaacctgaggccaatttctgcttcaacaaactcaaacttagctcatttatgaatcaaattttaaatttacactctaacttgttaaatgacctcaaaagatattcacatgtaactcatttaatccatatctcctcactatatttataaattaaactaaaaatatatacaaaatatatgatggcccaaattagatgtctaaaatacccgaaaaaaatgacatcaatataaatttcagtacctgtcaagtgcatcagcatgtgcagaggataaattaaaaaaatataaaacatgaatcaggtaaaatatttcacaaaaatcaaggggtacagaagataatttcataaatttcacaaaaattaataattttaaaaatataaaacatttcacaaataattttacaagactgaaatacatataagaaaatagatacctgtggacagtgtccgtcgataatggcaagatcggagagagaggctaactcgtggaccgtgatgccgaggaacagatcgtcgatagagtcggtggacg

SEQ ID NO: 47048 - DNA, 863 bp, Manihot esculenta
  Intron number 1 from transcript cassava4.1_017604m (locus cassava4.1_017601m.g) derived from phytozome v7.0 (chr-ID scaffold09086; pos 209077 to 209939)
ctgtttctctcatagaggaatcgccgtttctctctgtaaggcagcttcagttttctggatctgattttgtttctttgtcctttagttcgtctcttttgtttggtttcttgcaaaattgaggtaagtagactcggatgaattttcctggttgttgctctgtttttctattatcttcgtttcttttttgcttttgtggggttatggattacgctctgtggtgattttgaattagagagtaccgcaacttcgttttctcggtgctgctaagaaatttcaaggtcataattttagtttatctatatttttaaccagataatgaatttggtttcagatgtggactgaagctgaatgataccaatttcttatctgtgtatatcagtgtaaaatcgagatttttttggtttaacattttttttaatagttcagcgcccttgatgatcaattttcttagctttttggagtttggcctacctaccttaggttagaatctagttttctattaattctgttagtttcgtggaatttgtaaaacttttttttgaagtttgaagattttaaactttgttgttcttgttgcagaagtatcagttattctatttattgtcgtttttaggagttttttcccttttcttttttcgtgtatgtatatatgtgtatgtgtgcgtgtgcgtgtacataggtataaaacgatatggtgcattgacttgtgtgattcgggtaatgtcttggctccttaatcagcaaacttccctttcatcgaaatttagctctgtttttaattgatacttgaaccataactatgtactgaattttcctcaatttgatctatgagcctttgttgatacagatatactctagcaaca

SEQ ID NO: 47049 - DNA, 430 bp, Manihot esculenta
  Intron number 1 from transcript cassava4.1_028258m (locus cassava4.1_028258m.g) derived from phytozome v7.0 (chr-ID scaffold04043; pos 1580629 to 1581058)
tgtttttgcttccagccctgataatcttcctctaagtatgttgtttttctcatctttcttctttctaatttaatcgttttcgttacgttatcagcaataatcaatggcaatagcattcatgtttcttaaatctgaattctgtttgtttaatggcgacttttgagtttccttaaacaatgtacagcgttaagctattctacttgagtaatcagtttgttttgctttgttgatagatttatgattctttctttctcattaatgcttatccatggaattacaatcacgctgaaattacaatatcctgattcgatatcaaatcaatttgaaatgttagtttatggtttttatcctttctgtgtgcttgggatcaatttaaatccaatttacttcaaaaatcaaattcattctggaaatgtaaaactttgtgcag

SEQ ID NO: 47050 - DNA, 995 bp, Manihot esculenta
  Intron number 4 from transcript cassava4.1_026815m (locus cassava4.1_026815m.g) derived from phytozome v7.0 (chr-ID scaffold11833; pos 7359 to 8353)
cttacttttgggttgtcaccaaggattttagggtaatatcaagcaacttaaacattgtttcctcattttcatctctcttaattcagatctatcatcaaaaaaaaaaaaaaaaacatacaagaaagttactatagggcaccattgttcagttataattaaataattaatttgaattgataaaataattattttttcaattatcaattaagttagttttgatttgataattgaaataattaaaataattgatttttattaatgagtatattaagtattgatgtggctgaaatagagttgttccgtggttgatcaattatgtaaaaaaaaaaaatgtgaggtgattataatctatggtaactactataatgttcaaatcagtaaacggaagaatatgttaacggcaaccactccaatactagagtcagtatattaagaatatgacaagtatatagaattatttaaaatttaagagtaattgtaaaagataaatggtatctttatttctatcatccttaatttttataccgcaagaaaactaaatcaattattttattttttaaaaatttagttagtatcgactaattgataagagattatgttacaagggataacaggaatctgctggattgttagcagtccactaactttatataaaaatttgacctattagaagataacaagttttagtgaagatccgaatgctaatgtgtccgaatttttttttcacagtcgaaactgtgcattaatttatcagtatttttgttatgtggttctatactataataataacttataatttattttaattgattgttgtattatatcaacgtgagtaccataaaatatcgtgtcatagatgtacaatggaatagaattggagaaaaattttccagtcatcatatcaatagcccaattaataatcaaatgtccaacatatgactcaaattctatgctttgcaggaagctagcgagagttgctaccaaactatacggaa

SEQ ID NO: 47051 - DNA, 801 bp, Manihot esculenta
  Intron number 1 from transcript cassava4.1_008211m (locus cassava4.1_008211m.g) derived from phytozome v7.0 (chr-ID scaffold00847; pos 2149690 to 2150490 reverse strand)
ggggtaccgcaggcggccatatttcattttagctggtaaaattatgcattttatatagctcatcattgcctgtatatttctgctaaattgctcatccctttctcactttagtatcctattgatcttatttttcggtgctacagatggacttcttttatttagctggtaattgatggactatagattgtccttacctgaatatgttctactagatttctactccaccttaagtttggtaattaagtgataaaatctcatttatatgttaacacatgccttgcaacccagaaacttagctcagtttctgctgaacagaattctgtggggtgtgtgtttgagtttcaaaaagtaaaacattatatttaacaatagaatccagcttttgatttgcatgagatagacatgttgatttctgtgaatggtattgagctgctagaatttatcatattccatgtcgaactcatgaggttcgtgcgaaacaaatttgagatgaaattgacgattggcttttttcactacatacttggagcatcctggcaccaatggattggaataattttagctgcatattttgaggctatgcttccagacatctagagaggaaactctatatggtgccgcctctggaaaacccttccctcttgagatgttcttgatttaacttatttgctactgtgcataaaaagaaattgttatgttttcatctactacaaaacaacattaatgctaatatttctctttggataattggaaaacgtttcttctccaatgtctatttcaggattgctcggcgtggtctcc

SEQ ID NO: 47052 - DNA, 571 bp, Manihot esculenta
  Intron number 2 from transcript cassava4.1_006489m (locus cassava4.1_006489m.g) derived from phytozome v7.0 (chr-ID scaffold03651; pos 422084 to 422654)
gttcctcaactaggtctcaccggtggatctctaccaggtgaaatccataagcccttttcattttcatattaatataattagctgaacttttgcctggaaattagcatcaggagttgaaattatgttgtcttctaattgtttgatataagtcaataatgcatgataacgcgtgaatgacaaatgcacaattgggaaattaattgcttagtcaagatggactcgtaaatacaacacttctccaggcatagctaggtctaaagagatgagtggggaatgttgggtgagatctgtaattgttattttaaggatttagcatttccagggcaattgttatgaataaggatacaaatcatgtatttttcagctatcaattttgtggctcaaagtcatggatcaataatttggtctccaaaatattgttgtgtgcacttgtgtctcaattctacaaggacgggaacaaacacgatgaacgcaaactatagaagaagtccagaaagttggaaaatgattagtaatgctctctattggtgctgtttcttcagggtgtcctgtgtacacaccgccaactgtt

SEQ ID NO: 47053 - DNA, 659 bp, Manihot esculenta
  Intron number 1 from transcript cassava4.1_018556m (locus cassava4.1_018556m.g) derived from phytozome v7.0 (chr-ID scaffold10899; pos 124307 to 124965)
gcccacttagtgacaagggcctgccattgagacctgtaagtttattcttcctcataggctgcttcttatgaagggtaataggcttaggaaataattttaaaactttttgtttatggaacaaaatggaattacagcctatcaagaagtagttgattttccaaaatgagtaagatcttttcttgttcattttcaactcatttattggatgtggcggtaatggcagaagtaacgtctgctccaatacaagctcatttatatctttctttcctttttttttttcgaaaaaaaaaactactttggggcttcacttcatagttggagaacgttggtttagtcagataggtagttaagtttctctttagccatattttagtagaaattgaacttatttaaatagatagaagtgatttgctagtatctgccaagcaaataaaccttactgagcctcctggaaataatgattcatttgctgctggacatctttcagttaatacaacaaatgcatgctgatgcagttgacttgaagtcctcattagtagttttagccatgaaaactgaactggatttaaacttgatgtgtctcttccatgactaatttttcttttattctttctaatcaaatctccagggtcagcacatctgttcgtactacagccgtt

SEQ ID NO: 47054 - DNA, 1035 bp, Manihot esculenta
  Intron number 3 from transcript cassava4.1_021380m (locus cassava4.1_021380m.g) derived from phytozome v7.0 (chr-ID scaffold11106; pos 314427 to 315461)
tacgtcagttaaacaagcaggagaatcgggggagagtcagacaattcctcatatgccggtgaatggcatcaaccaagggaaggacttgccgaaaaatcgagaaattaattcagcggtggtagaaaactatggagattagatgttagtcggaaaggaaagaaagaggaatttctagggaaatcaacaagggaaagcacagggaaatcaggggaaatctgttgcctgtgtttctagggattcgaatgagaaggaacgtgacggttatgaaaatagattcctaagtgttagatgatatggatattgctgagtcaactaaaggggtgacttatgagacaaggaataatggaaattatggaaataagggtacaaattatgggaagaaagtcaaatttgttggaggtttgacttctaatgggcctgtagggaaaactgggtctaaagaagttagcgctcaaaatgtgacaaaagataccaatcttgggctagatactaacaagagaaatttaaaaggggctatatggaggaaggcagctggagagagtgaaggctatggggagccattttttagataaggagaatcgtatgtttgtttcaggagaggcattgtaggtgggtcttactaagttgtacaagattgcggaagatagggagcagttgcaattgccatcgccatccaaagccaagcctacagttccaaatattggtgaaataaatgcttctgttgatgttgctcaggaaactccgccggatggtgaggatgttaatttaaaagatgctgaagctgttgtcaattcgattgaagagtatagcaaagccgttaatgctatggctgagaggagtcgggatatacccatgcttaatgggttatctaactgagtttgccgtcgttttgatacaaggtactctggtgggagtggtgcttgtttcgattttctttctcttctgctttttaatgatagttataacttggaattgtcagggagctatgtctcctaattttcttagagcctttgttgaatacaagaagttgtataa

SEQ ID NO: 47055 - DNA, 925 bp, Manihot esculenta
  Intron number 2 from transcript cassava4.1_018921m (locus cassava4.1_018930m.g) derived from phytozome v7.0 (chr-ID scaffold08828; pos 27525 to 28449)
tttatttattctttctgcatcgagtgatattttaagttagtttcctcatagcgcagcaaatttgatttttattcttcagcagtacagggctttttattgacattgcttgtatttgaacttttatatctgattttgttaatctcaaacttgagcttgagctcaagtttcagcttgagctcaagtttcagcttcacaactttgagctcgatcttaagctttgagatgagcttattattgagccaaacgagcataataatgggctgagcttgagctcttttcgtaaacatgttaaactaccttaaaccggaccgagctcaagctaggctcttttatgtgataaatgagatcgatagtagccaaactgaaatcaagctcaagctcaacaaagtttaaatgaattgagctcgagattgagcctgaaaatttttttccaagtcgggcttgaacttccaaaagctcggctcggtccaattacacctaaggtatttggctcctgttgatctatgtgtcttttgttatattactactactaatattatcgggttttttcacatttgattgacatggagttacattgggattttgttttacagattttagttcatgtaaatggtggtaccaataccatgggccttatactggtggtgtttctttcagtgttaggttcttaatatgattaaaaaattaaacattttatgtcaagattgtcaagcttcaactgaatgaataccagcacatgtaaacttttgtgcttaatgctgcaagctcaatttgtcacgattgatgcttgttggtcactgattcaatttctgcgaagcatgaatattttgcttttgcaaatcaatgaatttgcagctttgtttgatgggttttgtttaaaaattctgtaggactgtgtctcatacccatatccaggaactataaa

SEQ ID NO: 47056 - DNA, 468 bp, Manihot esculenta
  Intron number 2 from transcript cassava4.1_015937m (locus cassava4.1_015937m.g) derived from phytozome v7.0 (chr-ID scaffold02973; pos 106698 to 107165)
aggtatttgaaagatctcagctcttgtcattgttcatggttttatattctgtttatacattgcgttttattgaaacatgatcactcttcagccttgaaggaatgatttactcagtttaatgggatttatggtgttcgtttttttccattttatttgaagctttagtattgatttttctacatttatatccaaatggaagtgggttgtttctatctacgccaattacagactattaattattttatatgcgacacaatttaatgtttgggtgtagaatgatttgtgctatatgatgtgatctgtagcaaatttgatttcatgcattctttgtcttgtacttggaagtttttctatggcgtgtgtttgatattgacatcgtgcttgattcattttatattttatgctcaatgttggaatttttcctctactgcagtaagcttcagagtgaggcattgagagaggccatct

SEQ ID NO: 47057 - DNA, 700 bp, Manihot esculenta
  Intron number 1 from transcript cassava4.1_030881m (locus cassava4.1_030881m.g) derived from phytozome v7.0 (chr-ID scaffold12498; pos 189696 to 190395 reverse strand)
agcaaggtgtgttaattttttacatctaaatgaataaataaaaactgtgctaactgtataaatgctgattcctctcttctctctatctctctctgtctatctccctctcgtgttgaatttttgtactttttatgtgaagttgctacatcacttttatttgttagtaaacctatttcattttagaattcataaattctgggacctgagtttgatatattcacataaaatgtttttatctcttcatatatggagtttgaatcttaatcttttatattcaaagcatgtatattgcatggttttaggtatatgtctctctgtgtccacaatataattccaggattattttgttatcctacaatgtctcttggtctaggatataatttcaccaaatgcttgggaatatgaaaattttcctccttttttgctctaatcattagatttgcttcttgtggaaatgatcaattttagttatgggattcatgtgatgattcattgtctagagcagtttattgttttgatggagctgcatttagctttgcagtgtgaaaatggcatgatcagtagaaccaaattgtcacttacagttatgagcatcatatggtattctgtatgtcttctcaatttgttgttcagtttgtttaatgtcagatatcagaaaagacattcacagctcctatcaaattgacaggtactttgacca

SEQ ID NO: 47058 - DNA, 549 bp, Manihot esculenta
  Intron number 1 from transcript cassava4.1_011026m (locus cassava4.1_011026m.g) derived from phytozome v7.0 (chr-ID scaffold03741; pos 455293 to 455841)
tcagccacatcaacactaaatctgaggtttgtatctattgttatttctttttacttttccctcttcttttttttttttcattttttaaatttatttcggttctcttctgtaggattttgtggacctttactttacttattattattatgcttcatttggctcccttaggtttttcttttttattattagtttggttattgttgtggttcactaattgctaatattgcttcatttgtagagttatcaacattatgcaggtccttttagagcttaatttagcaattatgtcgctctcttgcagatgtttgattatcattgttctaatgtttgttcactgcttgctaaagttggttcatttttgtagttttaaactttgtttatttttatagctttgcatatcaatcttgctgattcacctaccttgctcttctctctggtggtttggtttatttttatggaacactttaaattagtttacttgcgtttctgtccctctttaagttctaatggctttttttggttgcctgtttgctgtaggttaaggggtac

SEQ ID NO: 47059 - DNA, 550 bp, Manihot esculenta
  Intron number 1 from transcript cassava4.1_027336m (locus cassava4.1_027336m.g) derived from phytozome v7.0 (chr-ID scaffold03750; pos 214368 to 214917)
gctcttgttttttctcaacgctgctgtatctcaaggtatagactatcacttgacaagctttcatttgcactttctttaacatacaatagctgttcaaattcttgctatgtaaaactcatttaatgatatctgaattcaatatttagataattccattttctgctatttctaatcttattttctttccaaataccatgaatcaaatttttaatatgatatcgtagtattaatgatcttataaaaaaaaatcaagagagctcacagaggtaagaaaaaaaacagtttcacaaatgaatgtttgatgccaagaagatttttgaaaagaaatgttcaacaattgaaagatgatggcgaagagaaatgcttcataaattttatatttagagagaagtgttctatattcagctgttaattttttttttttaaatttcattatttaaataaattataggattttttgggttattggatatttagttgagatttttactttttgaattaaactccgacgatagcatcttattttactattatttcatgcatggcagac

SEQ ID NO: 47060 - DNA, 582 bp, Manihot esculenta
  Intron number 1 from transcript cassava4.1_026538m (locus cassava4.1_026538m.g) derived from phytozome v7.0 (chr-ID scaffold00337; pos 17367 to 17948)
gaaatttgttgaggcaaagctggtccaagaagaaggtaagtgttaatggctatctctctctctagtgcaattcgtttggttagttgttatcttaaaaagtgtgggaaatgggaaggaattgaaaatcttgggtttttgtaatttacttaacgaaatggacaacttgattggtgcttagataatgtaggggaagaggaagtgagatttgaatcttgggtttcgagtttcatgggatttttttcttatgggcgcttctgcttgggtggcgagaaaatgcgggaaaatgaaggaaataagaaaattttgacacttgggttttgctttcaatggaattttatggaataaagttattttctttgaactgacactcaattcaattacttggggttgtttgggctgaagatttcagtccatcttcttgtcatttgttttgtgagtgaaattctgtaaattggaaccatcttttcctccaattgttgaattttatgattaaagaatttcaaattgattcattttctgctgttctctaaatgatttaacctcttatatgatgcttgcttgcctatggataatatttagttg

SEQ ID NO: 47061 - DNA, 453 bp, Manihot esculenta
  Intron number 4 from transcript cassava4.1_014328m (locus cassava4.1_014328m.g) derived from phytozome v7.0 (chr-ID scaffold09809; pos 311123 to 311575)
tgttgagcttctaggaattgctgatactaagaaaggtatgcagcataatacttctttagcttgagcttcgcttcttgaaaaaggttttatattcgcttaattctaggataagtagtaaatatgtttgttaatttcttatgttccacaatctacaatgttggttttgcatggtttttctttagtgcattattttactgggttttgattactgaaatacattgtggaagttttctttgtcttctctatcatgactgttgaatataggctttgatgtaatcttagtacatgttcattgttatcatttcactagccataatgaataatctctgttgaacttcttgtattgtatgaatctctgtagctaaggagcttgtactatagggggttctcttcatagtttattggttatctaataccatgccaatgccattttcttgaaatgcataggcgcca

SEQ ID NO: 47062 - DNA, 671 bp, Manihot esculenta
  Intron number 1 from transcript cassava4.1_011615m (locus cassava4.1_011615m.g) derived from phytozome v7.0 (chr-ID scaffold11069; pos 133629 to 134299)
gaaagactgaatctatttgaatcgaagctgaccaggtgagtttgcttcttctctgttgaatgatcttatattatctagtcttttttctttccatgtttgtgtctatgtgtttgattctaggatttgattagttgcttgatgttttgctgattaaagaaaaggattttttttttataaaaaaattgcatttaaatcttggtaattgattgtatattattggctttgcatgttcggtagttcatatcttattggctgctaaaatagacgaaaaaaggaattgaattatttatgaattttaaagggttaaactccatttttaaagtaattgaattatttcatttggaagtttaagaaaaaggaaaaaagtaaaaaaaaaaaaaattactctccttttcagagacacgcttatgctaaaagctttaagtttgtatgatctccagtttttaatctggtagtgggttccaccattgagtgattgctttgaagtattttttttttctttttctcgaatctaatggttgtcagcctaatctcaaatgagcttgaggttctctggctacacccttgttattagtgttttgatgttaacgcaataatatgttattattggactaactggagtagctaatgcaattattcaggttttgggttggggtgattcttcaaagaaa

SEQ ID NO: 47063 - DNA, 996 bp, Manihot esculenta
  Intron number 3 from transcript cassava4.1_011615m (locus cassava4.1_011615m.g) derived from phytozome v7.0 (chr-ID scaffold11069; pos 134861 to 135856)
attcctatccctgtaagtttagctgctataaatcatcaggatgggttgttttgccctcttggtgaggctaaatatgcctgggcatttgtggtttcttcactattgtttgactgatggttcttccaattataaaataattgactttttttttgtcaaaggttaaaaaattgacttagttaacttgaagaggggccggggtggggggggggggggttgatgccttttccattaagtttcaattactgaataatacaatagatatgggatggaaagttggggtatactcacccaattcacaagtatttgtccagtgactgagggaggttctgaattttataatgtgcttttgatgggggctttgaaagtttgaaacttgcacttgcaagtccaatgtaatttagtaatttaacatttctaatatttaattagacttactttgtgaatgattctctgcttgctttgttatattatgaaaatcatgtctaactgaagattgttgcgtggtttacgaataactatagcaacaataactaacccttgattccaaactagttggggtcggtcatctttttgtctatcagctgtttctgaatcgtctctacctctgcatcaatgttcaataattgtaaaataatctgcacacatttaattgcacaaggtcgattcaattgacatgctttcacttgtatagctgtatagcatattcttcctttcttcttctccaaaggagattaaatgatctgctctaatatgattttgcacatcagaaaaacctattcatagtaagcacataaatacacaagcctgaatgccaatgttttggcatgtgttcaagcttttattaaggcaataatcctacatataattcattcaattaccattttcttcaacttaatatcaaagcgcacgcgtctgcatgcataaatttttttttagcatatgaagctatgtttatgaattttacttatcctaaatttggcctccattctgtgtagc

SEQ ID NO: 47064 - DNA, 661 bp, Manihot esculenta
  Intron number 1 from transcript cassava4.1_018547m (locus cassava4.1_018547m.g) derived from phytozome v7.0 (chr-ID scaffold11225; pos 10008 to 10668)
cttcacttcagacatttcctcttcaagatccccaggtataatttctgatccttttcaccaactccatttggggagattcttaacatttgtctccatgggtatattttatatattaactctttgatagaatatgtaatcaataaggaaaatttacagtttcttttttcatttcaagcaattttaaaatcccaatatttatttggtaatgaaatgaactttccccttacatgttttaagcagatcatacctttgctgtattttgccagaaaatacatatataaaaagaatgatctaactcattcagattaattttacatttacatacaatataaaatcctttctttttcttggacgttaatagataaaaaatttatgatcattaattgtctaaggattttattatgttattcattttgtttgatttaatatgaatcttattgtgcactcacagacttaatttggtggtaagtgcatttaagtaaatatgagagatctcacaatcgaaaattcaaatattcaaatagttgaattaatcttcattcaactcatacttcatagtagttgccattaactagtggaaaaagaaaaagagtgtttgaaattataatttgactaatttgtttcagcataaacagtcgcagaaagtgcacttaagcactga

SEQ ID NO: 47065 - DNA, 623 bp, Manihot esculenta
  Intron number 2 from transcript cassava4.1_006595m (locus cassava4.1_006595m.g) derived from phytozome v7.0 (chr-ID scaffold11998; pos 1531064 to 1531686 reverse strand)
ctataacagacgatctctctctgtctctagcagaggtaagttaatggcttgtccccttatctactatgcatatctccatctaagatagaatgtaggataagatagaggtggactcaaagactgtttgtgagtttattccccctgatttcataacccccctcctctcaaaaaaagaaaaaaaagagagaaaaaagaaggaagtgattaaagacttttgattctcgaattccaggattaagtttgaaaactgcaataatatggaattcattttaacaagtctagatatatatgcatactggcaatagatcggaaggagtattagaaaaaatatgcataattagatgaggtgttgttgtctagaaagactaacaattgggcatgaaagctttaatcattattggcaatgatttgtgatgtctattaatgatcaaagaatttagaagaacaggaggcgttttcaagaaaaatttacatacggtcagaacaatgactgggaatcaagattaggataaaatattgctaacattaaaagcttaggtccacatgagccttcaatgaactgatttgtgataagctgtgtgcttgcagtattccgtgtttggttccatattgacgtttggtgc

SEQ ID NO: 47066 - DNA, 845 bp, Manihot esculenta
  Intron number 1 from transcript cassava4.1_016802m (locus cassava4.1_016802m.g) derived from phytozome v7.0 (chr-ID scaffold02978; pos 214522 to 215366 reverse strand)
gctgggcctagtcctgattgcgacatttctgaaaggttagctttgatttctagcttggttttgtttgtttactgattcttttgatatcaaactagatcatactgatcaacttaattaggaaaattagaaaccgaatctagcggtttgatgcattttatttcctattatattaattaaatgagtgggtggagaaaatgggggcttgttaatgtgttgtttggttacttagaaaacatatgaaagaagaaaataaaggaaacagttagatgcttgaaaattcggattattcagtgtaatttatggaagaaatggaagcatacctaaaccttgtgctccacatgagatttatttcttggtgaagaacataggtagcttgatatgggcattgtaaaatcaattattgtttggcgtcctcttgtttcagatggtatgtttggtttcttaattgtgcaatggaaatgaaaagatattttagcagacgaaaagaaaagaaaaaattacattgtttggtaggtgtggataggaaatacataagtttgtaaagtctatttttaccgttataccctcgccatgtagcatttgtaattgatatggtgtcaattatatgtttacagcctctataatctttcttggatatgaagtgtatttttgctcttacacccttgtcactaagcctctctttctccaaattgagaggaagtttttttgaggtttagaagggaattaagaaatctaattttcattatttcccatcatttactttctttgtccactttcctcagagcaataaaagtgttggttttggttcctttttggtgtacaggagaattacaaggtaataatcc

SEQ ID NO: 47067 - DNA, 786 bp, Manihot esculenta
  Intron number 2 from transcript cassava4.1_012958m (locus cassava4.1_012961m.g) derived from phytozome v7.0 (chr-ID scaffold06916; pos 893684 to 894469)
ctccagcttgatattatagctattgacgtttgatagtaagttcactgttatgtttggtggtcttttacttgacaagtgtactgtttattgaaactttatcaactaatgcagaatttttgtgttggtatgataaatttggatcaattttggggtagttggtatcaatgtgtgtgattcattatcaaaatgtaggtttggtttctgaatcctgataagacaggttggagtttgtgttttagtttgactacactttgatccctttttttggtaataaaattgtcccactttatttgtttatttattttaaaagaaaaacaagttagccacagtgacattgaagggtttattcattgggcaagcagttcttactatggattaaattgcaactcaatcatctgtttttaccctataacgttcttcttagaactaaattgcatgcattttatcttgttaacttgttccttgtgctaaggcatactagcaatgatttaatgtcatgaaatttgtctataatctctgcaaatggataggcttcttgtatatgcatatagtatagtgtcagaccaaatgaatgggttctattgcatcattttaacaagtgatataaattgttttaatatggctaagctagcagattggggccttgatctatattattaacttgtttgctttgatttgctaatgtcctgtgatgcatattatatcttttaacttttgttaattttcctaaaatctgttgttgttaattgtggacagtcctttgtagaggcatttgacattaactgg

SEQ ID NO: 47068 - DNA, 783 bp, Manihot esculenta
  Intron number 2 from transcript cassava4.1_017944m (locus cassava4.1_017944m.g) derived from phytozome v7.0 (chr-ID scaffold07520; pos 1476261 to 1477043 reverse strand)
ttaactaataagcaggttagtcgaaattcgtcccgattttcagtatctgtgatttattactaggaatctctctctctccccctctctctgttttcttccttagctacttcagttagcgagcctttatgatcttcccttttaaggttacacatttagagtaaccaattactccacgtgcaggccacatagctatcattcctttaaatggtaccggcatagttatatttttgtctgggaattcccaagtggtttggccattggttctcgattattctgtgcgttcatcttgttagcctcatgtattagagtctagctttgaaatttctgttgtgtgttttggattatgtttgtaggtgagattcatattatatagccggccaaccaaatcagaatacaaacatcatattcatagtccacttctttttatcaggtgttgatttactaatcccccagtttgaacaaatatccacaatcattaggatagtattgctgttcatttcagagtggatttcgtatccttttttcccaattaatcatacctatcttgtggtcagccattagaagctgatggtattcaattatttcagatggttttgtgattgattcacttgaaaagttttattgctcactatgattttatttttgcaacaatgaaaatagtatgcaacacaaaggcttttgtcattcaaatgtactttctcttcatggagtagatatttatagtgattagaaatttctgcttctgcagtttgctgacttgatacagccgattgaggaaaggat

SEQ ID NO: 47069 - DNA, 821 bp, Manihot esculenta
  Intron number 1 from transcript cassava4.1_015845m (locus cassava4.1_015845m.g) derived from phytozome v7.0 (chr-ID scaffold00847; pos 1489598 to 1490418)
gccgacgacaccgctggaagtaaagctttcggttcttcaattcctgtttagcttttgttttcttgctaattttgcgtatgatgttgagaatgagaactggtagcttaggagtagttgcagcatgctttttattaagatccaaatcgattcaattatttatttacttttgtttgtcatatctcttcttgccgtttgtgtgcttgcatttgtagctgtccatttgagcatttgccctgtggtgcgtttttttagattgccaaataacctgttacacacttttgctgggagatcttggcaatactaaattatgaatcatgaatatatccacatttcaagtaatgtcgattagttttgattccttatcgctgcaccatctcggattgccaattctctgcagctcatcagttgagttgcattatatctacatggctctttcccctgtttttgaggttgcattattgtaaatttcacctggccaggcagaatttgaatttgctgcttcccgtgtacttttctttcccttctttataagcattctggatactgaactaaataaactagaggttctcatgtgtatttttaggtagttttggcttccaagtatccgtgatgtatttgatttttatttgcgcgggggaccaaatgttgtgattatcacatttgtcttcaaagctctaagttgtaggatgcttggcaataaggatcacaaattagttttgtgtgagaacaccttgcataatatcttgctgatccatccaatttacaacaaattaatgcttcgtgcaggaagaataccttttgcgtttcttgaagacattcat

SEQ ID NO: 47070 - DNA, 305 bp, Manihot esculenta
  Intron number 1 from transcript cassava4.1_003538m (locus cassava4.1_003538m.g) derived from phytozome v7.0 (chr-ID scaffold07891; pos 51555 to 51859 reverse strand)
gttacgtgagaataaggaaactaggttagtgtgctctaattggctcttggggaaagaaataggccaaatgttttttctcaatttgtttcttttttctcattttctttaatccttacaagttactcccctcaaatttgatactgatcattttagagttgaggtcttttaacctgttgtgacttgtgatttttaacttttgtttcattctacataaatttcaattcccatgccgctcttgccttgttttgatcttgtggcttcttctagcagagactttctgttggtatcaacgggcacatctgagt

SEQ ID NO: 47071 - DNA, 592 bp, Manihot esculenta
  Intron number 2 from transcript cassava4.1_000574m (locus cassava4.1_000574m.g) derived from phytozome v7.0 (chr-ID scaffold02658; pos 761428 to 762019 reverse strand)
tgtggagtcctgacgccaaattgatcgccattattgtaagtggtctagattggtttgatttctccatttgagcgttgcttttgatgatttgttgcgattcttttgatatttttgtgacgggatattctgttttcagtcgttaattgcttagaaagcgtatacgctttcagatagatttcatcaatctggtgcatgcttcggcattattaaaaatgaatttgaactgcctttttgtatcagagtgttgagagagataggggatgtacttgtgtgcctttactctgagggcgtcatttatttgaggttggaaatgtgctgaacttcactgcataacatgcttgaaactacgtcttgctgtagctagctgaagcttctttctctctttctttctttctttcctttttgttggccagagagattcatgatctctaataatgcatgtgtggtttcttatttcttgctttgatcttcttcacgttcgatttttttctgaaagaatagtccaatgcatcacattgtgctcatatattttctcccaatttttgtactgtatgcagacgtcgtccttctttcttcacatattcaaggttca

SEQ ID NO: 47072 - DNA, 368 bp, Manihot esculenta
  Intron number 2 from transcript cassava4.1_008800m (locus cassava4.1_008800m.g) derived from phytozome v7.0 (chr-ID scaffold11998; pos 583686 to 584053 reverse strand)
atctcgttgggaaaaatcgtccactcatcccgccggtacttttctcacttaagccgggtactattaaaaatatctgtcacgtttgatcgctggaagcaagtatgaacctagaatttaatcaaagatcaaaaagagaaataaactcttttttagaagatcggaactggggggaattgctcaagttgcatctttctattcagtgtagtattttctttttcccttcctttttctggggaagaagggagtaagagagaactctttggaaatcttctccttggataattaccttatcaaatttataattttgagaaaatcattttccgccgtttgtttccttatatcaacctttaatttaatccaaggtataa

SEQ ID NO: 47073 - DNA, 538 bp, Manihot esculenta
  Intron number 1 from transcript cassava4.1_009983m (locus cassava4.1_009983m.g) derived from phytozome v7.0 (chr-ID scaffold11179; pos 311378 to 311915 reverse strand)
ggataaaatagggttcgatcgtgtatattactgaggtaaaggtggattgtttttttttaagaaaaaaagaggaaataaatcaagagttctgatttttattctttaaaaaaaaacatttttttaatggattcagccgaaggtaaatgtgtgtgcttgatttgattttgatgaaaattcagtttcttatcgtttgggttgtttatgtcgagaaaaccataacaagaaaaagagccaaatcattaactagggttttgatgctattgattttttgtttcattttctttgggaatcaaaaatatagaatctgaaatagaaattttctgcaactgcatttttaaaaatgggactatgtcctttaatttttttttaaaaaaacttttcagagagtattgtaaccagggaaccaagaaatcctagaagtttcagtcttcacattattaacaggatcagctttttttcactgatgcttccatttattgcacttgcttgtgctcctatgtttctttttacgtcactgaccactattttgcaggttcac

SEQ ID NO: 47074 - DNA, 469 bp, Manihot esculenta
  Intron number 2 from transcript cassava4.1_015862m (locus cassava4.1_015862m.g) derived from phytozome v7.0 (chr-ID scaffold00847; pos 149729 to 150197)
aggtatgttcacaattgaatttttctattttacatattttcatttcataatcttcaattttggttttttggtacttgggggagggggtttattgattatgaggtgacttgagaaaattgatcttatggattcttggattcccagcaaatccttggcagtttgagacgatgttcattattaacaaattttcaacttcatatgttgatatttaaatcctttatttttgaaaccatcatgtacagcctacagtgtcatactgctatggtcttcctaacaacaatgactagcattcatgggtacaacatcacatagcagttgatataaaacaattatttcgtatatttgttttttataggatgtatgatattgatgttgaccctttttcttattgactccgatttcctattttgctgtcgcgtttttgttctaacaaaggtgtaaattcttttgcattgaatagacacttgaa

SEQ ID NO: 47075 - DNA, 498 bp, Manihot esculenta
  Intron number 1 from transcript cassava4.1_032447m (locus cassava4.1_032447m.g) derived from phytozome v7.0 (chr-ID scaffold05782; pos 45648 to 46145)
gattttacaaggtcagatttcttcttcaattgcatacagtctttactattttctacttttctgcgtcgtggcaatttgactgcataatgggtggtgataatggaatgatgttcaacattttcttgctttgaattttaaaactacattgtttgtttatgataaaagaataaactgcactggtggtagaagtgctttacagaatttgtcaatttcagggaagtttgttgcttttagaaaaggatcactttgacaatgatattttgtaaaacatttttgcaaatttgagtatttctgctgtgttttgttattgcaacttttctctgtttgggaatttatattgttactcattgacatgtgtagatgctcctaccgtgcaaaagtgtcaacttgaacccacttatactgcaatctcttcagtttttcttcatcaaaattgtaagcataagcatattagttgacttagtttggtggatgcatccataggcaaagtgtttgtag

SEQ ID NO: 47076 - DNA, 433 bp, Manihot esculenta
  Intron number 2 from transcript cassava4.1_024684m (locus cassava4.1_024684m.g) derived from phytozome v7.0 (chr-ID scaffold11179; pos 203519 to 203951 reverse strand)
ctttactggtttttggtccgaaagagctggctgaggtgagttgtgcacggatgaatgatatatttgctagcaatttcttttttcctttgaggatggaaggttgttgtgctatttgtaacccttgcttatagacgatatgctggtcttaattggaacgcagtaatgacctcatccaactcaactgaagaaaaactaattaaaaacagagaaaacaaatggggatttcctaggattgaattctgatctaataagattgattttactcgttttgtcacatatacctccacttttttttcttacctcagtgcattagctttttaggtggttcggttgcattttctttctttttccaagatgtttatttgtgtttgtagctctactgagttatctaaattcaggttgcacgcaatctagggaaaactctgcgtgcatt

SEQ ID NO: 47077 - DNA, 902 bp, Manihot esculenta
  Intron number 2 from transcript cassava4.1_015106m (locus cassava4.1_015106m.g) derived from phytozome v7.0 (chr-ID scaffold07543; pos 169395 to 170296)
gctattgcccagtctaccaagctcgtaacttcctggtattgcttttacactttcttaattttcattttcttttctgggtttcaataacaaatctctaatgttttgggatctggaattgtgtttattggcttctgaatttctttctcaataacatggttggttattggtttctggttttagctagatcgtcgaatgaatttgatttaaatagtttatgaaccatttttagagtcaattcaaaagtagccttcaattgccatatttttaaatttagaaatgctcacttaatttttgtttatctctacaaataacagaaatcatatgtgttgatttgcttttacaaaccacaaaggtaatctctcctctgatggattcgtctttcacaacaatgcagtaggtcaagctattgatagttgttaagttcaacttccattgacgagatggagaggtagaaagtgttatgtaatggagaggtggccataatgggcccactgggcctcatgttcctgcaactaggttgtcttgaccactggagagtccttgactggaacatgatatatgagctgaaatactaaggagttcaatactagattatctcttagctaaactgcctaaaattctgaaattttagtttctctcatctcgatcaaaattgagctctatcacttggttatttgatgctttccttgggaattgattgtgatacagaatttcagtatatattgcaatcatcaatctatgaactttttttcttttttgcataatgatagtgaaagctttctaaacgtatttaatttgagtcttgtttggagcaatgctgccaaatttttttttatcaatttttagattacataccctaagaatgttaagctttcctagatttgcaggtataaggaaaggag

SEQ ID NO: 47078 - DNA, 717 bp, Manihot esculenta
  Intron number 1 from transcript cassava4.1_000481m (locus cassava4.1_000481m.g) derived from phytozome v7.0 (chr-ID scaffold01945; pos 8107 to 8823)
agggaggttataactcgcagtatccacagtataaggtattgaatttgtagaagttcaccatcttcggttaatttgaagatcatatttgcatgtttatattagcttttaatgactttgtttcggtgttttttatcattttatgatttatatacctaacctgcaaccttaggttgttgattatatattgctaatttctttgcatcgacttgattttgatggttgcatatttgtgtgttatcgggaatcgttattctgaccaagttaagtctcgctttgattgtggcaaactaagaacagggaaataagatatgttgagagattccatgatgaaataaggattttacaaacttttaatcgtcctatcaattttcgttagaagctaacataacggaagagatcactactgaactggttgcaatgtgaagtatttgctaactgggtggcttcagattcttcacaatcacagaaatgattaacttaagcagctcaaagatccctcccctgatcctttgtatctgcatggatggttcgtagggacttaattgattcagtattgaaattaatcagttttgattggggccttcctattgcagtatgatgtgtttccatttttttttcctatgttctattttacaaagagcgctatttaatggaagaataacccagacctgtttcttttttctatttctggtgctattatgcagcatctaaaaccgt

SEQ ID NO: 47079 - DNA, 431 bp, Manihot esculenta
  Intron number 1 from transcript cassava4.1_010393m (locus cassava4.1_010393m.g) derived from phytozome v7.0 (chr-ID scaffold06916; pos 1115243 to 1115673 reverse strand)
tctctccgcctccctgttcctcctccaatcttcaggttagaatgctctctcttttcaattgcaatctgttatttctcttctccttcttctcttttgagtttttgctggtaattctctgatctctctttcactcggtgttttgggttctcttcttttgatttaattttttcgtgtttcctattaactagtgactagtcttcttagatctgtgtctacccatttcttattcaacctgtgttctggatgatgagtgaattttcgttctagtaatatattaacatgtgggattgtttggcactgaaatagctttgtgtttggagactgatttttttcacttgttattgttttatttgccgcattgactctaccatttccttttcgttaattttgatgcagattttggccttcctgttttcctttcaccccgggtt

SEQ ID NO: 47080 - DNA, 891 bp, Manihot esculenta
  Intron number 1 from transcript cassava4.1_032519m (locus cassava4.1_032519m.g) derived from phytozome v7.0 (chr-ID scaffold01926; pos 900 to 1790 reverse strand)
tttgtcaaagaactggagtataatgttttcattttttagtttttccatgcctacgacgttacaaaagttttgaatgatggtccatggagttttatgcaacacctattaattctgaaagagctaaaaccacgacaaaaccctagagctgttgaactaacgcatatggagatatggatacaggtgcatagtttacatagtggttttatgtctaaaactattgctagaactgttggtgagtatatggagagttttgtatcatcgaatgagaagaacttcactggtttttggaaggaatacatgcgagttagggttacatagatgtccgtcaaccattgagaggaagatgcagttgtctaagaggggtgtagattggttttgggcggacttaaaatatgaaagatttcccaccttttgttatttatgtggagtgatcagacatactgatagattttgttcaaaactctatgatctacctcctatttccagagataaatacatgtatggcctttggttgcgtgctcagtttaagaaaccttttcagagtgattcttgatggctgaagatagaagccgactatgattcatggatgaccgaagggtcgacaggtggttcaagtggtgttctgatggtgacagacccgatgaatcaaggggcgagacataaggagttgaatgtgcctcaaatttcttttcaaatctttggattccatatctacttgtgcgtgtgggtttgaggcttgtgccatagggctccgcgtcatgggttatctcttttctgacagggctgttaactttgatgctttccaacatacaatggccattgcttggagacctgatcctgggatgtttgtcaaagaactggacaataatgttttcattttttagtttttcc

SEQ ID NO: 47081 - DNA, 750 bp, Manihot esculenta
  Intron number 2 from transcript cassava4.1_029849m (locus cassava4.1_029849m.g) derived from phytozome v7.0 (chr-ID scaffold12711; pos 263550 to 264299)
cttgttagaatccatccccatttatttttgacaccgtaagctctcttctgttagttctcttatgttctgctgtaggtggatagatcttatgcttttgattcttattaatgtagtatatatgacctctggaaaagaaagggaaaattcaaagaaatcttttttagttacaggttagatagattgaaattgttcttaagtaatgggagaccacttttatcatgggagaaggcgtgtttatctcttcatttttattctttggatgagagctaaaagttgaacttgtttattcctgtaatgggaaagaaaagtgtgacttagttaccaagctaattcaacggtaacagatattatgaaattatatttggcttttgatatgtgttctatgaatctaactcacaagacaggagcctagagaattaaaaaaatagtcaaattttggcccttaagctgttttggtgaaaattataagaatgtctgtgaccctaattatgtaattgtaattgaatttttcaactatagttgtttcctacatatctcattgggttggaatatgatttttcttagttgatctatatcacctattctttttgtgtgctactgcaaattcccactaatgactgtagctttgttgctttgaagagatggctttattacccttcccttttctttttccaagattagtaagtacacaattttgttctccttgaatttgatgtagttgtgaaactatattccaggttcctgcattca

SEQ ID NO: 47082 - DNA, 609 bp, Manihot esculenta
  Intron number 2 from transcript cassava4.1_028228m (locus cassava4.1_028228m.g) derived from phytozome v7.0 (chr-ID scaffold10797; pos 155845 to 156453 reverse strand)
tcagcatttctttttattctacagctaagattcatgtaatttcttcacttcatctctttttcttagtgttttgtgatttggggttcttggatttgtaaattgttgagtaatacttgtatgaagttcctgggattttgggttttttttgggtttgtaaattgtttgaggaaatacctatgtgaagttttgggtatttgggaagtctaatgtatactaatgattgacaaataggtgatgctaagaaaaaacacattccagccattgcttattaaaaaaaaaaaattcaccgaaaatcatgcttaatcaatgtggaaaagctaatactcaagtgatcatgtgtttgtctttgtctcgcctcttgtacagctcttagttagaatactgttaaaatacctactaattggtttgaagtttgacctctctaatataatcaagctgtttccatcaactacacaagtagccttggtgctgtaaaggcaattttgatagattagagtaagaaaaaaaataatgcaattcctatcatttcttacttatttagaacttttgatcttatgttatgaaaatatggcaggacaaggtggagatagaggcaaaggttgtaggaga

SEQ ID NO: 47083 - DNA, 940 bp, Manihot esculenta
  Intron number 1 from transcript cassava4.1_024270m (locus cassava4.1_024270m.g) derived from phytozome v7.0 (chr-ID scaffold04740; pos 161829 to 162768 reverse strand)
aggtctcatattcaagctatcccctcagtgtaagttatatatatgtataaataattatgcttattttttaaaaaataaaaaataaaataataattctcttcgataaattattgataatttcatagttgatattttaaattactaaaaataataatttacgaacagaaccgtttttacataatctgatcagtaaaattttaccattactttcttatagtaattaaatgactttcaattgaactctttatttccagtgatattaaaataatcaaactatatgtataattttttttaaaagaattctcttaaagatatatatatatcagttgtaatagattttctgaaaaataaaagtaatagatttttatttctactgaaaaaaaagattctttcatcatttaaatataaataataatgacctcctagaagatttatatatataaaaaaaaataaagtgcttgcattttttatttactttataaaactccaataattaaattatcatatcctgacatgttctgataattttatggacaacccatgacagcttatttgagctaattttttgcagctagacacaattattattattcctttttctgattacttcttagatgcatacaatcatatatataaaattttatatatttaaattataaatttatataaattcagtctagataaaattgcgattttatataaaagtggagactaaattagtttcttctttgctgggaaggttggagaggccatcaacacttgagctaaaaaatgataggtaattgatcttcacaagtaccatttttcatttcatttcaattccaatgggattaattgttggttcataattttaattaattatgttaataaacaattttaatattttatttaattatatttatcaggcacccatttgaagctcaaatcaagaagcagaaga

SEQ ID NO: 47084 - DNA, 674 bp, Manihot esculenta
  Intron number 1 from transcript cassava4.1_024782m (locus cassava4.1_024782m.g) derived from phytozome v7.0 (chr-ID scaffold00847; pos 254342 to 255015)
acagaattgcagcttcacggcttaggtctctcaaggttagtttctcattggctcttttaaatatgtaattttttatatctccgtcctcttgattcaatctcttttagcctgaccatgcccagttgatactttattcgctacctagtataattagttcttgtttaatctgtggcttcgtgattgcttacctgctacatctgttatagttcagtcgatggccttttgtttattggaatgttctgtttttttgccgagtatgtgagaaaaaggataaagagaggaaagaggtcatgttttctaatgggagctttagctgcatggggtatgaaaattacttaattgaacttcttgttgttaatttggcttggtttgagcatagcttccgtcttcctagaattggtaaagggtattataaggtttcgtacatgggtggaagcacagtagatggattgacttgaaacttggtttggttgaatgataagaacttgctgttgctacttaatatggaattctttgtttgattctggattaggagtttctcgctgtctgttttcttattgaaataaagaagtttggtacaactttatcatctctgaagtcactttttcttatatgaactttgtgtgaacaggtccataggacagtaagtttcctgcaaggtttgcaagttcaat

SEQ ID NO: 47085 - DNA, 634 bp, Manihot esculenta
  Intron number 2 from transcript cassava4.1_032179m (locus cassava4.1_032179m.g) derived from phytozome v7.0 (chr-ID scaffold03741; pos 876875 to 877508)
gtcgagacttcagctggcaatgtactgtttctttgatatatttgcttttatgcttacatttttaagaaatgaatcaactataaatgtacatattaaaagtaggcggatgtttaatatatgaaatattgatactttaatattagtatttgcttattattcaaatttttgggttataatgtaacctcattcaatggtaaagtggctgatttgttttgtgtggtttcttttctgtttttccttacctttaacaatttatttcagcaaatgattatgagcattttatatttacaattcttattacaaaataaaaaaaaggaaatatgaattttagaaaatttagaattcttatgattaacatgtttttccattgctcccagtggtgtgaaagaaatccttttgttagagataaaaagctattcttggaagctttagcatttctttgcccgcccaccaccccaaccaacaaatcctttctttagcattgcttttagctttagcattacttagaatgatgaccttttcgttcttgcagtggtactttcattttttgccaattgcttcccctttctcttagaggatgcttctggaagagttattgacactttatcattttcccctccattttggttagcag

SEQ ID NO: 47086 - DNA, 843 bp, Manihot esculenta
  Intron number 1 from transcript cassava4.1_002948m (locus cassava4.1_002948m.g) derived from phytozome v7.0 (chr-ID scaffold00325; pos 34124 to 34966 reverse strand)
acctggtaagtgaattgcattttcattagaagcttcagatactcatgtttatttcttggttgattatatactggaaacatgtccgactgtctgtcatagaaaaatctaggtcatctagatccttttttttgtacttaacccatctcatccttggtccactttcttctttcttttccccgctgcaactttgatacattgaacttattactgttgtgattgatgacatattattaagttattaacatgtacaaaccatctgaattgccatttttgaactcatcttaaatgtttccctttcaccttctctcaaatgtactcagtttttacctggttcttgtatttcgacacatctatttaacattctcatctctgccacagtaattttgtggacatattgtttcctcactgcccaatacttgaggctgttaatcactgtcagtgaaaatacagccttatataactttttcttttaacttggctaaagtttttactatcaataggactttcctggagttatctcttcaacattgttttttttttttatcttttttaatttttatttgttatgaatcctaaaaattgaaatgtctgcattattggacttctaaactgtcaaaactccaaaataactccgcttagctccttcttcattcagttgctaaaataacacacgcacacacatagttgtttgtgtgtgttatttattattttgtctgaatcaatctatgattggatgtgtggcatgtatctttggtgcttgtttggggctatgattttctgaatctcatcatggattcatgtgaagttttatttgattttatacttttcatgtactgattcagg

SEQ ID NO: 47087 - DNA, 960 bp, Manihot esculenta
  Intron number 1 from transcript cassava4.1_013151m (locus cassava4.1_013151m.g) derived from phytozome v7.0 (chr-ID scaffold12317; pos 92379 to 93338 reverse strand)
aaaagctgccaattccttcaagcttgccaaatcatgtaactatttttttttccttagcttttctgtttgttttccgagaaagtatttgatcggaagtaaatgaaatgaaaccattaatgtaatgggatgtcatttcattattttttttctcctgttggcttatggagttattgctgccttttgttctggctccgattggaatgatgcgatcacgttttatactttttgcaatttctttacgatgtgaggaattggagatgacagctgaggagaacggattttttttttatcgcaatttctagaaggataagaagtaattagtgtgtagtaggatgttctttcaatttaggggttttttccctttaatcctttgtagaaaggtttgcatggattgttctagaagtctgttgtattctcatgtacgaaagaagttattgtaagatcctcctttggtgtttgattattatcaatgctgattaggtgcaatttaagagatataagttcatcgggtgttttttatgtagtcgatggctttgtgaaactttgatgaatgggtttattccataaaatgaaaaatccggccaattactaaatgagttgggctgaattataatatttcagtatgttatgcatatcttttccctttggaatttgtttgattttctagaatacaccgttgattgctgtgattattgtaacttttttttaatgatcataattgggcaaagtatgaaaaatgggatcccatattgtgagtacgtgattccaatgtggggtttaaatggtcttgggctcttgcacctcagaagtttaggtgcagagcccgagtccataaccttattagtccatttagtttgctttctctttgagctagatttactaacatcaggttccatatttttgtatttgtatgctgacatccttcttatgatatttcaggggataaagctggatcaactt

SEQ ID NO: 47088 - DNA, 808 bp, Manihot esculenta
  Intron number 4 from transcript cassava4.1_010820m (locus cassava4.1_010820m.g) derived from phytozome v7.0 (chr-ID scaffold03245; pos 7342 to 8149)
ggcaactgagttttagaggcaagagggtacttgaggtaattaagttaatgagaaaattttgctacttgatttttctatgctgtggctttatgttttagggtcttccctgttgcattaatggtctagataagctgaataagttacagaactggctgtaacacatacatatgtggcacacggatagacattcttaattattggcaaaagcctgtatcggtaatacattatatattttaaatggacagatgctatgaaaaataagttctttcggtaggattatattgcatggaggagagttggctggctggctttgtctatagattaagccagattgacatattttcatctatatcttactggcaaagaagaaaacttcattatagcctgcactaatttccatgttctttgattttgtttttttctgggtggtgttataatagatgaaagcaattggctggcattgcctggattagacctaattcaaaatttattatttgttatttagacatttgaaaaaatagctttttggtgcctgagattagaaagatatatttatgtattcgttcaactggttttggattcagactactgtcctgatggtgcctctgaatttccttagattttcttattagtgctcactggtcgttattgaacgatcaattactttttcctttcctgaggatatttaagacccacaagcttttcttgatatcgcagctcccataagcctttttttagtctgaagtgatgaacagtttcagctgacggtctatctttttatttgtatttttacagcttggttgtggct

SEQ ID NO: 47089 - DNA, 701 bp, Manihot esculenta
  Intron number 3 from transcript cassava4.1_013440m (locus cassava4.1_013440m.g) derived from phytozome v7.0 (chr-ID scaffold07087; pos 378145 to 378845 reverse strand)
tgctatattgtgcttttggtctatatcttgacaaggtattaaaataaaaactctatgtttgtagatgttttggtaccttaaactgttgtacaatgtgctattgtacgtctttttaaatacattttccttttcttttacctttttcctcttacataataggggaaagcttatatccttgtgaggaggtttcctacatttattctgtgatttgaaaactgacagacacacacacacactcacagagagagagagcattggagcaacattaaggttgctccactatgccttggaggtgatgtgctaaataatggaatcagccttcttgtaattcaaaactagagctatgcatatttgatcctttatcaagctcaaaatgtaggatgccttgtgagccagaactgcctgtcatcttctgtcaggtagattgcttgcttagttaagtgaatggattgtggctgccctatttttaagtaattatagttggagcttttatgaacttaggtgctatcgtaatacgtaattagttacggtcgtaatctatcaaaagaggggaaaatgattttgtggtatatctttccacaaaaaaagtgcattggattcaatttatttcccctctatttaagtctgctcttttggtatgctagttttcatttggcaaaactcagtgagatctttgaatgatcaggttctcccgagggaaa

SEQ ID NO: 47090 - DNA, 849 bp, Manihot esculenta
  Intron number 1 from transcript cassava4.1_024350m (locus cassava4.1_024350m.g) derived from phytozome v7.0 (chr-ID scaffold08477; pos 92293 to 93141)
agcttcaacttctctgcgaatacgtaagttttcttctctctctctttctagggtttattgtcttttctttctctacgttacggccctcgtcttttttacgaatggaattagggtttacgtctgcttctttgctttagtttccattccttaatattcgtctctggaaacaatacagaaatttataagaaattctgattttgaagttcagtttcagcccttcatcaatttctattcctactaaaacagacttatattctttaatatttgtttttgtgtgttctcatgacttccatttctttatttccttttcaagccaaaatgactgttaggtctttttcattagtggatgagactggtgtttagacattgtgattgctgttgttttggtttctgccaatggagaattttgctgtgacacatttggaattttgtaacatcaagacttgccttgggttcgtcttgtaacaatccaaatgatggaaaacgtaatgcttgcaggttttgttttgtgcagctgcttgtgcttgtattaattaattacaactggcaactctttattatgtatctcctttttctttatctctcttttttctataagcatcattggtatctattgttataacttttaggttctaatacaaatgagtttaaattatttatgtgctgtcaaaatgatttcctcaaattatgatgaagaacggttgacagttcaccgccatcaatgcattttgacacaaatttagttttttttttttaattaaaaaaaaaaatctcagaaagttcaaaatttacttagttgacattgcttgtaaacaacacaggtaaaagagatcctcatcgaggagtcca

SEQ ID NO: 47091 - DNA, 1017 bp, Manihot esculenta
  Intron number 1 from transcript cassava4.1_003666m (locus cassava4.1_003666m.g) derived from phytozome v7.0 (chr-ID scaffold04094; pos 60649 to 61665)
tgggctcttcgtcgaactcccaatccactcaagtgaatttcttctctttttctttctttctttctacatatattagtccatttgtttataaatgtatatttacttctttatttatgggtttcttttgattcgtcttgatttgagtacataaacagtaatgggaaatgtttcttttgaaaacgtagaacttgggttggttcagggtgtgatttctttgagcaaaataatacagaaatgttgataattcttctttcccagttgcaagaagtaattatagttttgtaaattattgtaattggcttgtcctttcttctataagtcttttattttattttggttctgatttccagtaataatttttaaaaaaaattgaaaaaaagagttgtacggagctacaactagagctccaagattgctggggagggatttcttattctttctagcacacaaacgatggagtgtgcaaacgtgggcttaattgctttttcatcacttgtagagccaattttagtactgttattaattattattgatttctgatatgaaaatttagtatttagtcaatgtggtacggaaaacattcgattgttagtcctcagttttgaaaaatacattaaaatgtcagttttaaaaaatctaatctactagttagtgcttttagtctttaagtgttttgctatagtcgtttaagtgttttgctgtttagttctcgtggcatagtaaaactctttagttagtctcttggtttctttagttttgtaaaagtgtctattgattaattcgtatgtattaagggacttttctatagtacttaacagctcattactagactttttaaaacctcaatgttgttttaatgtatttttcaaaatcaagggtcattttaatgtatttttcaaaatcaatagactaattaatagtttcttgtattagaaatggatacacttcattaatggttctaacatatttcttcaattttcaggttccagggattgagtgtagtagcttctcgagttt

SEQ ID NO: 47092 - DNA, 800 bp, Manihot esculenta
  Intron number 1 from transcript cassava4.1_024394m (locus cassava4.1_024394m.g) derived from phytozome v7.0 (chr-ID scaffold02196; pos 351032 to 351831)
gctgcacccctggcatcagtcacctttcaggtaatggctcttcccttccaattttgattacctttttttttttaatatggaaaaagattaattacttggaatgtccatggaaaattattaaaaccttatcatgatcatgtagagctttgttttgattttggttcccttttttttttgaatctggatatctaatttgatgaaaggtgcaatagttgaaaaatctgtaaaggattgaacttgtggggactaaaatatagtattgtttatgattgattatgttgcttttcggtgaatggatggtgactagttttaaatttttaagaatgtcattatcctgaaatttggctggtgatgcaccacctgcttatctgataaaatgcagttaagttactatgctaatatggagccttagccaccttgagcctgtagtccaccaattgtatatcctttgtgcttttgctttccagtaagtgggtatccaatgttttgatactagggatttattcactggactgtactgctatttaacttctgattgttaacactactattttaattatattggattggtgtagatgaaaagttactgtacactccaagaatcattacattttggttaatgttgtgcgtgaatggaagcagcaaggaaaaagctgatataaactagctgatttcagtaaatatgttacaagtaatcaaaaattgactgaatgcactttcatcttgcaatggcagcattgtctcagcagtttcttttctatatatgagctcaagttgataacagttttgctcgttgcaga

SEQ ID NO: 47093 - DNA, 629 bp, Manihot esculenta
  Intron number 2 from transcript cassava4.1_017742m (locus cassava4.1_017742m.g) derived from phytozome v7.0 (chr-ID scaffold06683; pos 506012 to 506640)
tcaatcctgacccgtttcccgttcaacctacaccagttagtcaccaaaactctctctgccttgcatatttattaaattactgattttgggatattttgcaattgcttatttatttatttatttttatataagagtttggataatcaaattcatgattttattggagggtgcatatggggttcaacttcaaagttcatatgaatatgtaaatacattgcaactgcgttggaaagaagattcagaccagtggccatgcttttataaagatctccctttctttttcccccttttaacccttttccagtaaaatggtttttagataaaactaaaatcatagtatttctatatataggtcaatcaaaataaaaaaaacagagtgttttatatgtattgactgtgatattttgaggctctcactagattctgttgatcactctcttctcaagttaatatcacaacttatatactgaaatagcaattagatattagaactctccttttaggctatcattttagatgcatttcttttgttgtataaaagaatcaaagcaagtagacactcatcatgaagttttatggttcttgtttatccaggacactagcaatagtaatcccaagctataagggga

SEQ ID NO: 47094 - DNA, 689 bp, Manihot esculenta
  Intron number 3 from transcript cassava4.1_009653m (locus cassava4.1_009653m.g) derived from phytozome v7.0 (chr-ID scaffold02196; pos 159596 to 160284 reverse strand)
aggttgaggcagattgtggaacaattgttaagaaggtttctctcttgttatttggacttaccatcataaatgtatgaatttaaagcaaaaagtttaacataattaacaagtcatttagattttcaagtagaaggttcattgactgcaagccaggagaatcttttattgcttttgtgttcataacttatctgaattcaacaaaccttttgaaaacttttgaaatgcaaataaccattataatggcgatacaggttgctggttatattgatgcattcattttttctgaccagcttgaacatcaaaagtgttaaaattgttcatattctttcagaggcatgaacttatgtcattcttcgtgtcattcttaactacctatgattcttgctattgaagcaaacaaataaagacttgttttaaaaaatcatggaagtcaaggcttttttttattctctgttttatagattattagttaaatctgcattctcttttcatatttagtcctagtaatattgttattattttgcttcttgagtggcatgtcatgtagtacacaagcaaatgctactctgagctttgttgctgttacaattggttatgaatgccttagtaatggatattcaactggttgccttgaggatgtacttatgcttggttattatctcatgatatttagtttgtttgctttagga

SEQ ID NO: 47095 - DNA, 828 bp, Manihot esculenta
  Intron number 1 from transcript cassava4.1_025958m (locus cassava4.1_025958m.g) derived from phytozome v7.0 (chr-ID scaffold07292; pos 4364 to 5191 reverse strand)
agcgtgcaaaaaacaggtttgtcttttacaagtttgacgcagagtttcttccttatgatgattgcttactttaagcgattaataggagtttaatttcaaagaacagtttatttgtctttctggcactaagaaaagttgataatgtgctttatctagagttgttcgacacgtatgcaaaagtagaggtggtatgtttattctaagtttctaatttctttaatttattaatggcatgtctagttataatgtgggatttcaaggtgttacaaatttggttgatttgggttttattgttacagagaggaatagaaagattgcatccattttattgtccaaaaataagttggaatttctagattcataggtcatgtgaaacatatattttagtgctgaaagtaaacgcttcaacaggttttgttgaagacttgaaggtgtagtggtgtactagtttcaattaggatctttcagtggtgtgaccatttaatgatctgtaagcaagtaagctaacttgtagtatttttcaacttattggttgtgcttattttctttcagcactaactttttttttatttttttatttgaaattggttcacattttctgctgctttctgcttcactactgcacactaacaggttctgtatcttatcacacttccgttgctcttatggggcctccagaaaaggttttagagtctgcaataatgctgatttattttgtgtcgtgtactataatcattggatatatgcaattctgcaaagacattaagtcatccagcccttggaatagcattgatgagtgcttactgctactgcaggcataagcaggtg

SEQ ID NO: 47096 - DNA, 601 bp, Manihot esculenta
  Intron number 2 from transcript cassava4.1_013814m (locus cassava4.1_013814m.g) derived from phytozome v7.0 (chr-ID scaffold02373; pos 64461 to 65061)
ctcttccagattccggctctgtttgaaggtgagttttgatgttcagttttactggtagttttcttcttccttgtttcttgccctgaattaacatatcaaggttgtgttaattacatcagagagagtaagctctggctatatagattgcaaagacaaatctgagggaaaatgaaggaaaattagggaaaaagaaattgagagaataaatttactcggtattcaatcaaaaggtgcttgcttactatactttgtttgatattacatattcatccagctgaacagtctgtagccacacttgcttcattgattcgtatctgcaatttataaacaatcttgagattttaagtagtagaaaattcttgtatgtacttaatcaactgcttgtatctgagggctaataactcgtataaatctgcgattttctctgcaagaacttgtctttggagtagagtgattttcactttaaagatttacacatgccatacatgaccaagtattagttctcaagtttgtactttttactactattagtagtatagtctaataaatattgaatgttgattttcaatctctttaggcacagtcgcggataacataaggt

SEQ ID NO: 47097 - DNA, 996 bp, Manihot esculenta
  Intron number 1 from transcript cassava4.1_029455m (locus cassava4.1_029455m.g) derived from phytozome v7.0 (chr-ID scaffold10797; pos 117200 to 118195)
cgagtcagactttggcttcctcggggtaccttggtgtaagtctccttgtcctcattaatgcatagatatttgcgggtttgattcagatctgggttttggatcattatatctgatcatgctcttgttcaattttctgggagaaatgtaggcaaggaaaggaatgctggtttagaattacagtgagatcctcatatgatgggatgggaccggaaccactagtgctctttatcttctttcggtgctggcttagttaaaataaagtttggcaaaaaggccaaatttaccctgaaccataccatacagcaggcataaaaattgttaaatttcatttttcagtaagatcctgaactatcatacagcatgaaccataccataaaacaggatttttcagtatgaccattaactatcattattaaaaggtgaaataagctcaggtgaaagtctaaataaacttagtgtagttcgccatggataaattaaatagagtgtagctcgcacttttagtttaggggcgaatgcggggatgatgcttttacacctactagagtgatgactgtcgactgaagtgaattctacgctctaacttccatttttcagatggtttgtaattttgaaatattttgtagcattgcttaatgcttccaaccactttattatagtttatggactttttgatccccacacattggcgtcgttggtggaatatccttattcaatctgcaaaaatttattgttgcctaaactaatttcactctgttgttctacttaacaagttaagttggtgtagggctcatgtctgtgaactttttcatggacttgtgatattttcgttcaattacattcattgaaaggacaaaattatgtggttttaattgctttgattttttttttttggcattgatcagcattctagatttattggaagtttgggtttgagctcttgtaatcaatcttctcccttataattcttgtgtttggtaaaaggcagatcaaaac

SEQ ID NO: 47098 - DNA, 877 bp, Manihot esculenta
  Intron number 1 from transcript cassava4.1_012727m (locus cassava4.1_012727m.g) derived from phytozome v7.0 (chr-ID scaffold11661; pos 99209 to 100085 reverse strand)
acgggtaaatctctctttctgaaatcggtcttcattcatgggttggtttaggaatgcatgttctgtgaagtgtttttaccacttttcttaagaaaaaagctgctatttttcttttttccttttggttgagtggtttgtaagatgggttttcatggacctgcatgtattttttttttaaatcatccatggaggttgccagatttttttggtctacattttagttctgtttatgtatctatttatacatttatgctggttttgttaatttcaaattttttatttctttttttctctttttgttttttgagtttgctggatttatcttgtactgtttgatggtaaaatgatgatgatgaggatgtgggctctgaacaatttggtgggtcattctatttttctttcctcttttcatttttcttatctgtttagataattggtcatgaaagaaaattgccaaaacacatacctttgtctaaagtttttatcctgcatagatccaaacaataaaaatctttatgattttttgctttgggcttcaaaattggatgcaatgagccgattttatttttttcccatctccttttaatttgctgaatggtgatccatctctgatagatattgtctgcaaatttggtgattgtgtttccttttactcgaatcatttatgttgatgtgaggctgactttaggcttagtttactaatttagtaaagtgcagaatgaaacataactcttaagcatgagatatgtgaccatttttcatctaaaggattgcattcattgctgcttgcctattactttgttacgctgttaggctttagagatgtgttttgacaagcctaatattctgaatatcttccttattttatgaagtggca

SEQ ID NO: 47099 - DNA, 669 bp, Manihot esculenta
  Intron number 2 from transcript cassava4.1_018097m (locus cassava4.1_018097m.g) derived from phytozome v7.0 (chr-ID scaffold01426; pos 15914 to 16582 reverse strand)
gaattatccttggtatgcctttgcaacttttcaagtcttatacaacatgttgatggataagattgtcctactttgtgaaaaggactctctcaagtgagcattaagggacttaggggatcatggtgaacaagcattcttatcaaacctggaaccggaagttttcttcctttatacaaaacataaaaagtgttatttgtagactaaatcagaatgcaggatgccgactgtagaatactgaggtcacttataatgaactcatttatggtaaagactgcctactccttcatgattgattcagttcccaccatctacttcaaagtgagtggaaataactgggttctgtcttttgatcagaaaaaaaaaatcatattaatttgttcttcaggactgcctgtggatttttgcatactccattgactgattttcatactctgtgttcatgagtgtttatttggatggattcttgttatagcagcatttgaccatgttaatgtttgcttctttttaatgttcttaaaattctctgttaactgagttggtttatcaagtcttcaaatctggagttatattatttttctggattatgcattattacatatgtatcctccatcaatttgtactttgatttgctcttagttattgatttgtactttaatttccttttagttt

SEQ ID NO: 47100 - DNA, 565 bp, Manihot esculenta
  Intron number 1 from transcript cassava4.1_018097m (locus cassava4.1_018097m.g) derived from phytozome v7.0 (chr-ID scaffold01426; pos 16602 to 17166 reverse strand)
tgggaaaagattgaagcttacaatttgggacacaggtaatgaagggtacccttcctgtttcttctgtttcatcccatagctatttactcagttttgtcatcagtccgtgtactatactaggtacgataaaatggattatcctgaaaggaaatgatcctgattattttgaagaaagaggataattttatcttcctaaaggggatatagcacctttctttttttttaaaaaaaaaaaaaaccttacagcattaaaaacatgagtatagatattgcagtgccatgtttacacaaaaagtgtttcatcttagattaagcaagagttaaatgggcatgcattatgaaccagttatctgaagcctgaaaaaagaaaagaaaaagaaaaagagaagttttggatcttattttgtcagtgatcctttagatattaaggacagcctgcatgactatctaaaatcaaagccatcaccctagataaatatgtataactaggcttgataggcatttacttaacatgttctgttgtattgcagctgggcaggaaaggtttggaacattaataagctct

SEQ ID NO: 47101 - DNA, 797 bp, Manihot esculenta
  Intron number 3 from transcript cassava4.1_021520m (locus cassava4.1_021520m.g) derived from phytozome v7.0 (chr-ID scaffold06816; pos 56820 to 57616 reverse strand)
cctcgagaggtatgtctgcaagaaccagaaaaagtcttatatcttttacaatagttctttttctctttctttttgcatagaaaggctataacttctattatccttctataagaatggattgggtacagatttttgtttgtcaatttctacctctatttctttcaaatatattgattatttctctgcttttggctactttcttatactttttttctccttttctttatttactttgattactcctctctctctctctctcggttctgccattttctgtttgtttctcaagatttctatctgtcattgggataaataactcatttactatataagaaaatcagaataagaaataagctgttactcaagatctctactcctgtggcaaatactagatagccttatccacaatgctagttgagtagttggcaactgggcgctacaccttttccatacatatttatgggtttctaccttctgctgtcttctctgtttagttctataccattgttttgttctgcgtttttctttcttggcttctttcaagattcgaatttcttctcttttcttttttgtttttcctcccttttcccttgtgtgagataaataaattactggctaggaagttgcggagttaaactcattggattaaagcccactactcctgcagcactcatcattgcttcactgcacaaccctccaaacttctctctctattcaatccttcattttttgtttttctgtgcctgtggtacctctttgcagttaactggtgtaacagtgggggaagtgaaggcagt

SEQ ID NO: 47102 - DNA, 585 bp, Manihot esculenta
  Intron number 1 from transcript cassava4.1_021520m (locus cassava4.1_021520m.g) derived from phytozome v7.0 (chr-ID scaffold06816; pos 57836 to 58420 reverse strand)
ctgctattgagcttggcaaggaattggtattgtttttactattttaatgattctcacttttgcttttatttgtttcttttggtgtccggctgcatttgcaagacttttgttgctacaagttcttttcctttgtgggagcatgagaagggattttgatagaaatctatatttcaagttgctccaagttcaattctttatgttgagctttgggtaagctgtgtctgtttataacctgtttgtaacttggctcacatgggctctagcatttttataatcttgaatggtttcttcaaaatgatcttttttcttggttttctctctgttatttaaacttgctccccccattcatgtgaaacctgaaaagctgagacctttttgagaacggacaagtactgcttggtttgccaattgagtcatttcacaatggttaaatataccatgaggaagagagttttattgagcccatacccacatcggaaacttccattctctgccttctgaaaggctcatatggtttctaccaactgatacgaatgtgggtttcttgcaggtctcaagaaacattgatctggtctacggaggggg

SEQ ID NO: 47103 - DNA, 279 bp, Manihot esculenta
  Intron number 1 from transcript cassava4.1_010513m (locus cassava4.1_010513m.g) derived from phytozome v7.0 (chr-ID scaffold03750; pos 112836 to 113114)
ttcttcaaggtagccttttttgtatttttcttgttggggatttcaatttttgttatctgggtcttctcgtttgttttcattattgattgattgggttttcttactgagatcttgcttctaaatgggttctaaagtaagatcaacaaagataatggattctctttaattcggttctacgagtggatgaatcgatgatcgtcgtagctaacttgtttgatttaatgttactgagcggttttctgcaaatctgaatcatttaattttaatttttgtcaggaa

SEQ ID NO: 47104 - DNA, 600 bp, Manihot esculenta
  Intron number 1 from transcript cassava4.1_004507m (locus cassava4.1_004507m.g) derived from phytozome v7.0 (chr-ID scaffold07520; pos 2818943 to 2819542)
ttctcgtagaaaaggttcttcacaaattgggaacggtatgcgcaaaatattcccttcgatgctcttttcttgtttttctttctctctctctcgattttctgccttctttttttcatcttcttggtagtattggtgttcagcccacatgggtttttgtttttgcttctctttaatacgtttctgggcttagttctttattcctttccttaattgtgtcattatccttcaatctttttgggtggttgggaggtctgaaccattaatgctgtctgcttcttcaattcagtatacaggaaattaacggacagatttaaaaaaatttagaatgctctctcactgcccacacttatttgattagacattcatttatcaataattcaccgcattacgatgggattagcccgttcttaatttctcctgctactccgtgctataaactttagccttcaattgaacttatcatgccgggttaaattaatgggaaattatcatgccttgtttcaaattgtgagcttgatctgttggtcattaatctttgttctaaatttatgagttttcaattcagtggctgacggaaaggcacaagagagctctatttga

SEQ ID NO: 47105 - DNA, 1017 bp, Manihot esculenta
  Intron number 1 from transcript cassava4.1_007759m (locus cassava4.1_007759m.g) derived from phytozome v7.0 (chr-ID scaffold08757; pos 390826 to 391842)
tgagggaccccctctgtcaccgtcgttgaacgaaggttctctcactctctttctctgtctcttctcatttttttaataagaaatgcgtttcggttgtttttttcgtgctagtcattttatattcaaatgaactcttatgcaatgctattaacatgacgcgctgtcggttgaattttttgcgaattgtctgttttacccttatgcgcggctaatttttggtatgatcgctgattgaattgtgtttggttgtaatataggattttcgccttttctgtttgattttgatgaatgaggatgatgtgcttatgattcattagatagtgttgaaacggaactaaattgtgtttttttgtgctggtttcctgctgggaattgccagtgttgccttcccctgttctgaatttcttattattcttaaggcttattacaatcattacttgatctgtgttctgtattcatgcattctgacattgattccttaaaaagcggtctgatttgatgtggttttggcaaaatgtctataattaagtagctttgatcattttgaaatcatgactttgtcaatatttaacaagtcatcctttggaacgtaggccgttatgcttacctaaactgattttttccccctttttttatttattcattaatttctaatctattatttttctttctcttgtttttgtttaattcagatgctttcatcacctgtctcctttctccaattcattctttctctctctttttaatttttaaatatgggttgactacttatgagcttgcaaattgatttttatgcggctgctgaaaaaagaagagaaaataaaattacgttcaggatggatatgtttagcagcttttgacttctatgtgatcagaaaaatgaatctagttcactggtaaagctgtcaaagtatgcagcttatctggatgaaatgaaagttgagacattactttgcatttttttgaggcaaagctttgcaataaatttttaaacctagttatttactgctatctcag

SEQ ID NO: 47106 - DNA, 868 bp, Manihot esculenta
  Intron number 1 from transcript cassava4.1_006172m (locus cassava4.1_006172m.g) derived from phytozome v7.0 (chr-ID scaffold08500; pos 173880 to 174747 reverse strand)
tcccccactttcattgctcatttccaccttgcaaggtaatagatagcgcttccaatctctcctcaactgattgcggtacttcgattctgattttgattgatgggttctttcaatttctcttctctttttgaattggttacacttaaaacgcattttgtatgctcttctttcttgaatgaaaggttaattttgttattacctgttgatttctttctcatagttgatgaatgtggcttttagcgctcgattatagttgtgatagtggaatgtcataggtgctggttagattaaatgccacccattcattataagccaattgtctggtttgcaggtggctaaaactcttgccttttcaagcagctgtttgattgaggattcacataatagtttcattgtttaggtgaacacgtttcacttggtgcagttggctgcttctcttttcttttttttccttttggtttttctgttattaaggacattgtttgttgtgggtttttttgtgaatggttgaattggaaattaatgatagcctcggaaatagtttcatctttttattgctttgcatagtttcagcaattttactccttttagctagcaaattgcatttgaatgtttgcgttggacatgtcttgctctgcatctctatgaatctgcctttgcatctagcaaataatgtgctctggccttttctctcatcatttctttgcaatgttttggttatgttgttacactgcttctttagcaaacttttgttaattatacattgtgttcatccttctaatgtcaagtcctgatttgcatattaaacccactcttttcttttctttttcttttctttttttaattttcagtgtcaaaatatatttaa

SEQ ID NO: 47107 - DNA, 698 bp, Manihot esculenta
  Intron number 2 from transcript cassava4.1_001875m (locus cassava4.1_001875m.g) derived from phytozome v7.0 (chr-ID scaffold11069; pos 164395 to 165092 reverse strand)
tccagctttttcggggtgacacgatcttaattaaggtttgaattcttctttacttccgggtttgaattattgttcggagttgtttttgctggtttttggatattgattatgtgtctttatgatgcgttttatgtttgattaggtttgggattgagatttgtgttttatatctagtgttatgagagatttgggttgctggatagttatctaatatgggttcatggagtctaaagatcatgagctgaattttgcttcatatttttagtttttatgtgcgtcttactgagttcattgtagacggaggcttttcttttcctgattgagcgtttagttggttcccaatttgcaaggaggatagaatttgttggtctgttcataatggtagttccaacatggcatttgaaaagaggcggtgattgtggtttcaaaaggaattggcttttgcagggcccttcatattgttaagcattatatagtcagcttgttggctaatcctatgatttatgggtgcactaaaatagtttctacaatggggatgcagttctttttgttgttctttactatgggcttttttttgttcgggttgctaaccatctcagaggaagtcataaacaaattccacttatttgcatgtatataactatgctgctttatgtcctttagggtaagaaaaggaaagatacaatctgcattgcact

SEQ ID NO: 47108 - DNA, 569 bp, Manihot esculenta
  Intron number 1 from transcript cassava4.1_000114m (locus cassava4.1_000114m.g) derived from phytozome v7.0 (chr-ID scaffold08473; pos 62822 to 63390)
tgaatagagtctgatattgtgcgtatttcatttatgatttcatttgaactcttttagctacttatttttggttttctttagtctttcattattggttttgatcgcaagaactgggtagcaagtggagtcttctaaatgcatcaaattcaaagtttcatcagggtatttcgttccttccggtcaagttatgatacaagtcctcctttaacgttaattttcttccaataatgcatctagttaatcaatgtgtcatagaatcattgaagcttgatgttaaatgcctcaatgttttttaactggcacctgaaactaaacgattgctttactaaacgcagtgtactgcaccctcttccattcccctaagaagtgagaattgcaatgtcctgtctgatttcgttgagacctcctgaagtgccaattgagaactaattgcctgtgtttctgtttccttaacgtgtctttttgttttctcgttcattcttggtgtctcaaaattgatatttctgctgatatgtttggttcctattatcataggattctggagagattgcaggagagttgacaagaag

SEQ ID NO: 47109 - DNA, 405 bp, Manihot esculenta
  Intron number 1 from transcript cassava4.1_013973m (locus cassava4.1_013973m.g) derived from phytozome v7.0 (chr-ID scaffold12118; pos 207122 to 207526)
tggcctgctagggcgtacccaagaaaggaagaaaggttagattttatttcagtgcgttatccttcaattctcattaaccttatgagttacgatctctctctctctcacacacaacaacaaattgagagagatattatagataattacatgttctttcttatgtcatacttagaattaccatttgaattttctgaagaacactcaaagagggttacagggaaaatttggaaaaagaaaaggaaaaaagagggttgtaggtttttttccaattaaaaataatttattctgctatacatcttttaaagctatttttttctaaggaaaagaaaaaagaaaaactctaattacttgtggtgatgatggccattattattattattatcattgtatggttataggagtggc

SEQ ID NO: 47110 - DNA, 216 bp, Manihot esculenta
  Intron number 2 from transcript cassava4.1_013973m (locus cassava4.1_013973m.g) derived from phytozome v7.0 (chr-ID scaffold12118; pos 207679 to 207894)
tcgacaacagaaaacgtcgtcctagcctcttcgatgtaagtaattaattcactaagactacactaaaccataatgcaatgtaataattcaattttctattcaatttcaataaaaattttgattttatcacacataatataatttctttatgtggttgcttgcttaatctaactaattggatagtttccattaacttgtttgtgtttttcttgtcag

SEQ ID NO: 47111 - DNA, 854 bp, Manihot esculenta
  Intron number 1 from transcript cassava4.1_000037m (locus cassava4.1_000037m.g) derived from phytozome v7.0 (chr-ID scaffold02658; pos 843482 to 844335 reverse strand)
gggtctagacaggtaggggtttatggattttattttgttttggttataaattggttggtttcgcattgggctttacgaacttgaagcgtttttttttggcaagcaaatagttgtgaaattcgtgaaaatatcgttgatgcatgatcactgaatttggtaattaatgcgagtaatcagttgggtacttagttgagttttgatcaatcggcaagtttatggtccaactaggcatttactaatttaggcgggatgggaactggcattaaattgagttgctttggctgtaattatgcttcacctccactcttcaatggactcgatcaagcttaattactgcaactaagtggagtttgcttatcttgttgatgtttattgttgtgtaccatgattcctgtattcctcttttctttatttatttatttattaatgtttttaatgttcctccatcttaatggttggaaatgtatttggaggttcacggtaaaaaaatcaaaggcatgttgggtttgtgaagttttgtagatttgtttatttattttatttcatataactatattttgaggtccattcatcgtatagtaatgcagtgtttgattatggtttaaaactgtgtacaattacttataatgttaacctttctttggttttagttttatgccaaatattgattattattattattattatttttattgttagtacttttttttttcaattgtcgctgttttttgaattgctattctggatggaagaatttttcatgtcaaactttagtcatatatatgtactttcttttaaaattatgagctgttcatgcaggtgttgccacaccaattacttagaaaacctgaagg

SEQ ID NO: 47112 - DNA, 628 bp, Manihot esculenta
  Intron number 1 from transcript cassava4.1_003083m (locus cassava4.1_003083m.g) derived from phytozome v7.0 (chr-ID scaffold03245; pos 108845 to 109472 reverse strand)
ctgctgctgccagaggccaagttgaggtgaggcttcaattattgtgttaatatttcactttcttatctgtggacaaattgttttctttggtggttgtcaatttaattctttttatcatcttaacgtgaacttgattgtgttgttttctcctgctttcaagtgatagcagagacattggatgaagcaaagcagttttcactgaatttgtagtcatatgaagtttttttttggctttgaattttcttaaatctaaagtaataatggaaaggtgtgagatctagaatgcaagtttagatcatatccattacctccattgtcttataaatgtttcaaccggttaataatgtaatgaactactagaaatacttgcctgcacctagtcggaccaagcgggctcaccatgaaaaaaatagatgggacccacttcaatgtctcttatgtctatggtggatctggtcctcttaagaatttcctgtgaactacaatgaagtgggtgatccattgtttgtggaaaagaaaactgttagtgtctgaaaatgatgtgttacagtaacttgatcttttaattgtaacctctgttcttctttgtgcaggtagttaaagatcttacagcctcctttgatattat

SEQ ID NO: 47113 - DNA, 519 bp, Manihot esculenta
  Intron number 1 from transcript cassava4.1_003543m (locus cassava4.1_003543m.g) derived from phytozome v7.0 (chr-ID scaffold06916; pos 1731581 to 1732099)
actagcgggctcgctgtggttgctagtaggtgcaggtatgtgggtttcactttctggttctattctaaagcgcacgcgtattcatgcggggttgtagtttatgcaagtattgggtgattagatctggtttcctgttggtttttatgggtgttggtctattggttagggcgatatagaaaacgccaatggggttgattcagtttatatttgttgttttgtgttgatgtttaagttctgcgggtttacatttataattaaagatctgtatcgagtttgaaactgatcagaagttacttaactggggttgggatcgttggccattgttgcaatctgtttgattaattggattttgatggcaatatggatcgctctttcagtagcttgactattaagaatttattcaaatgattagaatttgcaatgagaacagctacttcgttgatgaacttgttaacttattctggatgttatatcttctgtacagacaactgagagtgcttgatctgcttgaatctgagg

SEQ ID NO: 47114 - DNA, 392 bp, Manihot esculenta
  Intron number 2 from transcript cassava4.1_005505m (locus cassava4.1_005505m.g) derived from phytozome v7.0 (chr-ID scaffold03245; pos 154985 to 155376)
ctgaattatctctcttagctgaaggggagattgaggtgaatattcgttatctcttcttctttttagcaaaatcgactgggcgagttagattatcaggagcttgatcacattatctaaatctgaagaattattgtgtagttcctgatatttaatgcatttgggtattttaagtcaaacctaatgatttcatttacccctttttgggtgtaaagtttaaagcagctactaatattttggatatgaaaaaggttaattgaagaatttgtttttttcatgcaatatatttgaaattaactgtaccatagttactagcttggagtggcattttatgttccccttttgtattttttttttttgttaaatgaatgttgttttgtgtcagtggcaacgga

SEQ ID NO: 47115 - DNA, 986 bp, Manihot esculenta
  Intron number 2 from transcript cassava4.1_010815m (locus cassava4.1_010815m.g) derived from phytozome v7.0 (chr-ID scaffold08059; pos 20511 to 21496 reverse strand)
ttacgggcagcttctggttctgctgattttactgcgtatttatcagtccatttattttatttatttgccctgaaagattttacaattttcttctacttcttgatgaatgctcccttttccatctgttcacactttatgtgcatgcatgttatgaatgtgtttgaaacattaaacataattgggtcagtgaatgtctgacagccagaggttttcttaattgtttcttaaaatacgttctgagtcctaaaatctggcacagcttcctttttttttttttctctcttcttgatgtagcatgaagcttacaaagataacatacactcacacatgaaatgaaaactgagagaataaacgctgcaggagtttttattgattcaaagctaatggaaaatacataatttctgttgtatttgtagagttataatgttcataaacaaagtaggaatacataactactaaatcggaaattaaaacaaaacaaataacttaaagaaacctgggtaaaataggaataaagctgtcattggaaaaggaagttaaatggctcatgaataaatacaaactattttatctttttatgcaggtagatgcttctataaatgcattttcatttcatgttttgtataagcttcttatgatcctgcaaaacctgtctcatctgagtcattcttcagttactagaggcgaagcattttgtcattttatttgttactggaggcatgattagttaatagtttaatattttcaaagtgtgtatagtagatgattccatatggtactctattggttgttcctatatatatggtggatgaaattttgttttcttatagtgtaataatcatgttttatgagatcggatgtgtagtttcagaactcttgaataggtattatcaatacacttacattgatttgttactatggagcatttgtgatcaatgtttgagaatttgacatgtccaacaatgtctcctgcaggaaagtgtggg

SEQ ID NO: 47116 - DNA, 339 bp, Manihot esculenta
  Intron number 1 from transcript cassava4.1_012192m (locus cassava4.1_012192m.g) derived from phytozome v7.0 (chr-ID scaffold08873; pos 36916 to 37254 reverse strand)
ctgaaactctcagaaaggcttgtgaaggttaatctatacatattccattttttttccttttctttttaaattttatgtgtatatcttattatttcatatagttgattatcttctgggctatgtgtttttataaatgggatcctatttgagtttatttgattctgtgatctctgattagtagtcgaccatcctccctccatctttctgtttgatcaatgccttccctttcgcacttatgtggcaaaatgcttctatcgtacaggagatgattaaggggaaacaaaagagatgaaaaaactgacatttggtattttctttgtgctgttaaaatttgatagg

SEQ ID NO: 47117 - DNA, 681 bp, Manihot esculenta
  Intron number 2 from transcript cassava4.1_022495m (locus cassava4.1_022495m.g) derived from phytozome v7.0 (chr-ID scaffold00010; pos 205191 to 205871)
taacaactggaggttaatcacttcttcttcaccatcatcttcaccatcatcttcgtttagtaatctgtttatctatcctttctgtgttcattgtcattgctagttagtgttaatcagttgagaatttgagatgtctgcttgtcaatttgatgtcccattcgaagtataatttgctttcagtcttatactggggctttttttctttgaacgtatctttcaaaagtttgttttatagtaggggtggggaaagcttaattccctagtaggctaaattttggcgaggtggaaaagtttagctccgcataatggatcaaacttgcaacttgcagctgacaccagtcaaatatgaatcaccactcgttgcaaaataataatcaggataagaagaggcagttatctcgtgcgtacctggtagatgggacacaagccaagccgtgattatgaatcatgacttgcccagctcaccaaaatttatccttattgtggaaattaaactttcctaactccttccatggaaataaatttcataaagcccttcaaaggaaacagccccttattttgttatatcacctgaatactattttattggaagttgaagcgttgccttgggattacttgggcaataaagaaatttctcttcataactctttccttatcccctttttacaggacctataccca

SEQ ID NO: 47118 - DNA, 751 bp, Manihot esculenta
  Intron number 1 from transcript cassava4.1_020580m (locus cassava4.1_020580m.g) derived from phytozome v7.0 (chr-ID scaffold10097; pos 273458 to 274208 reverse strand)
aacatttccactcgcaattttgatcaaacggtgatttttttttctttttcttttttcctattcatagctgcaatcatgaaaatcctctgtgggatttccatttttataatggcattagttttctgtatctcacatgctattagttactccatagtttgattctaagaattttgattattatctttgattgaagaatgatacaaattagtaaatgttcaatatgggaagagaaagcctttagtttctactgatttctcatatttttgtttcccttagtaatcattgatcttctcaaatgctgtttgcccttttatctgctattctttggtaattattgttttttttctgcgagtgtttaagaaatgagataacaatccccatgctttttttgaagaaaatattgtcggtgattctagccacatgatagccgtggaattcctgaactccataaggttcttctaccagttgttagttctccatttgaaacaaactacatattgccagttgctctatttcagtatgagcaatattctcaagatttctttaacaccattttcagacttctgaaccatgggtactttgttgatttttgaaatttgagtgaaaaaagaatattttcttattgaagggcttacattatactaatttattgaaaaattttatgattgttttatttgatatgtaataatggatgagtaggtgcaatataagttttctgctaatagagatactgttattgcagctcaaaaag

SEQ ID NO: 47119 - DNA, 964 bp, Manihot esculenta
  Intron number 1 from transcript cassava4.1_014163m (locus cassava4.1_014163m.g) derived from phytozome v7.0 (chr-ID scaffold12211; pos 546723 to 547686)
ttcttcgctttggattttttagtctttttctccttgtgtgtttggatctgagccaccgttgggtttcctggtaaaggaggtacctcataatcctctatagcatcccacaaatcacacgcttccaaaaaagcttacattcttactgcccatacctggtagtcttctccatcaaacactggtggagccaccactgagaaagaactctctccttccattaaaaaaattccttacagcagtagaattttagataaacactcagaaaaaaactcacaagtcactcagaaaaaactctcacagatcccgtaagaaatagggctctgataccactgttgtagtttagtaattaggaaagttatatatttgaattccaaaactgcaaatttatagagttacagcaaaacttagaatagctaaaaactagtgaccactactgccacttcttgcttaacaataaaacaaaaagtcttgctgaaaatcagctaaagaataggacaatcctaaagaccaggactacatggaacaggtcctgattcacttgctaacagtgtttcttttctacatgggagggaatgggatacctttaacaactctcattgacctcatctgtagggtcttaggtcttggacagttctaattcatggtagttcactgacataacataataccatcatttgtgcttcagaaatatggttatgcattgatgtttaaaggtgatgagaaatgtgctatagtcaactctctataaagtagttaaaacttgctccctcagaagtgggaaatgctgtttgtgaatcgttccatgaagctgaagttgattatgatgctttgctattaataaagttgattttgcaagctgaaaaatgtttattttgatgcatttttagttgacatttgcaagtttcctacactactctcacataggtaacaaggagtgttgatacacagcacggtcaactcagtccac

SEQ ID NO: 47120 - DNA, 572 bp, Manihot esculenta
  Intron number 2 from transcript cassava4.1_023169m (locus cassava4.1_023169m.g) derived from phytozome v7.0 (chr-ID scaffold03454; pos 261268 to 261839 reverse strand)
ggtcagaaagaaatattagggtcaaggttcccaaggtaaatcacatttgaatgttttgaattgttggtgtaaaataacttatgaaagaaatggtggctaattcttacaaaagacttcattaattcatattcctaatttatgtgacacattcaaaccaaaattttaaagtattattcatgccaatttttaccattctcttataaaccaattgacttagtgtagaactaagattgagtcgttgaccgactaattgaacaagtgatacgaaatacatagtgagatacttttccatgttgactagttggaaaaatataatatcatacatatttgaaaaatcaaatgactcacttcaatatcttaccttataatatatatatatatatagaatacctttttagactctacctatcaaactgtttttttcaagaggaaaattttgtatatacgataattatattacagttattaatcacagaagatgtcatatttaatcaatacttatcacataatacaacgattatttttcctttttccaaggggttactacaggtgcactcaccaaaaactatacc

SEQ ID NO: 47121 - DNA, 496 bp, Manihot esculenta
  Intron number 1 from transcript cassava4.1_023169m (locus cassava4.1_023169m.g) derived from phytozome v7.0 (chr-ID scaffold03454; pos 261932 to 262427 reverse strand)
gcttcatcatcagcgcaaagaccgcgaagaaggtaagaaacttcttcaatgcctacatttttaattaacatgtaataaaatataaattcgctgtagatgacttgtgtttcacgatcagaatcatcaatctttattaacctagaaaagttcaatgagttgtgaagggtgcttttttttttgtttcttttgtcaaacatcctttaagtaacatgcgaattgcccaaaggtttaaaggaactgtccgaaaaagcaaaacaagaaaagaaaaaaagaagcaatcccacttaatctatatattaatttcttggaaaaaaagaactcatcatcatatggtacagctatcacataatgaggttaaaaaaaaaatacaataatttgattacaaccatataattcaattaaatcaataggtaggttaaaaatgcatgaaaattttttcaaaaaatttccaatacaaaaggctgttagtcattttggtttttaattagcaggaaag

SEQ ID NO: 47122 - DNA, 680 bp, Manihot esculenta
  Intron number 1 from transcript cassava4.1_016460m (locus cassava4.1_016460m.g) derived from phytozome v7.0 (chr-ID scaffold11341; pos 177670 to 178349 reverse strand)
ggtactctctctctctctctctatgtctaaacttgttctcgcttagctcataatgcttcattgtaatggcggtatgtttcttatatacagtaaaaatggctgtactttggttttaaatctgttactttcctggttgttcgagtctttccgattttggcctcataaaaaaggcacctgaagataccatttcgtttgatccatttattattctgcttttgctcattcagaactttctcactctatttccggattaattaaagtatatttatggttgccactttcaaaaataaggaacgtaattttgatgttccctgatttgcaaaagagcaaaggcttgccttatttagctatacatttggttttgagttacatcatgttaaatgaaaatgcttaattgaatgagctaactttatgttcattttgtgtgcattttattattaccaaatatattctggtatcagccgtgaagcgttttactttttgttttggctattaattactgtttacaagtcttttggtgataatgctaagaagtcttgtcctctgtagttgcatttttgtttctgttctgaagtacatgggcgatcaaactgagcctccagttagcttctttttattttattttttcttttgacaatgtgtttgataaaaataggggcttacaagtatatctctgagtt

SEQ ID NO: 47123 - DNA, 671 bp, Manihot esculenta
  Intron number 1 from transcript cassava4.1_017788m (locus cassava4.1_017791m.g) derived from phytozome v7.0 (chr-ID scaffold06651; pos 133069 to 133739)
gagctacctctccatctcttgctgttctcaacaaggtcctctctctctctctctctctctctctctctctctctacacacacacacacacacacacacacttgcacacttttagttgtattgctgttgaatctgttaagaatttggatttattgaactttgatctgtcttattctgctaattttgtttatttgttgtttccattttgaacttatacgcttttctgaactttttctcccttcttgtgggtacagatttatccatcttttgggaaattgagtttgttcttttaatctttttcgcagtttattcttttatatgggttttgtggcttctgcttaaatattgatcttgcgtattgtttaagttgttgtgaagagtgtcccctgagagaaacttatagtatccttgaatttgattcttcattcgagattaaacccctcagcacgattcattttgcaagaaaagcaagcatatcaacttcttttaaaatataaattcttaaagatagttaaaaaattgaatagaaaagaaatcaattgacttaaattcttttgaaattcttgattcgaaacggcggttgaaattttagatattgagtttcttttgctttgttctttgcagtgtttttcttctctcttgaaattgctgcatctgttttactagtgaact

SEQ ID NO: 47124 - DNA, 769 bp, Manihot esculenta
  Intron number 1 from transcript cassava4.1_003717m (locus cassava4.1_003717m.g) derived from phytozome v7.0 (chr-ID scaffold03651; pos 388665 to 389433)
cccaaacgcgtattggagaaattccctgtaagttaagattttccatctacacatgtttttttttcttatatatatattttgaatctccctctctctgtttcccctccccattccctgcttggttcccgagaaaactaatgcatacttccccttttcttttaccaaaaaagaactactatatgattatactatggtaaattttagttaactgagaaataaattgcgggtatctgtcttgaatttcatttcagagtgttgagtacctaaaaaccaaatattcaaaaggaaaagtatatatgaatagtaatcatgtgaagtataatttatacatttattaagaaaatataaaaatgcaaaggaaatagtaatactttgatttttgggattggaaatgatatatatatataaaaaggagcgtagtggatgggtgggaggcttgttggccttagtttgacattgacttcaaggtctgctagtgctttgaatttagaggggcatggtggcaataagccaagacttttcttcttcttcctttttggttggaagctaatactttacgcgtatggtttactgtcaaaaattagttataagtcgttatttttgtccttttaactttggctttctctttttcaattgcataattacctgtgcctgtctttgttgtcattataactgcactgattgttatgaaattatttaatagatctctggccttgtagtttagcttaaattggtggtcatttcttgtttgcagacaccagaaatttgg

SEQ ID NO: 47125 - DNA, 210 bp, Manihot esculenta
  Intron number 2 from transcript cassava4.1_027173m (locus cassava4.1_027173m.g) derived from phytozome v7.0 (chr-ID scaffold07520; pos 1675985 to 1676194 reverse strand)
taatcaaagaaagtcctgcaagtagctcaaacaaagtgggtattcttacttcatcttccatttgattacccatttagtcaagttattgataattttagcaagatgaagcttggtcttttaattatatacatatagcacctttaccatctcagtgtttttttttttttcatgacttataaattgaaactttgaaggcctcagactttgaag

SEQ ID NO: 47126 - DNA, 663 bp, Manihot esculenta
  Intron number 1 from transcript cassava4.1_010581m (locus cassava4.1_010581m.g) derived from phytozome v7.0 (chr-ID scaffold07520; pos 152524 to 153186)
gacaccactgaaaagatcatcgccgagtacatgttcgtccttagacttttcttgcataacatgtacccttgcacgtattcatgtccgcgtaactctgtgtttgtgttcatgggtatgttcttcctttgtttgtttcgcttctggcccattctatcattttctttctgggatttttgtttattttcaagctctaaaagatgtctttggatatttggtttttgggattaaacagcttcagatgcacccttggctttttgcagttttttttgttctataaaatctcaggttttttctttgtgcactttttgagtggggtcctcgaggaaataatcttgtttctattcatcgaggctaaatatttattcttaatcttttttttttaatttttaatttttatttttgctgggaagcatttcccgttcttcttcccatgtctatggtggataaattggatgtttattaagttttcataatctacgattggaaatgtgtttagaaatattggtgctatttttctacgaggttttattagccactggtgtattcttgtttgtgtttccaacggatttttgcgcttaactctgctttgcaccgaatccaattggtctatgtttttctttaaattacacctttctttactttgacaggatcggcggatcgggc

SEQ ID NO: 47127 - DNA, 407 bp, Manihot esculenta
  Intron number 1 from transcript cassava4.1_001394m (locus cassava4.1_001394m.g) derived from phytozome v7.0 (chr-ID scaffold04457; pos 269704 to 270110 reverse strand)
gcgtctgcttcttccttgtcaggtgcctccactttagcttctgaagattttgacgaattttgtctttgaattgttttcctaatcttgtgttagttgtactgtaagcacggtttatcaattccgcagtttgattgtgcttagccccttgtttggatgctcatcaaatgtgtctttgaatgagataatttttataccttagggatccgagtttacagtaacgtgttcatttagttgaattcatttttctgtagtagtttaggctaacttttgttttctttctatgtttatacttctgcaagtcttggattaaaataagctgaagatgaatttggctaaatttttttctgtttatcatatgatttcgatgccttatttttttttggttgtttatttttagtatcattgga

SEQ ID NO: 47128 - DNA, 886 bp, Manihot esculenta
  Intron number 2 from transcript cassava4.1_015336m (locus cassava4.1_015336m.g) derived from phytozome v7.0 (chr-ID scaffold03750; pos 983698 to 984583)
cttggtatgccatttcaacgcaatgtttcttatttaccggctttcatttcttcaatttgtgttcccctctatagagatgtctattattttttctagtgtaattctgcagtttggacactgtttcattaagagtaaaatattgttaatttttaaatgaatgaataatttgaaaatagtgaagattatgatatgaatggacgagaaaatcaattgttaattgcatttgtgggcattcaacttattttggctgcttatactttacatcttcagtttgatatcattattataacatttaggtgaatctcaactccaaggttcgtcctaagatgttaagttaaccgatccatttcatgcaatttatgggctggttcgtatcacaatgcaaggatagttttaaaggtttccatgctctaatttttggttgtatggggtgtggtgcctggatggaatggaattcctctcataatagcaaataggatattcatattttttacttcgattcaggacatccagcatcaaagcatgttcggaactgggtctgaattccttgtttattgacattaacgttaaactcatggaactacataaggctttgccagaaatcttaaatgagatatctggttcacaattttacttatttattctttctcttatttcttcagaattaaagggaaaatgctaattacaagatataaagatgtctatgaaaacttcaagttttctgacactgtatgataaacacagatttgaaaattccattggacttgagtacagttctgaaatattttgggtggcctcagttttctagctgcaaccttcacttttagatgttgctaactttctgtttctccttattctagctctttggaagcagttaataggattt

SEQ ID NO: 47129 - DNA, 606 bp, Manihot esculenta
  Intron number 1 from transcript cassava4.1_016050m (locus cassava4.1_016050m.g) derived from phytozome v7.0 (chr-ID scaffold07520; pos 1499023 to 1499628)
ttcacgccaagcgattctctgtaagttcatttcatattcgttcaatggctatgactaatttgcattcagttccatttcatttttgtctttgttggtactgtatttttctgttttattattcttcttctttttgcttgcttagaagaataacatttacttttgggtgccctttttttggattcctgcatctgttctagaacttccccaacaaaaatggaagagaatacttttgggttttttttttttttctatttgtcaaatggttttgattttagttcatttcatggttgatttcattctacctatagggttgcttgtggttcttctctagtaagctggttttctttcgtttgatctttgtgagtctctgtagtgtatctttctttttgcctctgatttatagttacttacttctcatttttagaatagcatagaaatctttttctttatttttttttctgcgtgattaattgatcttcattgaatattctttgggagattttgggtatgtttttctttttggaatttacatatccttgttagcttcctcaccgagtcattgaggttgttctgttttctgtgattaacttatagcgaaaagtaaac

SEQ ID NO: 47130 - DNA, 543 bp, Manihot esculenta
  Intron number 3 from transcript cassava4.1_016050m (locus cassava4.1_016050m.g) derived from phytozome v7.0 (chr-ID scaffold07520; pos 1499884 to 1500426)
caggaccaggagctccatctgttttcaactgtgtaagttttgtttccttaagtattttgcaaactcttgcttgggttggatcattcattcttccactattaaataattccctcttcatctagtagaactggtgagatttgagagtgttcttttggagcttggagagagttcccatggatcctaaggtgcccccatccccaaaaagaaaagaagtgtgccttagggatggagcctagactaatgctgctagagatgtgtgaccttgggctgggtgtgcttggattctaggcattaccattggtaactagaggtcaatttataaaatgatattgaaaatagggatatggtcactttgattattattgctcaacactgtcctaaaaaggatccttgatgatcaagtctggaactatgggtcattgttccttgaggaccatatgttgtttttgcgtttgtgttgttatttttgccttttttttcttaacttaatgtggttttgtaatggcaggtgattgaaattggcaaagggagcaaggttaagta

SEQ ID NO: 47131 - DNA, 592 bp, Manihot esculenta
  Intron number 4 from transcript cassava4.1_016050m (locus cassava4.1_016050m.g) derived from phytozome v7.0 (chr-ID scaffold07520; pos 1500423 to 1501014)
agtacgagcttgacaagataagcggtcttataaaagtacaaacttcttcctttcccattattccttctgcaacttgatgctctttcagatagattatcttaccactcaaatccattatcttttataataaggcttttttttttcaaaaaaaataaaaattattttggttcataataatgagtaggaccaacttgttctattgtgcactcgggatccttgtgatgctctctcctctttcttccttttaaatttgtataatttgattggctatattgttaaaataaattaccttgacctcctgaagaagtgtattaaatccctatcactcatgatgaattttatatctttgtaatatactgctaaaccatgacttccatgcaattgactcgagtctttaacctcctttataatttcaatagttgttataaataataatttccattgttctgtatgatctttgcttagatcaccatgttgctggggtgttgacatgcatgtgaatttgttgtgttttttaacatgaagaacaggacaatgattatcaatttcatgattaggttgatcgtgttctctactcatctgttgtttaccc

SEQ ID NO: 47132 - DNA, 496 bp, Manihot esculenta
  Intron number 2 from transcript cassava4.1_013208m (locus cassava4.1_013208m.g) derived from phytozome v7.0 (chr-ID scaffold07520; pos 2452881 to 2453376 reverse strand)
gggaacctcgggcttttatctatcataattttttggttagttttttttttccttcgtattttctactgaatttatgacttgggattacctgtttcaattgagttttgaattcttctatgttctgggattggcaaaaacatgccatattcaatgtggtttaatgggattttttatttagttaaacttcggagttcagacacacgcatttttttaaaataatgtcatccgcagttaacttggcagtagagaaattcgtctaaatatggatgcagttctgaaaggttgaattatgaagaaatttggaaatgatcgagtcttctgttttatatgttgctttcgtagtttaagcctgtattactcccaagtttgtcttcatggttgaaatgttttccattagcatttttgattcttatcttagatttaatgcttagtcaagtgatgccatctatagcagccactgaaatttggatgattacattgggcagagcgaagagga

SEQ ID NO: 47133 - DNA, 778 bp, Manihot esculenta
  Intron number 4 from transcript cassava4.1_013914m (locus cassava4.1_013914m.g) derived from phytozome v7.0 (chr-ID scaffold05421; pos 82947 to 83724 reverse strand)
actctctagcgactttccacactctccacccaaaggtttgtgaataaacatgttgattaattattcttcatcattgtttattcaatttagtgggcaaggaagattttcttttggcgaaggaaaatttggtgttaattggctgcttttctttatatgatagtgtagagttcagtttggctttatttggaatgatttattttataaaaaagaattcagatgaattctaaaaaatcatgcatgattcaatttcttttaaaacaaattatttgcagttaaaaatatcaaattcttaaattacaaataagaaaattgatagaaaaaaaaagccaatagaattgaattcttgtaaaattcttgatttcaaataaggacggtgtcaggaactttgctattctagctatgtagctattttgtatggacccaatgaccaaaaaatttcaaatttgtacctgcattttcatttttttagctcaaatttttaattgtatcaattttattctcaagctttgagttagtttaactttattaatcatctaaacattaatgttttgtgctagtcagagcatgctatcttactgatttatgtatttgacctatcacatgaattcactgttacaattaaaacaaatgttaaaggttgaagatcatattaataaaattaaatgttttgattaaatttgaaaatgtgttaaaagatttgcaattttttttatatatgttgtaattttgaaatgttgttgaagggtatttcctgacaaagattttccatccaaatatt

SEQ ID NO: 47134 - DNA, 403 bp, Manihot esculenta
  Intron number 1 from transcript cassava4.1_013914m (locus cassava4.1_013914m.g) derived from phytozome v7.0 (chr-ID scaffold05421; pos 84451 to 84853 reverse strand)
ctctctctatctctcgttggacggctggagaacaggtgatttctcatcttggttttcttctttcatctgtagtggttaatgaatgatcaatctatgtctaaattttcaatgtactactaatccaagtttttttgatcgttttggctgattgtgaattaattcctttcgtatgtcttgattattattgatatattaaatgattccgatactgtgtttctctgtgttccaatttttttggttcatctgcttgaatggtatgatatacttttgtgtttagtgttttgaaaatcctgaccacttttcatgcctgttttccaaattggaacaaactgctaaactgaaacaatgaatcatcttgctatttacaggttatttcatcatttggtgaagttttggcacatca

SEQ ID NO: 47135 - DNA, 615 bp, Manihot esculenta
  Intron number 1 from transcript cassava4.1_007568m (locus cassava4.1_007568m.g) derived from phytozome v7.0 (chr-ID scaffold02421; pos 36116 to 36730 reverse strand)
accgttcagaacgacgggatctctggtgttaccaggtatatacatgcacatttatatagagttaagccttcgaactcttggatttcggaaatggctgtcatttgtttcctgtttctttgagatgtatgctgctccacgtacaagtttcgaaacagagcttcccctgttttattatgttcattttctttgtttttttctggtgagtttgattctttatgcttttgattttcgaatcaaaattttaactgcattaactggttttcatgtagctttcaagactactttcgttccgttcttgaattcttaaagaaaataagttttcagttagaagtcagaatttctttttcatgtacttgaatatttcaagattttaaggggtttgtgcatcttgttaactatctgttggcgactccattaatagcttctgttcctcttcatttattattcatctctctctctccacaagaagtagcgcgagaggtcacatggcttttaatgagctacacccagagagagagagtagaatttccgttttagtccttatgcttttctctaattgtcatttgtcgttattttgcaggaaagaagaaacagagaagttgcagacctccaaga

SEQ ID NO: 47136 - DNA, 624 bp, Manihot esculenta
  Intron number 3 from transcript cassava4.1_023179m (locus cassava4.1_023179m.g) derived from phytozome v7.0 (chr-ID scaffold07520; pos 414709 to 415332)
ttgcaaggtgagcaactcccatttctgcaatagataggttcaattagttcagcaagtggtgctgctgagaattattaatatgataaagcaatcatacctgctgttctctaaatgggatctaattctggctgaacttccacacataattctgataaaatcatgacacaaattgattaacgacgacaaattgataagaaattgtcattttgatattggaaaaaaaaaaatgatatctgcggaaacctcgtttatatcacatcccattattgtatcgctgataaataaaacatttctgttctttgctgcataaccataaatgcctgatgtaactgaagacatttatatgcatttcaataagtttctatacaaatgcagctcgagtacaatttgatttataacaaattatgatctcctgagctcatatgcatttcaatgagttcctaaaaaatgcagcttgaaaattgcatcaaacatttgcatgttatgatcaaggtgatgctgttgagtacattgatggataacaaactatgatctcctgagcttacattatagaagttatttgtgtcacttttgatttgatctcaatgtcccattaaaatatttgacaggttacctgggtagaac

SEQ ID NO: 47137 - DNA, 629 bp, Manihot esculenta
  Intron number 1 from transcript cassava4.1_003725m (locus cassava4.1_003725m.g) derived from phytozome v7.0 (chr-ID scaffold04457; pos 1113356 to 1113984 reverse strand)
gagctttttccacaggtgtccgtcttacctcagaacttatatatggttaaataaagattatgttcttgtagcatgctcttggtgtgcgaatgaataaatgttgaagttttaaacctgtaggaaaataagtttctactgtggaaattattttggtgaatgcaaactgatgaatatatgcgtacctgaatattttcttgaatctgtatgttttatgctaattgcgaatgaaagcacctgaaacagatgattcttgtttacaaccttctttagaggtatcagcaaccaacaacactctacctcggccaacaggcaattcgttaatcatgaagaatatttatgttcatatctagccagtacattttttggtatttttgttatcggttcatttaatttgaaatgttccttttatattttgatctacatgcaactatgtagtcttgagcaagttgcctacagttgcaactgataactaaagcgcaaaatatatatatatatatatatttccttcttctctgctccttttttcaaagtactggctttattctttaagaagaaaaaaacactggctttatttccctttatattgtggttgtaatatttgaagttcaatgtcataggtggactcgcgc

SEQ ID NO: 47138 - DNA, 700 bp, Manihot esculenta
  Intron number 3 from transcript cassava4.1_021583m (locus cassava4.1_021583m.g) derived from phytozome v7.0 (chr-ID scaffold09354; pos 90123 to 90822)
ctgttgttactgcccttaacttgggaagatataaggcaagtgatttatttctgattttctttctttctttctttctcttaccctccccatcccccccaccccccttttatgtggtcagtgttcttttatggttccaaactaatttatatgtaagtttattggtctatttctttttttttttatctgtgggtggaaatagtgcagctactaagctaccttaattttgtctgaagacaaacttttctaccccaaggatctggttctttgtatttctaagattaaaaaaacaagggctgtgccaccctgatttttttacaccggctgaatatttaattcttaaacttttgtcaagaagtctagctttaaggtgcctggtcatgccagtttgcataccgattgaatcaaaatgtactaattgataaaaaagaactttgtatatgcaaaatttgcatggacgaagctatctgtgaaagatccccaagctgaaatctactttgaccaagactttctgatgactatgactatctcattttgtacctgtcttataaggacatgttcagggtcttttcctatcaaacctctgttgtgaatgctatgtgatgagagttgtgattttaatttactggtaactagtggttttactgagcagttcttttatgttggctaatgaattgcgggtcggttactaataggatcataa

SEQ ID NO: 47139 - DNA, 612 bp, Manihot esculenta
  Intron number 1 from transcript cassava4.1_000262m (locus cassava4.1_000262m.g) derived from phytozome v7.0 (chr-ID scaffold11341; pos 752709 to 753320 reverse strand)
gaagctccattgttagcagagaagtaaggatattctctttgatatcaagctggaattaaatgaaattctggcaaaatacgtatcctgctcaatactgggaaagaacaaatacaaccaagacaaatatatgcttatgactcattgattattggaacttagctgtttatttgggatcattttttttatccaaagtgaatgcaaattaaacgagagatttgaggaagaaagatctacggatttcaaaggcttctaaattagccttgttgagtttagtggtctgaacttcaagctagtcaagatataatatgtttattcatgttcaaaatctttaattttagtaactttaatgagtgttacataaagaaaagattattagagagatcttatgtcctggatgtttattaaaaatcaatcagttgtgaaagtagttcaaagcagaaaccgtgtttgaactttgaataaataaataattttgattataatacccagacttggacacaactttttaactcattgacttctgtgtctagaaaaaataatgtcttcctagttgttttattgattaatgtacttttaccttttgaatgcaggttgatacattggagaaggata

SEQ ID NO: 47140 - DNA, 436 bp, Manihot esculenta
  Intron number 2 from transcript cassava4.1_008236m (locus cassava4.1_008236m.g) derived from phytozome v7.0 (chr-ID scaffold06158; pos 530188 to 530623)
tcatcatcatcccttcatctcccttatcatcccaggtctcttccaattttccccttataattccctcacctttgtttgcctgcctagaaagacgctggcagttaatcaatttaatttcgttatataagattcaaaatatttagagctataaaaacttcccatttttctctgtacagctcagttttaaaaaataataattttacatagatcaaattttgtaagaaaatgtgaaaattgttttacagaaaaatatttgccagaattttatccacaaaaaaaaaatccagaaacaaatagagttctcagcttaaaaaaaaaaaaattaataggtgttataactgaggtgtatttttatcatattttgttgaatgtgatttttttttttttcaattgatcggggatgacttgagcaggaagcaggaagttgaaacagtga

SEQ ID NO: 47141 - DNA, 642 bp, Manihot esculenta
  Intron number 1 from transcript cassava4.1_033069m (locus cassava4.1_033069m.g) derived from phytozome v7.0 (chr-ID scaffold07351; pos 369898 to 370539)
ctttcatttctcttttggtaggttctcattgtagcagaagtaaaatatagataattttaacgtacgcctcatttgaagcaagtaatgaaattgtgtgctttgaagtcttatctaagtgagaatgaatagttaatatgtctttggactttacaatatatgagatgcagaaaaagtaaatgtgggatcttggcatcaaggatatttgagaatattcttattctgtttacatcttgtcagaagtttctgtaaaacaaaatccaaataaacaaacatttttctccccttgcggagtaggaggtgcgatacattgtcaaggatgtttacaatagtctaaattaacgttcaaaagaaccaaatagtttcaagtttcattgttgcatcttcatcaattttactggactcagaagggatcttagagtagacaaaagaaggaagttaaagggtttcttgaggccattaaatttgggagccaatacaggatatattatgttcttatgttttaggttgctttattcatggtagctttggatttgttgaactgaagcatgttaaatgtgtatgactctactttctccctgctatttctacttttgatatcaagcttctgttttaattttcgaagcaacattctcacaggtattc

SEQ ID NO: 47142 - DNA, 981 bp, Manihot esculenta
  Intron number 1 from transcript cassava4.1_000268m (locus cassava4.1_000268m.g) derived from phytozome v7.0 (chr-ID scaffold04457; pos 688974 to 689954 reverse strand)
gacccagatattgctctctcttacatagtaagattttttttcctcgttaaataaccttgataagtaattttcttctcctttttatttttggtggaattttgattttggctgtgttagacatcacatgttgactttttttttttctccttttttgttgggaaggtatgtttgagatccgaactgtgaatatcgtgggattttgagtcttatttttttattgattacaatgcagagtgtaggttggttatatttgattaatatgttattgctgttcaaaaggagggaataaatggaaattatgcatcatattctgaatgtgttcggatatggagacaaaattggtagtatgaaatttttttccaatgctggggttttgttagctgtataagcattgacatgtttctgtgatttttgtctgatctaccagatggttggagaaatatctgtattttggtttcttagtgttataatgacttgaattataagttcaaatggtttgttagtgtggcactgatccaagatgcaatatcaagtccaaagaccgaagagactgagcatataattagttgtctatattttgccaaatatgcttgtatggattgtgtaatgcaaaagcttcaacatttttcaaatttgtgaggtgtctttgaaattttagctttcatttcaggactcgtcattacgataatttgaattacaactccctagatttgactcttaagagctagcattcttaactatcttatagtgggactatgaaacatgatttctcttgaagttatagtaactagccatacaacattatatctaaactctggtctttcagttcgtgttgtacagttgtattctgtcagtatttgttctagacacacacacacacacacacacacatatatattatatcagccaagtgcctcgtgatgggtaattagtattgttttttatttttcctttgaactttgtagggtgaaaaacttcagg

SEQ ID NO: 47143 - DNA, 801 bp, Manihot esculenta
  Intron number 1 from transcript cassava4.1_001854m (locus cassava4.1_001854m.g) derived from phytozome v7.0 (chr-ID scaffold08423; pos 51969 to 52769 reverse strand)
ggtgtcaccttcgaccaattcccttattacctcaggtgtataatcacatttctcaattcttatgccaatgcatttccatcatgaatcattccttacttcttgaaatcaaagtttgatacttcattttgtagtggtttggtttttatttattctttataacaaaaaaaaaaaaaaaagagttcttttgttcatcttatctaaacttgttatctttagaggatttatattgttgggtttttagagacaatgaacccatgaaaataggagcagagattgattgttttttcatgaaataattgagtattagagcacaataatccttttgattattttcagtgcatgcatatataataataataattggatttttttggagtttttgtagcatatgcttgcatcgttaacctttgaatttaatttttaattttgagttgaatacgggctcccattatatctggtattttagatttattttcctttattttttccatagagttggattttctttttctctttctttgtcttttgaaggttattaattcttataaatatttgtagataatgttttatgtatggttggatattgatttggaatcatattttgggttcatcaaatgtaatgaagacttaaaataaaacttcatgatggaggctactgatactgatataaaacataggggttcctaagaaccatattataaaataacttcttatgctgaaacttttttaaagtattatctaatatccttcttgattatattaacagtgagcagactagagcattactaacaagtgctgcat

SEQ ID NO: 47144 - DNA, 931 bp, Manihot esculenta
  Intron number 1 from transcript cassava4.1_017889m (locus cassava4.1_017889m.g) derived from phytozome v7.0 (chr-ID scaffold06591; pos 28582 to 29512 reverse strand)
ccaagcgggctgtcggtgttgaggtcaacaagcaggtataaatatggaaaatttttcttgatttggtgttttgcttcttgaaagcaatgaagattggttattaacttatatgtattttatgcttatgaattggggttttctatctctttttttcctgggttttcattgtcattttgattggtgtgtgtttgatcattaggtttccgatgtatgtatcatacattatgtaatagtttttcactccttttttcaggggagatgatagctaatttgtgagaatctagttattttgatcatgtgggtgatgatgctactttgattaaggaatttggttgaatgttcatgtgcttgctattatatggactggttgtagctctttggttgttgggtttgggctctgacttcgatttacttcattttgtttggtattgtgcaactgaatggtttcagctttagacactatgtgaggggaagaggttactgaacccttgttttctttctttagaaggcatgcactcgaccggcgtgttctgattattctgcccctggtacaaatgttcagattttatgggtgctgttgtctggtttcatccgtctcagttaatgctagtttaactcgtagacttttgaaattttgccttggtgttcttatgtttggtttatagttttcagttctgttgttaattgtcatggatgattatttacagcgtctgagactaaaggatttgcttgacattagagagcaatcaagtaaatggcttaatttttaactgaatcagtttttaaccttaggttattgcttcatgtgtgctctgtttcacactgacctgtgtatttgcattctttgattgagtgtttaagctgcgaactataatgatggatattatttgcctattataggtgggtaataggattatcaagaagaggatcc

SEQ ID NO: 47145 - DNA, 429 bp, Manihot esculenta
  Intron number 1 from transcript cassava4.1_015239m (locus cassava4.1_015239m.g) derived from phytozome v7.0 (chr-ID scaffold01945; pos 599469 to 599897 reverse strand)
atatccatcgcacatcaggctattctcaatccttggtaagttttatttttgatcctgtccttgttttgataatttgatacatgttcaataagtatgtgcaaagtccctgaaattagtaaccaatatgtaaatttctctgcttcattgtttggtctagttaaaaatttaattagtgagagttgtgctatgattgctgatttttcattacacccttaatatttcacaaggtaaatggacatatggtcaagtatattatgtttctctgattttctccagggaggtctatgatctataaagtttttcaaaagcttccctgcgattttgaattgggatcttttcttctttcttctagagcattttgagtaattttatttctgcattttcatcaatacaggcagggtgctcaaagttctttcagatcttcaatag

SEQ ID NO: 47146 - DNA, 991 bp, Manihot esculenta
  Intron number 1 from transcript cassava4.1_016726m (locus cassava4.1_016726m.g) derived from phytozome v7.0 (chr-ID scaffold01624; pos 196854 to 197844)
aggtatagttttaattgtagcttaggaacaaaattcgagtcttaaataaaatatcgttcagcttaatttaagctcttagattatgagaaaacttttctaagtgaaattcacggtatagtttaatgttttctatgattttgttatttgcattttattatttaggtggaaaaatagtttggataagctttggctcatacatgatccaagttcagctgagcttgatatttgaattatgttactatttcccttttgtattttaaacagaggactacttggtttttgcagttcctaatcataaattaggattttgaatatttgatactgaatacataacacctcagtgccccccccctagaatgggctatgatattgtttaggatgcttttttttttaaacgaaccaagggaatgtttgttatatatgatttttttccttttgctttttattgtttcttttctgcttgtgaaacggaacttgtaataaattctggatatgctttagtcatttgcttttagtggtagaatctactaaaagtttttggtttgagattcaggagattcctactcccacaggtttaactaagtctgttcctctgtgcgttgatgtactcaattcttagttcattcatccaaaggaagaggaatttggttcactgcattttctttagaacagtgattcttgagctcatgtgattttgttggtataatagctggcctaaaggttaataatgcaattcttgccattaattgaaaaatagaaaagtcgtccatattaggggtgcttaatagaataccgtaaacgttgccaaatatccttttcatacctaggacttgacctacagttattgtgaatcacggcagttgatgcaattttaatgtggaaaaacattttttattatcagataaagagtttccttacttttactttagatgtttttgcatgtctttttttccctgctgcagttgtgcgaccttctcaaatctagagttgg

SEQ ID NO: 47147 - DNA, 465 bp, Manihot esculenta
  Intron number 1 from transcript cassava4.1_001099m (locus cassava4.1_001099m.g) derived from phytozome v7.0 (chr-ID scaffold06043; pos 6676 to 7140)
ctgtcacctatattgcgtcttctccttcctctctggtataattaatcagtgctcgctttctcttatgttttagtagctagctacttcggaggagaaataaaattgagttaagcatgaatgttgattttaacgagttaattgtccctgagcaacacctctgtttaaggaatgaatgtggttctgctcttctacttaatggaggtgtttgttttcctggaatctagagaatgaagagagcattattttttaaaggtttacaagggttaatggaaaattttaaaaacttttaatatttttaggagaatgtttaacattttttttctatagatatagtagtatttgtttacttttcacgtccagaattttgagtttttttctagaatccctggcagtctatgttcacaaattgtgtagatgagagagtcaaaaattgactttgaatttgaatgtaggttgccagtgggt

SEQ ID NO: 47148 - DNA, 945 bp, Manihot esculenta
  Intron number 2 from transcript cassava4.1_000753m (locus cassava4.1_000753m.g) derived from phytozome v7.0 (chr-ID scaffold04177; pos 196435 to 197379 reverse strand)
tagtcaaagtgcacaagaagaccatagagaagtaagtttataacacttaaaggctttcttgttctatatgttctcttgtgttgtggtggatccactattatctttttcccaaagtggcctaatctaacattctagcatataaagccattccttgtaaatgggtgttatgattataatcttgactgagtgtacatattcctggcaatattgttctgactatatgtgtgaactgagttatgattctgtcacataagagcttaggagctatgtgaatgggatcatgattggggcaagtcctttgcagcttattgaaagcattgatgactgaattttttttccacacctatctgaaatttctattggaaaagagaatttaaaagaattcttttttttttgttttcagtttgttaataacatactcttttatgatttaattaattaaggtggtcaaaatttcatgatttatagtttaagtctgggcattgaactgcaaatttgatgctgtaagccagagtctcaatcagtactttcatatatttatggcgtgattctcagaggttgggggagtctcctaacatggttaagttttatttttatcttctgctttatgtcattgctctcttgttgcatgtaacttttgcattatctagactatgactttgagtactcctttaaaggagtacaatttttgtttttctttgtctcacatttatattttcatttttttagaaaaatctttgccaactcctgactagctttcttacagtatgtgctatagtcagtaattgattagttgtcaaattcttttatcttccgtgatttatccatactaatacttaatcatgtgagcacttgtttatcacatttaaaagaaccagtttagttatgtttttttttctttggatacaaggtggcattgatcctttttagctctttaactgaaac

SEQ ID NO: 47149 - DNA, 584 bp, Manihot esculenta
  Intron number 1 from transcript cassava4.1_000753m (locus cassava4.1_000753m.g) derived from phytozome v7.0 (chr-ID scaffold04177; pos 197447 to 198030 reverse strand)
aactccctcattgagagcatcactctggagcacaggttcttcgtttgttctttgattgaactatcactggtttacattttttttctaggtttattacaattttcttgtttaatcaattatatttttattgaatttgttcagttcgtagcatccaattgtttccttatactgttgtgaatttgataagtccagaagctcaaaggttattcgaggatcaccaacaagaattccattacaaatgtcaagttggttacgaagtaactaatttaaagattatagcgcttaactatcttaagcatcattctttgcaattgtcatcgtacaacattaagaatttaatgcttttgtagggtgttttttacccttatggatacttgtggttgtctatgtaactgatagtaattaaaagtactattacactcaatggagtgcaaatgattggtgcctttcgactgggctccaagggcctttggtgctcagttgtgagtatcacctttaacacagtgttgcaattacaacctttttctaactaacgcaatgttgttgcagtccaccagtgaggcgagcaagtgcaaacgttgtga

SEQ ID NO: 47150 - DNA, 627 bp, Manihot esculenta
  Intron number 1 from transcript cassava4.1_003107m (locus cassava4.1_003107m.g) derived from phytozome v7.0 (chr-ID scaffold10689; pos 550583 to 551209 reverse strand)
ctcttcttctcacagcacaagagtcctgctcataggtatgtttcttattcaagaaacggataaaagatgcaatctttcttttgttatctttgatggggttctttgggtgttttcctttatgggttttgtttattttgtttaaagttcgaatttcttttttggtttctgggttagcttagattgaatgttagctgatcttactagaacgaggtcttgttttcttttgcttgtgggtagcgggttgactatttatgttagctttggttcttttgttgttaatctgtcatctgagagcttccttctgcttgtttaagtctgaaaatttgggaaatacaagttggactaaatggtattggaagagtttaatctgacttcttcaattcgtctactgatgttatctaattttatatctcacaggttcttaggactttctatttttaggttgctgggaaaaattagttttgttgcttgcaatcactgaattatttgagactcataattgtagtttcttcttttggattcctcttatgtatgtatttggttgtgcttttaagtaattagattgttgttccctttgacagagtggatttttgatatctacgtgttgtaattatgcagggttcgggt

SEQ ID NO: 47151 - DNA, 782 bp, Manihot esculenta
  Intron number 3 from transcript cassava4.1_017818m (locus cassava4.1_017818m.g) derived from phytozome v7.0 (chr-ID scaffold11341; pos 317290 to 318071 reverse strand)
cgtcaggaaggcgtgaacaaggtgatcgtcctgataatttatttgtatgctcaagtgtcatgttcattatccagtctttttcggcaactaccacattggtgtgaaattgttttgtgcatacagactgtcacaaaattttgggaactgagaaacttttaatcaatcagatgtcttttcttgctatttcgcattgagattgccttagtagctcatgcaagtttatattgaacactagtatcagagtccacatacatgctgttgacacatgagaaatttcaattttggaataaaggataaagaatcataagcgttcattagtgttgctggagcctcatctatggatttaataacctctaaaactgcttgggaggtatatttttcatccgcatgatattttagatattccactttaatttgaatgtttattcttagcacctgcatccatgctagagatgaggaatatttttggtacagaatctacttcagctgaatctgctcaggttctgtttagtttttgttattcattcatatgaaggttcagtttttaggtccaagctgatgcaaactttagaattccaagttctttttgacatccagaaataatcacgaggtcttctagattcttcaccttgaaacacgtttagaagatctccaattagtgagactaagcttttgtttccaactatgtagtttttgataataattttcattttgcaagggcaatatagttatcattctttaatgtgttctggctacaggaacctagcagtaaagtttatttc

SEQ ID NO: 47152 - DNA, 742 bp, Manihot esculenta
  Intron number 2 from transcript cassava4.1_033119m (locus cassava4.1_033119m.g) derived from phytozome v7.0 (chr-ID scaffold00708; pos 80735 to 81476 reverse strand)
gtattagaggaacagagcaggtaagtattttcttgttttcctcctatcctttcttgctttattggtccatatgattaatgaatcatttcatttgtgatttgagcttgccttctcaatgtaataaaattcctaaatactaaatgagaggtcggccgacagggtaattgttgtagcataacagattgggatgcttgtttcttttcacatcttacccactaaagtaaatagtcttcttcatttattctgaagttatcatcaatagatagttacatgacaaacttttgtttactgttttgagattgcaatttgaatgattcccagtcactttcttaactcccaagtttgttttgtcaacacaagtcaactgttgataacttgatatttgttgttgctgagagtcttggaggggggctagtaacagacttctatggataagtatatatcataatgttattgcaaggagtgcacattcttcttggttctgattgatagttttcttgggtaatctgttgatcatctagtgaggatacagcatttggatgattatttataatattgtaggtttctttaatatgatttaattataattgcttgttgattaatggacactgattgcaggtatagtttactttttcattttttttttgctacattaggatatattttccaagagatggaaagaaaattgaccaacttgtatgtctgcttggttttctcagatttgcccttgacatagatttgg

SEQ ID NO: 47153 - DNA, 993 bp, Manihot esculenta
  Intron number 1 from transcript cassava4.1_016730m (locus cassava4.1_016730m.g) derived from phytozome v7.0 (chr-ID scaffold02421; pos 746782 to 747774)
cgttttctgctaggagaagataccagaacgacgaggtatttttccttgtccttgttcttctttttaaaatgaatttggtggttaaatttgatgtgggtttctttggtgtgatttttctttttgtgtggaaatttgagggggaaaaagggtttcgctaatgatttgctgatgtgtgtgcgatgggtactttgttcctctttgtttttctcgattcttgggctttgatgcaggtcttggaaaatgatttttcatgcatttttttccctgtcaaattttgctattttgggtttatttgcctcagttttcccatctgtttctctgtataaacctttgtttatggagttattcttgtagagttacagttaaataaggatgattgactttagagtggataaattgacaattttcttgatttatttaatggtggatttgggttggtctagaatcttgatgggagtgtcataaaccaaaggtatgacttcaagcgagaaaatttccctagaaactaaggcggaaactttgaatttttaggtgttctattgaccccaattgttagttttttccaggcaaagttagtggagacttctattttttaggggttatcaattagtggaagctgagaattcagattctgatttcttcaaagttaatttctttgtggaccttctgtcaaaatccatagaatttatgtttgtagccaaatgtgcattatctgctcctttttttattggtattcataacttacattgaattatttgattgaacaaagcaattttctagtttatgaggtcagacctatgctattgtggtaggtaatgaagaagtttcacttctgtttttccatttaatctttagtccttgatcttttggaagaacccgcagatgctttgaatttggtttcagtcagttttccaatttcatcactgtgtattcaatctgcttctctttgctatatcaggaactggaagtgagaggcgagtggaagaatcggtg

SEQ ID NO: 47154 - DNA, 1044 bp, Manihot esculenta
  Intron number 2 from transcript cassava4.1_019405m (locus cassava4.1_019405m.g) derived from phytozome v7.0 (chr-ID scaffold02973; pos 133997 to 135040)
ttttcatcaaggtaatctcctttatatattcggttatcgcccccttatatattatattatttataaaaatatatcattatctttagattctaaagtgctgttattttttacatttcttggaaatgtaattattttttattaatttaataatttattataaaataattactttacaaaaatatatattattttatataaatttatgaaataaaaactacatattttatacatcttaattttttttaaaaatataaaaaatattatattgatatttttttggaatatatcatttcccattaatatagtaaattttctgtaatatgattggtttatgaaaaatggatattactttgtaaaaatttgaagtaaaacataaaattttcataaagtttgatttgtttttgaaactaagtccaagtgactatggaaatccctatgcattaatacatataagttttttatcttaaatttttattttgctttctgcattatcagcatgtgtcgattgattagaaggaaaaaaaatcaaagaattggactagtattatcattgggtattgttatagacaacaattgatgtttaaactcaaattcgacaaacgttatagaatttgagaagagctgttggcacccacacctaaaggtcccaagcacactgtcaacacactattaggaatataagtgttgaaaatggtacatttgggagtatgctttcgtgtgttatactctgaaataaatccttaggcacagaaggggttacaatctaatgaaggttgtcaattcaatgtaatcctgataccagtcagtattgttgtttttcatgtcactgaaattttgaataactctgtcttagattgctaaccagcctagattgatttgttatatagatttcttttttctcaaaggaactgaaagttagcaagcagttctttacttgtgagttttaatatgtttctggttcattttcacatattttcttattgaatgcttagttgttttgacattgcagaaaactgagcaagagaagttggagaagcttgcacg

SEQ ID NO: 47155 - DNA, 790 bp, Manihot esculenta
  Intron number 2 from transcript cassava4.1_021814m (locus cassava4.1_021814m.g) derived from phytozome v7.0 (chr-ID scaffold07520; pos 391858 to 392647)
tggactccgaggactatcgtggcaaactatctgaggtttgtcgtttccttctttttggagtctatgcattttaagtaatctaatttgcacgaatttcatttgaaatgtataaataagctcaaagttcggctaaatttattgaaatattatggttcactgcttcatttgcggttggttgttactttcagtataggaatcgaaaactgattctcgaggaagaaattttttcaaacaaagcctaagtttatgatgataattcgttatctcttgattaaattctacatcgtaatgtaatgctttgtgtctttcatttttcaataaacaagagaatttttaacggatctttattttctttctttcttttttattttttaaaaatttttttaatcccaatctgctagttggagattgtttctttagtaagttggcgattgttagaagacgccgttatgccgcagtcatcctatcttatttgggtccggtaggagtgatctagccatatagctacggtctcttgggctacaattttggattagtttgctatctggtctatgtaatgtcctagtgatttagtaaatcgttacaaacaaggtcctagagaagctacatttattgtgattaaggttgaaaatattaacagaaattggctgttatctgtaaaaatgtagtgttaccttgggagaatcaaataaaaagaagcatctgttcaattaaaacaccttctggcttcagtaaggtgaatatgttattttttggtggcttccaggttcatttacgttcagccaacaga

SEQ ID NO: 47156 - DNA, 416 bp, Manihot esculenta
  Intron number 1 from transcript cassava4.1_011554m (locus cassava4.1_011554m.g) derived from phytozome v7.0 (chr-ID scaffold07520; pos 2151461 to 2151876 reverse strand)
accttgcctccctccaactccatccctgatcacaggtttctttcctttgttcttcaaatttataattcttgtaattttcagttgtttgcttaggctctattccggtgggtgtgcgcttaatgaataacatttgaattttaagtcgattgcaaatttttttaatttgatatcatgaaaagtgagttgattgcttgatcttgagattctttgatttttttccccccttctttgaacaagtctttgtgatgaaatgtgaatggggttttgtatcaacattgcaactctttgatagttcaggtgtagatttggtaaattctattatttttcttttagcttttcagttttctgtttccttttttttgtgcttctctaatgttataggcacgattcttacagacagaggctggagccggagg

SEQ ID NO: 47157 - DNA, 731 bp, Manihot esculenta
  Intron number 1 from transcript cassava4.1_014377m (locus cassava4.1_014377m.g) derived from phytozome v7.0 (chr-ID scaffold07465; pos 110485 to 111215 reverse strand)
atgtaagtcttctatttctagtttgtattttatattaaaatttattcgacggctataattttggttgtcgtgtttgtttgctgtgcatagcatatgttcactacatatatttcttatggcgtttaccgtttttgttggctagctgtgtgatttataatgtaaaacttgatttattacctctttattttctacaaatttaatgaattcatcaatcttggggaatctttccatttttcagcacaacttttgcaattccttgtttgatatcatttttaatgtagtcaatttctaggttggaatacttcatgattagtctctgtttatatctgtaaattttttttttccagatataattcatcttttttctgtttactagctatcgtagtccatacatctactttcaagtataaagctatcagttatttgaaaactgaaattggattgagatctttaaatttgggttcttgaagtccatttccaagggtgagcaagcgtgctagttcttcaacaattggctatcttaattcttgttatgctcttgcctacatatagctttgctgagctttttactagttacactagttgtgaaatcttgctcatacctgtaacatttgagtggtgctccctgaacatgtcattattcattcaagtgcttgagatgacattcacagaagccacaaacatcatgtcaattttttatgatgatcctaaacaggtagaggatatcccaa

SEQ ID NO: 47158 - DNA, 588 bp, Manihot esculenta
  Intron number 2 from transcript cassava4.1_027571m (locus cassava4.1_027571m.g) derived from phytozome v7.0 (chr-ID scaffold11069; pos 446551 to 447138 reverse strand)
gaattgaacgcttggctgaagcaattctggataaagtgagttgtatttccttttacttttcataatttcatttgtgattatgggtattgcaagcatgaccaacatcttgttgcaaacattgttgtgccacatcgttcttattatctcttttcgtttcatcaaaatgattaaacttgtatgctcatcaacttcaatgagtactacgactaggttttgctttattgctcagctggttgaaattttctattcgtattttgaatctattttgatgtccaatttccataattgccttattatgataatggtatgggagccttgatcaaatcacgtgtatagaactttacatgtttcacctatgatctaaaggtagaaattaataattagccatcgttgcttcttttgccctttttagtggattctgattacaactcttcaaactcgtgtgcttctatttctaactttgaaataaacaaaagttcttcctattgacatattagcattccttaactgcagccatcaattttctctttcctttcaataaaatttttcataagattttttttttgggtattttttaggagttgctag

SEQ ID NO: 47159 - DNA, 962 bp, Manihot esculenta
  Intron number 2 from transcript cassava4.1_019092m (locus cassava4.1_019092m.g) derived from phytozome v7.0 (chr-ID scaffold03507; pos 45549 to 46510)
aggtgagatgcaagagcctgaatggttgtattagaagtaaaaaactacagttcaatttttctattgtcagctgttaatatatggtgtgcatgttcttttaagcctgtcactggagctcaaaaaatctatgctttattatgttgcaactgataataagttgagttgctaatgggattttcttggtaaatcaaatgcaatgctgtactgaaatggatagggagagagatggtttttctttttttgattcctacatggagtgcagtgcaatgcaattatctcttaagtcagttggctgacattcacatgcacccacagagatttagatagaaaaatgacttcagaatgacattggcatggtctttatttccacgttcatatgacatgtttagagtatgaaaaatatgctgccatattagttattactaacatcaaggtgtatcaatggcacaaaataggcttgtgcttgctaaacatagagaaattgagagaagtcaaattttttagtatgatttgtttcagtgatccagtttttcagacctctggaatcatttctatttagctgaatgacccttttcaatcttgtgtttatttaattttgttatgtatctaaattcagtgccttctacactcttatgcctaaaaaattgacgtgattgatgctctataggaaatttgctccagttgagtgtaattatggttattattttctgtgcaattatcttctcattgacataactcatatatatatatatatatatatatatatatgcatgtgtgtatgtatgtatgtatgcatgcatgttggtaacattaatgatgcataaacttgcagttttaaacctatttcttttaccatggttgtgggttttatctaatgtgatataaggtatcttggatcctgtctgatgatttgttcatttgatataggattcaatagttggatttttgcttgctggagttgg

SEQ ID NO: 47160 - DNA, 464 bp, Manihot esculenta
  Intron number 1 from transcript cassava4.1_001860m (locus cassava4.1_001860m.g) derived from phytozome v7.0 (chr-ID scaffold04269; pos 204726 to 205189)
tctcagtctcagatctttcagttttcttgctccaagtttgttttcttcctcttttcttctattttctgtgatctctagtttatttttcttctcagcttttcattttttcttgatgattacttcaattgccaagcagttgtaagttctgatgaatattcccctttcaatctctttcatatttttttgatttttttggtacttttgatgtttgcttcttttctctccctttttctttttctgattaaaagtttgatcatccttttttaaaggctgtttcccttctttttgctttactttttaaagaagttttgatttggtgattaaattgttctcccagaacagcaaacaaactgagtgatcttctttttaatgatctcttctgcttaggctctcacagacacaccacaagcacacgagtgtataattcaccatttcactgtttttgctttggttacaggtgagag

SEQ ID NO: 47161 - DNA, 786 bp, Manihot esculenta
  Intron number 1 from transcript cassava4.1_000433m (locus cassava4.1_000433m.g) derived from phytozome v7.0 (chr-ID scaffold06715; pos 1519 to 2304)
ttctcgttaaggccagaaattttttggtcttccaggtcatttattttgaatgtctttgaactctttactgtttttaattttagataaagtgttattatggtgctttaagttgtggcggttttgaccaagttgatttggttctatactcgcggcgctctgctttcttgctcttttttaatttaattttatttagtcttcttagttctgggttcgtcacattaaatttgctatgtttacttgatccttaattagttagtgtcttttaagcggctttctagactgctgtctttcgaatgccacttcagttgatcaccaacttcctgttcattttacgtgggcttttttttttcttcgtcttattcttcttctctttttattcctaacatagtttgcaggcactcttgaagttgctgttgttaatttttatttgggtactctttgtgagtatatcctttgctctttgcaaattgggagtttcttacgctttcccctatattagcgttttcagccaactaatttgtcaatgcagaatgcttttgagactcgaatactatgatcgttgtcttacatctcttttccactaaagtaaaagaatttagctggtcttataacttggcctgacagaagcagttgttaaaatattcatctggtaaaattcagtaggttgttaacttgatttcaaggtatacctgaagtcctttatttaggcaggttggaggctacaatagtctagttttctcaagttggagcatacatctgatgagtacttaaaatttatgtagggcg

SEQ ID NO: 47162 - DNA, 628 bp, Manihot esculenta
  Intron number 1 from transcript cassava4.1_030007m (locus cassava4.1_030007m.g) derived from phytozome v7.0 (chr-ID scaffold05362; pos 49221 to 49848 reverse strand)
atagtgccaggccttcacttgtggtcagagattcagtgagtaattcttctttaatcttatttgtttttttttttttgttttcttttttccttctctctctctctctttaaagcataaaaaatcaagccctttgaaaggttatttaagccttctgtcaattcaattgtagaatcctgatggggaaaaaaagtggcaggttttcactgaacaaaagatacccatgatgttatttttgaagtttctttgaaaatttagcataaatgggcaaaacccagatttctttttcctttttctttcagaacttttgtaaatttcaaaataatggctgaaagattttctagcaggcttcaagttccaacaggaattcttgcaaagaaagaaaatttagtggatgtgtattttttttaatataataaaaagaaaaacattttgcttcaactttcactttcttgggattcccaagcatgcgcaacattggtcagaatcatatagggatcttgtataaaaatgatcacaatcatgcattttttttttttctttattttacctcgagcccatgttgttgttttcaaattttgatttttgtatgttctcaactgtgctgaaggtgcatattctaccgagagag

SEQ ID NO: 47163 - DNA, 174 bp, Manihot esculenta
  Intron number 4 from transcript cassava4.1_024978m (locus cassava4.1_024978m.g) derived from phytozome v7.0 (chr-ID scaffold07520; pos 339661 to 339834)
ttcaattactctgtgagtagaatgagctactgaatttttcatcccattcaaagattcaaatcttgataatctcttcttcttcttcatttgtttttgaaaattaatagttactctaaactttcaagtaatggatatgcaggttgcaactaagctatacctcattgagctacaaaa

SEQ ID NO: 47164 - DNA, 433 bp, Manihot esculenta
  Intron number 1 from transcript cassava4.1_014543m (locus cassava4.1_014543m.g) derived from phytozome v7.0 (chr-ID scaffold00325; pos 539580 to 540012)
gtaacattcaaagggagctcttcgctaaacaggtggttttcttttgttgatcttcagcattcttctggaatataaaagattgattcgaaattttcaatatctgtttgactgaattcgggatttaattgctgtcgaactgaaattcagtttttctctttgatttgtttttctttggttttgattattaatttttggaactatggatgaccaatggaaaccccatgcattaagactggagaattttccttttttaacatttgacgaagaagttaccttgggttcatgttgaacagttttagactggccatagagaacagatgctatgtaactagtttaagaaaaactgaataaggcttaaatgagtggagatgagttctattcttaagcacttatttagaattttaattccaggttgcgttggatttaactgaag

SEQ ID NO: 47165 - DNA, 971 bp, Manihot esculenta
  Intron number 1 from transcript cassava4.1_011649m (locus cassava4.1_011649m.g) derived from phytozome v7.0 (chr-ID scaffold06158; pos 449016 to 449986)
aaaattacattctcatctccatttcctcctctcaggtttgaaccaaaacgctttctgtcgacacttgcatgttttccctttccttgctttggcttctcgggcggcacatgctttgtcgttgttttttctggcaagttgtgggtggtttatgatttttgtaaatgataaatggacaactgaaccgttattttttgggttctgctttttttgggtttctttaatttctatgttatccctttctattgtgttcttggatctttactataaatgagataatcatcttctttcatgcttgctatgattttcttggttatatcatgcatgattgctgcagcgtaccattgattttttttattttttttatacccgtatattccttttctttttccttttcttttcttgcttttatgctcgtcatgtagttggggattcaccagtgattcgtcaatgaatgtccactctcgtgaaagcaaaaccttgcaggacaagttaatgttatgcgtgacggaaagggttgtgcttttgtgtttcattggattccaaatgctcaattgctttgattactgtcataggctgcagcagatttggggtataacataactgatgcatgcttgatggcgtcagtgtgaatttctctgtgtggatttttaatcacatgtttaaccagatcatcttcttgttattatttatttcattgtactgcctctttctggatcataatgttttggtgtttatgttagtatttcctcggttgcctatcagttttgaattattttggtgggtagtacaactactttgatatttcatttttgaatttcattgtcatgtttgtaacttccagtcttttgcaatggatttaatttagttttgtcattagtggaatgcattttaagatttgagaaggaaggtggttataattgaaggtttaaggccattaactggaactttatgcctggttataggaggactgg

SEQ ID NO: 47166 - DNA, 291 bp, Manihot esculenta
  Intron number 1 from transcript cassava4.1_016219m (locus cassava4.1_016219m.g) derived from phytozome v7.0 (chr-ID scaffold00325; pos 612559 to 612849 reverse strand)
cggaggttcatttcttcttcattgttgtgatagcttgctattattgaatgtatttttttttatcttcgatgttaatttgtttattagtgacaaatggagaaacaaaggttcggcgaatggttattttgtgacatcgaataatttgagtttaatggaattattctcttgcaattattgtttggttttgtaattgttggtttttagtgcgacatgaaatttatgtatttattttcttttaataatgatttttcgacagaatctaacgaggtggggaggtgctctgctggagtt

SEQ ID NO: 47167 - DNA, 429 bp, Manihot esculenta
  Intron number 1 from transcript cassava4.1_017112m (locus cassava4.1_017112m.g) derived from phytozome v7.0 (chr-ID scaffold01190; pos 31122 to 31550 reverse strand)
agtctggaagacgtattgctgacgttgtgtccaaggtttggtttcttttcttgatttatttctgtttttccttggattagttgaatacttgagcgatggtacgtatatggaaaattttggttccagattttgatgggtattgagcctcatttctgatctcaatagagagatgcttcagataaagttggactatttgtagaggattattcttgagaaataactatacttgtagaagtgttgggatgatcttaggcacttgcatagttgaatttgtactaatgagatgtgattatgcccgtaattgttatttgggattaagtagttttatttttataagtgagcaattttcttgaattatgcataattatgtcctaatcttccactttctatgcagagtcaacttggggagttaagatatcaactcgatca

SEQ ID NO: 47168 - DNA, 663 bp, Manihot esculenta
  Intron number 4 from transcript cassava4.1_001821m (locus cassava4.1_001821m.g) derived from phytozome v7.0 (chr-ID scaffold07543; pos 203413 to 204075 reverse strand)
gttccttccttccaggtattaccttcagtagttctgtttggggatagtttcataaatgacctggtcttgcatgtcttaaacttcttgtgaaggtgctttgtgtccttacatttaactaaagattcaagaacaaaaataaaaattcctcgggggatttcttacctcctcaaatgtggcagtagctcttcatgctgtttgtatatattttcatcacatttctttcttctgttgcttcttttgttcccagaatttgtgtttcttattctgaaaaggaatatgttatctaaaagatttctgaagatgatccagaaaaattatggaaatgaattaatgaaagatttctgaagcctaatttttgggttaggtcagtaaatgagaaaattatcagcgatacctttgtcgtgtagaaaatgtggctttttttaactccagtgtggtctatcatcttgtttcttattctgctttacgtgtctaagcctaataaatttgttaaatactttgatttagtttatggttcggaattttattgtgtattgtagctttccacaaggaccaatggagtaaaatgtaaaagaagagttaaaatagaacatctgatgaacatgttggaaaataattcaatttgcagtgcctttgcttgacaagtttcctccaatagaagac

SEQ ID NO: 47169 - DNA, 769 bp, Manihot esculenta
  Intron number 4 from transcript cassava4.1_026417m (locus cassava4.1_026417m.g) derived from phytozome v7.0 (chr-ID scaffold04003; pos 48230 to 48998 reverse strand)
aggaattgggttttatcctaactttcaagttgaaggtttgttattatctatgtataaactgtttatgtcaatctgtaaattctgttgcttcactgaactcaggtagtttaataatttatttggaactcgtagctgcctgggaagtgctgagacttcttaatctgatttgtccattgaccacatatttatttttcgtggttcataaggtcaaccttattatccagttggcagagctctaaggagaagagcagaagactgaaggctatggaaaagatggaaagaaggttgtaaatatttgatatgttagcttgtgaggataagactattaggaatatgagctcttaagtttactgacgctccataaaatatggacaaagaagtcaaattaatgagagaggaatatgcacatgcagaatgcacactcacatgcgatcaagatctagctgattactttcttcccacaatatttggttgatgaatttgtttggtttcttcttggataatagcatgccattgctactgtgttttgtgtgcttatttggggcaaatgtgctagggaatatccaaattcaggctgattgagctaatagactctgaaagtgatttccatctaccatcaatatctcagtctataacaagtccagcataaataactttcctctttatttcccccatctggctagaatttggaacttcagtattcggaattatcttatatttttctcccaacatactggctttaacctttatgacagggagaagacttggt

SEQ ID NO: 47170 - DNA, 752 bp, Manihot esculenta
  Intron number 1 from transcript cassava4.1_015724m (locus cassava4.1_015724m.g) derived from phytozome v7.0 (chr-ID scaffold00847; pos 1784346 to 1785097 reverse strand)
ggttggcctcgggatctaccattctggtgtgcaaggtttgaattatttttctttcatttttttgtggtttcttcaattaggtgcttcaatttctgttccgatttcattgttgttgtgtttttcttttgtttttttttttaattgataattcttatctcagatctgcgtccggagcaagcttgttccagtgtttggattgagggaaactgaaaggaaattcaattttcattttgaggattattaattgttgtttccctctttgtcctgtatatctgttattttatggcttagggcagaaaatttttagactagtgggaacgtaatcattcccacatcacattttttgaaaaaataaaaatgaaggaaaaattctatggtcaaaccatagtttcctaattaatagttctgtattttctgcttagctttgttcgttgagatttggtgtcaaaggaattgaaattaggccagcgagtgttgttatttgtattattttaaacaaatttgtttggtacctgtaaaatatgaagaaatttgtttgctacctgtaaaatatcatgtgaccaccgagctcaaataaattagtgggtttttaaaattgttaagctggttctggaaacttaacattgtttgttttgcttggctttctcttctgctattcccctgttagcttcttttaaattaattaaaagttggggtcttttggttgagatgatttctatgtttttacgcttctgtagttcacggagtggaat

SEQ ID NO: 47171 - DNA, 746 bp, Manihot esculenta
  Intron number 1 from transcript cassava4.1_001930m (locus cassava4.1_001930m.g) derived from phytozome v7.0 (chr-ID scaffold04043; pos 1272101 to 1272846 reverse strand)
agcgtgcaaaaaacaggtttatcaaagttcttattcgtcgtgattgcttatgcaagtgattaatggaagttttaactccaatggacataccatgtctttctggcttttagaagaatggacaacctgctttatcaagagagctgctttacattagtgcaaaattagattgggaatttgttttctaagtttatgataatttttatttaataacactatagtcgttatgaaaatgcgggaattgaaggaattcgtaatttggtcggtttgggtattattgttgcagactggaatggaaaaattccatccattttcttatccaaaaataatacaggtcgtatattctagatttgaagtttatgcaaaactaatatttgcagtaagagcaaaagattcaataggtcttgttgaagaattgatggtgtattggttttaaattaggattatttgagttttgtgaccatttaatgatctccaagcaagtaggcatgtataactatgttttttttcaaaaaaaaaattatttgctttcagcgcaattatgttttgttgaaattggtatcaatttctacttctttattattctatgcattaacacttcctgtatcttatgacactgccatggctcatattgggcctttagaaaaggattgttaggtctccaatgatgctgatttgttttgttaatctatctggcccttggacttgcattgatgatcgcttgcttctactgcagacataagcaagtg

SEQ ID NO: 47172 - DNA, 750 bp, Manihot esculenta
  Intron number 2 from transcript cassava4.1_029332m (locus cassava4.1_029332m.g) derived from phytozome v7.0 (chr-ID scaffold08617; pos 114774 to 115523 reverse strand)
aatctcaaacttggcatcttccaggtaacctttttgtgtttttttcttattctctctggcttttctttggatgtttttgcattaatattaatttctacgtagtttgtgcttcatgttagacttatattcaaaaattgtctaggtgtaggaattttgcagttaacagtgaatttggagttctatttctttttttaacaatccaaacccatatgggtcaacggaatttgatttagttctggttgatagatatttaaataattaaattaaaatatttaataaattttaagaaattcaattcatatatatgagatccatttttatttataattattttattagaatttattaattatgtttttaaatatattaataaattatttaaaatttaaaaaataataaataaatttaaaattacaaatgatgtagttttagaaaacttatctcttagtggtgaaaggatattaacataaaagaattggagctctgaagagacaagtgtgttaatttatttatgtaaaatatatttttttttcattttctaattttaagtaaactgtagttttcgttttatataaacaaaaaaattgagaaactctataaaaaaaataaattcaaactattttccaaattttagctgagtttggaaattaaacaaggataataatttttctagttttccattcaaaaaattgataattatatgaatacaaaattcaattttccagtttcattacacttttttttaaaaga

SEQ ID NO: 47173 - DNA, 715 bp, Manihot esculenta
  Intron number 2 from transcript cassava4.1_027555m (locus cassava4.1_027555m.g) derived from phytozome v7.0 (chr-ID scaffold07660; pos 103476 to 104190 reverse strand)
aatctacaagcgaaattagaggtaaaactaagtatttcgatttatatattcacccttagctttaccttccattcttcttagtgcatgcaatgcactacgtataaggtagaaaaggggtcatagcatatgctgggctctcatatttgaaattcctttacttttattgataaattgcatttgaatgatctcggatcaatgagaaaagaaatttagtgatcttatcacagattttatacccactcatcctttgtttgacatttttgctgcaaaaatcttgtttattttataaatttagtgtttagtttgaagattaaataagttgttttgttcacttgcagaaaaaatattttcattcatcacatttgtaatatgtgtggttacaatctgcttatcagcaattggcattggggtttgtgtgggtaaacacacctacaaaagaaagaatagcaaaaagaagttaaaaggtaatattcattaaaaaaggaaactatttaattatttttttatctcaaaagtttaaatgattaattaattattatctttttttcattttattgaacagttgccctgttcttacagaacttacaagaaccttgaaaagaaacattgatcaatgatttttttttaatatattggaattaataatgaagcaaaaagtgacttaattattatctcatatttagtggtttaatttgtatgttttacctttaaaggg

SEQ ID NO: 47174 - DNA, 906 bp, Manihot esculenta
  Intron number 1 from transcript cassava4.1_010209m (locus cassava4.1_010209m.g) derived from phytozome v7.0 (chr-ID scaffold00325; pos 9706 to 10611 reverse strand)
tggctactccgtcagaataattgtccacactgaaggtgatttcgtaattgaattaattccctttcattattattatcattattggttttggtcattagtcacagtaacgtgtccttggggaacaggtccctaataatgctgcaaaatttacaaaatcatttcatttttagaaaaaaaaaaaagactcattttccataggtatatataaatttattaataaattttatttttaaattaaaattaaataataaaaaataaattatttattaaaaaatatttttcatgctaaaaaaatattttttaaattcagttattttcttaaaaaaagggagtcatattatggatattttgttgttcttccccaaattttatttctaataataacatattcaaaacgtacccgaatcctgctgtttggagtaatttaaatccaggcggtaaaccctcctcccagattgtaaggtgtgatgtgtcatctcagattagtatagcaacaacttttaaagtgcttattattttaaagataggcaaagtaatatttagagttaagattagggctaactattcctaaatagctattgtcatgggtttagtcagtttgtaactgcatcattgttgaacatgagatctgggttcaaccctccgatcccttttactctaggcttcaactcagtttgtaactgcatcattgttgaacatgagatctgggttcagccttccgatcccttttactctaggcttcaactctccaatttctttgactcaaaaaataagctgattcagtatttcactttacattaataaatttaaaataaattagcataataataataataataataataatctagtaacttgaaatgggttcaagagatttgagggaatgagtttgaaaatgcagaggac

SEQ ID NO: 47175 - DNA, 520 bp, Manihot esculenta
  Intron number 2 from transcript cassava4.1_002059m (locus cassava4.1_002059m.g) derived from phytozome v7.0 (chr-ID scaffold10560; pos 2583 to 3102)
tctttcctgtaggcgttttagagtaagtttcagcttctattgttgttttgacgactgtgatgaatcatcttgttgctcttaaaaaaatattgagattgattgtgtatttgtaaattcacacttcagccaatctttagtcatggttgcttggtataacaagggctaactgtatgttgtacttctgatccaattttcttgctattagcataaggagctgaagctcatagctttgagatttttttcttcttagtttttttacccctttttaatcttcaatttcttgtcaagactagatcttttaaaatgaccgtggtgattagatactgcagagttcttaaagtaactaacgatggtaacttttaatatatgtagaattttgatcggactctactcatcttttagcctacagcatggttttgagaactttgatgaatataggagaacgttttgattatttatgagcaaaatatttattaaatacaaaaactcaccttttacttgtggcaggggtctccgtttc

SEQ ID NO: 47176 - DNA, 783 bp, Manihot esculenta
  Intron number 2 from transcript cassava4.1_017973m (locus cassava4.1_017973m.g) derived from phytozome v7.0 (chr-ID scaffold00847; pos 874823 to 875605)
atcgaagggagtcgcagaaattctgtgcattagcggtacatatcttctaaaacgatttactacttttcttttagcttcaaacattttgacttggattctgcttttagttgacatctttacgattttcctggtaaacaatttacctttccgccgcttattgactttgtattggcaattccaagtatttggtgaataacggattcatttaatgaaaattccgacctttgatttctccgtttttggatggtcatcatggttctctagtgtaagaagtttatgcggaacattattgataaaattaccattatgcttgaattctttctccattttctacgcctcgccaaatgcacttgttgctttaaatttcttcgcggaaaaatattttcttaaatacattggtaaaaagtattagaaacgaatttggaattatatttgatatatttaggcatgagaacaccaagataacagaaaaaaaagccttcttttttgaaactgctggtttcaggccctctctaaacagcacttttctcgtcttcaagcacaatgccaaccgagctctaactgagttttttcttttgttgtttgaacatattttgtaatgaatttcttggttgctgttgtggttaacagatcattgttgtaggatctaaaactcaaatttggattttgttgaactctaatgcttgctcaaagcaacgtttttgtataactgattgtaatgttgtgtttcaacatttaagtactggttttggatcttattttgcagttaacgacccctttgta

SEQ ID NO: 47177 - DNA, 983 bp, Manihot esculenta
  Intron number 2 from transcript cassava4.1_019362m (locus cassava4.1_016749m.g) derived from phytozome v7.0 (chr-ID scaffold00325; pos 553090 to 554072 reverse strand)
ggcgctattatcgtccggcagcgtggcaccaaggtgtgaactttaaatttctcgcatttcttaccatttcaatagaattttgtgcatttaaattttgcttagctttagagttcagtgataattagaaacaaatttcacactgttaagtgtaaatgagtgtatatcctgcttttttttttgaacgagtgtgtatcctgcttttgaatgccagaaatttgtaatttcttgaatttaaactttttgcatggtagctatttgttaagaaatgcgaaattaggtggatagagaacctcgtttagttttgagaattatagtgaagattcacagaatcacatttgcttaattgatgatttttttgcataatataacatgtaaatgaaggctgcattttatgcgactctaatgcagaccatactcagattgcaaaagaaatttggttgagaaatccttaatgaaataatatataatgtagaaaattggaaaattgagagaggacatgattgttacatatctagttggctaatgtctggaagataggattttgtttttgctgctgaaggtgaagaccataaagactgagcttaaggatcattaggactgcttatctttattcttaattcaaatttgcagtttgtagtgaagaatacttgtttttggatgaccaaattttaattgacaactccagattgccaagactttttgctttttatgtcatgctaactctctactcaaatagttgcgccaatcatatacagtggcagtgcatgtctagtaggatgtaattgaaatgtattgaaatggaagtttaattgaacagtgaacagaaatccattgcattacataagggaaatatacttgaaatttctccgtgaataacatggcaattggcgatgtgtactaccttattcccaacatgttttatgactgtttgccttcaaaacatttcagtttcatccagggaagaacgtggggattggcaagga

SEQ ID NO: 47178 - DNA, 839 bp, Manihot esculenta
  Intron number 1 from transcript cassava4.1_015985m (locus cassava4.1_015985m.g) derived from phytozome v7.0 (chr-ID scaffold03268; pos 245781 to 246619 reverse strand)
gttcggttttgggatatttcattccggaattgaaggtttgtggacgttatctggtttctgttgccctttcttattcttgctggttttgttgctttgcttttgttgatcttaccctgcccatttcattaagcttattttgattttgaatctgagaggaaaattttattttattttgatttagtagttgttttcaattgggacatgcatctctctttttatttttattttttaatttgatttttgggtataataaatcaagattgttcttgcttcagtagctagtttaaaacctggtcatgctctttgtaaaaaacaattgtgctttaaagctttgattgatttattgctagctaatagtaattgtctgtattagggtgtgaagaagaatactattaaatgatgattggtggctcaatctaacactttaatgatgtgctgcattgattttctcagcaacattaatttccatttgttttgggttgtatgtttgtagttttaatgctgccctcaaggcattgttctgttcaatgtccaggaatatcatcttattggcatgctttagtctagaatgattgagggttctgatgtgtgaggccactttttgctatggaggggccacaatatgtaggatttgttttggttatggtatgcatagcttacaagtttcacgattcttgcttctgatatgttgttctgaagtccttgggagagcatcttttttacatgttgagataaaagacatgaatttacatcagaatttgtatgttgatagtcattttgtttaacctgttgagctagaattacttcttgttgtgtttgaacagtatacggaaaggaat

SEQ ID NO: 47179 - DNA, 636 bp, Manihot esculenta
  Intron number 2 from transcript cassava4.1_016245m (locus cassava4.1_016245m.g) derived from phytozome v7.0 (chr-ID scaffold04457; pos 48326 to 48961)
actatcgaggtacaactcttgtgatttgtgaactcagttttttttttccaaggatttatattgactggtggttcaatgtgtaactttttgaatttagttcccagtataattggttgcgcctacccggttgttgaggaaattgagagtataaagaaaatgagtattttccttgtcctatttttcctcttcctattgttctttttttccctatgtggttttagacttcattttgcaaggcattgaaatttttgatacatcttgttcaaatctttgaattgtattcaattgattggaaagttttgaattcaaggatccaagcattgcatcatgatttaattaataataataataataataatattaaaaaaaaaaacataaaaaaatcttgtctagttctatattcttaactaccacaatgttatttccaggaacatatacagctgtcagtcaaagattaagagcagtgttaagtcaattaatgatatttatccttttttcttctttatgttccaattagaaataattatctgaaaaaatactgtgttctttattctcagggtttttgtttgagttgtatgttctaggttctttttatgtatttttattaataaattttagattgacttgactgcttag

SEQ ID NO: 47180 - DNA, 519 bp, Manihot esculenta
  Intron number 3 from transcript cassava4.1_002465m (locus cassava4.1_002465m.g) derived from phytozome v7.0 (chr-ID scaffold07318; pos 227142 to 227660 reverse strand)
gtgttgggttcttggtctccgaattgtataattaggtatatttttattcgtacttgtttatctcttggtagtttgttaaattatacggttgctgtcttattgttcatctggctaaatctgcagtcaaaataagattatatgacttgtccttgagttctctgcttcggtatttgtgtaattatgcatcttataaatcccatgaatctaggctcttttagtgctgcttgaaatggtaattttgatagttcgttgttgtagctattcattgtgatcgtgggagttcaaatacttgcctgtaattgttgcatgtgtagagtagatcatctatgtttgcctgcaactcatcctcgctgctgccggacgccactcttcttgtggccctcttctctgcaattgtctttgtggttgatgataattgtttctgaccaaggatatcaatgatttgtttctgacatctgctaaattttgttacatttttctttaggaagctaaagggaccaggggtaccaactactgtgc

SEQ ID NO: 47181 - DNA, 621 bp, Manihot esculenta
  Intron number 1 from transcript cassava4.1_032621m (locus cassava4.1_032621m.g) derived from phytozome v7.0 (chr-ID scaffold00889; pos 255453 to 256073 reverse strand)
aagagtttattgaagattggaggaggaaaaggcaggtgagcttctttatgttgccatttcagattaatgcaattttctgatctttgcagcacaatatctgtgtttaagctgatagcctgggtcaaacctgaggcgttattctttgagaaaattttcaatcatggtgaatgctggggatgtttttgggaaattttgaatgctggggttgtttttgggaaattttggcttttgtagttgcatttgattcttgatctacagtgaagaatttgttattttcaaatggctacatttttagctatttagttgttattctttcttttcttagtctcctaaaagccagttgccaatctgtatcatgcatggcttgatttagacaatacttgatgtctcataaattgaagtctttgcaagggcgtgtgtgatgtttcatttccaacatctcattattagctgtctctgttcatttggcatctcttatgcttactgacatctcactagtagtatttgttttagagctctttattttcatcttcgtttcaattggaatgtgcacatgctcactgtgtttttttaatcttcttacactcgatacataatctagtttattaaaatgtcatcagg

SEQ ID NO: 47182 - DNA, 634 bp, Manihot esculenta
  Intron number 2 from transcript cassava4.1_009468m (locus cassava4.1_009468m.g) derived from phytozome v7.0 (chr-ID scaffold00889; pos 194861 to 195494 reverse strand)
gtattgacacacagccagttctttctgctgctaaggttggacctttcaatttttctgcttcattctttttccccattaattatggagtgtgttttgttgctttgaagaattgggctttacaagcatgtatggaaattgatgtcaatttcattgccctacttgaaattgtatcaaatcagtaatagaacatgccttaggttttgaaatgattggtttgtgaattgttatttgaattgatttaattgcaatgggttatcccaagaattagaaaaggaatgattatagtagtgattattgactgaataattaaactgcccacattggataactgttgcaattctaatctgtttgcttttggtatcattgtgttggacttgtgaatacttcaaaatgaattgagttaatgaactgtaaagaatctaaaaggcctgttttgttttacccataactgtattttgctttggaccattttaatagtgttggtttttttttcatcttcaacatgttataaaaacaagctgtttaagaatttgatgaataatctcatgtcaattccaatttgtagtcattgagatctaatatttatgccttcattcataaaatgtatgacccctttgaacgcagacagtggctg

SEQ ID NO: 47183 - DNA, 889 bp, Manihot esculenta
  Intron number 1 from transcript cassava4.1_017096m (locus cassava4.1_017096m.g) derived from phytozome v7.0 (chr-ID scaffold00784; pos 7914 to 8802)
aaggtttgtcatttagctcctccttcacagctccagtttagttttttttcttttcttttcttttaatatttatacattatgtgatcttttctatgcctcattttctagttgctgccattggaatggtagttcttgagaatttttggcctcgtttatttaattattttataaattatgcctaaaagtcatcccaagcctgaataaaggagggtgttgtatggtaaggaccagcgtataactctgtcatttctcttgattttgtagaaaataaatgttaattatataaaaaaaattattggaaaaatatgaattttgcttcatataaaataaataaatccttattacacataaaattgcctatctaaatgctctatgattttgctttttttaaccgtaaaataccaaaagccaagctaattaaggaggaattatagaattcctcagtggtaccaaatagaatttggtaattggtatcacaatctgtgaattgaaattttgaaaaagatagaaaatgtgaatcgatttttttttttttcactgttttattccatgtattacttttatgctatttttgttctgtgggattatttatacaaatggattttcctcttcatattttccatctcaaaaataatcataattaaatgaaactctcaaagaatttagattacttttctagttgagttctgctaccagtttcttattatattggctttccccaacccccagtatgaaagaaattactaacgaaaggtcaaaaagcttgaagttgttttttttttagcaactttctttgagcacttgtggtatataatatgctgcatctgatgtatgcaaaagcatgaaatctgcagttaaagcggtaacagattcaagctgggacgatcta

SEQ ID NO: 47184 - DNA, 801 bp, Manihot esculenta
  Intron number 1 from transcript cassava4.1_003110m (locus cassava4.1_003110m.g) derived from phytozome v7.0 (chr-ID scaffold11661; pos 145067 to 145867)
accatcatctattccccaaagccatttctcagctggtacttgttctttctttttttaatattcttttcttttgtttggctgctgagaaaatatagggtgatgggtttttttagttaaaggaaaacttggttgtgcccttgcttttctagttatacagggtgctgatttctgtccagtggagtttagtggactgattagggatttgaatatccttacttctatttaacttaatggtatcaagctgcagagctagggatttttgagatctcgattattcagattttttttgcataattttcaagtaaattttgtattcaatttgagctagtatgggatttatacttctagccctcgtttaagttgttctattaggataatttgcatcctgccatttttcgttctattttttctagtgatcacagaagaagcatagtctattaaaaaacccatatcctttttgcggagacatggcatcctgtaacttgcgcggtccaggaaacccgttttagcaagtcatgaaaaactgactcaatctttttacctattaactataactatgaatcaattaatcaatttgcttgcttagttttaggcttggagtttgtagacttgtttaattttctaagtctcttaacttatgttttgcctttttgttttgtttcaataagttggttctagcataggttgcggtaataagctgaaccattgacaggatgtgttatatttccttggtactggacatagcatataacgcatagaatagcattacttggacaggtacaaaaatttcagattaaggaa

SEQ ID NO: 47185 - DNA, 334 bp, Manihot esculenta
  Intron number 3 from transcript cassava4.1_000788m (locus cassava4.1_000788m.g) derived from phytozome v7.0 (chr-ID scaffold06684; pos 24989 to 25322 reverse strand)
tttgttgtgcaagttcctcctttgttgaggtataatttgttgaactttactgttttattccttgtgattaatttttgtgacacctttctttacagtatgagtacagcatttggttttcaagttgcattttgttcctgtaaatttgttttacttttctttttggtctttgctgtttttattttctgatatttcttttctgtttttgtttgtttattgatcgtatttctagattgattaggttcattagtttatagtattttgattttacttgctctaatatcaaaggccgcgatgtacagggtgcagttgggtgagtgcctcaagacaattatcc

SEQ ID NO: 47186 - DNA, 986 bp, Manihot esculenta
  Intron number 2 from transcript cassava4.1_022075m (locus cassava4.1_022075m.g) derived from phytozome v7.0 (chr-ID scaffold10453; pos 39585 to 40570)
taacctactctcaactcactgtagctactggaactgtaaggacttgtctaattttgactcttatcattaataagcattattttcgattgataattattgggttgtgaaatttctttatgaacaaatatgaagaagagatattttggcgttgaaattgtagttactctgattttcatttcaatttcaagttgggaaagtttgcttccaattttcatttttaagtaactattttttaatgagaaatgttcatgtatactcatagatgtaacataatattaaagataagtccaataatctttaaaatgtgagaggtctaagtttaggaattagtttcagttcagtaagtgattaaacaaaaattatgaaatctcaaatttgaactcaaatgaaattaacaaaaaaacgtgtcaatttagattttatttattttatgaaaaatattacatatatattctagcttttggagtatgcaaaaaatttattaatattctagtgttttagaacatccaaaaaaattgatcaacgaaaagtatttacctaattaaactctatttatttatgaaaaataatttgtatttaaataaaaaatattttttaacaaaataacttattttttattatttaattttaatttaaaaaataaaatatattatatataaaaatcttaataaatttttcaaaatatgaaaaataacttcatattttgaacagaagaaattactcttttaaaataatttaatttttttatataaataaacacaataccagtgaattttgaataccacgtacatacatatatgtaattttaataattaattaattactataattgtagagtcagcacattcaattaattcgtcatatatggatacaatagaagtaccagttatatgatattgctaaattactttttcatgggaattaagttatattggataatgggttttgcagataagaaatttctatcaatcaagaaagagtcaaag

SEQ ID NO: 47187 - DNA, 681 bp, Manihot esculenta
  Intron number 1 from transcript cassava4.1_013538m (locus cassava4.1_013538m.g) derived from phytozome v7.0 (chr-ID scaffold02242; pos 224107 to 224787 reverse strand)
aagaaagttgaggtacgtataaaaagtgataatttttcttatgatttttcttctcatgcaggaaagattttagtttcatgatgataaaaaggacttaatgatttattaaagagataagtacccatcataatttctttgttgaatttagaatacgactagaaagaagttgctctgttacttcagtaaggtcatgatcacttctccataagaacagtgattttgaagcttgaagcactgaggagagatgagcacatatgtgattgcctttcagatgttatgttcaaatgataaggagttttcatactggcttgtttctgaagcgagttctttcctcctattacttgtttgtggaaaaaccgcagaccatgttcggcaataacatttaaaatagtgttaagccttttgattgggctgaaacaatagtatttagaggtcaagaacattactttttaaactttaaactaactagagaccactaaaacagccgacaactattaaaacagccaatattgtcgaacaaagtcgtagtcctaaaacgccagatcgagtatttttagccagtcaactcttgggttcccaagaattagtggctatgtctttgtttagacactgcttatggattctgattctgattgtttttgtgcagaggaagctggaagagaaaagagcaagagctcttga

SEQ ID NO: 47188 - DNA, 998 bp, Manihot esculenta; identical to SEQ ID NO: 45473
  Intron number 1 from transcript cassava4.1_013064m (locus cassava4.1_013064m.g) derived from phytozome v7.0 (chr-ID scaffold00935; pos 97482 to 98479)

SEQ ID NO: 47189 - DNA, 527 bp, Manihot esculenta
  Intron number 2 from transcript cassava4.1_025917m (locus cassava4.1_025917m.g) derived from phytozome v7.0 (chr-ID scaffold07789; pos 391 to 917)
accatactggatattgtgctgatagttgtaattgggtatgaccatgacaccatgttctgtttcactttacctttagcatgtctgatttgctttgttgtgcctgtggattcttttctcttgatttctgtagatattggtctttgtgatggttcctttcctaactgtgtgacataattttcttaaaaatcaatgtttattgaatgagcattatttaaatccataatagttctgaaatgataactttttatcttggatccatcagttaagattttctcaaacaaattttcctttagtgttgcatttcttttcctatattaagttagcatcttactttagacttttgtatattttgctttgaataattttcatattatataatttcatttcatttctgacacttctgtaatgcaagatattctacataagcctcttgttgagcatttacaattcttgaagggactgataatcatattttcttctttcttgttttagttctttgtgcactgctcttcgagcttggttgtttg

SEQ ID NO: 47190 - DNA, 598 bp, Manihot esculenta
  Intron number 2 from transcript cassava4.1_019725m (locus cassava4.1_019725m.g) derived from phytozome v7.0 (chr-ID scaffold03252; pos 64699 to 65296 reverse strand)
tgcgacaagagaacaggagccacctcctcctataggtacatatgagcctcattcttttaccctggggtcaaaaaagggtctggtgttgtgctggtggtgctaaagttaagttagctgcttgtaacccatttatttgttgtctatgttaaggagatagtggatatgctcaacagtatatctaatgaatgagctatagccattcttctgctagagcttggacatggagagtttacaagcagtgattttgggaacagctggtttgacagttgacaccaaattcacagttgcatgtctgcaccataaaaagaactgataacagtcaaagtacaaaatgtttgttgagaagtgaattttaatgcccttttgttggcacatacccaaaaatcttatgatttctgtatcatgcctgaacaaattttctggttgcctgtcaattattatcttctgaaattcaggttacaatgttggtatatttgactgcttgatatgatccttccataagtatgattgttttatctgcttttgtttgtaggaagcttgagcttatgaaattgtttcttattctccactttctgtttgttttcgcaggaactgtgac

SEQ ID NO: 47191 - DNA, 690 bp, Manihot esculenta
  Intron number 2 from transcript cassava4.1_007953m (locus cassava4.1_007953m.g) derived from phytozome v7.0 (chr-ID scaffold04043; pos 631988 to 632677)
ataagtggggttctgatctccctttcttgttcaaggtacataattctctttttatttgtgtgaggacgtgaatttgtgtttttgtaattattcgctcttcttttttctttttgttttttcaataattttaatcatgggcttgtgaattttgatgtataacttctggatgtccgtccctagtggagtgtatgcttttgggaactggaagcaatagatgcttctgaccgtcaatcgcagaattggccgctctaattttccaagttaggatggcctaaaggctaaggttttatacgatcttttaactattataagtcccatttcctgtactgtctttttgagtataataaggtaataggtcattctatttactttcagtctttccttttttggttcagtaaaaatttaatttatggagtcaatttcaaaattttagtaagatttcatcttcacggcgattgctaatagtggaacatttgatcagatgttttattattattattattattattttaattctcaataagatatgtaaaattcatcatatgatcaatcagttttctggatttttcattttggaagtttatgggactggtgagatctcaaggatttgatttatggagttgtcttgatgttcactatttgttgtcttttcaaggtactttctgtggcaaaagcattgtcgattcaggc

SEQ ID NO: 47192 - DNA, 821 bp, Manihot esculenta
  Intron number 1 from transcript cassava4.1_001272m (locus cassava4.1_001272m.g) derived from phytozome v7.0 (chr-ID scaffold09809; pos 234713 to 235533)
ttgtaagttcttactcttctgtaatttgtgtatctatacatgaatctacatttctatcagtggatgtggtgctagatctttggatctattaggtaatgcatctagctgtagttgtgaatcttaagggcgtgtttggattcagaattagaagcagctagaaatgtacacttgattttgattgtattcctacattgagtttttagtcacttattagttgtggagtggctattttttgaggaagacatgcaaagaaatgaatacttgtgtttatacgtgcctccctgtcgtttgatatttgagaagatggtattaccagtgcattgcttcagtagatggttacaaatccgcagtgtctcattttgtagatgtatttggttgctcattgttgtatgactgtacatttggaatgaaagaatttacatgtagggatgctttatctgcagtattagaatgtgactgatggagaatgggttcgttcaggatagaacctactctgtaaatgaaaccatttagttcaaactatgttgtagggatgctcagtattgcttctgcaatgctttttctagtgaatttcattggtttctcactttggatgaatggagggactattgaggaaaaattgggagaatttgtaaacaaaaagcaaaatgtaaagggaataaaaagagctaaagattgcactaataaagctctcttttttgcttccttatgtttactatagcttttttgatggcaatgctgtaagatgttctaatgcattattttttctttgaatatattgagcagggtgctggtaaatctgctgtattgaatagtctcat

SEQ ID NO: 47193 - DNA, 749 bp, Manihot esculenta
  Intron number 1 from transcript cassava4.1_014460m (locus cassava4.1_014460m.g) derived from phytozome v7.0 (chr-ID scaffold04796; pos 399041 to 399789)
tgctttttgagttttgttcctcgatcaacacaaaggtttggtggccataaaagcttcaatctttaaacttaaagctcaacacccattactttgttcagatctttttcagtttgtttatattatatatgtaagttgatgcttgcttctgctttcttccttgcttctcacttgaccagtgtttagaagtatagagattggttcttcttctcatctggctatgaatttttatttttttcggagggacatagacacatagtgggagagaagcagctgcttttttataataaaaatgggaaaaaaagaaaaaaaaaaaacaaaaactcaaacaaaatttgcggttgtattcttgggttgttaaagttgaattgctttatttttccactgtccacaaagaataaattccctttctttctatgtgcattgcaacctaaatactttgttgagcttattttttctgcatttatgtgatttgatctttctggattctttgctcataaaagggttgctgcttttttaatctttttgtccctttctttattctgtctctgcttttcttgggtgcctttcattttcttatggtttctttagaaggtttaaggaagtaaataactggtgaaagcaagagtttttgacgtagacagatggatcacattccatttcacctttctatttggctataagtaggggtggtcaatttgattttcttcattgcagggacttggcttaaacctttcatcaatcaagtagtc

SEQ ID NO: 47194 - DNA, 987 bp, Manihot esculenta
  Intron number 3 from transcript cassava4.1_014460m (locus cassava4.1_014460m.g) derived from phytozome v7.0 (chr-ID scaffold04796; pos 400038 to 401024)
gtcttggtgacaagggctcaaggtattgatgttaactttatttttttattttttgttttatgaattcttttctgcctggtttccatttgaatgcttcacaaagagttagatcttttaatctggtttgttaaaatacattttttgttcacagtgctagatgagtattagcaccttctgttatttgtggtttttgggatgtgcatggtttgaaaaattatcaaaattaaggctttgaggtaaacattcttgtattttgatgtgtttgttttttatttataagtatttgctgaaattctactccatttgtattatctggagcatctgccttaaataaagatgatagatttgtttagaataaagaaaaggggtatggaaagtcaatatcttgtcctcttctggtgtagaaatttggtgttaaattaacttgaagtatgttttttctagaagattcttatcctgttgattggatggatggaagagagcaactgtactatgggcgatataaaatgtcgttacttttcgctttcatccttattttttattgatctaagctattctggagtagcctggaatccatatctggatatgccaagccttagaatgggggaccactctttcactagattgattggcctttcaagtggcagagaaagttacattgtttccatatgatataatactaagtatttaattttgtatttctcggaatacggttaggcaaaccaaggtcacacatttagattttcatattgtatgatctgttacgttgctgctaaaggctagtgcttgactttgagagtggtcccccaaagttagaaggcatttcttcagttataaaataatttcttcaaatgttttgaaccctttacatcctgatttgttgcttaagccatttctaagatatcttgtatggtgactaatggatctccccattctatgctttgtattgcagctggtcccaactcctggaaacccttcctcttccaa

SEQ ID NO: 47195 - DNA, 807 bp, Manihot esculenta
  Intron number 1 from transcript cassava4.1_009243m (locus cassava4.1_009243m.g) derived from phytozome v7.0 (chr-ID scaffold00847; pos 642288 to 643094 reverse strand)
ggcacaacttcaagttcgtaggtaaaacaagttagttagcttcattagcattgccaaaaaactttcagatgggtatctcaataccttacagccttattcaaaggaaaaggaccacatcatcaaataatttcatagagctaaaaagaattcaaaacgttaaaatgaaaggaaatataaaccaaatagaatgttttttttttctgaaaaaaggaagtattgacatccagaatcaacaagcagaaaagtagcgtccttccatgttaaaaataaaagataaggacccaggaactgcccctggggctgggagaaagggggaaagttatatattattttggatgtttaactgcttggaaataaaccaaccttggaaactcgaatttgaatagctaaactctttatttaattgactttgaaagtccgggaagaatcttgtctagtggttcttctctgaaattttaactctggctttatgtatatgatgcttgacttaggggagcaaattttagaaactttctaattgatttcaggtaaatttttacctttcttaagtgaactgaaaaattgaagtctttagtgaactacaaaattcaaagccctttttttcctttttcattttttataatttgtgtagaatgtataggacaagccccaaaacttttatgaatagcgacccttgattttttttttttcccttttctagctgaatggagttaatgaactctttggccccggtcctagttaactttgtaaattggcagatttataagtgttaaaaaattttgttgtttccagctctgtttcaagctt

SEQ ID NO: 47196 - DNA, 547 bp, Manihot esculenta
  Intron number 1 from transcript cassava4.1_007229m (locus cassava4.1_007229m.g) derived from phytozome v7.0 (chr-ID scaffold08473; pos 92207 to 92753 reverse strand)
cttgagtatcgtaaaatcacagtcaaatttggcaggcaagtttcttctcgtatacacacattatttttggagttttaaaactattagaatggcagttactgtcttttaatggttgaagaagggattgggaattcttagttaagtttgatgttgaaagctaaagagttgaagacaagtatttctgggatttttggagtcatgaagtcagggttcaatttattatttttgtttggtgacttgagaacctaggtaattattttatctttctgcttttgtgatgataagaagtatttagttcctgtttgagtgatggaaatgttgagctctgcttttgtgatgataagatagaagttagttcctgttcgagtgatggaaaatgttgagctgggcaactgtagcaggctgagcgtgtgaaatttatgaagttaatttgatagaattggcattgtagtttaattgtttttctatgattttagctctttgcttctgtacattatcgtgtgttgttattgctcatttacattttgattgtgagcttgcagagaag

SEQ ID NO: 47197 - DNA, 923 bp, Manihot esculenta
  Intron number 2 from transcript cassava4.1_018767m (locus cassava4.1_018767m.g) derived from phytozome v7.0 (chr-ID scaffold11584; pos 213899 to 214821 reverse strand)
ttcctagtgctaagacccttggcgagtgggctggtgtgagtattcttcatttgctagcttttataatttcgggttttttcaagtgaaatctatgctcttcttctttagtcatatgaatttgcatgatttttgttattgtgatcccacttaccattagcaaagatcatagaggtttgtgttttgttttcattgtactgaagaaatagttataagattcatgattgcacgctcatgatggggatgtctggaaatccattccagatgcagggctgccggtgtatccattgcttgggtttctatgcatcttggatatctcaatgaaaatgatgctttctatttccttattggccttataatttgaaatataaggccaatagtcatgtttgtttcctcaaccatgagatggaagtatgaagatactggcacaaactagtttatgcttgtgctttctttttatcttgaatcaatctcttaataagatcaatttctcatccatctataaacttaaaatttcaaaaaaatgtgaatttgatgaagacatatgcaagaacagaaaatatttgtacaatccactatcttccttggtgtgaatcttaattatatatactcttatacactattggttaataggtttagtagttatggtacttctcgtctccctaaatatttggtggagtcaatgaactatgatttaacatatttttatttgtttcctcaaccatgtaccaagatttttgacttgaattatctaatagtcatgtttgatgtttaatatcgctgcatagatcactactttttcactctggtctaattttcacttcctgaatctagttatgatttgctaactataacattatctcatggtacttcttgggttctttactgcagttgtgcaaaatcgattctgagggcaaggccaggaa

SEQ ID NO: 47198 - DNA, 549 bp, Manihot esculenta
  Intron number 1 from transcript cassava4.1_007534m (locus cassava4.1_007534m.g) derived from phytozome v7.0 (chr-ID scaffold05084; pos 13975 to 14523)
caacaacacttgacaggtaatccaactttttctcttggcattattttttagatttcaatggattcggtttatcagcaatcctcttgcttttgagtttataattcttctatttcttcttgcaatcaacatataacaaatatctgtaatttccatttcagatttctctttctggacgttgtttcatctttttcattttcactcgtgctcttcttccattgtttgtggaatcagataaattttatgtgaatgtaactgtgatacatgtctcggttgattactggaatgaaagaaagggaaaattctagaccaattatttcccctttaattatagtgggttgtaaaacttttaatatttagtagcaagtagaagtgtttgttgatgatttttggtctctaagttttcaatcgcttcctaatatgtttgaaagctccatattctcatagattctgcaactaatttcaccttctcagtcacttcgtctgatctatttctccccatgctgttcaacttcaggtgaacaagtcttatatcttccggtgggattgaaa

SEQ ID NO: 47199 - DNA, 722 bp, Manihot esculenta
  Intron number 2 from transcript cassava4.1_018764m (locus cassava4.1_018764m.g) derived from phytozome v7.0 (chr-ID scaffold10163; pos 95441 to 96162)
ggtggtgctcaggtagtacctgaacttccttttacattaagaggttaacagtctttcatgtgtttgctttatgtgaacaattacatttacaaatgaaacatttaaatgattatgagaatctgacgtgatttgtccaacaaaatttttcctgtgtcctttttttttcgtttttatttttctgtgctagcctaatggttagcactgaggcctggaagatgttaagtttgttgtttgctatcagcttcttgcacgttgaggtttccaggctacctcaagggtccaaggggcgattagtcccaattttggctgtccttagtaggcccttcaatggtccttcttgaattgctacagtttggatcacatatttgtgtcaatatggattgtgtatcagtgcatttgacaggatatgcctaactttggaccccaaaactgataatagtatttgtttataatgaacactgattgattcatttaggaatgcaaaacattcaaaaattactccagcaacttcaacttgggttgctgtatttttttttccctgcacatgttatttattctcctctcagaaattgttaggtcttttcctttttgtttctgaatttccatggtaatttcttagtagattataatttcttagccctgtaatctgttgctctttgagttctgatttacttgttttgcttggaaattttcaggctgctggtgtactgtcccaaatagaa

SEQ ID NO: 47200 - DNA, 812 bp, Manihot esculenta
  Intron number 3 from transcript cassava4.1_004780m (locus cassava4.1_004780m.g) derived from phytozome v7.0 (chr-ID scaffold11179; pos 254191 to 255002 reverse strand)
ttacttgtggaagaggaagaagctgcccagagaaggtgcatcctatttttggtttgctttttggctttgttctgtaggccattgatattccttgtcctgttgaatctaaataataatgttgtaatttcttttttcttttttctttctcatgatgaatatttctatttcaatgatttgagcgttaatgaattaactttggatgaattttttaattttgggtcggagctgctcatgttggtactagtttacaaggtggcaaactagaggatcatgggcagcccttttgcattaaaagatggtgaacctggattgcatcagaagtttagaactgaattttctcagttcatgaaacatgcaattgaccttaatattaggatgcacacacgtctatgagaagaaatgtggttgattgtgtgagagggagacgcactaaaaaactatatatcctagacctttgggagttctgtataattatatgtatatatattctaaagcatgaggcgttaggaagactcttagaacagatagcaccctaaaattctcaattgtgttattccttcatttccttaagctccacgggaacttacttaatcgaaagccagactgctctttaaaatcttctaaggtagtttttgaattatgaaagtgtttcttgagctcttcaagacctcagatttgcttaggctttaaggtttcttcttcaacgtaggacttatatgggaagagagtgatttgcttgtctaactactatttttatattctctaaaatgtctacagacaagctgagctcttggagaggaagaggcagaaaa

SEQ ID NO: 47201 - DNA, 771 bp, Manihot esculenta
  Intron number 2 from transcript cassava4.1_002801m (locus cassava4.1_002801m.g) derived from phytozome v7.0 (chr-ID scaffold02817; pos 227930 to 228700)
tacttctcatcacccagtatgtatttctttctcatattttagcttaatttagttgcttatcttgggtcatttttcatttgctgcaccagaggatgatattttaagtttatataattgatttctatttcttgttagggtgtgtgctagtgtcaataatttagctaacataaattagtcattggcaaaagggttccttctcatagtgactatgttgaatgaaacttagtactgcactatgccttttgaggatgacactttatttttcacatgaatgaatatttgctggatgtaatgcgattttgatgtaacaattgcattagatacttagttccatgagaatatgtaaaagcaaagatgtacaagggtctcagaattagaatatgtatgtatgtatatgtttatgtatgtaagtgttgtgtgcttgctcattggttttgttgcctcccctagaagctaggcatatgaggttggaagagttagtagtggacaggtagaaaacttgggtgaggtgtaaagttttatggaagctaattcttttggaatagcacttagccccccccccctcccccgtggccggaaaaaaatctcccttctttattcatccctttttttattcaatttgcagtttccagatccactttctgcctttgctttctgaatcaaaattcttttttcttctctttctttcctccctcatcctcgtctctaatctctatctttgccacttaataactatagtgatacttttttcttgtagctttcacttggatc

SEQ ID NO: 47202 - DNA, 346 bp, Manihot esculenta
  Intron number 2 from transcript cassava4.1_001671m (locus cassava4.1_001671m.g) derived from phytozome v7.0 (chr-ID scaffold02658; pos 910511 to 910856 reverse strand)
ggggtatgagttgttcttttgtttcatcatccatatatgttctcttattttttgaagcgggtcatctgtgggatccgcatattgtaatgaagaataatggaagtaaagagctactaaagaagagttctgatctgaactttatatatttcagcggtttgaaatggatataatattaagggctgggaatatttgcattcatgtcctcactgctgaattagtctgtagtagacggcttgaatttgaagttcctatttgaattggcatgaatacttcttaactttttgattgattcttgcatttttcgattatcatatttcaggtccaggctgagaaactgtatattgaa

SEQ ID NO: 47203 - DNA, 427 bp, Manihot esculenta
  Intron number 1 from transcript cassava4.1_001671m (locus cassava4.1_001671m.g) derived from phytozome v7.0 (chr-ID scaffold02658; pos 910961 to 911387 reverse strand)
attccgttgagtaagtactgttaagtaggctatgaacctttttttttcccaaaaaggatatggaattctttagcaattgtttgaatttcgacctgcatatactgggactttgtttcctttttatttcattctctcgcttttaatcatattatgattttgaatttggaaatcatacagcaataatggagacttggctaaagttgaagaatttttatgattatacttattgactctatttctacaacaaatttggctgaagttgggattgaaatcctatcttttactgctaaatcattctggttgtaattttaaagagcaaaaaagtgaatagctttatagatttgcatatgatgcctcttaattgaaatggttttcattattccgggttttatttttcttctctgtactgcagtgggtacaaaatttc

SEQ ID NO: 47204 - DNA, 277 bp, Manihot esculenta
  Intron number 1 from transcript cassava4.1_032015m (locus cassava4.1_032015m.g) derived from phytozome v7.0 (chr-ID scaffold06701; pos 79025 to 79301)
gattccccctctacttcccctctatttcctctcaagtaagcaccccattttgccctaattcgattgcgttatagtatcctaatttatagaatgtgcaggggaacaagatatttttgcatttccttccataaaagaagaaattttcttttgaatttccttgaaataattgaactagtttgcatctatcttgtttgtttcaagtaacggagtgtggataatcgctgataaattttttgttaagactttaagctaattgttctcaatgccatttgtaggg

SEQ ID NO: 47205 - DNA, 1042 bp, Manihot esculenta
  Intron number 1 from transcript cassava4.1_003079m (locus cassava4.1_003079m.g) derived from phytozome v7.0 (chr-ID scaffold11106; pos 106415 to 107456 reverse strand)
acttttctgctcatcaatcaatcggattttacaaggttacttttttttttgtgggttttatttgtttttctcgttttttcattttttgggagtacataaagagcatacaatgtttggttattaatgggattatgatttagatcttgttggagtaatgggttgttctgggattttttacaatcgaataatgaatcttgaattaggaaagcagatctaaatttcacgttagctttttgtaatgtgattaaagattttagcttcttgttttgttcatgtgttgatctattgaaataaatagttaaagccaatctttagttgttgggagcatatggaggatgtaaggacgaaaaagattggatcttgtttgacggtgctggaatttggttatatgaacggtatctgcttgcgtgtgttttacttttcaatggctaaatgctttgaattcttttaagcagggtgtttttggaattactgggatgctgatgactttgattgaaactgtattatatcgtcttgtgtgcttattttatttactcgactaaaatcctgtattcaaactaggtcaatgtaatgggccttacggaaatttatttatttatttttttgtgcgtgtgtgtcattaagctgtatatagcagttgaattcaagtttatctggatcttgtgcatagtatcctgcaaaaatttgtgtggcccccatctgcttgtcgcatttatcttttcaaacttgagctaggactttccatgttaacaagaatgaaacatggttcgtaacaccaatggagttagattgatatcaacatgcatataaaatgacagcaatggaatgacaatcttcaaactttttttgtaaagtgtctattccttggtaatcaaaaccccaaaatctatgaactagtctatgtttgatgccgagcttaaatatgaagttatattttctcatactaaatttatatttttccttttcttcctttgtttttgtgaatatcgtttttttctgtccactttatatgcagtgctttcttgtgttctttgtaccaact

SEQ ID NO: 47206 - DNA, 840 bp, Manihot esculenta
  Intron number 1 from transcript cassava4.1_010358m (locus cassava4.1_010358m.g) derived from phytozome v7.0 (chr-ID scaffold11584; pos 133408 to 134247)
ttgttgctgtcaagtatatcgagagaggtgagaaggttagtgtggtctaattgcctttctatttatgtgcttactatttattagattggtttttgttcatttgttcatttctagttaatggtttaagcttgtgtttaatctgtggtatcgttaggtgtttgagctagaattttcattggctaatcagcttgatatgcatctatgtttggctagatttatgtttcatttttgttcaactttaaagataaatgatttctaatttaggatcagatttaattgcatgatctatctatggtttcagattgaattcatttcgtaaatcaatgaagtgatttggtctagtaggtgtttgctttagtgtctaactaaaccagctaattcattaatttttattttcaaacgtatagcaagcattaatttgaataggtttcattaagctgcaattatatattaatatttctcttctggaactggaggattccacaccaaggtaccagtggatgaaatgagaattcgtggatgcccatggagtctagaaatttgtttcctatatattctgaacgtcaacaatattcatttgttatagaagacaagactatggtggaaaaaagattggttacttttcacaaaaagtagcttgaaaagttagaaggatcgatgaggaccaagaatcttcaaatcagaccactcattttgagttttcattctgaaaatgatgtggatagcaccactttagttggattgattctatgtaatttgattcccttccaagcttttttagaaatttccacttttgatattgggatttaccttgcttttatttttttgtataacagatag

SEQ ID NO: 47207 - DNA, 826 bp, Manihot esculenta
  Intron number 1 from transcript cassava4.1_018468m (locus cassava4.1_018468m.g) derived from phytozome v7.0 (chr-ID scaffold06801; pos 78225 to 79050)
aaccccggagttgccatcgaaaccctagtccacaggtaatcaaattccaacaccaagcttcctgtttcttttctttttatgcttcttttttggttgaatgttaattactgatttgtttttgaggcttatggctccgattgttgattttaatgttcagaattttctatcttgcatgccatggagctttttctacctatatttttaagatttttttgggtttttgtgtatatataacaattttttagattaccttgagaaccctttgtctttcaaaaagaatttatttgtactcatgattgggagttggattcattaaaaaaaaaattaaatttatgtcatttgtgttaattttttattactttatctactgcccagtgtatatagattgccaagttgccttcagtgtcagtgtttcagttttttttatttagttttcttttctttaacagatgtgatcattgtttttctgtttattttccctgaaaattaagtggattatttgttttgtgggctttttgttttggagagtttggcatttcatggcatgatttctaaatgggaccaaatgatttttgggtgcttccgttttaatttttgacttgagtccagtactcgggaatattataaaatcttgagaaatacataatgatttgcgtcatatctgtctgtccggtttacaacatacttaccctttgttataattaaattggattgtatcagtccagatcatcctgtcagaggtcctttatttttatttttaatctaatcagagttgaatatgcaattaataattttcatctgttcttgcagttgcagagaatttgtg

SEQ ID NO: 47208 - DNA, 756 bp, Manihot esculenta
  Intron number 1 from transcript cassava4.1_033259m (locus cassava4.1_033259m.g) derived from phytozome v7.0 (chr-ID scaffold03602; pos 570072 to 570827)
gtctttcacgaggtactcatctttgaaccctcgctttttcatctgcaaacatagcaccgcttctgcacttgtttggttcctgaatgaaaaaatgagagtttcacaaatgaagatccaaagctgtgatggcggattttccttgtttattattattatttttttgtttttttggtaatggaagtgaaatcacttcaattagactaagtatttttgctgaagttgattactgaaggaaaaaaaagctgaatcatgaggtttcggctcttgtttttcttcattttctcggtatctagacaatgaagctgtaaattacacacgcttgcgcactatccgttttgttcatggaattatttgcagttttccatctcagaaatttacgtatttacaaaaatgtagatcagagaataggatatttgatgccaaacaactatcgttcctgttgaacttccaacggaaaatatgacattgtcacagttagttgttgtttactagcaatgtaacttgatccatgttatttgatgcataaactgtcaatggcctaaactgtcaaggcaaaaaatgttttcaagctctgatcaattttctaggaattttcaatgctgtgttcgcataagttagcattagatgagaggcagggagattttgctgaatatctaatggttccttgatgcattagctcctccttttgcttgtggttaacttctgtggataatttttgtagcttttgtgcttaaccgacttggaggctgaccagat

SEQ ID NO: 47209 - DNA, 696 bp, Manihot esculenta
  Intron number 1 from transcript cassava4.1_002693m (locus cassava4.1_002693m.g) derived from phytozome v7.0 (chr-ID scaffold09260; pos 81715 to 82410)
atgtgattatagatagctgtgattgctttcaatttattttctttggctttttgaaatcaagtgcatttctcaaaagcagattgtttttttggttttatttgctccagtttttggaattaattgtttttgctttggtgggggatagaatttgtttaaatggggattgaatactttttgggtttcgcgcgttatttgaagtttggttgtggactggactcggtgttggatcgaagttaagtgggtgtatttgactgagtcaagtttttcttggggatgttaattataacaatttattgttttcgggaaatctaggaattggtgggtttgagatttcagctttttctttatttgatagttatatttttccataaataaatattttattattggttctttgtgtttgatctggccttgaggcgcccaaaataatagacgcacagatcttcttgtctgaaaaagcttaaatttgtcttttctttagtagttctcagttattttttgcctgtgcctgttgcctgttgtacttgctcgacttttactgtaacttttctcatggtttcttcaataatcactgaagataccaacaattccttttttttttcgccttctgctttttgttcgagtaatttgcataatttttgttggactaatactcttgcagggtgaaaaggctccgaaagcgacagacactcttca

SEQ ID NO: 47210 - DNA, 618 bp, Manihot esculenta
  Intron number 1 from transcript cassava4.1_002416m (locus cassava4.1_002416m.g) derived from phytozome v7.0 (chr-ID scaffold03741; pos 1094503 to 1095120 reverse strand)
ggtgatttgccaaggtgaaattttctttctctttactctctttcttgtcttcaaggggaagaagcaagggaatataaaaagggaatgaatgcatgtcttttacagaataagtttagttgtagtccaacggaaattcgattgaacaattaataattcattttggtatattgcattctgcttcatcatggtctactaaacaggcaacggaattttgctttaatgttttctgatgttaataatgcttaaacagaaactgtaagctcatctttgttatactgaatagtttattaagattagatggtatgtactatgtagtctgatcctttcttaacttctagggtgggttttgaggaatagttttatattgtccgagaaaagtgtttgattaaaactaacagaactacctacaagggtaatgatgtttaagcttctttcttaaacataactaactttgattgcttaaaaactgaactagttatggacatggccttgcctagagaattcacaaaagtttttttatttttatttttatttttttttacagtagaatttttcttttgatatgttgaaatggtttttccagggaggatattccaaatacacttcggatacttgttg

SEQ ID NO: 47211 - DNA, 513 bp, Manihot esculenta
  Intron number 2 from transcript cassava4.1_024122m (locus cassava4.1_024122m.g) derived from phytozome v7.0 (chr-ID scaffold11998; pos 713522 to 714034)
cagcgcctgacttaaggtttctatcttctttgccattaactcttttttcctcttctgctttgtaactttttagcttattgaattgtttgatatttgaaacttccctggtattcggcatggggaagaggagaagctcaattccatgtcctgtcagctgagatcttgttaatttatcggtacttgtttcataccatatataattatcctgcttggtttttgagcaaaaccaggtgtgctggagtgtaagccttgtcatgccccaaatttagaaattggagaggaacagttggatattggctgtgatttgagtggtcatgccttgtttagcatagctactcttgtttctctgcgggtgcaccctgcctgtttactgcgctgcccaatgtttttgttaaagaaactctatatcagtgcttgtaatcattgacttatttctagctcacattcaacttgattatatgccttgtttttaaaactaaccttcaagacacttttgctttctggttcttagat

SEQ ID NO: 47212 - DNA, 314 bp, Manihot esculenta
  Intron number 3 from transcript cassava4.1_021758m (locus cassava4.1_021758m.g) derived from phytozome v7.0 (chr-ID scaffold10532; pos 13629 to 13942 reverse strand)
ttcaatccaaggataaagacatctctcttgcaaaggtatagtttccttttgtcctattttttggtcatctttttgccctgatgaccatttttgttttttcttttaataatcttatctttttacattatatgcttagatatgcgttttaatgatacattgcagcagaagatgaggcatatgtttgttacattatatgttattgcaaactcaaaatttctgttttcccaacttcactctttatatcttgtggtgattcttaattgcatatgtttgtggcttgttggtgtaggccttgctgtacattgcagcagaag

SEQ ID NO: 47213 - DNA, 885 bp, Manihot esculenta
  Intron number 1 from transcript cassava4.1_020273m (locus cassava4.1_020273m.g) derived from phytozome v7.0 (chr-ID scaffold04718; pos 94255 to 95139 reverse strand)
aggcgagcaaagctttcaattggaagaaacactgggtgggtatagctgtctcatagttttgatttcagattatgcatatttctttctttggccaatagttgcccttgtcaccgtctttctcttttttcaaggattgcttaatattcgctgcaataaatttgattggtcttatgaagcaccctgttaaattttacaattaatgtgattctccgtgtgatttgcgtcgtacttagtgaaatttgtgatggacttggatattgtacttcagttgttcgataaaatgtctgaatgaattttaattgttacacatatctttcctattgtgttcgattttccattttctactgattaactgttgtgctagaggattctgttatttcttttggccttgatattgtgttgttaaagtttgtcgcacgttggctttaatatatactgatgcgaatgatcttattctccaaactgagtgatgaagtaaatttccaatggactaaaattttagttatcaggtttcatcttcttgaacttaagaacctgctatgcctctatattccaaactattataattgatttgtgaatagttctaacccatgagaagtcataggagaatgtttgttctggcaatgaaactagttttacgcacattacattgttgcaagtcatgggctggtctgctatgaagattccttatgtctggcttgggcactccgggaaattatgtagaagggtgaggctaagtacttatcatatgaatactagctttctttccggccattgattatgcgtgggatgtgtaacttgaaatgatactattgttgtcactttatctctcacttttgtgatgttatattggaaatgaattcttgttcacaggaaatataaagt

SEQ ID NO: 47214 - DNA, 748 bp, Manihot esculenta
  Intron number 1 from transcript cassava4.1_009287m (locus cassava4.1_009287m.g) derived from phytozome v7.0 (chr-ID scaffold06609; pos 408879 to 409626)
ccttgctcaaccatctccgcatttatttacctgaggtaatcagatgtaatatgaagcatctcatttaacctgcatggaaatgtagtatgatggctatcataatgaactagggacagaaagggaaaaactacaaaggaaaaactgaacagtggaaaaaagcttatgatgcttgatattagactctgcctttgagcagttactgtgtctgcatggatttatggtttgtcatttcttatggcccacatcttgtcattgaagatgtgtttcagagatttctagtttcttaccagccaaataagtcagaaaataagtttggtacacttcaagatcttgaaatgctataagaacatacattcaatttgtgtagataggaataatgtgaatatactgaaaatttcctaaattctttcaaatcaattttacactaagcctgatttttgtcagctaaacaaggtggtatatggataagatgtgaatcatagggtgatttaacaagcaaatacactaattttgatgattttgccgactagaatagttggttttctgtttttacttacaaggacattggttttggttcctaaagatgtgtgcagtataatctgttacacctgtgagggtgtccatgggtgcattttggatattcagtcattcattctttcttcctttcaactttgctccaaatttgtggttctgattatgcacatattcaacagctctttccaaaccttgacaaggtggtcttcttgga

SEQ ID NO: 47215 - DNA, 741 bp, Manihot esculenta
  Intron number 1 from transcript cassava4.1_008779m (locus cassava4.1_008779m.g) derived from phytozome v7.0 (chr-ID scaffold03750; pos 436320 to 437060 reverse strand)
cattaaacgcaacgatcaaacacgaaccacttcaggtatctatataatattttatgatcattattttctttaatgttttgtttttgaacttttgaaacgtaaccccagttttattgggtttttttttttttgaattctggtttcttctttctttttcagtgtggggccctttttcttcatctttgatagtgatcaaaggggactgtttaggatgatttcttcttcttttttttcccctgttaatttcaagtgtttttgtatatcaataggagattgacagctgaatgattagggaatgctaaattttgactcatgctgaaattgttgaaatgatcaatggctttctcaatattgtgtctctcatgaagaggcatttctccttctggtttcttcgtttggggtttatgttggcggtgatgttattttcatggtccttttattattattattattattattatttaaaatgtttgggaaagtaagtccaactcatagtccaaaaccctcatttgggtgttcaatattttgtccttagcctgttctttgtttgctttcaaatttgatggccttggctttttatagcacccttatatataaatctctatttttaaaaaaaaaaaaaattggctttttctctctatttgccttgcattgtgatttttttttgcatttttaaccattttttttctgtttgtgcttttctttgttctacagggtcattgaaagtaaagccatttgcaa

SEQ ID NO: 47216 - DNA, 855 bp, Manihot esculenta
  Intron number 3 from transcript cassava4.1_018592m (locus cassava4.1_018595m.g) derived from phytozome v7.0 (chr-ID scaffold07351; pos 547952 to 548806 reverse strand)
ggccacgtgggaagatctaacttagcattttcattgtatgtatcttcttttaacattgtaagtctgtctaaagcaaacttaggaactgaactaagaccctgttaataattcaagtatatctccactttttgtgctatttggtgcatgtctttgagttttaaatgctttctgtatgatcatgttactagataatcctttgcattttcttaatatatcagtgtactgaaatgagctgttttcttccaagcagtaatcgatgaattgtataggattagataagcatagtaactctagcagatttataatttgttgagagaaaattcaagttgtacaagaaaaagaatgaatctccatttggaactcaacaaaaaaatgacctttgagtctaacatactacatgtgcatttcttgtacaaaagaaagaatgtatgaaatgcttcatatacaatagtttttttatacttatatgctttcttcctatttacaaaaggaaggaatgtaaatgaaaataagaaaatctttgataaaaaggatccaacagaattcatattcccatattaggctttcattcctctatctctcttttgtgtttgttgttatctccatattgttgctgtcaatgtcgagctgtagggcttctttgtcctcctaagttctcaagataagaaggtttcttgatggctactatgctagcaagtttttctgttaactttaaatttaagccttcgatttcttcatctggaatttcatctgcctcattctttgcatcactatcatttgattccatagtccaacccatgaaatctgacagtgtcattgaattgggtccctcagaagctgtctcgtccatcggcg

SEQ ID NO: 47217 - DNA, 636 bp, Manihot esculenta; identical to SEQ ID NO: 46843
  Intron number 1 from transcript cassava4.1_019217m (locus cassava4.1_016557m.g) derived from phytozome v7.0 (chr-ID scaffold03219; pos 572468 to 573103 reverse strand)

SEQ ID NO: 47218 - DNA, 762 bp, Manihot esculenta
  Intron number 3 from transcript cassava4.1_005667m (locus cassava4.1_005667m.g) derived from phytozome v7.0 (chr-ID scaffold09372; pos 387048 to 387809)
taacatttacaagatttcaacaccattatctagatgtaagttgatttttgccatggttgctttcagagatgttcttgattgaactttgttaaaaatgtatacagtaaaatctcaaggtacttagcttcatagttgggatttcttttcgttgattacttttcttttctaatcaggtggctgattccaaatttatgatctaaagggtagagaaataaagaaaattccatgtgtttgatatgcttttgttagccacaagtctccactttttgaagtacattagtgcttttagttttgtttctgactaaccaattctatctttttggagatcttcacccttttttttttcaattatgaagccctacattctcacttgactgagcaaccttgctaatcactcttagtcctttaccttctttttgcataaatcttaaacttcaagattagtatgtaattctagtttcttcaagaagcttaaggctgtaattagtttcaacaatgagatcccaataccactttttgcttttcaaggttaatgattctttgttcaactttcaaaataataggttagattctttttgttttcctcagacaactgataaatatccagatgctcagattcttcctctttgatcttttgctttttcttggaggatctcaatcaaatcatgtggtagaggtggaacatataattttttattatttactgagatggcttgatgaaatgcagatagccggcccaagctgatcgctggatcttctgaa

SEQ ID NO: 47219 - DNA, 936 bp, Manihot esculenta
  Intron number 1 from transcript cassava4.1_015912m (locus cassava4.1_015912m.g) derived from phytozome v7.0 (chr-ID scaffold11689; pos 315582 to 316517 reverse strand)
attctgatcgtctggctccctggtatgtgtttttcaattttctttttctgtttcctttctgggttctttcgtaaatttttgcttggtttgttaccgggtaagttacagaaatgaaggcaatagagacagtgtagaagaatagaaatactaaaatgtgcggaatagaaatcaaattttgagatgctttgttattatacgtttatgtactcattttatttttgaattgttgagtatgtatatatagtgactattatttttgagattgggaaaaggtggagggagtagcttttgaaattcttttgaggattataatttttagttatttagagtcgttcaacaccatcataaattcagcttgttgtatggtaatttgggtttttcatcgtctgtggtgtaacctttgcatatttcataattcaactcttttccttggaaacaagagaagttttggtgcatataggtaatagtttgaaaagcaagtttgtttgttgttattgtagtgggcttatcctttcaactggactaaaactttttacaacttttggttgtttacctttttatatgaactattaaactgtttcctgttttgcttcttcatttagcagaagagaaaataatgtttctctttacctttagtcatttctttaggtctcaactctcaaactctttaattaattaattcatttatcttctttcgagcatttttcacaagcatcagttcaaatggcaagtaagcagggtatgttggtttcatcatttttacggcaaattctcaactatgaaggatactcactttagcactttgtaatttttgtcctttaaagtgaactgataagttgatgctttcctcttgattactctaaggcaactaactaagcccttgtgttctcatggaatgcaggtttatttatactttcctcggcctcggggttattt

SEQ ID NO: 47220 - DNA, 635 bp, Manihot esculenta
  Intron number 1 from transcript cassava4.1_000914m (locus cassava4.1_000914m.g) derived from phytozome v7.0 (chr-ID scaffold02264; pos 759944 to 760578)
agatctgcctctgctctgcagaggcgtggcctaaggtttgtacaactccatttgcgcgtcttgtaaatatctcttgcagatttcgcttataatctcttaattggttcctttggtagcttttattttttgggttggtggattttttttaaagagattatgttttgagctgtcggtgcttgtgtttttgcttaccagattttggggttactcgcttcttgtatgttaccatgtattttacagtgtccctgtttgttcctctatagtttttttcttcctgtagtaaacttttcagttcctgtttgtgcttttatttatgcaatttctgtgccagtgctaaaccatgtttatcttatggaagcccacattggaatgccatttttttgctgctttcttcttgcctttcaaaagtaaaagaaaaggaaaatgtggcatttgttcctcttacttttagaaagttgcattttgatttctgggtgttaaaaattaatgctgacatcctcattgttttaatttacttgttctggcgaaattgtgaatctacgatttgggcttccctagttcttgatttgggatttttagcggatgaactcagctggttctcacctattttctctggtcatgacaatgtgcaggaa

SEQ ID NO: 47221 - DNA, 788 bp, Manihot esculenta
  Intron number 2 from transcript cassava4.1_000914m (locus cassava4.1_000914m.g) derived from phytozome v7.0 (chr-ID scaffold02264; pos 760676 to 761463)
ataaaaaactgcttgcagagatattccccaagtctgtgagtattaaattgttcatattttcttcttcttttccactcattggtatttacgtgctgataattttttggggctttagtatcaagtatattagaccgattgtgaaattccatttctataatttgtcatcttcatactgcaatttttgtttagctacagtcatgtctagattatgtgtcatggtaagtagagggtaaaaagacaaatctgtcctttgaatgcacatccttgctatagtgtatgctcacctctacaagttttgtgaaaaatctatctgtctaacaaaattttggacttgaaaagaatgagaatagatcatctttctcttggatcttggaagaaatggtgggaggagtggatgaatttattgcttagaaaggaagatcgctggagacattggaagaaaaaattctgctgttcttataaaacaatcaaggactgtgatgggttattattatttaacatcatctagcatattccagaatttgttcaatggacggaagtgagtcctacaagttgcattacacatgtataaatggatttgcattaagttttgttttggggacaatctagccattagagattccactatctgcaatagaccatgggaagtgatagtcaatactggcaagcggttttgtttgcatgttgattgtagatgattgcttaattatttccaatgagtttttatgccttgtttctgtttccgccaatgactggtgtaagctcaacatttcacacttctttgcagg

SEQ ID NO: 47222 - DNA, 439 bp, Manihot esculenta
  Intron number 4 from transcript cassava4.1_012245m (locus cassava4.1_012236m.g) derived from phytozome v7.0 (chr-ID scaffold11495; pos 150752 to 151190)
ctggaacagagttccaagtctcttgcattgagcaggtgtcccttgattttgattttgattttgaagttcattaaaatgtctgaacaagcttgtgttttgaatactatatccacactgtgatgacctttgaagaaatctccattgtgtctgatgccttctggttggaaccagtggctgttcgtttcttctcctagcagcatactaggagatctttacaaatggtgtttgacatttgatactgacattatatctgaatatggaatacatgttttgtagaacagctggaagggaatttttccttcattggttttctttcaattaaagataatgctagagattagtgtagtgatgaactgctctggatttaaacatttatatatgcttttaactgaaggatggcctttttttccccctttttgtgttgttagagggtgcggac

SEQ ID NO: 47223 - DNA, 592 bp, Manihot esculenta
  Intron number 1 from transcript cassava4.1_012284m (locus cassava4.1_012284m.g) derived from phytozome v7.0 (chr-ID scaffold03104; pos 142765 to 143356)
ctcaaacacggtacgcttctcaactatcttgacctatagacatctaaacttacatttctaattaagttttagggtttcgttgatattttgttctgtttgtgactgaagctgaagctagggttagtcgatctcatatgtgatttttgggttctgttcaatcttgcgcttacgcatttggattataatacatggattttgatgcaatttagggatttcgattatgcgttgtgtttgtttttttggtgacgtcatgctgtctaattaaaatttgaatttgcaaccttgcaattttttagtcatcgattccttctattaactgaacagtttcgtagacatttttgcagcatttgagtcctaattatcattctcctctatgacttgcttttgtttttgttttaatttttgttccttgtatcacaattctatatatatatagatggtggattattgactccatgttggatgtgaagatttagttcctattttcgtttacattgtcttctttgagacttgtaaatatcctggactgaaattattatcatatgcaacgtttgacttgactgacatgaatataggaagagctggggtcccc

SEQ ID NO: 47224 - DNA, 535 bp, Manihot esculenta
  Intron number 3 from transcript cassava4.1_001530m (locus cassava4.1_001530m.g) derived from phytozome v7.0 (chr-ID scaffold02892; pos 993525 to 994059)
cgaaagttcgtaaaggtatccttgttattaatctgaaaatttaatgctctggttttgaagaaatttaggacaagggaagttagtaaaatatcataatgtgggtattggatgggaaacaaacttaataagggacggagaccatatattatgtaacttttctcttgaaattaacataagaatgatgataggtatcgttgcatacatgcctgttaggtattgaatttttcaagtaatacgtttttccttgttgctgaaaattatttacctatttgtctccattacgtacttcattattcctttatgttcatgtggtttgtttttttgtttaagcatttgtgtaatttgtgcatgtgaatcacaaaatttacaggttttttctgcctctagtaattcatgtatatttgattgagtttactggttaaattacttgaaagttctatctcttaattacttttaatgttctattttagcccctgcattcattattctgccactacttcatgaatctcaactgttttatctctttcttttgaag

SEQ ID NO: 47225 - DNA, 775 bp, Manihot esculenta
  Intron number 2 from transcript cassava4.1_015645m (locus cassava4.1_015645m.g) derived from phytozome v7.0 (chr-ID scaffold02441; pos 47461 to 48235 reverse strand)
attctcacccgggagtactccaaaatctgtaaattgtgcgtgttttcagttctcgatttccatttcccatgtgtagattaattgtctatggctagtggctacttgttattttcgttgggttgttacggtatcttctgagaattaagggtaacgtgtggtttttgaatattttaggttttaaaaggggttgttagggacttaggagttaggagagggcttctgttggtttctactaattttgaatcaggctatgcccattgaaatggattgatgggtgttgtttgacaatttggttataaattgggagcatagcacgcaggtcttttttaccctttttgaatatttttatgctaagcgaaagtgtataaaagatgaaaccatggaaatgaaatttgattgtatatattgagcttttcaagggagatcatttgattgtgaaatacaagtcaaggtatattgaaagacttgatcagactgaacttaatattttgctcaaccgcccctcgtattaaggataaggtcctagttaaatccttgtcactagctgatatatgattttttgcttcaaatctgagctagtctaaatacttaatgtgtcgacacttgtgtttaatcattgattacatgcctatttgttattgaggttcaaaagctaaattgaaaaagcaccatttagatgtgtgtgcgagtgcgcgcacttgcacttgtgctttgtcttgtttatgacattgactggatgtgtgttcttcttgtgctcagagctgaaaaaagtgta

SEQ ID NO: 47226 - DNA, 885 bp, Manihot esculenta
  Intron number 3 from transcript cassava4.1_009129m (locus cassava4.1_009129m.g) derived from phytozome v7.0 (chr-ID scaffold00506; pos 205795 to 206679 reverse strand)
agttagttggtccagctggaattggtaaaacacaagtatggctttcatctaacttcgtcattgtatttatttatttttttctcacttttggcttatagacagtgtgggcttacgaatgtatcatcatgttttttaatgtgaggtttgtatgcacgtacattctatgtgaagcttttaggatattgggattatgctgaatattgcggcttcactcaagatcgctaggggtggatcatatgctgtaatcactcattaataaatagtattgcaccaggattggtggaattttattgaaaaaaaaaaaaaaaaaagaagaaggctgaaaacaactttagccaagacgctgagaaatgagatgttggatatttgagatggcttatacttggtccctgataggaataaatggtgtagcatttcaaaaccttttttcctttagaaatttagattaataataacttgatttgaatttaactgtagttctggcaattgttctttttttcttttctaattcataacaagtctgaagaaaactttgaggtcttggattgtagatgcatgtttggtctgtgacctgcatacgctgctgcatgatgcactcatcacaataactttcagaggacaaattctttaatgtagctagagctggtttaacccgttaactgccttttcactgtgattgatttctttgccaaattattcctatgattattacctttgctccaatatcatcttctccttgcgagtgttacataatttcttgttgttgcagcctaatgagatgtgtgtatctgtgtgctttatggacaacatccaatttgagtagttctttgatgtttttctttaactgtagttttgcctgaagatatcgttgctggcttcactgcc

SEQ ID NO: 47227 - DNA, 744 bp, Manihot esculenta
  Intron number 3 from transcript cassava4.1_008032m (locus cassava4.1_008032m.g) derived from phytozome v7.0 (chr-ID scaffold07238; pos 318065 to 318808)
gatcctcaggtattagctggtataaaacccgagctgtgcctattatcttctacattactggttgttttcatcgaactatatcaatttgtttatgcgttgacgtcgctggagttttttgtgatgatattttcaagtgcgtcattgtccagagatgggaaatttcatctattattattagtcattccaatgtgggagtagagtttataagtgatgaataaataaataacagtaacaggaagtgaaaaacgaagaaaaactgtaagaccggatgccctgaatctgacatgtagagattaacttgatttagcattcttaattctccataactgaatagtgagcttgtaatatatctgtgctaaagtcaaacgagtgagaagacactgatacacttggtccctttcccatttttcccgtgttttttactctttacccaggttcaaattctccatgcattgttaggcaatttttaccttgtcatttatcattgatgctttaatatgctttcattatgagttcttattatgttaagacttgagagaggaactggaagtctggaactcctggacctagtaatactcaagctccctacattttctccatctttttgtctctttttatctctacttgtaattctctttgatcacaattttagtttatttcagaatcataatttttatttgttttactgacttcaacaggcatatgacaggctactctgaaagcagaagacatattaaattgctg

SEQ ID NO: 47228 - DNA, 627 bp, Manihot esculenta
  Intron number 1 from transcript cassava4.1_028203m (locus cassava4.1_028203m.g) derived from phytozome v7.0 (chr-ID scaffold03883; pos 370334 to 370960)
gaattatccttggtatgttattgcaactatgaatattttattatatatttatggataagattgtcatgttttgttgaattggactctttaaattgagcagtaacgaatgcagggatatggtgaataagaaacttgtttcaaacctgggagtcgtctctttatacaaatcataaaaagctgttacttgtaaactagttcagaaagcaggatgccaaattgccaattgcggttatattgggatttgggagtgcttatagtgaacatattgtatgctgcctgctccttgattgatttcccataatctacttcaaagagacaggaaatagctttgccgagtacatattctgtgatcattgcatgatttatgggtgaactctttctccagcactcgtaactttttttttcctttctttctaatgcagaaggaaggagaaaaaagaaaaagctttaacatgtttaacatatttaacatattctgttttcttcattcgtctaatgttcttaaaattttctattaactaagttggcttatcaaatcttcagttttggagttatattgtttctccagaaatatgattgagatatatgcaaccttcatcagtttgcactttgatttccttttagttt

SEQ ID NO: 47229 - DNA, 1042 bp, Manihot esculenta
  Intron number 1 from transcript cassava4.1_030159m (locus cassava4.1_030159m.g) derived from phytozome v7.0 (chr-ID scaffold03818; pos 189454 to 190495 reverse strand)
cttcggtggaaggagtggaagtgaaactgtggcaggtttgtagttttgtttgtaatttgaattaagctatttgccttatatcacttaaatgttttgtcagtctgaattatgtctcatagtttgagatcatttgagttcaatgaaatcttttcaatttgactgagttatactctccgcttgtaattaagaatttcataagatttcaattcaattaatttttttttctaacaatacttttgttttgaatgaaagaattcaattctttttagtttgaaaactttcattttaaaagaagcaaaaatctcacataattttgcaaaatttatttgaattcttttcttgcaaaacaaatcatgccaaacaaggggatagtgactagaacattggaggatatattgtcagtataaagctagtttcttttgcagatgccaagggatgttctttcaatttgatgtaaataaagcttcaatgatttattttccattttagctttctagccagagttaggtttaaaatcttgtagaaagaaaactgatattgccttttgcctgtcttctaagagaattgccttgagaaacattgatatgtatatgccaacagtagaagagacttttgtaagcattaccctctgtttcttatatgactttgaagctatttctttcctgtgctggacaagattttattgtctgggaacttcagaaagaggattccttctttttttaaaaaaattctttttggaggcaaaatttttttttattcttcaagaatgtgaaagccagttgagttttctagttgacagcatataattttctaattttagttgcctcaatctaaaacatgtgttctttatggatctccaacatgattccattgttagcttgtcaaaaatatttgaattatcaccggaatcatacaataaacgacatatcctttctgacttgcctggttttctctattccagagtaagaattagagttgcctgattgaatttgttggcacatcaacaggtacctgaaacactgtcagaagaggttcttaagaa

SEQ ID NO: 47230 - DNA, 1006 bp, Manihot esculenta
  Intron number 1 from transcript cassava4.1_002532m (locus cassava4.1_002532m.g) derived from phytozome v7.0 (chr-ID scaffold03098; pos 71580 to 72585)
agagcccagcgtaagtagttttttgcatagccttcttttaattggtttttattgattttcttctgttttatttttgtatatcggtttcaatttctgctcaaattgtatatctgaaatagaacatattgagacctcgatatgctcctctgaatgacagaatatcacatgttcgtcaactggttttcagcttatacgtccatcatgatgtcattgcttaaagatggagttgtaagcaatgttataggatggttgctgttggatcatttggtgtccttttaatgaagattgatgtaggtaaatcatgactgggttttgtcagggaaggctagcttcccttaaaaaatcaataatggtgttttagtaatacttttgtttctcgcagtgaccaaggttggaataatttagagacgctgcaatatgcatgctgtactcatctaaaatttcatagtaatcatgacgtgattctgaataacatatgtagttctagaagttgtgagtcttcaattatattgctggttccaaggatcttgatgacatatgtataacactagatgttagaaataaaacattgtctaattgattactaatcaaaattaccataactgctcactcaagtgttcatatcccctactcacaaaattctggccatcacatgtggaggtggtctttccattctctttcttgtagcaattgtttgaaacatccgtggttatgtcctataactgttacatatcactaacactagatgaagctttcttaattgaaatttctgtggaattattacatcatttagatctatttggtgaaataaaaggaactcattttgagacactagtttacctgcatgtttcatattcattattatcacttcacataatgtcatgattttgctgaatgtaagatgtatcaattgcagtttgcacagtatttatcggggatgtctaaattgattgtatctagtatgatatctggattcctttttattacaggattttgagttgggaag

SEQ ID NO: 47231 - DNA, 831 bp, Manihot esculenta
  Intron number 1 from transcript cassava4.1_005465m (locus cassava4.1_005465m.g) derived from phytozome v7.0 (chr-ID scaffold00940; pos 174124 to 174954 reverse strand)
aaagagtgcttccaccaaggcacctatcttttcaggtaaaatatgaatttatagtattattttaaggtttggtttaatttaagattattcatatgcttggaggttataaaatcatgtttaattcagaaattttatgcaaatcacttagttcttgacatccttacatgttcatgacatttagaatttgagaacaaaatacaacttccattgatttcaatttgggattaaagtagaaagtttctagagtttgtttttaatacatatagattattggtaaaattgatgattgaatcctattttagtgtatttattaaaaaaccaatgaactaaaacatggaaaagagcacttggaatttatttgatttaaaggttagactaatatcctgcaaattaatatgatctttctgatattgcatctctcttcaattctccaaaattggatatattattgcctttgaattgaattttgtgctgtttattgcctcgttaaaagtttctttacctcttgtttggaataaaaaatttcacaagaattctatttaattctttcataccaaattttttatttggaatggaagaattgatttcttaacttacaaaatttttatttttaaagaaaatgaattcatgcatggtgttgtaaaaattcatttgaattattttcctgcaaaatgaattatgccaaaggagggtagtgtctgaatgcagccgttgtagatttgagaaaggatatgtcctttatcatattgttcaatcaacattgtactctgagatgggactgttttgttattccctgactacatggatgtaactttggtgtatttccaggtg

SEQ ID NO: 47232 - DNA, 421 bp, Manihot esculenta
  Intron number 2 from transcript cassava4.1_006903m (locus cassava4.1_006903m.g) derived from phytozome v7.0 (chr-ID scaffold02871; pos 281235 to 281655)
tacccacttggttgtccagatatcctttaattgtgtttttttttgggggggatgaaaaataggttttttcgttttttgttatttaacatgaaaaatgaaaatttttgtagaaatatgccctttggcttgctgtgaatggattagcgcattggctttgtatgagaataaaatattgaatcagcttcagttgaattagatggaaaatcagaaacttaaaacaaatggaaaggaccatatatcatatttcatgtttttattactttgattaatccatctgatgcttattgataaaggacaaggaagactttgtgatttgatcctaaaacaatacatacactctgcaagtttcttattctcacaaatgcaattcttttgtgataccttgacacttaatacagctttggtggacgcaagttcgagc

SEQ ID NO: 47233 - DNA, 733 bp, Manihot esculenta
  Intron number 1 from transcript cassava4.1_023970m (locus cassava4.1_023970m.g) derived from phytozome v7.0 (chr-ID scaffold12587; pos 302424 to 303156)
ctcaccgaagtcattgataattcaagatcctcaatgtgacttagttgatagagcttggaggatattaatttcaggccaaaaaacagtgaagttggatgccgtagagagctgctgtgggtaaaaattcattgtccagccatgcttcacttggagtccttgccttgtcctgcatcatttatttaatatgaaagcaacacaaacacatgccattctttaacaagttactctgttaaaaatagtctaaaaaaatagtccttgagaactttattcaactcattaaacttaaaatcctggttaaggcaaaaggattagttatgtgggtgcttatgcacagaagttatgctggcttcattttacttggtgcttattaacagcttccccattaatcttaaggattacccttctttcatgctcttaaaagcaagaaattttgacattgagaaatctctttcatgttcttaaaagcaagaaagtttgacattgagaaagcaaagcaaatgtgggccaacatgattcagtagaggaaggtcttcaacggagagagggagaatacaaagaagatgagagagaagagacaggtgaagcttatttgttcttaaaagggtaatttcagtataaaaaaaatattctcgagtttgacttaaagattaacagtaaagagaataaaaactaaccgttgttcttttcaattaacatagactccttggttacttctctcctaaaacagctgagc

SEQ ID NO: 47234 - DNA, 680 bp, Manihot esculenta
  Intron number 1 from transcript cassava4.1_028107m (locus cassava4.1_028107m.g) derived from phytozome v7.0 (chr-ID scaffold10878; pos 662367 to 663046)
atctctgcttctccaaggtaaattcttcattttttgcctaaaaattttgaaaaattctttacaccggcgttcttatacacattcagctatatgctgctcgttagaggtaagtattcggttggttcagtttaaaatcgaatcgaattgaaaaaattgaaaattgaaattttattatttatgaaaatcaaatcgaactgattttggtcaaaaattaaatcgaactgaaccaatctgattcagttcgattcgattcgatttgatcaatttaaatttttaataaattttttattttttactctttatttttaatattttaaaatttaattaaaatattttaattttaatatgatataatctccctatattattgaaaataatatattattatcactaatcggttcgatttaatttttttaatttttttctgattaaaatcaaaccaaactgaaataactagaaattttaaaattaaaaactgaaccgaaccgaaataaataaaaaatcgaaccaaattttaaaattgattcagttttatcaattttttcgatttaaatcgaataatgctcactctagtcctcgctaataaaatataattaaatataaaaattattataattttattttattaaattgtttaaaagtagtaaaatataaaggtcttttattgcttaggtatttga

SEQ ID NO: 47235 - DNA, 308 bp, Manihot esculenta
  Intron number 3 from transcript cassava4.1_020372m (locus cassava4.1_020372m.g) derived from phytozome v7.0 (chr-ID scaffold00204; pos 67885 to 68192)
aaataggtgcgttgtatattttttgcctggaaaaaaaaataggcttgcaatttttaatagaattttgattccaatatttttatatgaaaataaattcttgcacttaaggatgctgaagtattttggtatcttaaacgatatctatactagctctcagtgatgaagaaaaaagagatctgggatgtatcctttatttggtttccttagattgtggaaaacttgtctcgttgaatatattagatgacaattttgcccctctatttataattatagcgaaaagactacctcgcgttcagccagctcagaat

SEQ ID NO: 47236 - DNA, 659 bp, Manihot esculenta
  Intron number 1 from transcript cassava4.1_028783m (locus cassava4.1_028783m.g) derived from phytozome v7.0 (chr-ID scaffold03823; pos 247583 to 248241 reverse strand)
cacgcttgcttcaagcctatatcgattgccagaaggtgaaccactagaaaaataataaaaaataatactagtactagtctctcctttatttttatctcactgtgcgatgaaagaagaacaatagagttatgacgtgagtccttttgtgcaagttatttcgcttgttcctataccagctgttttcaggttttgaattatggagttttgtgtcagtactgccccaagtacatggaaactagaagagggaaattttacagcggttgatattttgctattgattttaacctaaacagacgctgattactttcattctatggtcaatccgcagctcctttgctctagctgctaagctttttaaagaagctgcgggttatatatatatgtgttttcttttgtttgtttcttcatttttaagatccaaggcggagaaaacggttttcagtggaacgcgttttggaatttttactttataaattatttttctgggaaatattttatgataaacttgcggtgcttcaagcttaattttgttcttattacgtgagaggaaagaaaataatatgttgttatgtttcacccggcgagtccgagatttcaatttcgtcgagtttctctttgtttcaggtaggtgcgcctccggaaatagcgcgtttgttgga

SEQ ID NO: 47237 - DNA, 745 bp, Manihot esculenta
  Intron number 2 from transcript cassava4.1_025078m (locus cassava4.1_025078m.g) derived from phytozome v7.0 (chr-ID scaffold08265; pos 4427452 to 4428196 reverse strand)
ctagtgagacacgggccacacggcttcttccaggaacataatcgactgcctgtataggaaagtatgtattatttatgaactaataatgacttgttccatcttgtttatctaaatttttgctacgtttagttttttttttttttttttaaaatattagaattcactatttttcagtgtatataatctaatttaaaagtgaatttcacataaaattcatatgatgagattctgaataccatgtctagactgtcattctctaatgacattaatcagataaattatagaatatatttcttttttcttttttcttatttaactttctttcattcaaattataaaataatattatttacatatatataaatagacaacatttgaggtctcaaatctctttcggattttgaattgataatgtgaaaatacatttaatctttatcaaaattgtttattcattgttttactaatctctattttttttggattttaattaattattgttatattattatttcatataattaattatttagacttatatttttaaaataatataatttatattataaaattatataatcattaaaaacataatataatagttatattattatagagttttttattattaattttatatattatacataaaattttcttactgtgcccttatctcttcctgctgcctgctcacgtattcccattttctcaagaggaggttgaggcaacaggaatacgggcggccgaa

SEQ ID NO: 47238 - DNA, 505 bp, Manihot esculenta
  Intron number 1 from transcript cassava4.1_015652m (locus cassava4.1_015652m.g) derived from phytozome v7.0 (chr-ID scaffold06814; pos 216208 to 216712)
agcccaagcgtgaggaggtttttgctgttgttgtgagtgatgaatggcaatgatagcatttgtagtttgattttgtggctattcagttgggttttgattgttttggcactgtcaattacattcgtatttctcatgggtaatttgtgatttctcagcttgtttctttttttactcttgaatttaatccttttaatactagtttgattgctaacaagttaatctttttaattgtaattttggtttctagtgtaacattttggttgacatgtgttgtgtggtttttttttttaaaacacccataattggttgactgataatgtggttatcacaatgatagctctgaaattttccatcttcccttttagtgtcatataaattaatatttatggttttacagattgtttatagttgttttatgaattttaatgctgtagagcattgcctaaagctggtgttctaatttgtttcagattgggtcacgccaatatattgtcatcccagggcg

SEQ ID NO: 47239 - DNA, 525 bp, Manihot esculenta
  Intron number 1 from transcript cassava4.1_008276m (locus cassava4.1_008276m.g) derived from phytozome v7.0 (chr-ID scaffold07933; pos 137603 to 138127)
gctcgaacttggtggaatcaagattgctaaaggtatgattattagctccttaaatctttcttgttcgttttctctttttctttttctttttctttttaaaaattgaatgactaatcaccgctgctacttgtactactaattaagttcatgttattatttgaattgctgctgatttttttatttaattcctgttctggtaagatcttctgggtagttggtggcaatgataatcatgtggtgggttcggtttttaatccttaaatacactaaaattttgcaatttgtggttttttttttttgggttttgactaatctgaatcttttgattttgatcctttcattctcattatttctcttgtgctgttttagtgttttcagaaattttttcctaatcattggcttgacatgtatatttgaaaccagtagggttttagtagatagtaaccagactggtactttttcatcacgttgtatcaagttatacccttcatatggttattgtagtttggacattggtttctgcag

SEQ ID NO: 47240 - DNA, 323 bp, Manihot esculenta
  Intron number 1 from transcript cassava4.1_023832m (locus cassava4.1_023832m.g) derived from phytozome v7.0 (chr-ID scaffold08265; pos 4104135 to 4104457 reverse strand)
atctctttcattcatctggtacttgtgtttttccttcccatgtgtggattgtttgttttctcttcagctgcaaaaccgttccttttttatataaaaagttttctaagagcttttgctgatcaaaagtgtagatttttaatacagatccattttataaggaattatttcctcctgaaatggattttttttttctcctccctcctcgtatgagtgattgttgcaaaaaatagaaaattcagtaaaagatcatggttttcaaaactaacatctatgccttcaattaattacaatattgccattttgtatgatagataggagctctg

SEQ ID NO: 47241 - DNA, 667 bp, Manihot esculenta
  Intron number 4 from transcript cassava4.1_002561m (locus cassava4.1_002561m.g) derived from phytozome v7.0 (chr-ID scaffold07301; pos 292015 to 292681 reverse strand)
cctgctgagatcaagcgttactagtgagtttctcctaggaaaaactcatttgcttgaaatgctattgatttgtgctagacttgttgtctagggatgattttttaaatttaatctgcggctgattgctggattttcttaatttaagcatatctgtatcttccagtgttatgttgctagattgttttgcaagcttgaaagaatttggagattcgaattttgtgaaattaaaaatatcagttaaatttagcattacaaactctgaacaactctggtacttctaaccattatcatcaccaatcccattttttaacctggttatttggcttgattgtttgtaactgcttgattttctgaatgctgggtgcacattttagcagtttttgcattgactataaaaggttaatcctggctgttcatttctgcatgatttattgtcagctcaaacagacaaacactcttttatcagctattagattttggtttttgagtacatcatcctatgtaaatacaatttactatggcgtttttctgagtaatttgtctgcttcctattatagttctgggcatgatgtgctgtgacttattgagatggacttactttgttgatctaaactcattctccatggattcagtgaagtttatattagagcaccttcaaagggacggc

SEQ ID NO: 47242 - DNA, 837 bp, Manihot esculenta
  Intron number 1 from transcript cassava4.1_023509m (locus cassava4.1_023509m.g) derived from phytozome v7.0 (chr-ID scaffold10563; pos 1405442 to 1406278)
tagaggaatttgttgatagtctttggatttttaaggtagttaattttcatcgcttttctctttactatacctaaattctatcgtgctatggcgtttgtgtgttcctttttgagttattcttcaacaattcttttgaaaagaagtgtgctgttttacttgcctgtcagcataagtatgtaataaatcacaggatgggtgcttatgttcttgcgaaaatttgtatatgaggttactgaataataattttataattaattaaacttaaatatacccagatcattgatcgttaaaggtatgacggtagattacagattttgttgacaaaatggcatattggctgttgtcatgctgccttgaaaaaaaaaaaaagggaaaggttctcctgcttggagttggcaccttttgcctttgatggtaaagctataatcattaggaacttcatatgctctgtcattcaactgattaggctctgctgctttatttgcccatgttataaggtttcaaacctctgcttcccttggatttatgcatgcttgtacacgctttgttatgcagtcattaactagtgcaagtgctgttctttgaattaggtttgtgatactgctgcaatgctgcttcttggtgtcctttgtgtttaagaatgatttgtgtttaagaatgatgaatgcgttgagcaatttatataatcagtttcctttgcagacactatgtcgataaattacattcatttggttcgaaaatctgttttggaatttctattggaattgaatttgaaatagttccaaaatatttctcaattgttttgctcaaattggtcagtgcaggtattcaaatcct

SEQ ID NO: 47243 - DNA, 409 bp, Manihot esculenta
  Intron number 4 from transcript cassava4.1_007498m (locus cassava4.1_006479m.g) derived from phytozome v7.0 (chr-ID scaffold02936; pos 133991 to 134399 reverse strand)
ggaaattcaaagaagccctaaaggacttccaacaggtattgtgatttcttggcttttgtttttgcttgttaagaggagagagatgcttgcttcattctctttcttcttcgattcaccatgtaatttgtttgattttgtatgagttttggttaagaggagagaagatgttgggcgcttggaaatttgtgaattaatgtgataggaaaacttattgtttgaattattacgggtttttattgcatatctattcttccaaaaaaattattttgttgtgttaggagcagcattttccttgtcttaggagtgtgcgaagggacttagtgtattttataaaaacactatactgtcgtgtccagtgcttgacacttttatgttttatgcttaacttaggtcaagaaactctgtccaa

SEQ ID NO: 47244 - DNA, 655 bp, Manihot esculenta
  Intron number 1 from transcript cassava4.1_010435m (locus cassava4.1_010435m.g) derived from phytozome v7.0 (chr-ID scaffold02264; pos 677614 to 678268)
aagtggtgagttttgctttgttaaatacgtcgttgcttttttgtggtacttcatagttgaatgtgtttgattctgttattgaatcatgttaaaatctctttctctgtctgtctgtctctctcagagtaagaagagggagtgttccatgagaaagaaaaggaaaatgttgaaagagttgttgttgttgaagtaattctgtgaaattccttgggatctaccattaatgaacgatattttcgccattctttgcatggcctggtttgtgaagtttagtagcgatgcactgcttgaccatgatatgatgctttacttaatttcctttgccactgatagcttctgatcattttaatgtttgttttgattgtggatttacaatttgggactactaaatgcgatattaaaataaacagatcttagtaagatattactgcatggattttctgttctctgctattctatgtttgttaatatcttctctctctctctctctctctctctctctctctctctctctctctctctctctctctctgtctatctctctgtcttgtgcattgatgcgcatgcatgtgaaaactatattcttacgttaacagctccttgtatcttaaattgtgcaggaagcagtgattagaaaagtagtgaattctatcga

SEQ ID NO: 47245 - DNA, 841 bp, Manihot esculenta
  Intron number 2 from transcript cassava4.1_018390m (locus cassava4.1_018390m.g) derived from phytozome v7.0 (chr-ID scaffold00136; pos 55350 to 56190)
aacggcataaatctgatctttctatatccccaaaggttttaccctgcataggcctgcaccatttttccatttttatacatttctcttgctggaattcagttatctcctcaattatttgttatcttttccaagttttatttcaagaatgattatgatattagctggtgtgtttggttcaagtaaattgtattccctatgcaaagagtaagacttttggatcgtttggcattcgcattgccttgctgtatcaagcatcctctttttggtatgtggcaatcacatgacttccttggcctctttctaatctttgcccgagtcctattgttccgtgcaggcaggcacagacctacattctgagcttacactgcatcgctgggccaatatctatggtccattcaagttacgagccctttttattatttttatttttattatttttattccccagcaaggaagaaaatggagttcttttatatattaaaaaaacaaagattatgttgagaattattaagctttacatttgtgattcttgcattttgaatcagaaattggatgagctgactataagtagccccaaagtaaataagtatgatttgcaaataatggatggtaaatattttgcataaaacgagttttacaaacctctatgagctaacagtttattgcaatttgaacataatgagatgaagggaaattgttttgccttttcctctaagttaacaaaagctactttttgtatttttttatttttaaagttgtgtaatgctacctgcttattcttgcttcttatttgtgtttggaaataggagaggaaagagaaactaggtgaacggattgtagc

SEQ ID NO: 47246 - DNA, 493 bp, Manihot esculenta
  Intron number 2 from transcript cassava4.1_013224m (locus cassava4.1_013128m.g) derived from phytozome v7.0 (chr-ID scaffold08265; pos 2630322 to 2630814 reverse strand)
cagaaagtgaaccctaaggaagttattgttgggtatttttcatcttcatctttgtttggtttgtattttcattgttaataaactgcaatagaaggttgttgttgccttgtaaactctagtaatgagtcttaccattctatattttgttgatggtattttcatcttcatttttgtttgctttatattttcattgtcaataaactgcagcagaaggttcttttttccttgtaaactctagtaatgaaatctctttttttttttctttaattttggtcatactgtactatattttgtttgaatcactgcatttgatgaggttggaaagcccttccctaagctaccaagctatggctatgcagcttttatgaaatatgaatattttcaaaataaaattttatgttttcagaagtgttttgtagacagatgctccattttcatgctttagtacttggtttcaggtattcaacaggattaggggtcactggtggaagtg

SEQ ID NO: 47247 - DNA, 779 bp, Manihot esculenta
  Intron number 1 from transcript cassava4.1_014851m (locus cassava4.1_014851m.g) derived from phytozome v7.0 (chr-ID scaffold06598; pos 184378 to 185156)
ttcaactgcattcaccccacgttatttgttttcaggtgttttttttttttttgggaatttgcttacatagagaactgggttcagagatcattgatttcttcttccttaccgccaccttgctttgcaggaggttactccaaatatatatgacatatttaggcagtctagctggtggaaagcataccactgctctgttgcaaatgagatggcatattcaagaccatacttttgcatgctggtaagcgcttccaccactgtaagcacatagctttgtataatggttataatacagtagtcagcagtatgcgtggaaaatgcctattgcacattatatgtatcaaacttaatgcttgtttccatttcaaattcatcagttcagctagaagcttatgatctgtttctccttgttaggcaattgcattcagaactttaatctaactttcgttgtaacactgtgcgacaaccatcatcctaggttaaaaatgatgtcttaagtctacctctggtctactttccaagggaaatacatctgataatcttttttttaatgatttttggtttggaaccccaaccccaaaagcattagttaatatcaataattattttgatatgtttgccactgaaggtgctttaaagtgtcagttgctagtgtcatgctttacagtaatatgcagatccagctctagttcttcatgtcagcattcatttgaccgtggttaacatatttctatcaattctgtgcagttgagcaaactccctgtaaaatccttcagcgctag

SEQ ID NO: 47248 - DNA, 803 bp, Manihot esculenta
  Intron number 1 from transcript cassava4.1_027007m (locus cassava4.1_027007m.g) derived from phytozome v7.0 (chr-ID scaffold08542; pos 792556 to 793358)
agaggcttctcttctctaccatcttctgctcagaggtaagcaattctgcaggctcttcttctttccagaactctgtgtatatatatagtagttctttggattctcctcaaaacttcttaagaattcttatggtgagaaagtcagggattaaattcatgtttactctaaaataaatcaggaattctataattattttattatctcatttcagaaaatatatatagctagtcttagtatttttatttcttttatttttttattttctctggtaactttataaatttttctttacaataatttgaaaagtgttgtcgaaactgtctttttagtaggattattgcaataattttataattatgcctaaaatattgttaagtaaattttaaaatataataataaataattaaataaatttatatttaagagctctaaaatataaaatattttcaaacatttggagattataaaattaaattaaataataaatttatggattacgtacgtccgtattattatattattttttattgtattatttgtagaaaaaatattgtttatttggttttggtctcctcacgagatgggaatttgacagcacaatgaagcgcataatattaattaatataaagactaaaaatacgagaatagaagaatagcatttactttgttaatatatatatatacatataattttaacactaaattaattaatattatattttaatttgagatactatctttaaccaaagctcatcggtaagcatccaggttacagggcaaagtggctttgataactggcggcg

SEQ ID NO: 47249 - DNA, 846 bp, Manihot esculenta
  Intron number 1 from transcript cassava4.1_000573m (locus cassava4.1_000573m.g) derived from phytozome v7.0 (chr-ID scaffold10292; pos 93894 to 94739 reverse strand)
gtcttagaaaacaagtaaatatcctcttactatcaagattttttttttctttttgaaagaattaatagaaaattttagccatttgattccagatgcagctattcccaagactgcatgaaaccaaaaatcaattaatttgaccaaatttgataaagggaaagttgaattttgtgtgtaatggtcattgattatgcagattaggaaatcattttgtgaaagatggtaaaattgtagttttatttagcggacttaacatgatcatgactgagggaaaggaataaaattgggaatttgagactgaaaataacaaacaaaaccatcttaataagatggcacttgagttttggagaagtactgactctgcttttatttagtcttcagtctcatatgtatctttaatatttaagcatttttgcattttgttaaatggaattattctcttgaaaggaaaatcatatgcatctttatgtagatagatatgctaagagatgtaattgctagatgctacagttactgcaatttttgagaattaaggcattctctgttaccacttcagaaaattaacataaaaattattggctcgatatatctttatcttctatttcacataatacacacatggagagcaactccattatagaaggctttttttctcaaagttaaccggagaataaattctagtcttgaataatgcacttcaaaatctccgttttcatggtttatcaatgctccaaatgattcattggtgaagcaagattaccatacttattacatgattgctttaatgtggttgtttttcttatttctgttttgattttggcaggtaccagtcacagtttattcaaa

SEQ ID NO: 47250 - DNA, 574 bp, Manihot esculenta
  Intron number 3 from transcript cassava4.1_004635m (locus cassava4.1_004635m.g) derived from phytozome v7.0 (chr-ID scaffold10114; pos 92192 to 92765 reverse strand)
ggaagtctaggtaatttaaattcttataactcaagtggatttttttttatatttcaagtaattatggttcgaaggtatgaaagcaatcttaagtagcgtgggttttgcaatattagaaagtgtctacaagttaagtgaaagaatgagattgagactgcatgcaagattcactaaaaaaatggagtatttatggagcgagcttctcatccattatgatatgggataatcataatgtcataggtccgttagatacaccgctggcagtcaattctattgaatgtattttaattatatgtactttcgatgtcatagttgctagctttcgccttctgccttttttctttctgttacaaatttcatttgtgatttgtcttgcataatggatgggtgatgcatcttctaatttggcttattactgtattatcttcttttcagattttaaaattgtaattgtttgattttagtttttttttggctaataagcttggtatttccttttgccttcatttgtgttaatgcacactttttatggcttatagaacacctaaggaagaccagcaattgtcatttcgca

SEQ ID NO: 47251 - DNA, 236 bp, Manihot esculenta
  Intron number 1 from transcript cassava4.1_002249m (locus cassava4.1_002249m.g) derived from phytozome v7.0 (chr-ID scaffold01441; pos 260104 to 260339 reverse strand)
ggcagccgcaaggtcttccctgttggaaagctcgagtatgttctatgtttcttctctttatattttttccgttactttgactgtctgtttgcttagaaaagagaaaaggagggggaaatgagagaaaattttctttcaagtgttgttgataatctgtgaagtgagtacgggttgaattacggattagaatattattataaacttggctgatttgcttttgcagaggattgcgattc

SEQ ID NO: 47252 - DNA, 345 bp, Manihot esculenta
  Intron number 1 from transcript cassava4.1_008319m (locus cassava4.1_008319m.g) derived from phytozome v7.0 (chr-ID scaffold07683; pos 284204 to 284548 reverse strand)
ttgcctctggtacatactatcatcttgtttagcttaagtcttcacaggtttccataatttttgtaagaattttttctattttctaattcagatttatggtgtcgaagctaagttcaattttttttcgacttttagttgatccagaaattagatgaatggcttgttggatttcgttttttcccccttatgtttaattaatattgatttttttttatttatttttgtgggtgaatcaaactcaaggaaattttttattttgtggtttcaataggcagtagtataaattttgacggatttttactattggggtcttaggtgtggctgagaggccctggaaaatttcgg

SEQ ID NO: 47253 - DNA, 205 bp, Manihot esculenta
  Intron number 4 from transcript cassava4.1_002461m (locus cassava4.1_002461m.g) derived from phytozome v7.0 (chr-ID scaffold03802; pos 714800 to 715004)
agagaatacaaccttacatcagccaagtcctagtaattgcaaattaatgtgatgcttgcactcccaattagtttgtacttgacaattgtaggaaaagcttatcttctgttggcttcaagaagataataaatagatttgacttgataggaaatttgtttttggaggttgattttttatcgagtaattgacctgttgttaatgtagt

SEQ ID NO: 47254 - DNA, 536 bp, Manihot esculenta
  Intron number 1 from transcript cassava4.1_011419m (locus cassava4.1_011419m.g) derived from phytozome v7.0 (chr-ID scaffold06089; pos 257177 to 257712 reverse strand)
ccttgcttctacgtcaagagagtaagtcattctatttctacttcttcctatgttaatattgcttaaacttttggaggcctctttaccatcaactatcagaaaagaggttagattcctgcatgaatttgatttctttcatgatgtgccgttggctcaatggctcaacaattttttccaaatgaaactcatgctatgtgtcagattattttgtcaataaaacaaaatttgaacaagttagcaaagaaatcatttttctttcgccagaaagcaaaagaaagagaagtccttggggctttgtcttcatattcccagctcttgtcttcttagtgtttattatttttttaaaaaacattttcggcaactcccgtttggataggccccctcacctcacttttctatggttcaaaacttgaaaccctcgagttgagacttgaaattctttttttttttttaagaattatttcattgtggttgaagcatgtatatgttatttattattagggagaccaagcatcaatcattggaggtgttgttga

SEQ ID NO: 47255 - DNA, 491 bp, Manihot esculenta
  Intron number 2 from transcript cassava4.1_004489m (locus cassava4.1_004489m.g) derived from phytozome v7.0 (chr-ID scaffold04043; pos 112476 to 112966 reverse strand)
ccttcagggagtcttcagtttctaagttagttgatgtaagtttttatcttaatttccgctgctgcttatttttctgcttgctggctttctcctgttttgaatattttgttgtaaaaaagcggatatctcttgggttttctagcatctcaatatttggcattttttttttccaaaatgaagaaaaataaattgaggcaaaagttggtttcttctgttgcttatgcgtctgctctttcgggctcgaatcaaaagagggtgccggagcctgttatgatttttatatgtccatcgcaaaatgttaagcattgccgtttgtggttagagatcacttatctgcttgtgtgggttgcttccttgtcccttgctctgaagggttacgattaatcgtttagatgtgtcctttatgttattctattattcgtttgctatattcaccaaattctgtttttaattttgtttccgtcagattcccctttctcatatttctgaag

SEQ ID NO: 47256 - DNA, 493 bp, Manihot esculenta
  Intron number 5 from transcript cassava4.1_008552m (locus cassava4.1_008552m.g) derived from phytozome v7.0 (chr-ID scaffold08265; pos 66256 to 66748 reverse strand)
gcttgaagatttctgcaaggaccctcaaatatcaggtaagattcttattgtctacaattgacttttgttcatgctcgtggaatcctagttactcattaatggtgtgtttctacttgtggtagttaatatacttactttagttttggattcatggttcaaaaattaagaaattgcacaagcgtacaaactttacaattctagataactcgcaccctcttctccctttctctctatctatccttttttaggctttgggaaaaactccatctactaatttcttgatttgttataaagcatataggtctgctttataattggtttgcactctcttggtgctagttacttgaattattttgtaatagaataggcaataaattgaacatatctaattttatgttcacctctctttgttttatgtgcctgctgtatactgcctgtttaatgcttctataattttttacttatatttgtgatcttgcaggttggcttgaag

SEQ ID NO: 47257 - DNA, 646 bp, Manihot esculenta
  Intron number 4 from transcript cassava4.1_006424m (locus cassava4.1_006420m.g) derived from phytozome v7.0 (chr-ID scaffold02943; pos 474750 to 475395 reverse strand)
gggagaaagctgtcgtgcaggtgaattatgtttatgcttttgtaagcttgtgtgtacttaccaggctaaagttattcgccagtcaacgctgctacttggtgttgctattttccccttctgattccatttcactcttctattctttctctttcctcgaataatgatatttttttttgctgttatttttaattttatcttacacttggaagtttgatcataagctagctgcatttctggttctgcagccttcatgtaaaatcaagtttgtcctttccatgcaattatgcagaaatcaatagtgtaaattagcagaatacccatttcatgttgaaccaagtcaagttcattctttccgtaaattttgtcatatttcatgcttggtgccgattcaaagatcacccttttgatgcttttagatgactattatgttcacttcttttttcttatgcaattgcaaagtacaacaccgggactttcagtgtggcttatgtctaatttcttcatcctcgtagattgaatgctgctgctcaacaagttttcatatacttttatagtctaattggtcctctgatttgaatcgacaatctggttctgcttttcccattttgcaggtttttgaaggaacatctggtattgacaacaaata

SEQ ID NO: 47258 - DNA, 287 bp, Manihot esculenta
  Intron number 3 from transcript cassava4.1_018101m (locus cassava4.1_018101m.g) derived from phytozome v7.0 (chr-ID scaffold03150; pos 178784 to 179070 reverse strand)
cctagtgaagactgattcttccttttggactttaggtactttatttatgtctctgtgcctcattttttagcctctttgatttctaagattttttttccatgaaatcggattccttttaagcatacgattgtattgcctttggtatttgtaattgcctgttggtagtgaattatgttcttccagcaatatgtattgctattttgtttcaaattaagatttgaaaatcacattaaattctttgatcacatgttaaaaattggttttttttttccttttcattgcagagg

SEQ ID NO: 47259 - DNA, 581 bp, Manihot esculenta
  Intron number 1 from transcript cassava4.1_018446m (locus cassava4.1_018446m.g) derived from phytozome v7.0 (chr-ID scaffold06814; pos 284929 to 285509)
cctcatttcttcatctaccaaaccctaatttccaggtgaggtgatttttgttttttcgttacatcaaaaactagcttcattattgtattggttattctgtgtgtatgtgtttttcttcttatgatttgagagccattctttgaactgtgattgatctattgttgactgattagggtttctttggcttattgtttatttgatataatttattaatcaactgattggtcgtcgatcttgattttttttttaaaaaaaaaaaaattctccccattttctaaaccctgcttttgggagtatttttggaaaagataattaattaatgtgatgcagttcttgagagtattctaattttcatccgattgggcattcaaatgaattcttacaaattttaattactgtgatagtctatttatcgaaatccttgtctagttgatcaatatttgtatccattctccggtcagttcatcactgggattgagcattaagtatgattatgaagaattaattatgctgttcatatatttttttccctgattaatatctcttcagaagttctcattttgaattttagagggttggat

SEQ ID NO: 47260 - DNA, 800 bp, Manihot esculenta
  Intron number 1 from transcript cassava4.1_018071m (locus cassava4.1_018071m.g) derived from phytozome v7.0 (chr-ID scaffold00823; pos 241565 to 242364 reverse strand)
tttctgccagcttcgaacttgatcaaattccaaaggtaactattttattcttataatcttggttgagcatcatttgtattcctaatctccgatttctgagattatgagtgcgtctatgttctttatctaggggtttacatcgcaatccagtttttaattgcttgatgaatactgagtattcacgccgtttgggcgaggtcaggttgagatagtgaatgttaagattttgattattggagaagcagtgtttgatttgttgaagttgttttcgtaaggattttgggttcgcttctgtttggcattgcataatctgagtgttttctttttctttgaaatgctattttcccattgaatattgtttggttagcggttgataagtgttttcagtatctcccttgctcttgaaacgttactttatgtaattatgtttgttattcttttagcagtttgagctactaacattgcttttgaatgcaagataattccatactgtgttctagggtcttaaatgattacattgatccatttaaatatgatgccaattctttttaacgccagtagctcagtaccgtcacaatttgcattttttttaatgctctaattcttgccattatcaactaggctaccaattttcttaaagaaggaattgtatggatacaaggaaataaggttgatttatttgctttctataaggatatttcttgtcaaaagcattttcatcttagcgggactctgtgcaagtgcttacttgttgatttttatttgggtggtaattatagagtagccagttagaagacagt

SEQ ID NO: 47261 - DNA, 618 bp, Manihot esculenta
  Intron number 5 from transcript cassava4.1_024444m (locus cassava4.1_024444m.g) derived from phytozome v7.0 (chr-ID scaffold11242; pos 206906 to 207523)
tcaggtaattatctccctatcataagtataaattccattaattagcctgttggaactttgaaaaattccatttttttgtgaccaccagtcttgtggtaaaactatagtacgctgctaatacaagactggtacattgtgaaactatagtctggcctgcataatttttggcttaagctcaggttatatattagggcgtgtgcctttatggttgaatttatgttaggactagagcaggaagtaaaaattgacaatgaaaaggaaaggtcaccttgtcatctgcagcaaatcaagcataagtgaagaagcatgtgaattatcacatttaagttgtccttttgtattgagcattggatatgccataaaaaatgtgcttgccatcatcaaagaaggtaagataagaatagtaattacaagtttcttccaagtgtcaatttcagttgtatgaaagagatatagctatggttgttctgtttttccttaaataaactccaaatagttacttcttggaatggtaataatgtgtcttttagatattgcagttaagctgcttactgtcgcaaacatggaattttttttatttgtttctttttccaaattatctacctaggtctgaaatac

SEQ ID NO: 47262 - DNA, 918 bp, Manihot esculenta
  Intron number 1 from transcript cassava4.1_003534m (locus cassava4.1_003534m.g) derived from phytozome v7.0 (chr-ID scaffold11388; pos 105677 to 106594)
ataagggagtggaggatttgcctcaggctatcaaggtggctaatccaaatacctttggtactttgcgagtctgtttcatactgtttctctttttggccttcgtggcatttgtattgctcttgtttgtgactttgtattatattgtttcttgtcatgattcagcaatgtcagttacttttcttatacaaatggctgtgcaagaagttcactgttccttattatgcttaaatgttgctttgttagttgattttcgtttattttagttaggtagcgtttctgttactttactttgtacttcctgtgttttacaaaactgttggatgataatcaataatatggttaaattttctaatatcatttagaaggaaagattggtgatgcgatgattcatgtgtagaaaactgtctttatttgattgtcttatatgcatcctcgctttgtttcttttgatgcttggactctgtaggcagttaaatgttgttcctttagttcagtgtataaaatattgtcaacaaacttttaaagatgtgattggctatcacatattaattcatgcgttaccctgcttaagtccttacatctagagggtctaggccttctattacttgaaattctttatcaataagcaatgttcctaaaccatattcactttgtcactaatagtgaattggctattgttctctttccctctcttttattgtgcaccatcttggtgtatcctacactgggattggaatcattctatacatcgtagccttaattgcagttgctccatggagcttgatctgccgaaccacaacatcaatgttcctttgcagcattatttgattatgtgatcatgacaagtttcaatattatatctttttgtgttacagctaaaatgatcatcctcttcttcaggtggctttacaagaatct

SEQ ID NO: 47263 - DNA, 729 bp, Manihot esculenta
  Intron number 5 from transcript cassava4.1_006919m (locus cassava4.1_006912m.g) derived from phytozome v7.0 (chr-ID scaffold03241; pos 120992 to 121720 reverse strand)
aggttagtaacaccattctatttctatgatttttctttttcttttgagttgtgcttttagaatcatgatttaggatgcaaattggttgatctgggattaaaatcatgcttttagaacgagggaagaaactagtgcatattatgccttgttgctacaccaaggatttggtgaattttccacactggttgtttaagtttgcaggcttcataattctatattcaatccattgtaccgtgagaagtggaccagaaattgtctctcttaaggagtctccagctaaagctggctgactgaaagagagataatgtgtacaaaggaggcttttttggtattttttgaatcttggatagtatatggacagatttaagagctgttttaatcagattgtttttcccccatcaagcattttaacaagtttactttgttttcccttatgtgcttcccactgaaatagtttcaacagacctttttttttagcccactaatgttacattcttaacagggtgagggctaaattagatgcaatgcattaagtaataagctgcttagtatgttttatacccatacaacatgtagcttttatctctaagtgaacttttaaatgagtgatttcaatttaattttagttatcctgaaggggaatgaatcatacagctcaaaaaagttttatgcgaatagagttatcaactggccttatttttatgcagggattttgccaacattgagctt

SEQ ID NO: 47264 - DNA, 279 bp, Manihot esculenta
  Intron number 3 from transcript cassava4.1_006919m (locus cassava4.1_006912m.g) derived from phytozome v7.0 (chr-ID scaffold03241; pos 121860 to 122138 reverse strand)
aggtgcttcgttagtcccccctccatctttaatataaattcaaatttctttatagaagtttagtgatacagatggaagagttgtttttctttttcatttatagttttgtgccttatttctggcttgttaatcccttttgttactggtagtcaacatatatatgctttctctggattggtttgtgttgaaaaattatattacgagttatcttttttcaaactaaaatttataagcgtatgaacagatttttatccatacaagaggttttgggcatctccg

SEQ ID NO: 47265 - DNA, 718 bp, Manihot esculenta
  Intron number 1 from transcript cassava4.1_020206m (locus cassava4.1_019338m.g) derived from phytozome v7.0 (chr-ID scaffold08265; pos 2983435 to 2984152 reverse strand)
ctttaccgttttcaagaatctttaggtaaaaagttttacattacatctcttatccttctggtttatgcccattaggattttctttttgtttttcgcatgatgagaagatttcattgagaatatttgtgatcttagaattagaagtttgaggatcaccttcagttgcttatagggctcagttttggagagaattcttttatatgcggatttatcagttattttacatccctttgattttttttgagattatttaagttcgaaactctggctcagcaggggatttaacctaagtagctctagtttcttgttaacttgtaattgaattcaggtgcactagtagcggattagttttatagtatcttctgatcatgctgtgttaaatggctatgaattgttttcgcagcttccattttgtttagtgccttcgtgaacttggaggtgacaaaacctccaaaaccctactttttcaaccatttgtgggggatttgataacttactttccattactttaccttatcttaaaaaaatctcctacttctcccaaactgagtgaagaagttttggctgttttatttccacaaccatcaagttattgagttatgcttttggggtttatcttgttcgtataactttcatttctacaaggtccttattctcacttttcaagaagtctctaatcagtttctttttcatattgaataggcagcttgagcaagag

SEQ ID NO: 47266 - DNA, 713 bp, Manihot esculenta
  Intron number 1 from transcript cassava4.1_027928m (locus cassava4.1_027928m.g) derived from phytozome v7.0 (chr-ID scaffold04043; pos 174273 to 174985)
ggcaaacaggtgattaaattttcatttcctgtttctcctgcaatcttcttcaatttctgtgatctctgtttcttctccttctccttctccttctccttctaatagatgggtttgagtttgacttgcttacttgtaaaagtacagaggttttatactccttttgaatagttgtgtgctggtatattaatgggtttcttgagttgcgaaaattaattatctgctaccattttgttgcgaaacaggaaacagtggattccattgcctgattttgattttttaacttcttgtttgtccctcaaagccgatatttttgtgttaattttgaaattcactccaactacggggaaagctcgaaagcggattattgtttttaacttctccctgtttgttgtcttgattatctttttctaagttttaaggtttctttccaatcaatttagattttaatccactttgaaaatctacccggaaaaaagaaaaagtagaattgccttctttgtgtatgtttgtaatttttgtagacactagtgcatcagaatcctaatattgcaagagaataaaattttcagacttgatgttgttttcctaaactaggctgaagcctttgatgattaaagtttaattgagttggctttccctgttattttttgcaactgatctttataaaaactttggtattttgcagaaagtgaagactcgtgtggtgaagaaaa

SEQ ID NO: 47267 - DNA, 619 bp, Manihot esculenta
  Intron number 1 from transcript cassava4.1_018720m (locus cassava4.1_018720m.g) derived from phytozome v7.0 (chr-ID scaffold02932; pos 68206 to 68824)
ttcaccttccttagagcagcggacttttatataaggtaaagctcaattgtccatcttgcgcaaatgcacagatacatctcaaaattgtcagcgtgcagttcttcattaatcttaccctaattctgtaggtaaacttaatcccacccatctgtccccctttgcccccatcccaaattttatgggttgtcttgagttgattgtttcattgtttatgccttttcatttttatgcaactgctttactttgcactccattttgatgtattgtctgttttctgcatttctcatgggagagaatgaatccgtttaaattataattggcttttgtttcttgctattaatataataagagaagaccatgtgtaatgactatgattgcatgggattgtgcaacttcttgaatttttttgccaattttatttgagacttcatttttattttttaattcttcgattcctaattatagaatccattgataactttgcgttaatgttgataaaatgaatagattacctgttaattagttgtttcttacagaggactgggtttgcttcctttctcaccacatataccaatttcttataggtttttgctttccttcgtttgctgcattcatcatc

SEQ ID NO: 47268 - DNA, 693 bp, Manihot esculenta
  Intron number 4 from transcript cassava4.1_011519m (locus cassava4.1_011519m.g) derived from phytozome v7.0 (chr-ID scaffold02932; pos 86103 to 86795 reverse strand)
attagtacagagtgtggaattcctgattacagaaggtttggtatcttctctgcaaactgtctgttagctttctaatgtttattgttatgaggtccagtttatttgatgctcttttaaactatatcataggtttaaattagtaagatggatatttataacaaaatgatttttgaaattttgctcaagttgctatttaatcacttgctcacagttttacatgcctctagtttatcttttttatgtctactatcatctagaagggcattgttttcctgacactgtcttcagtaacagtaagtgatttttgaaactgtattttattatcttctcagcttgtgcttagtatgtgccaatgaccagcattttcgtgttatgagggcaactgtggatgtggctaggttttcttggttgtttgattgatctaacgaatccctcattttatatgtttaatttctccattaccctgttatcccattattgtacctgtcttggatatgagtaaaaaaatttgttcatcttcttctcccttctccctcccagtcctagagttgttattgcagttaaacctttttatgcactcaataatcctcttctgattgtttctcaatgcatacaaagtggaatttaactctgctgaataaaaaaaatccatatgcactcaatatatcacattcttattttgttgcagcccaa

SEQ ID NO: 47269 - DNA, 814 bp, Manihot esculenta
  Intron number 1 from transcript cassava4.1_016113m (locus cassava4.1_016113m.g) derived from phytozome v7.0 (chr-ID scaffold06089; pos 621697 to 622510)
taaggcaattccaatctctataccatttaaaccaggttcgattcacatatgcgttttttttcccccttaaattattgttttgtggattactggataagtctgattctagcgaaaatatttgtgatttaattttatgtgttttagcttagtttgctatttggatctgatgttcgtatttttcttttcatggccgtagtttaaattttctgtgccaataggttagaaataatgggttttgttttgatgtgatcgaattgagttattataagaagttgtggcacagatctaattgcttagagattagtggaagttaaaattggataggattgtatccctgttttaggcattcaaactaactaaattaacaaatatttgtatcccagcactttatatattattctgtgtgattgtttattattaattggtgcttacagttcaattttctaggatctaaaatcttactaaagatgtgacagtgttcaattatgaaattattcataggtgcaggtatatgtttattcgtgttcatctcgaaatctaatattgttttttaaaactgttagttaggttagctttttgttagtcttattaataatgtaatttgtttgaccaggtttatggttaatctctctgggccctcgtcaatgactggagttgaaaacttgaaatgagatttataatgtgttggataccatgtatttatcttacttcttttttgtgtgtgtgcgcgcatacctgatacttcatttcttgtggtttatgatttcttacattttatttacttttgcatttttggactgcagtaaggaaggcc

SEQ ID NO: 47270 - DNA, 773 bp, Manihot esculenta
  Intron number 2 from transcript cassava4.1_021652m (locus cassava4.1_021652m.g) derived from phytozome v7.0 (chr-ID scaffold08265; pos 2302848 to 2303620 reverse strand)
cggttgctgggacagataccggagacaacattgaggtaattatatgtaaattctatagtgccattgcttattagaaataaattagtttcaggattacgtaaatctgcaaattttcatggaggaattgatcatagaagaaatttattttgggattcagaattgtctcctaatgaccacagattttgttgagttttaatgtatgagttgatggagaaggagatcttatcaatacatgcaagtaaattgccatttagactatagtttttttaaaaggcatgtgtgagttgcctcaaaaaacattttctcatgtgaatttatttccttaatttacaagtgggaaactttatgagtggtaatcactagactcaaaggaatgagaatttaagcaaaaactttgtttgttcttttaaaaattattgaagaatacagaaaggagcagttcatgatgtaagattgctgttgtgtgcttcagctatcagcaatttgacctgtttggcgcttgaacaagaaacagagtatgcttagatcaatcagatactaagcccttagatctatgatgcttttcactgcatgctttctgtatttaaaccttgttctagagcatgtcattcatggtgaagttgtctttttcctgaacagcgttagttttgcctggctctcacctttgtttcatttcctgtcaatggaacaggattgcttcatcaaattgcactaagttactagaattttaattttcaggaatcaatattggctattagctttagtaacaaggg

SEQ ID NO: 47271 - DNA, 535 bp, Manihot esculenta
  Intron number 1 from transcript cassava4.1_001709m (locus cassava4.1_001709m.g) derived from phytozome v7.0 (chr-ID scaffold05432; pos 15350 to 15884 reverse strand)
agttcttggctcctaaaggcaactttgttaccaaagtaagatttttgttccctattcggtccaattgcgtttgttttcttagaaatgtttaggagaaattagtttttggtttatgcttttttgtttgatttgtttgctagaagctggaaggtttaattagctggatgagtttgagttcatatctagttttggattggatggtatttaaattaacgctagttgattaaaaaactggaggataaggggagagtatttcaacggtggtttattattattattttttataaatttctgtttttctttccctgtaatttacatgttgttatgtggtgctaaagaagagtgtggataattttctcttgtacttagttaactgacacagcttagacttaggtatgttttactgatagatgaaccaaaaagtatatctcattgaagtgttttaagatcggaatttcttgttaggtgaatcatagtgcttatctgttgtcttttaataggttttcaggtctcaagactacaattcagtcttgta

SEQ ID NO: 47272 - DNA, 496 bp, Manihot esculenta
  Intron number 3 from transcript cassava4.1_005958m (locus cassava4.1_005958m.g) derived from phytozome v7.0 (chr-ID scaffold06598; pos 260925 to 261420 reverse strand)
caagtcaagcaaatcaagtacctacaggaagagtttgttttctcgtgaccattaacaatatctaaagttcgtttctgtcatttacattacctaaagacatttaacatctaagcttgttgatttgaaatctgtatcagctcaactttcttattttatgcttatttgagagagtaattttattttatttcatgcttatatgagggtagtttagtctattcatgcttatgtaataattagcagttgaattcaccataaagttcatggttcatctctgagaaccatacctcaaattttctcttgattgattatctggttaaatataggaagattgcataacggtccatcatataatcctaagccaattagttaaacccattagacattctgttcctgggtgatgggggtagcagatgactatcatggatattttaatcattttaaaacttaatttgttctggtatgattaattgtgtaggaaaatctgctgagattcact

SEQ ID NO: 47273 - DNA, 543 bp, Manihot esculenta
  Intron number 1 from transcript cassava4.1_008242m (locus cassava4.1_004795m.g) derived from phytozome v7.0 (chr-ID scaffold02792; pos 73533 to 74075 reverse strand)
acaagcgatccaagccatcgcaagctgttcaacaggtactcattatgctccaatacgtttgttcgtttggtgagaaaataaatgaaaataatggcgaatatttaatcaatttactcctgctcctactagtgcaatttaatttggctgtatggtatcctgtattttgttgtcattctcgagaaaattggaaaatttttcggcagccaaacagttgaggattggggttgaatctagtataggattcagtggtaatgaatttggatggggtttccatttcgtgccttttacttctgaaattttgattttcttgctggacttggacctgcaattttgaaatttctgggacacaacgtgatgctttttttttatttgttaaagtgaagaatctaggatctctgatgatatccggcatgcattagaatgttaatttgttttcattgtgacggttgcttcacagttgcaaacttgcaagttataattttgttgaaattaatattagttgaattttaattgttttaatttagcagtggggtgcgggtgcta

SEQ ID NO: 47274 - DNA, 707 bp, Manihot esculenta
  Intron number 1 from transcript cassava4.1_008684m (locus cassava4.1_008684m.g) derived from phytozome v7.0 (chr-ID scaffold02264; pos 345785 to 346491 reverse strand)
tttgctttgccactaggcattggctggtaattcactgccatgtttattaaataatacacgcatattgatttcttttctctttttgtttatgggttttgagcataacgttttttttattgtacatgctgataatttataggtgatatggcatgcctttttttctgctgttaagcgtttttagtgttttacacaaggggaaaaagtagcttttagagttagtgtgctgttgcatattggtttttattctggttttaaattggatatatgtttgcttgttatttttctagctgcaacctactttagtgaaagttaattgtacggccatagctgtttgcttgatgcttattttgggaataactgaaaaattaaactttctagctcttgaaatccttgattgacttcttatttggtgatcagatatgattgccaggtattttgggaagatctattataccgttactgattctgtttaagcaattaagcttcaaatattttttttttttggttcaggaaggggatttcccagcttttcaaatgagtttgacccattgcttctagtcatggcaaattcttctttcttgaacttttttgatttcatctgaaaactttctttttgcgtatctcttgtcaatcttattttgttcttgatattgcaatatgaattgctttgactggtttatatatttatttatgtatttttgagcagg

SEQ ID NO: 47275 - DNA, 612 bp, Manihot esculenta
  Intron number 1 from transcript cassava4.1_006136m (locus cassava4.1_006136m.g) derived from phytozome v7.0 (chr-ID scaffold03264; pos 212721 to 213332 reverse strand)
cctcctttggttcagtgactggattcagtgtattggtaagtagtatttcatctttcattaagtgtgtggtggggttggtgcactggtcaactattctgaattatgactttcctttgcatctacgatcataaaatgtgtggtctctattccacaaatcattaatttgatcatataactttggtcccgctaatgggttcagacacgtttttttgttttttgaccttagcagttgggcaactgggccttactttgcaaggtgcttccacggtccacacttttcccacacaactgaattgattaaactccctccgaattcagtaagattcatgccataaacctctgataataaattaaaatctttgacacttggattttcttgaggaattagtaaatgaaattgttaggtctaattatgcaactgttgtttgttagcataaaaaatgttgtcaagatttaaaggtaagagaaatgagaatgtctttgaaggtcatgtaagataaaataagcctttataaaaccctgtagttcactttcttcttcaatttatagtgtgctaatataagaaagaacaagaaattcttctgaaaaatgttcttaattttatagctagga

SEQ ID NO: 47276 - DNA, 369 bp, Manihot esculenta
  Intron number 1 from transcript cassava4.1_001203m (locus cassava4.1_001203m.g) derived from phytozome v7.0 (chr-ID scaffold08542; pos 314278 to 314646 reverse strand)
aaccacaacaaattttctagcagcattccttctcggtacctcttctatcttagtattcttcaatttttttagtgtaaatttctgttgctgttatgatttttttttattgattaggaactagagaataatgaggcaaaattgtcttgaacgctaaaacttttttgagttttttttttaattattattagagtttatggaaaaaagtttttattggaaatcagatgctttaaggaaaacgttatccttggaatatctggtaattgtgtttgttcttatatattattaattcatagatgtatctcattgtttttggtgtttacttgtgttatttcagattttcgttcgtttctggttccattcatttaattt

SEQ ID NO: 47277 - DNA, 989 bp, Manihot esculenta
  Intron number 1 from transcript cassava4.1_007924m (locus cassava4.1_007924m.g) derived from phytozome v7.0 (chr-ID scaffold07670; pos 14045 to 15033 reverse strand)
gccgcagagtttcaggtaattttcgggacgcaattgggttcttactctgaaaagtataagatttgcttgatgtaagactcgctgttctatatctttggacaagaaaaactagacaactaataaagaggaaacattatttgagtctagttcagaacatggggaaattgattaaggtccgtttgggttgaggttgaatgctaaagaagtctcgattctttttttttttttttattaaagaaacaatatttaattgttttagaggtttatgattaaaatacaagttcaatactaaattgcactcagaggcatttagttgaaatcagggaggaaattggttcaacccctaatccccatctccctttctttggccaaaaaaaaaattattaaatcaatttttaataccttaataagagttatttgaactccacaataatcataaatagatcctaagactagtttaagaagttagaagattgattgaggctatactatcactggagagtattagtctagctagcaataatagataattatcacttgttttttcagaaaccaagtagattggctgatgcagggaagtccttactgtttcctatgctgcaatttcccccaactggaaatacaaagtctgtgtattaaataatgtgtaattaggggatgtgcgattgctgtacaagtttctctgtttggaacagagagtcatgcagtgaaactgctaactatactaaataagtctaacttggaatgttggagtacaaatcaagctacttggctgctagtgatgaaatattttgacccttaaatctgtgtttctgaatcattccagccttagaatctgagtagttcacagaaatacatagtatgaaatttattttgtatatgttatgcttgaaggcacatatatattaatgcaaactctgaatttgaatgacatggtttaactttggtatttttgtggcagggaaacagtggattcttactcaatcaca

SEQ ID NO: 47278 - DNA, 204 bp, Manihot esculenta
  Intron number 1 from transcript cassava4.1_023530m (locus cassava4.1_023530m.g) derived from phytozome v7.0 (chr-ID scaffold09294; pos 219951 to 220154)
gtacattttttgaattgttttttaccattaagaaaaaaaaaaaaaagattggggtgatattcttgtggtgttataaattgtggaacgaattcaattgatttatttaattttggtgaaaagaaaaggaaaatccgcgtggtcgcgattcccaaatatatttggcgggaaggctggaccttccaagcgattaggcttatttgtcac

SEQ ID NO: 47279 - DNA, 393 bp, Manihot esculenta
  Intron number 2 from transcript cassava4.1_023530m (locus cassava4.1_023530m.g) derived from phytozome v7.0 (chr-ID scaffold09294; pos 220295 to 220687)
agccgccagattcctccttcttgccttcatccaaagtatttcttcatttctttctttaatttcttttacttatctttttcctttacttttatgttttttttttcaactttataatttttctctcatctccctttcctttccgagtggccaaaacactggatcgcgtttgcttttcgacggatttcttttttccaaattcctaagaatcagcgatggatttagtaataatttgtttactgcgaacttttttgacgaattgaacggtggattagggggttatacagtcgagcttcaagtaatgagaattatatgagaatggcgatggtgaaaaatcatctcaaattacaatatgctatcaacttttgatttttctctgcagaatcgcgaggctag

SEQ ID NO: 47280 - DNA, 826 bp, Manihot esculenta
  Intron number 2 from transcript cassava4.1_029437m (locus cassava4.1_029437m.g) derived from phytozome v7.0 (chr-ID scaffold04043; pos 1514419 to 1515244)
gaggttagacccttcctttctctctccttaaggtttatatgcatgtttgatttttgaagtggtagaagttaaattgttgtattgcttattagttggatgttttaatggtaccatgaaattgtttctactttgttggagttggaggtacagagcagtcaatgttttgtttttatgttgaagaggttcaggcatattaatgcagtgctttgttttttgtttcctcgtttatgtccataaccagacagtaacttcttcgtttgccgacatcacaatcaatgaacttgtctgtatcttttgaagctaaaagaagttatttactctagccacatctcactttcatttactttcaaagtgaatattaatgggattgtttcatttgaaaattcttataatttttcccaatcactgtaattaaaccttgcttttatacaagtttttacaattaattatagaactcctttatttttttttccataatttaaaataccagtaaaatttccctatttttaaattaaaaaaatacaaaatgaatttagtgtaaagaacatacattttattttttatatttagaaaagttattggtcgatttaaaattaaaaccggattcagtcaaaggccaagcaacttttgtatctgtccttgcattttttttcagagtctaagagaatcatgcagattaagacaagggagtcaatatttggaagtacgatctttgctattttctagcaagacaaatccttatgggacccagagttttaaatatgagaaatatttttacatcttgaatttgtgataatctcaggtcctggttgctcttctgtggctt

SEQ ID NO: 47281 - DNA, 530 bp, Manihot esculenta
  Intron number 1 from transcript cassava4.1_017765m (locus cassava4.1_017765m.g) derived from phytozome v7.0 (chr-ID scaffold03104; pos 93640 to 94169 reverse strand)
gaagtatgtgtttttaagtttttgacaagatagtttcccattttgaatatctcactagtgctcccctgattaatctgcactggtgattcttctccgttggatgtatattttactacatggatgtggagaatttcagatctagttattattggttaatgtattagtagaataaagacaatgcactactattttccctttctattaaatcctcctctcctttctttcctctgctttttttccttggtattgtagctcaccctctctcagaaaatattccaatgaattgcatcatttctggatcttatatttgagtggtacatcaaaatatttctttggattctgtgtattggagtttgcaaacagaattcttgttatctaaatcatattgactagagctattatttattattgtttggattaacactatacctctctctattattttttttaaatctctaaaatatttaatgtaaatgtccttaacttggtccttagggcagctggaaccccaaaggttaaggtaggggttg

SEQ ID NO: 47282 - DNA, 501 bp, Manihot esculenta
  Intron number 3 from transcript cassava4.1_013660m (locus cassava4.1_013660m.g) derived from phytozome v7.0 (chr-ID scaffold08265; pos 4645873 to 4646373 reverse strand)
ataaggttattatcttattaatgatataatttgcttattgaatggacttggataacaattctaagccattaacgacatccatagatgttcaaatgcttgtagaattgtctgttttcaacggttaatgctttttagttgcagcacatgtcgcctaagtgtcggtgacatttacctatttctctgctcctgaatttttttccccccttttggggttatttggagaaagatcaacctttgagaattgtcttgtcaagaaaaccttcagcacaattattgaagctgatgggatttaataatcaacctactatttttttttgaatgttatctttatttgcatttcatgtgtggttttttgattacttgtcagtagtctcctctagttggtctttagctaagcagagaagattacacgtggacattaagtaaaactttctcatagggggattgagattgttgtattccttattcagggccattctgtcacaaggaagcttaattcag

SEQ ID NO: 47283 - DNA, 471 bp, Manihot esculenta
  Intron number 1 from transcript cassava4.1_019475m (locus cassava4.1_018436m.g) derived from phytozome v7.0 (chr-ID scaffold08265; pos 3830606 to 3831076)
gcgtccagagaggccttgtaagtttgtactcatcttctctacttctgattatggtctcatttccttataattcagcacttgagctttctgtttttctaacaaagatttcattttccatttaaacacacacagtgaagctgaattgggttaatgggttatcagttttgattgaagtgttcaaagatattatacttgtttcggagatagattatatatttcttatttcaaacatgggttagggctggttatagaaaaccaatgatatgttgagattagtgaacttcactatacgagctgaagtttggttttttaacttctatctccttgaataaataaagaaaagaatgaactgtagtgtttttctcttgagttgatcactggttgagaccataaaggccaatatactaaaagatttttgttcatgcgttcatttcaggttggtgagatcatcggcagatttgagaagaaggg

SEQ ID NO: 47284 - DNA, 915 bp, Manihot esculenta
  Intron number 2 from transcript cassava4.1_011582m (locus cassava4.1_006923m.g) derived from phytozome v7.0 (chr-ID scaffold06659; pos 280789 to 281703)
ctcagacaggaaagccatcaggcaatccactcgtagagtctctatgattaaatggctgatgcttcatatcaatgctgttctgtttttctatttatttattcataaagcaagttaccccaccttagggattgagaattccataagtggactgctacttggatggttctcatgggtttgtccaggcacaaggccatgttttcttatatttaagcatatcttcctatcattatacaacaacgaggttgtgaaaagatgaatcttggttcaataaaggttgctccactgcgacctagagatcactggttcacattggagatagcatcctttcaatgcaataggagatttcatagatctgactcccagaagtcttctgtatggaaactatgtattctccttttttgaatgtttattgtgattaactctctcttgaatgcaatttttctgttgaaaacttggtggagaatccttaacgcttttctattatcaaataattacaaggacatttgttatgaaaaacaaatagttattctctatagtctcgttgtgattagtagtaacttgtaagtctcctttttaaagttgatcagaagataagtttcatccatatagctctttatctggtgaatatcttacgtcttagaccttttcttggcaatgtgatgatcgatgcaaatgctaaaatattttgttttgtgcattataaatggtaatccctctatttcaactgaatttcttaacaagatctaattgtgaccctacaatgttgcttcaatttcttgttcctatcaaattggtattccttttgaaattaacaattttcacaatgtcacatattttgtcttttaattgttgtgctgttcgaagtaaatgtagatactaatatttggaattttccttctcttagggccacaaaaa

SEQ ID NO: 47285 - DNA, 422 bp, Manihot esculenta
  Intron number 1 from transcript cassava4.1_022532m (locus cassava4.1_022532m.g) derived from phytozome v7.0 (chr-ID scaffold04065; pos 389304 to 389725)
tctggccgccttagccatttctctggaaaaaaaaggtgacttgcaaattttcgatttttttgcatgttttctattcttacatctctttatggctgttgacaaaattattgaaacattattaatctttcatttttcctccatctccataattaattggtatttttcttgctaattagaaatgataaaatcatttgatgggtgttcttcatttttcatttttgagtcaatttggtggtgatgtgaactccaagcccaaggattaggatctataacaatacgtgtgactaatgccttgagaaactaaagggtggtttattgactaatgcatcataatttattttttccaaagaaaattctatcgatttcattcttattatacaagaatttgatcttaatttatggttgaaaaatcaggattgaag

SEQ ID NO: 47286 - DNA, 417 bp, Manihot esculenta
  Intron number 2 from transcript cassava4.1_009320m (locus cassava4.1_009320m.g) derived from phytozome v7.0 (chr-ID scaffold02264; pos 309415 to 309831 reverse strand)
aagtcaatcaataatactgtgagtttatatttacagaaaaaagggggtctgtttttttacgtgattaaatatgttgatatcatttctctgatgcttaaagttgttaagctaaaagcattaaaaagctaaaagagagggagtaaagttttcttctttttctttttgttttctctctcttaaaattcgattttgagagcttcccaagttaaattattatcgataatgttttactaatatgagatttttgtttgctaatgagtttcttctcgatgtgcttcaattgaaataaccagtgtgtttggtcttgtttgagttgaaaggaagttggtctttgtgtagatggtgaaattattgtggcttaattttttcccccgattttcagggacctttgcctgtggatccgaagagtaggaaatc

SEQ ID NO: 47287 - DNA, 815 bp, Manihot esculenta
  Intron number 1 from transcript cassava4.1_013024m (locus cassava4.1_012479m.g) derived from phytozome v7.0 (chr-ID scaffold05133; pos 156437 to 157251)
aattctgtagcagcgatcttgaagtttgtaagtctttcattgtttaatttggatttgcctttatatgctggatttcgcaatttgaggaagagctttttcttttaaaaaaaatattatgaaattgattgattaaatcggaaaacatgtatattggacctcgaaggcaagagcatggtaataaaaattgtattaattgtgtaactatcaaattgtatcatttctataatgactattggtttttattctaaaatcatcttattttacatttatttattataggaaagcaatggatcactcgtaattggacaaggactgccgtattgtattcacaatttttttggaagaattttctaagaagatttattttaaatgactctgatcatatgtttgcatcggattgtaaaaattgcttgcatctatctagagcttattggtgataaaaagctggctctttatgctttgaattggttcaatataatagccgtaagctattttttatgtttagcaacttcgttcgttttatttatgcacccttttgtttctgatgggatgagattgaagacaaatactaaccatttgccttcacaattttagttaaccggttctataatatttggggtggaaataattgttagactgcaaggttcagtaataatagcattgcagtgcttctaggttatcagattatacaagtatttgatttgtttcatgactacagttcagaattgtgctattacgggcacgactcattttttttttttcttttggttactttgctaggtcttcttggcggtgttgccccctgtgtgctctat

SEQ ID NO: 47288 - DNA, 683 bp, Manihot esculenta
  Intron number 2 from transcript cassava4.1_018296m (locus cassava4.1_018296m.g) derived from phytozome v7.0 (chr-ID scaffold06814; pos 994759 to 995441)
aacaagaggtctgctacttctgtactctgtttcaatgattttgtttgctgctgattcttataagaatgtcataaaatcaaatgaattagcaaatgtgatcttcttaacttttttttgttctgttttaatgttaacttcgctgaactactgtgttactcactattcagtgagtaaggttgactaaagtttgcacattgttggtttttttactgtaattttacttgaaaaaatggctgtgtattattctttccatagtggtggtgggtagaatttgatccatccttggaaaaatagaatgggagttctgctggtagtctaatggtcacggctgttttctttataggattcatttttggatataatattatcaataaagacatccatctgatccttataggctgttgtaagacatccatatccttataggatgttgtctttataagattcatccaataaatgatgttcttgtatctccattcagttgagttaaaagtttgattaattattatttattatttcttggggttttcttctggaacttgtctttgatttcagatgcacttgactttgatgactagaactaattttgatactttaaagtttaaaccatcaattttgttaagttgcaattatgcgatttgctttcagggctggtgaattaactgctgctgagctggataatc

SEQ ID NO: 47289 - DNA, 499 bp, Manihot esculenta
  Intron number 2 from transcript cassava4.1_027095m (locus cassava4.1_027095m.g) derived from phytozome v7.0 (chr-ID scaffold07330; pos 138798 to 139296)
ccactaaacttagctctgctggcctcgtctataaggtgattgactctattccgctcttatgtaaccaaagaacgcaagcaattttttttaaaggaaagaaaagaagttttttttttttttttgggttatatacaaacttttatttgtaaagtaaacctggcctggaaaatgaaaaacgggttgatatcttatagtttactgtgtacttctccagagtccaaaaagagaaaaatcctcgaaatagcttgattaatttatttctctttttcatttttcaaattttgagcaggttcacaagtagtatttagtgttgcaatgaaacttaaatgttacagcttggcaatggaagtaaaaaggttgattgctttcgttgtgttggcaatttgtacttgtgtcactattaagtttgttttctgtagagtggtgagtcagaacttaaaagtatgtcaatgttgtgtatttcttgcaatctaatgaatccttgttcccgttcagcatt

SEQ ID NO: 47290 - DNA, 947 bp, Manihot esculenta
  Intron number 1 from transcript cassava4.1_004014m (locus cassava4.1_003454m.g) derived from phytozome v7.0 (chr-ID scaffold04043; pos 867205 to 868151 reverse strand)
agtttccgtggtcaatttacctccccgaatatctggtatgcatataaattacatttctaattatgtgaagtatcactcactatatgcttatcagcaagcgggttgtgtttcagtaattcaaaggtgttgaacttaggattatcagttggagaatgaaatttgggtcttatgaatatgcttctaattctcaagacaggtcgggcttgtatttaataagtgtccgaatatttatgtcagagtcactatcatttgtcctgtgaacaatattgggatattggtaaatttcatcctctttctctaatttcaattagaaatactgttctggaccaagtactgactgcaaagaatataactagtttagcgtcttaaaggaatagttgcacatgaaatttgagtttagaagttggtattttcagtttttcttctgttgacatggggctttccttggtttttgtggcatgatatgctcaattcatttgtatgggttgccctggcttagtttttcaagcttttagtttacattcaaattgctgtaatgtggtgttatgcttagtctcactgcaacagttgcttctatttcattacttgaaatgatgcttttgagaaaactgcagagaaggatgtaagagaaacctgtcagtattcatatttgtcaactgtcttgatggtaatttatttggagatttggttatataagccatctaggatgaaaaaggatattttggagtttttatgtaatctgaacatgaatgcaaggaagatctcaatacccctcacgggaaacaagtgtctttatttggatgaaatgcagtgattggtttgattgctcgatttattatttagtaatgtgtctatttgaagtttatgatttatctaacaaatgtagcattagaatgaccataaaaagataattgcagaaaagactggagtgacggcagaagttcaaa

SEQ ID NO: 47291 - DNA, 615 bp, Manihot esculenta
  Intron number 1 from transcript cassava4.1_008625m (locus cassava4.1_008564m.g) derived from phytozome v7.0 (chr-ID scaffold12793; pos 166623 to 167237)
ctggactgattttccgttgtcactagaaagtatttttttgtttatttaattcacctacatgtttatagaatcatttaacttgttgctacttcagaataacataacaattctccaggtttgtcaataacagaattcagtaatgcgtgtgggtagtgcatcgcagttaagtaatataatatactttttattcctgggtgctggtggtggtttcttttttttttgggggggggggtgcgggtggggtggggtgggagaagatgcttatctaggaaggattatggaactttccttattttttgcccagggctgctggttcatcttgccgttagtaataccttatatgcattatttctatgaccatgaatatgggcatttgtgcattctgtaaaacaaacaagtgaatgaattaaatgtagcttttgagattgtgtctgtggatataagttatctagccaaattacgcagttttacttttttattggggggaagcacgtttcctgatacctttgatcattgaccaaaaaaaggaaaaagaaaacagcagcagcagcagcagcagaagaaagaacagttgaatgaccttgaatctggttttattttattgcagatttcaga

SEQ ID NO: 47292 - DNA, 880 bp, Manihot esculenta
  Intron number 3 from transcript cassava4.1_013842m (locus cassava4.1_013842m.g) derived from phytozome v7.0 (chr-ID scaffold06705; pos 153228 to 154107 reverse strand)
agggacgtatatattccaaaggactattacacagggtgagctttttcctttgggaatatgatcgactatgaattgcagtgtaattatgttatgttttctacattttctttttctggtattttgtctaaaattagctgcttgtcttgtatgtccaatctaagaagtccccttttttgagctacttttatagatgatataaaagtgcaaatggagagaaagtctgaattgcattctaaactatatgttaaggttcatttttctttttcatagcgaattaaattttgaactggtttgtcagggggtgtgttggtttgaagtaaaaaatcaagaccaagccccacaattgatgaagacctactgtttgtcattccttaacatattgatctcaagggtgttaagagtaatgttcaaatgaagaatgttcctttataaagagaaattatataattacacaatcactagaagtttgatggaagaaggttgattcttggtcaattgaagacaacttgtggaggtttttaagtttgggaagctttgatttcaagtgcatcttatatttacaagcatatgaagaattatcaagtcacttgcctcttttgaagttgcctttcatacttggctgttaaagaaaaggtcagccacttagcctgctttatgtgaatttcggtgtcaaaatatgtgtaagtgctctggagctgaactgtagatatgtaagaaacatgttatgctatttgtgttatagcaaaaactagacaatcagcttcttctatgttgccatgggagctcagtgttcactcatcctatattcatactctttttgatgctttgccttgtactatatgcagggaacctcgtgggtttgcatttgtgcagtttgtgg

SEQ ID NO: 47293 - DNA, 542 bp, Manihot esculenta
  Intron number 1 from transcript cassava4.1_007076m (locus cassava4.1_007076m.g) derived from phytozome v7.0 (chr-ID scaffold10563; pos 162682 to 163223)
tcacagtcggtgagttatatgaaacagagtgccagaggacaaagacaacttgtgtgatttataatatttggctcttggtcttaaagttatagcttctgctttgttttcttcttctctctctcacgttacattattgactggttttgtcctttcttagatcggttttgatgttacagtgttttggctcttttgggtttgaatattttttacaagttttgctctagtttggcatttgcttttctcttaatcttgaattttaaataaacacaatagaagctttttgaagaactcaaaccggtattgaaacttgaagtgagatttgaaccattttgttttccgcctgacgcttctcttttttcaagaaagcaaggcactgttataaaactaaacaagtttcttctctatttcacaccaactcgcaatcatttctagcataatcccattgtctccatctttgagttgctcaaaattcctaaaccccatcttgttttctacctcttaatgcagcaggaggtatccccacgaacttcaggcaggctctc

SEQ ID NO: 47294 - DNA, 816 bp, Manihot esculenta
  Intron number 2 from transcript cassava4.1_007076m (locus cassava4.1_007076m.g) derived from phytozome v7.0 (chr-ID scaffold10563; pos 163265 to 164080)
ctcctgtctccccgtccgagatcgacgacgtcaaggtacacaacccatgactactactacaaggtttttttttttccaagaactattaccgggtttgcagcaagatttgtgttgtgtgtatatctttttttttcctttgttcgtttttggcttttacggagcacgatacactgagtacatgtacacttgctcattcatgcccgagatgacatgtctcaggctttctctccaaccaatgctcctctttaatcgcctctggagacaatgatttttgtttcgttttgtccgatatactttcctttggtcgaaaggaatctagttcagttgtgttctaattatattttatttttagccaaaattcagcggacggtatttgtttgatttgggtgaattgtatatgacgtatttgaccttctgctagagctttttttaggccaaagggcagataaaatagacactacccatctgaaatatgttatggtcctttaattctgtcaaatgtcggatatgcggttgttcccctgccgaatttgttaaaaattattacagagctttacatttatggcttatgaaccctacccatctcaacattgttaacgcaactaatctcatctggtttgggatgatttattaatggtcaattaattattgttttttgccatgacttttgtttttcaattctttaatggttttcatgatgcataagaggaacaagtcggaagctttaccttctgaaaatggtaatttgatgagccaaatcaattcttttccttctctgcagtgttgccgtcaaaataacagcgttaacagccagca

SEQ ID NO: 47295 - DNA, 695 bp, Manihot esculenta
  Intron number 1 from transcript cassava4.1_001599m (locus cassava4.1_001413m.g) derived from phytozome v7.0 (chr-ID scaffold03569; pos 134287 to 134981 reverse strand)
ggagctcgtatgtcgcttgttctttgtcatggattttgatcttttgttttgttcttaaattattggttctttgtctatattttcatacttcgttgcatattataagtgagttttgtcattcttaaaacacccatatgcatataagtttataggattcaggactatccaagtaggttcgaatttggatgatattataattctgattttgtggttgatagttgagcatctttgttgtggaggaactgaggtttattgatgccacctatgtactctgtgagcttttttgagctattggagtcattatctagttgttcagttggattcaaatcacttttttattgttttctgcatctatcattgtctaccaagtaattacggtgttagtggtaaactcaagaggtgaattgtgatgccaataggacataattggaatttgaaacgaacatattggttatctagatatatgttttcccccctttttgttgtttcacagtcctagcgagtttatccaatgtgcaattatttacttctataagctgaatcaccaaggtgattattactgtttgttctgttttgaggaagagatgtgtccattttgctgagtcttcctgtcacttactgtccctcactcacgcaaacaccaagtttgaaataaattcctttctcgtttctttggattttggtttcgtcaaggt

SEQ ID NO: 47296 - DNA, 372 bp, Manihot esculenta
  Intron number 2 from transcript cassava4.1_007449m (locus cassava4.1_007449m.g) derived from phytozome v7.0 (chr-ID scaffold10868; pos 54141 to 54512 reverse strand)
cacatcgcccaggtactcatttctttcttttaaactcctttttgggtctgaattcagttgatttgtagtatcgtaagatgatcagatttcaattctggtactgtagaactaggcttgcagtagagttcagcagattgctattaagcactgtgtacctacattacaattatggttttgattttagaatctttcaatagtaataattagtcttccgtttatgcttcttgtttggtagagaggtcttaaccttcaaactccgctttatcacaacattgctagtttggatatcagcttgttatgtttaacttctctttttccttcccaatactgatttgcttgtcctccttttgtggacttcaattacagggagtc

SEQ ID NO: 47297 - DNA, 514 bp, Manihot esculenta
  Intron number 1 from transcript cassava4.1_017169m (locus cassava4.1_017169m.g) derived from phytozome v7.0 (chr-ID scaffold08597; pos 80854 to 81367 reverse strand)
ttgcttctgtgggcgggggaataggaggaaaaacggtaatcaccgtttttttttttagcatctaataagttgttgatttttcttctattttattttcttttgaaaatcatagaagaaagttctattccaattgaggcaactgtcaataaagaacaaggtatacaatatcttgtgaactttcatcttgcatacacagttcttaattttttttctattttattttcgtttagagatcaaagaggaaactgctattgcaattcaggcaaatatcagcgcagaaaaagttatataatatcttttgaagtttcatcttgcacataattatcccacatataagttcttgatttttattttcttttggagatcatagagaaaagtgctattccaattgaggcagttgctaacagagaaaatggttttttttttcttaattgatatgttttgattaacaagaaataagtagaatgttcatatttaattatattatgtagttcaggtgttcggacgttttctc

SEQ ID NO: 47298 - DNA, 715 bp, Manihot esculenta
  Intron number 1 from transcript cassava4.1_023688m (locus cassava4.1_023688m.g) derived from phytozome v7.0 (chr-ID scaffold08265; pos 1759345 to 1760059 reverse strand)
gtgagatcaaacgatcactggaatcggtgagaacagtatctcaaactcaaaagaaataataaatgaactctaaagactctgataccttgtaataagacaaaaaacaatagagtaatttctgtatatttctctgtttttcaaggtgggaattaatttgttagttctttaaaatttacaaggatagcttgattctaaaatgcagggactaatgtatagatttcactaaattaagggactgaattgtagttttccttaaaattaatgttctatcatgtttgatcaattatggtgttttaatgttcttgcatacaattaatggtgtacttttgtattagcagaaacctgctaatgaattctgaatggcacagattattgctctctctggctaattaattgcagaactaaagcttgtggccattgagctactggataataataattaaggaatctcaactactgtagttattactatgttaagcctgattggacaacttcaaattcatcttcagaaaaaaccaaccaaccacctgcttaacactgaagaataaaagaagcagcagaggaagaagccaacttccaagttccaacaatggcttcttgccccagaagagacatgttcgcggcagaaaggccccattttttcaagataattcttgaggagaccattcgtgataagaagcttgtaagtctctctccctctctttctctcttgtag

SEQ ID NO: 47299 - DNA, 1010 bp, Manihot esculenta
  Intron number 3 from transcript cassava4.1_017709m (locus cassava4.1_017648m.g) derived from phytozome v7.0 (chr-ID scaffold10493; pos 18389 to 19398)
ctggggctgagcttcttgacataattctaactaaggttcatctctctttctttatctgcatttacatgttattatttttactgttattatggtattttgttttatcgtagctaaactaaagagtagaataaggatgctatagtacatagttttatccttcaaatgctcgaaaacagaacatagttttatccttcaaatgctcgaaaacagaacagctgtagtggagtcttagaagtaagaatctcttcgttttctatgccaaaagtttgttgttttatatagtgagaatcttttatttattttttaccaatcttgtataaatttctttaaagcttgagataccttgctactcatctcttcttttttgttattttctttagggaaaaaaggactctttcaattttgtggttgcaatagtttacatgctttcgttaaccctttgtttggattgaaggaaatggagagaagaaaaatagaaaattaatttctttaaattctcttgtttagacatcaattagaggagagaaaagaagagaaagtgggagaaattgtacttcttcacttttggacccaaaacatgtctctccaaattgattttagatgaagagaaatggggagaattggatattatttgtgtaataattcctaaatgcacaaaacgctctcttttttagactgtgagggtataatagtaacatcttatttccttttaagagagaaattatatttctcttctattctaataaacttcccaacaaatatcaaatttctacttttttttttcttttttcttcatttctcttccttgattttcttcatttcccctacacaattaagaatccaaacaagggtaaaggtataacgaaaagattatgtatttctttatgatttcagtttgtttggaagctcttggttaaaaggaaaggaaatgaaataaactgcgtactgaatttatatgaccagtgacaaaggaaattgttttggttcctcttgattctttcagggaggat

SEQ ID NO: 47300 - DNA, 514 bp, Manihot esculenta
  Intron number 1 from transcript cassava4.1_010979m (locus cassava4.1_010979m.g) derived from phytozome v7.0 (chr-ID scaffold11960; pos 150367 to 150880)
tgtcctctcttgaacccactccggttaaggttctgtttctttctttttccccctttctttaactcgtttctcttataggtttttatgtctcttatcagctcagtgtaatagcattgtggctttgcctaggctccctttactttcaaaaaaaaaaaacttatactgtattctatatggttgttcatggtccaaatgcagcggaaaagggaaaaaaattaatcagtgtaatacattgttcgctcattcgttcaaggtcttttctagttactgttctaccattagatattgtatttgctttttacattgctttcgtaagaactcaaaatcagatgaagacagacttcatcttccaactcttcttctttgactaaaacagagcattatggtgaaaatatgaacaagtctttatttctttatagatttacttggttttatttattcaatttgattgtgatatttgatatcttttgtgtgaacaggaagaatcttctggttatcttagtttaaacagagt

SEQ ID NO: 47301 - DNA, 657 bp, Manihot esculenta
  Intron number 3 from transcript cassava4.1_005375m (locus cassava4.1_005375m.g) derived from phytozome v7.0 (chr-ID scaffold10563; pos 1413985 to 1414641 reverse strand)
aacaacagagaagagacatgtatgaatctgttctttaaataatttgttttggtggcttgctgcacctcaccaaactaaaattgtgttgaagttgcagggtttttatatgcgcttaaatatgcatccatgaatatctgtattatctcccaaacgttcatgccttccaagaagacctgttagattgtgtcagcatattgacctctatccatatgctgtttaaattcttgcttcaatttgagtaatgtttttatagctatctctgaactttggtttgcagaactcgataatgaatatctttggacattgtggtcttgtgaaattgaaatgcatgctgatagaagcaataatttgtcatatactaatgctaactggagctcgtttctgaatattttttaaataatgtcagcttgtttttttcacaaccttcactctattctttgcttgttgttgaggacccagctcagtaatacctttgggactttttgccttttgataatcatttccaccgtttcaagtttcaacccaggaccagttaacaaagagtcgatcattgttgcattgtttcatttgtagtagttaaagcagcccccttctaatgcactacctctgactaagtcctatttttatatcttggaagcagacgtggctattagaaag

SEQ ID NO: 47302 - DNA, 404 bp, Manihot esculenta
  Intron number 1 from transcript cassava4.1_030718m (locus cassava4.1_030718m.g) derived from phytozome v7.0 (chr-ID scaffold03572; pos 122615 to 123018 reverse strand)
atcttgattctggggagctcttggcagtgaagcaggttaccctttttttttctcaatttggaagttattttttgaatttgttctactgtttgctttatgattctgtatgggttacaggctttgttgcgtgattcttgaaatgggatttgattgatctcatttaggtgattatggtatgggctttagattgtgcttttcttcattatttctagttgggttttggtttaggtttctgataattagttgtctgtgttttaaatggattttgtaatattataacttcagtttcttattggttttgggaatttattatttcatactttggactcagagacggggctaaagtcagtgttcatttcgggtttaacttgtttctgttcctttataggtgttgattgcagcta

SEQ ID NO: 47303 - DNA, 522 bp, Manihot esculenta
  Intron number 1 from transcript cassava4.1_003328m (locus cassava4.1_003328m.g) derived from phytozome v7.0 (chr-ID scaffold06705; pos 298601 to 299122)
aaccccatcaacaccgtttttggtgagtattttttttactgagagcaaaaatctaaaatcggccgtctatttttatgtttttttttacttagtattcaattggtcgtcgtcgtttaaattcaaggatttgatttcgaatgtctgagacggtgagatctcatagatgagatccaaaatttaagaggataggacagatgttttcgatctgcaatcctacggtgaaaaagattatgttactctatgttttaattgatgaagcaatgtagattagggttgtgatcttatgcgtttaactgactgttttgtataccgtattcaacgcaatgattaaattatgtgaattgtcaataaaaaaaaagatattgcctctgttttcatactaatatgtctaaatctgcaatggtttcttagctaatcgagaacaatattttggactattgttgtttcttgcctgtttcattgcccattgcattttttttgtatgtcggtttgtgtttagtaattggaagtcatgtattgcag

SEQ ID NO: 47304 - DNA, 548 bp, Manihot esculenta
  Intron number 1 from transcript cassava4.1_002481m (locus cassava4.1_002481m.g) derived from phytozome v7.0 (chr-ID scaffold06598; pos 330106 to 330653)
caatactgatccctccggtatgtttaccctcgatttttttttcttgatttgttagactgagttgttagtgtgatggcgattggtgagtttaaaatgattctttttttctgtttattgaaatgagctgcctacagtcaaagaaacgagctttgacttcgctgatcccccattctctcttctttttttttttttttttttcctaatttttcaagtttaatccgtcagttccgtttgtttcccgggaaaatataggaaaatgaggagagcataatggttctgttgtttttgatgctggggtaccaaaaaaaaaggaatttagtgatatgagcggacacattttaatcgtgctatgctgaatcaagtgatcaaaatgttgtctctttatattctgattaaatcttattgttgttctttcttttctcagcaaattaataaaaggaatttctttttttttttaatgttttttggtaattgattagttctgaggatccaacttaattatttctgttccagttcaagctctgcaggtcatttacacttcattgaac

SEQ ID NO: 47305 - DNA, 913 bp, Manihot esculenta
  Intron number 1 from transcript cassava4.1_000636m (locus cassava4.1_000636m.g) derived from phytozome v7.0 (chr-ID scaffold02264; pos 116043 to 116955)
tgactcatccgtatattgcttttgtagtaagccttgtaagtcagttcatgactcggtatactctacaataatcgtgggtatactgcaattaagtgcaattgagtgttttttagatgctaattgggcggaatccaaaagtgataaaagatcaactgcagcctactgtgtgtttattagaggaaacctagtattttggaaaagcaagaaataaaatgtggtattcaaacagagccatggctcaatccacttatgagattttgtgataaatcatctgctggaagaagttagtttggatattgcgtcacccgtaaaactttggcatgataatcaagctgctcttcaaattgcttccaacccagtatactacgaacagattaagtatattaaagttgattgccatttcttctgtgagaagattttaacaaaaagttaattttaaccaattatgtgaagataggagagcaattggatgatctactcagtaaagttttaaatggatctcgaatagaatatctttgtaacaagttggacatgataaatatctatgctttaacatgaggggagtgctagagtgttgaacataatctgtatataattaacgaaaattatataatcataggttaattgatactattgaacaagaccttataatctgtatataaatataattatttcaatagagaagacacacataaattattcaattatttcttgtcttgttacatacatcacttcataattctcttagtttcacacgtcagaatgtgaactaaaataagtggattctcaagccaattggcaatcaaattcatgtctaaacagctaaaacgatctctgaaaccatgtgtaatcgattttagttttcatggtgtacataggcccgtgagaaattcttatcactgaggaagggctc

SEQ ID NO: 47306 - DNA, 928 bp, Manihot esculenta
  Intron number 2 from transcript cassava4.1_002430m (locus cassava4.1_002430m.g) derived from phytozome v7.0 (chr-ID scaffold01441; pos 33376 to 34303)
tgttagattcgccagtgttcctttcaaattcgtgggtaagtttagaagatttatgattctttggcatcattttcttttttctcttcttaacctttttgtagtaatatttagtgatgaattgaatgtgggagatagtgacaagctctaatgttttgcaacagatacatactagaaaaaaaggagtttgctaaaacgataagcagacattaaataacagataatctaatctaacaaaagcacttaaaattggaaagcatataccacgtccatagatcaggggcttaagtccatgattctggttagcctttgcagaaacataatcaactatgtatgtgatatcttttctttgatagagttcaatattaatcacccaagtagattttatgcatgtgggtgggttgagttttgttctatttcattctcctacatgcttcacagattaggccatgtactttagtttataggttacatgacattaacttcttgtctatccaaacctaacaaatcaatgggtgttttgataaccgggatattattttaggcaattgttaattctttgaattcatacttccataatccatcaccatctcatcttttatgtttaaccaagatcttatggaagattgaaggaaatctgaaaaccagactctggaagtcctcttattatattgctgatgtaaaacaatttttgtggccttcaatctgaaatgtaaaatagtatcctgcatttaggctttattttgaaagtaggttgacaagctgtaaatcaactacgtatatgtgtggtaaggagcaacagataaaaaagtgaaacaaatttatatttcaactcattaaatgggtttcaccaaggttgttctggaataatgctttctctgtaccctatctctcaggcccaaccatctccaacaactggaaaattctcttt

SEQ ID NO: 47307 - DNA, 997 bp, Manihot esculenta
  Intron number 2 from transcript cassava4.1_006124m (locus cassava4.1_006124m.g) derived from phytozome v7.0 (chr-ID scaffold08265; pos 3054609 to 3055605)
ctcctagagacaaagaacatccatgtcacttataatttgtacctacaagctactccattgatctaaacatgtgcatatatattgcctgtctttcagtgcaaccgatatttatattttcagattaaaacaagcgtattttgttattgtttaggacgttgattttttaaaatctgattttagcatggctttctctttacacggacccacttgagttttcaggggctcagagtctacttctgtttgtccattatagctattcagtgaagtctacacgaaatggaattccttcaagtttaccttatcctatttgtatgctgaacatggtgattatgactctagtttaagtttgttacgatgcattatgcctttcttattaaaggcattgtggtttcattatggcagtccgttgggttaattagatggtgtgatggttatgaacaatacatttttcaagtgtggtgaaagtgttatttagttagatttatctcaggtttttgcaccagaatggatttctttgtgtgtgcatacttggtttgttgatctacatctgcaaacacttgtattaatataggagaagaaggaatgctgcataagaaagaagtatgtaaacttctttgttttctcgatatatagattttgatatcaatatatgctgtcttgggttcaaaatatttatttcatcgggcaactttccatttttcattaattgtcctgttacaggataatatgttgacaagtttcttttcactattgaagagaagtattgttacattgatcctcaaattcagatgccttttctctaagcacctgcagttatttttatccatttcagatgctaaagagatgtttcacctcccaattctttctatggataatggatattgaagacgagtttcctttattttttttcttaccaatttgtttctagaggactgtgaatagccattctgattctagattttgtaattcttttactttccttttctctgctcagggc

SEQ ID NO: 47308 - DNA, 878 bp, Manihot esculenta
  Intron number 1 from transcript cassava4.1_004562m (locus cassava4.1_004562m.g) derived from phytozome v7.0 (chr-ID scaffold03802; pos 28950 to 29827 reverse strand)
ctctttgcctgctcaaattccacagtggcctcaaggtatggcttcttaactttccaaaagaagtctgaagtctgaagttgataataaagtttttcctttttttccagttattttggaacatataatttctgggtttgggaagttcttcacagtaaataatcaggagtttcttatgctgtaaggatattatccattaactttgttagcctttgggcatcagaaggttacaatcctctgtctgtctgtctgtatgtctatgtctttgagttttaattctttagatttaaattattgtcttccccagaataagagaaggttgttcagacacattcattaacttggtcaaatgatagagaatctggcatgccttgaaagcagaagcttgtaaaggcatttgaagctttaaaaatgtaaaaatcattaagcatatggcatcatctatatcctttttcttctttttgagaggacgaaatctattatctcactgtgcagtatttatatttccaaattttgtgcccttgattgtggttgaagcaatggaggaacgtgtcttcccttttggtctattgcatatggatgcatccttctaagctgttttgggagattttttgtcaccaaagcatggaattagtactatattgttcttgagatctaaagtcttaactctgtaccaacgatgctcattatatcattaaatattaattattggcttgtttaaaaattttagcttgttatttgttggtagaactcatacctgaataggccaactgtgcttttgatgtctgcatcactgaatcttcatttatgacttgctttataaataatgtgttcttgtattctcaggtcaaggatttgctactgaaagaataaatctagga

SEQ ID NO: 47309 - DNA, 874 bp, Manihot esculenta
  Intron number 5 from transcript cassava4.1_006286m (locus cassava4.1_006286m.g) derived from phytozome v7.0 (chr-ID scaffold07896; pos 107811 to 108684 reverse strand)
gttgaggtatgttgcttgtgttaaattttaatcacttgctttaatcaaaagaactaggacttgtagttaattttgaaatcctattctttccactttcaatatgtgaccaaacaggagattagaatagaaaatgaagaaaccaaaaatccaggagttaccttagattaaaaaaacaactctccccttatagctgctgaaaagccctatatataatgtcgtgggatcccttttctgttagcatctccaagtggcatttcctccttgattccgtctccagacgcatgcatctagatgcatacttccattcaaatgtccgtgcctctttctgctttctgctgtatgcttgtaaattgtcttgggcctaaattcacccctcctgggcatctggctgccatccttcagctcctgctatgaagtcatcacataaaacatgtgaatggaagcttgatcttgacctgtcaaggtttccccttctatgatattttagtgagtgaagttgttcaaacttgcacaaagtttcttgataaggataaagagtttaaaatatataaaaaggaaatgcaaaatttattgtgtcattatgatctcatacacaatacatattctgcatctagggatattatgctaatctaacttagatgaactgctgtaatgtatttttggattgatcaagtattcatagtgaattttgctaggaatcatttagtgcttggcatctagaaaaatacatactctttttcttgattttttttttcttatagaaacaagttctggaaatttgcatactacagcccttagactttgttatagtctgcatgcctgctttttcttctgaaatattttcattacttctgctcttgttccagagaaaatt

SEQ ID NO: 47310 - DNA, 346 bp, Manihot esculenta
  Intron number 1 from transcript cassava4.1_029530m (locus cassava4.1_029530m.g) derived from phytozome v7.0 (chr-ID scaffold11495; pos 683758 to 684103 reverse strand)
ggataaggtgtctgcctttgaagaagtatttgttggtaaaacccattttctcattcaccctccttaactagaatttgcttttagaccgtgaaaatgcattttaccgtgtttcatccaagtgagtgtatcatatgcaatgtcgctagttgataacttttggaaaaagtgtaaccaaggtatttcttttttctttctttgtcaaacatgaatgtttgattccctcattgcggtcaaacttaatccctgtcattgccgagttagcatttaattccaaaaacaaagcttttcaatatctgattatgtctatatatttttccttcattctgtttcttggcagaaaaggtcc

SEQ ID NO: 47311 - DNA, 683 bp, Manihot esculenta
  Intron number 1 from transcript cassava4.1_011567m (locus cassava4.1_011567m.g) derived from phytozome v7.0 (chr-ID scaffold11495; pos 580472 to 581154)
ttctctcctgattcctacttctgccactcttcgtaatttagcttctcttttgcttcatttttttttccatttgacatggttgcactctgttctgtgctctgtatcttgttaggattgttgattttctactaaaaattcctcttatttgtaaaaaaggaaaaattatttcaactttgtttttgatgagtatggaaacgtttccttactaagaagattgattattattattcccttttgggggggcttggtcttttgtaggaacaggatcattctattctaatgcttagagaaactgcgtttattttatttatttgccttattttttttccaatactatctatgggaggagtttgtttggtcagctgcatcttatgagggatgttgctagtatagaaaccaaattaacctaattgttccatatcgtttatgaacagagccaccgcctttactacaagaaaaggttgaaacttttgcataaacattttctttcttactttttatgcaagttttgctgctctgttttgatttacttttgagtttcctcttcagcttgtaactttcctgtgtttatcttttcacttctcattagatatggcagctgagatataaatgtaaagcaatttgggattgtattcatctaataatgtctgtggtgctttttcttttttgcaggtgcaaagtct

SEQ ID NO: 47312 - DNA, 968 bp, Manihot esculenta
  Intron number 2 from transcript cassava4.1_032724m (locus cassava4.1_032724m.g) derived from phytozome v7.0 (chr-ID scaffold10493; pos 226713 to 227680)
tgatttagctttggagtgtgctcaggcaaaccaaggtatataatccaatcctacttgttttctttgtcatttgctaccgcatacttgacatggagaatataaagattgttttaattttccttccttattctattaaaaaatttgttattgattgaacccagatctattcatttctttttctttcaaaatttttatttagaatgaaagtttatttttttaatttataaaattttcatttaaataaaatcatttgtaattttataaaaaatcatttaattctttttcttataaaattaattatgacagaggaagagtttaaattatgaaatacaaaacactaacagatttaatttaatttagtggcgagtgtatctaaataaatttgagagatttcatgttctatttcatctcttagattttcattttaaaaaaaattatagatataagattcgtcttgtatcacatgcacgtgatggactaaataatatttcaaatttcagaccttattagtttcaaatgagttagagattttgatggtttgtgttcccttattatgtctgaaagcgaaaagggcagatattgtcgtcaagtgtcataattattaaggaactgaagaataaatgtcggattttaacagcacaccatgtattaccagatttaaaacacagagtactgcgtcatgtttggactttcttcgatctgcacgcccgttttcaacaattcacaattgtatgttatttgggtttccatttttttgactatgcataattgcatttcatcaaacatatcaatatagccaaaaaaaggaaaacttcttccaccacagaaaaataagtaaaatctttttgcaagctttttggcttaattgacttaaatatgattataattattgattattaataattcttcttaactcagctgactctggcaatttggggcatgtttgttttaatatcttgcaggtcctg

SEQ ID NO: 47313 - DNA, 906 bp, Manihot esculenta
  Intron number 5 from transcript cassava4.1_017020m (locus cassava4.1_017020m.g) derived from phytozome v7.0 (chr-ID scaffold02264; pos 198205 to 199110 reverse strand)
tctttgcagaggtttctagagaaacgcaaggagaggtaaaaccgtgtctttctgtttgaattttggttcacgaaaatgaggttctagatccgaatattagaaaaagtctctctagttttgcttttctttcttttcttttcttttgttttttttctttttcacacacacatatatatgcaaactctgcactagaagaccaggtcttggtttagtttttctaagaggaaggtgtgattgaattggcttttttagttaaccattgattttgtaggaaaaataattatccatgcccgatttcaccaaattgaatttacgataaatcatatacgaagaaaaattagatcaaaagaaattcataagaattcggttacccaacaaatgtagaaattatgtcatgcattagtcactgattactatatttagaaatgccaaaatacgtctttttaaatatgataaaattattccaaaaaaaaaatgatttccctctatcagtgttgatttaaagcgcaaacaaaacttgtttgaatgtatcaaagtacgtgtccgtgtctggtttggtcattgttattctcttctggaggttggtgggagagagtgggggtggggggtggggattcatttccattagaacatctcctcgatgaagcagaaacggtaaagaaaaagcaccgaaagtggtttgggaagcaccccaatgttgactgaatcaccttgtcaaacatcaatccctgaataataaattaggcaacaccgttgatattatgccaatataaaatgacatttttcatgtttcaattaatgtgtatcgtgagtttgcctcttgatataagcgttcctaaatatgataaataaccattaacacgcaggttttgatttatctttgcaggttgactttggcattccctc

SEQ ID NO: 47314 - DNA, 964 bp, Manihot esculenta
  Intron number 2 from transcript cassava4.1_013619m (locus cassava4.1_013619m.g) derived from phytozome v7.0 (chr-ID scaffold11495; pos 479816 to 480779)
aagtcactcttactacctacacttccaccggagttgtgagtatttttctgtgtattttttttttaaattttaatggcgtttaacgatgtctttgattggtatactaatgtatagttctcctttttgttatttttgggatttattccctgtctggttgctaagaggaatgaaaaagacttgctatcatttttttttaattatcttttattcgactctccgaaggttcagatggataaaactgaaattttgctttgatttcatgattgaattataggggttttgttttagtaataattagtccattttctaaagcaaccaaattgatagaatttctgccaattgcagcagttgttaattgttaggtacattttattggagtaagaactttcatattacacgtgtttattcttttggtgattattttcttgttgcatgtcctttttttggtagtctcctgttgtgttttttatttgataggtttcttgtaattttcattacttccacatgagaacagatggatggatcacatgcatgattacttaaaaaaggatttgtgcagcatccggttttttgttgtgggattgccaaactcgttgtatgaatttaatgtatcattttcaaactaccatcatgttagtggtttctagatcagaatcctggcctatttttatcattggaaaatggcttttgtcttaaaaggaattcctgggagtttctggtggcacacttttgggcatctgttttactatcatttcttatctgtgcattccttgtgtgatacttttagatggatacttgcgctttaatgtgatttcttgtatacttagaaacaaaatcttctatgttgctttctacaccactggacatgcactgatatatgattggttaccctttgttgttttctgatgtttattatgttgtggtttcaggcaatcacttcaagtggaactaagaaaggcgagtt

SEQ ID NO: 47315 - DNA, 922 bp, Manihot esculenta
  Intron number 3 from transcript cassava4.1_019747m (locus cassava4.1_019759m.g) derived from phytozome v7.0 (chr-ID scaffold08265; pos 3322174 to 3323095 reverse strand)
aggacgctacagtaagttctcaaacttcctcatcatatgcaaacgctcctgatattacatatctaccttattatattgcttcttctgttctgcgtatcatttgtttaaagattccacaagatgtgcttcacttgtgcgacattttttttttactgcagctttcagctcccccctttaaaaaaagatctattataagttactctgtgattttcacaagataataaaaataaactaggcatttcagttctgttttcaactgtactgatagtaatgatgatttgaagaaatgtgctgctggaaatattatatgtgacgagattgttctctactgcaagcagtgagaatttgtgatatttgtcattagttctctaaggtttctccgtgtttcacctacatgctctgtcttttgctgccctttgatattctaaatgttttttcactggttgttcagcactgttggttgtttctgtcttctgctgctgtgatacttgtttttaaagtgctataagtggtttgtcatgtacaagtacaaccaagataatgtgatatttcactatggcatgtgctagcttaacacttaacttggtgatactatttgccgcctttatggtaacctgaaggctgctagtggttgctaattcaatgtttatttcataaagttattggttcctttcatgttagttttgaaccccaatgcaatgtgaaatatgaagctaacctactcaaatgacagctttgattggtttatatcccttctcactagaaataaaactagatatgtgtccatgctataacagcatgttaatttatcttatctctaaggagcatatttcaatttgtgtagaacctcctctattactttaatgttttaactttccagattgtttgtcacacttatctaactttcttctgtaggacaaga

SEQ ID NO: 47316 - DNA, 936 bp, Manihot esculenta
  Intron number 1 from transcript cassava4.1_012359m (locus cassava4.1_012359m.g) derived from phytozome v7.0 (chr-ID scaffold12439; pos 205484 to 206419)
tctcactcaggtactgtttctttctctatctccgggagcctcgataatggtaaaaatttcatcttgttcagtgctgattggttatctttttctgtttattttttccgactgagttttgcagctttttaatatgcgaatttcagtctcttttcgtttcgtcaatgcccttttctgttgagttggtctccctgcttagttttttaacttttttttccttgggtttgttaatcaatctgggttgattctctgaactgatttgcataattttaacggtataaatggattgatcattgcgagatttgtggatactctttcgcttttttatacttggtggatgattggctgatctgttgataatagattgtgaaagctgatcgaattctttgcgggctagctagatttggatcttgttggacgttgggttggtcagcagaagcagaactaaggagtaggctttaatgagtaactttttatgtcaactttagctgttgtcgagaactggaatatgcagatcttggaaaattaatcgctgaagagtgtttaagaacataatggtgacttaccccctttcttgtgtgtttgaatgaatttgatcgtaaaataagtgagaaaatgcagtactagtagctgcgatagggctgatgcgtcagcttgaaagttttgaaatttaatacaagttttgaatttcaatctcattacaaggttttgccttggttttgttttatgtgaaaggtgacatggctaaattgcagaaattgtgttagtgaatttaatttttgttctttgagccatctatcaatttggaaggggactagagatttttatttgcaccatattacttgagctggtatggctaaattgtgggttatttactggtgaattttactttttgcccttttaggtgatccatctatcgtttcggaaggggactggaga

SEQ ID NO: 47317 - DNA, 680 bp, Manihot esculenta
  Intron number 1 from transcript cassava4.1_003785m (locus cassava4.1_003785m.g) derived from phytozome v7.0 (chr-ID scaffold11495; pos 234328 to 235007)
cgattggtaatctatctgtttctccttttgtttagtatgctgtgcattttttttttcagatttgagctttcaatttggttaaaattttgtttggttagtttgaattactttgtgttgaattacagctttttttttcctgattatatatttgcggttttgagatcagatttcgattttgttagctgtttaaaattcccagttttgagaaaaattgggttccttaatatttgttaaacaggaagtttaactgagaactaacgaattatccaaatggtatctcattgttcttctttgtaggactgcttatagatttattctatccctaatagggagaattttataattgattttactttatgctgtctacctcttgtacaaaaagagtacaaaaatgatctgccttcttatttttgatttctcattggtagatgagtttcactttttgatagtcgtttcattgcttttctttgtatagctcttttagaggctgcactatacatgtcatagtatgaatcactgaatgaaatattacttgtttaaaaagtgggttttcctccaatatcttacctttatatacttgtatgtacttatggatcttagcagccttgggtacggtttgttattttttgtgaaattttataattgatactgaaacaatctggtatgatttcaggtctgta

SEQ ID NO: 47318 - DNA, 102 bp, Manihot esculenta
  Intron number 1 from transcript cassava4.1_032996m (locus cassava4.1_032996m.g) derived from phytozome v7.0 (chr-ID scaffold08798; pos 1240 to 1341)
aaggagaggttaaaaacctaaaattttaagattacagatgtttgttttcttcttttgattaccccaatcacgtatgaacaattattatctctgcgtaggttc

SEQ ID NO: 47319 - DNA, 780 bp, Manihot esculenta
  Intron number 1 from transcript cassava4.1_011264m (locus cassava4.1_011264m.g) derived from phytozome v7.0 (chr-ID scaffold06659; pos 59135 to 59914)
ccaagttccaagagctctagggtttcaattttacagtaagtaattctcttttcaaatttcttttcttttgttctgttttgatccaatttttgttgtgggagttactaattttctatttttgatgatgggtctgtttctgtggggaaatttctgtttgggttggtggaaattttgtgagaaaagaagaggaaatttggaagtatgagttttgggttgtcaagaaaaggtagttggacagagttgtcctttgtggttttggtttgtttagcttgagtttaatgatgatgtggatatctagctgaatttggagtgaagctatatctgggcttatttgagatcaaattatttgtgtttagcttcagttaagcagtgctttggtttgaaattatgaatataatagtttagctatcactgaaatggaaattgaagcttctcttttctcctcctcctcctcaaggtctggttttcagttgagttttttagtttcgtttggaagattaatggtaatgatgcttgtgatcatgcatgtgtgtgaatcttgatgcttctgctttttgtttcttttctgtgtgtaattctttgttctgtatatgatatatatacattaagaggcaccaaaaacattctaaaatcattatcagtagccatatttagattagaaattgttttgtttttcctttttttccatgattgagctttcttaacttaaatgtaatgcttaaatcttcttttgtctttgtttcagattctgttgttttgcttgttttactccagtggggt

SEQ ID NO: 47320 - DNA, 846 bp, Manihot esculenta
  Intron number 2 from transcript cassava4.1_032340m (locus cassava4.1_032340m.g) derived from phytozome v7.0 (chr-ID scaffold01782; pos 12924 to 13769)
tgataaatcctgccttccacctagaaaaacttaaggtcagcttcacttttggatcgattttaagaaaaattattttttatttcctgtaatatatacaaattttttaattaattttttaattttaaaaaatatattaaaatatttttaaaattttaaaaacttattaatttaatttcactctcaattttaacagttaaatattataaaaaaaatttaaaatatctttagagagaaattataattaataagcattcttataaaactgaaaaataaattaataaattttattataatataaattaaatagtaaaataaatgattaaaactaataaaaagattaattaataattttttaaaattcagagaaattttaatatatttttttaaaaatttattatttaatttttaaattatagaaattcattggttgatttcttaatttttaaaaatacattaaaacatatctaatattttaaaaaatctattaattatttattatattagttttaattgttaaatattttactatttaatcctttgaaaaaaatcgtcctttaggattttaaataatctactaattagtttttctctgacattttatattttgtttgtattatgtaacggttaaaattaatctaaaaggttaattaataaatttttatatttttaaatgttttaatatatttttaaaaaataaagattaactaatgaattttttatattatagaaatcaaatagtaattttttttttttaaaagcgaagacccaagtaataagtagggattaaataaattttctttcttattattgaattgaatttttttttttcaaataatttgacaggga

SEQ ID NO: 47321 - DNA, 907 bp, Manihot esculenta
  Intron number 1 from transcript cassava4.1_019847m (locus cassava4.1_018673m.g) derived from phytozome v7.0 (chr-ID scaffold05133; pos 110038 to 110944 reverse strand)
gggtacgatccccctctttcattttcactcttgttttaggtgccttttgatgtaatgattctaactctagatcttctggttcccaagaatgcttgaagatgttagaaatctaggaaaacttcaagctttcgttttttttttttgtgtttttctttaattcttctgtgaatgagttccaaaatggaaatcaattggccgttataaagaatgtttgaaattaagagatgcagatattcttgtaaattggcatttgatacgtagttctggttcagttcattttgctttctagttgaatgaatttgtatgttgcacgttagtagttatgatcctagagttgatttgtttaagataatgaggtggctatgtattgagtttaaattttatctttgtggtggccgattatttcttgggtataaagcttagtgatgttcagtgttatgccaccaaatgcctattataagcaacagcctattagtttagtttaatggaccccatcagtttatgaaagaaaaataattaatttttaaactactattggattactttttgaagtttgtaaactacagttagggacttccatctaattataggtttcaatgattgtgtctctaggctttttgttcggggttaaggtgacctcttctataagggcaagtggtattttgtactggagaggagcaattgagttcttgtagcatggtaggaaattgattgaacaagtttttctgcattattaaattgaatcctgatttatgtagcaaacttgtagcatgactttgatgcttgtctctggcacttcagtggtgtggactgcatttatttttctgtgttccaacatagttttgacttcaaaagatctatatgtgctcatttgtttccactattgtcttgcaggaagacacgcggt

SEQ ID NO: 47322 - DNA, 890 bp, Manihot esculenta
  Intron number 1 from transcript cassava4.1_004510m (locus cassava4.1_004510m.g) derived from phytozome v7.0 (chr-ID scaffold04065; pos 196460 to 197349 reverse strand)
aaggaatctctgagtaagtgctcaatctctgcgcttcatttgctcctagacatagctctttaattatcatttgcagacggagcattttcgttttcacatgactatagcatcttccaatctgttttttgattcttgtgcattggctagtagttggtcaaggctgttcagtttctcaattttatagcctttgcggttggttattaagtttgtggttaggcagtaaatttatgtataaattctgacaatggtagcaacaaaaacaggaggatttaagtattcttttttttttttcataataggataataacagtttagcagataccaagtaatgttatgatagatgaaggcagctacttgaattgggtgatgcctaaactagtgacgtcaaactcagttttaaatggtatcgcagtctcgcagatacatttagtatagcctttcctagttttgcatgactagttgatgaagtaaagtcccttgcccaaagaggaaataaaggaaaagaagttctatgtcaccattttggtgcctttggaagtctagttgaaggcttgaagcaatgttataggggcatttagtggggagattagtggaaatcacagttacatattctaaatattcttcaaagcgtctcaatctggtgtatgtttgggaggacatgatgtttaattgtttatattatcacaattaaatatgactagataatttgatgccatataaataaaatcacagttcattaccaattgaattggagttcaaaattattattttggctttgtgacacaatgcttgttaaggggtttaaaattattggttgattattttatcatggaaagcactctttcccgtctcatctaatcatgcttcgtacattatctattcctgcagtg

SEQ ID NO: 47323 - DNA, 1003 bp, Manihot esculenta
  Intron number 2 from transcript cassava4.1_008076m (locus cassava4.1_008076m.g) derived from phytozome v7.0 (chr-ID scaffold06814; pos 90278 to 91280)
cttggtgcggtcactgcaagcgcctctctcccgaggtacatagcatccacttcctctctctcttgcctttttttgtttttttgagaaagttttattgcttatgctttgttgtcaatttcaatcaatccgctagaattgaagttagtatttagatgactgggatcaaatttagatagcttctgtgtagattatccgttttctgtgttcttgttttcagttaatcacttttaagatgtagattctcaatatcattaactggggtttaggaatttaggttttactgcaaacttattttacagggaagagtctttgtattttagtggatgcatgcaggtgatgagtaatacttccaaaatcctgaaagtagtaaacttttcccagcaggttaaatgcttcagttatttgtagctctggctttgtcttttttctaaaaaaaaaagaaattaattaggggttgtacttctaattttttggagagtcgtgcaatgtttatggcatcttgatgtgtaagagtctcattctagcttttattcatacaatcaacaattacagctatgtctgacctttggccttgtagagatctttggagagttttgtgtgttacatagtttggtgattgttagcaaatgaataagggcttcccaaactgtggatttaatgatttttcctaatggtcaacatggacatgttaaatttactttttattagtggaagcttgtaaatgatggttatgtctttataactttttgctttgtctaatcggcaattgatagtttaacacaaaggtatcaacatgtgagaattgccactggaaccattgcccatgtttcaggtgcaggttatcaggtggacacactgaagtggtgtttggttatgataaatcctgaagtttggctgttagcttttttattagaaatgaaatcttttcatttttggctgcttatcatggaacagattaggtaaatccttgaaatattaaatttaattgttttattgcagttag

SEQ ID NO: 47324 - DNA, 747 bp, Manihot esculenta
  Intron number 1 from transcript cassava4.1_019776m (locus cassava4.1_019776m.g) derived from phytozome v7.0 (chr-ID scaffold04043; pos 1436231 to 1436977 reverse strand)
ttctcttttcatttttcaacaaaaagaaagagcaggtacgcaaattcaaatccatttctggtttagtgcttgtatctatgggattctattatctttcttgtttctatttcaatttacaaaattctcctctttcccattagtttgtgatcttctcttgttcatattttcagtttaattttttgcttcgtgtgtcttgtattatgcgttatttgtcttctttgagcatttaacttttttgatatggaattagttcttgcttgtagcagaaattgtacaagattgagaactcaacatggctttggttctttgtttttcttcatttgcggatgttggttataacatcttaagggttataagtaattttgtttcttttgacggagttcttaaaatggacaattttgttatcattttgcccaaatggtttctctcatgtgatcataaaatttatcagaatacgacctagtccataggagaatgaccctacatgtttcctcttacctgcaagaactggaaaaaaaaaagcaatcaacgattgcttctcaatattccctgcattggcctgaggcaagtgcagtaggattcctttatagactcaatgcaattggaggatgtggccatgtgggatttgcctatttggttccctcctgtcctgaaaggggggaagagatgctactattatgttcaactgcatgtaagtttcaattttctcacaaaatgaaatacatttactagcttttgcatcgaata

SEQ ID NO: 47325 - DNA, 690 bp, Manihot esculenta
  Intron number 1 from transcript cassava4.1_023563m (locus cassava4.1_023563m.g) derived from phytozome v7.0 (chr-ID scaffold05214; pos 515345 to 516034 reverse strand)
ttcatcacttgaacctggtacactttctcccctagttacaaaaataacagtcatgcctataaagaagaattgatgttgtcatcatctctttgtttgagcaaatatgatgaaattttgttttaaaatagtttttggagtaaattttggtatttcctagaaaacttcggtcattatttatgtctatcttatgaactaaatagaatataacatggttcccggttaggacttaaatgaaccttggcaaaattatgttatctgtttgcatgaccagatcagtctacattccctgcccagtgattatataaaatactgtgcctcctagcctctttatattaagtttttatttgattataaaatccacttactccttataaccgcttctttgttttggcaacttaatcttaaatgccatgtttctgtccaccatggcaatttaagaaccagttcaaatgtttgtgtcaaacaaacatagaatggtttagatttaaggctgttgaatttcggagatgttgaatgatattagtttatggctttatgctatagttttgtctgcatatgtccaatcatgcccactccaattgcatggatgatcttgtaaaacttcagaattttcttaccttctattcactacgtatattatctacatttcttgcaggttcgattgattggatactgtgttgagggttctct

SEQ ID NO: 47326 - DNA, 577 bp, Manihot esculenta
  Intron number 1 from transcript cassava4.1_008086m (locus cassava4.1_008086m.g) derived from phytozome v7.0 (chr-ID scaffold11714; pos 78693 to 79269)
cctcggttattgtgaaatcaaacgctcaatttttggtttgagctatagctaattcaaattacaaggatttgtcatcatttagtagtcttattttttattgtaaatcttttatctaggaaataatttctatttctattaactttattcgtagatctactaatagtgtagctcatgcacttgcttgagttagccatgatattttgagtctggttgaaatttttttctcatttcctaattgtatttctgagttataattcttaaattttaataaaatttacgtttttattcaaaaaatacattataaaaattagtaaataaatgtatttaacgttttttaaccagtgcaaacgttacacgttttagaaaaaagaagtgaaaagaaaaagaaaaaaaaaaagtaaaagaggcgcacagtggataaaaagtatgcaaccacccaaggactttgtagattccgggattggaatccattttcctgttgaatattccacaatcctcccagcgtcatattttttgttccttgttttttggaaagaaattaggtggttatcgctggtgaccacattatttactcacc

SEQ ID NO: 47327 - DNA, 802 bp, Manihot esculenta
  Intron number 1 from transcript cassava4.1_025916m (locus cassava4.1_025916m.g) derived from phytozome v7.0 (chr-ID scaffold03241; pos 453484 to 454285 reverse strand)
ttaaagttttgactgtgtgcagtgtccttcttcaggtatctttcttttttcctcgctaattaacttgtaattatatttctttattgttttgtctcctaaccctaacagcttcctttttctttttgcagaacaaaaattcagaattttttttcgattcatgcataactaataaacttttcattaaatcacgcaaaatttaaaaatattgccgaacatgtacgttcgatattattattgccgaacatctacgttcgatattattagtgccgaacaatggctcagatcattggtgtcgaacagccatagaagcagtttattcgatactattagtgtattcatacatatattatgattatttattaactattcattaataattatatgtgtattattaagatattcaaattttaattgtaattattatttattaactattcattaataattatatatgtgttattaagatattcaaattttaattgtaattatttacgtgtttaatgatattcatagttattaatttgtaattatatttaaagagcgtatggtacacgtaacggtttaacattttatatctagaaattacaaagttctaattattcttttagccatattgagtaattaagagtatataatatttcaaaccttcatgcattgttttgcagattatatggaggaaatgtaatcacactggaatgatttcttttcccttgttatatatattgtctcatagtcatttgaactcaaaattttttgtggtgctgcagcttattccccgagaagaagaaccatttagtttgcg

SEQ ID NO: 47328 - DNA, 880 bp, Manihot esculenta
  Intron number 1 from transcript cassava4.1_014065m (locus cassava4.1_014065m.g) derived from phytozome v7.0 (chr-ID scaffold06871; pos 642105 to 642984)
tcatcaattcatcccaattccaaaacatttccaaggtaatcttattcattttagtttctttgcttttattgatctcgtgctttagatctcgtggtttgttttgtttttctttttgtggattattttatttcttttattttttgattgtatgctttgacctgattcgatgattttagggttctgagatgtttctttgatgtgtagttttttcatagtttacttgagagattttctttgtaacgaagaggagttggtttttaggtttctttgtttggttttgtggtctcttcggttactgataaagtaggttgcggatggcggaggtgcagggagggggttgtgaaagggaactatagtttgacattaggcttttcatcttcatttcgcttcaagaaatcgggctttgatttgttagggtggtggtaaatgttggagaaactaaatggactgatagttgactttggtatatatatatatatattttttgctttgggtcttttttttcttaacttaggtctttgaataaaaaaattttggtggttcttttttttttttgaaaaaatcttttaaaaaataaataaaaggaattaagttatggagtttgaatttttattattattaagatgacacttgtggatttccctcccgacaagcttaatttatgtatttgacctgatctcagaaagaaaattaagtgaaacagatcaattttccaagtgcggtgttgtttggtaatttgtttgacggatgcttgcttgttacttatatcttgatttagctgttgagatatgattgcaattgacaacgtttggattattctaatgatgtttgtcttgggaattatcatgcagaaattacgttttagtttgatatatcaagg

SEQ ID NO: 47329 - DNA, 646 bp, Manihot esculenta
  Intron number 2 from transcript cassava4.1_005423m (locus cassava4.1_005423m.g) derived from phytozome v7.0 (chr-ID scaffold10563; pos 1196400 to 1197045)
agaagcgtttaatcgagaggcacatatccgtatgtctctctaacttttttagtttttgttttgttttcttgcaatttagggttttggtttctcatattctgttttcccgcgagaaaatgtagagcaagcaaatttgaagattttttcgtggtttttgtacttcaaatgaaaaattgacagaagcatgtaactaataataataataataataaatcttgtttgtgttttgatctgaggcctggatttagtttggttactgagaattgaaagaaacaaataaattgttggagtattgaattttttgtttctgaacatgtgaggtaacaaaaccgtttgtttgactgagctcagttcatgtggcttttccattttgcgtttgaaaatcaggattagaatacacctgaagaaatagggacctatatctggaggggcttttatttatttatttatttattatatgcttctatctcttttgagatatcctaacaagagagaatgcttaggatgtgtctcctcgatacagcagaatttgttgtttcttatgttatgcaatctatatattgataactcctttttattcttatttttatgttttagccttatgtttgatgaacccagtattgttatttatcatataattaggatt

SEQ ID NO: 47330 - DNA, 950 bp, Manihot esculenta
  Intron number 1 from transcript cassava4.1_010038m (locus cassava4.1_010038m.g) derived from phytozome v7.0 (chr-ID scaffold09016; pos 52448 to 53397 reverse strand)
ttggcaacacttgctactgtaacagcgtcttacaggttcgccctctttacttcgatttcagtccctcgattttattattgtttgttgttattagttatattgttattattttttcttattgtttcgtttagttttattggattatcattttgagctttgagtttgtggaatgttgaccttttgaattgattgacattgggttcttctacttacactagattgcgttttgcgtttttttgtcgtacgacgtttccatactctctgagaaacagatatggatggagattaaatttgggatgtaacgttaataagaactattttgattcaattcccaagaagattttcactgaaaaggttttgcaatttaagattcttggtaaattaactttataggtttgaacttggcacgcgtgtttcaattaagcttaagctatgtataagttgggtttacagtaaaagtaattagtgattcttgtaattggcatcaactattgcattctggtctgccttagactttaatttttcataaatttgaaatcaaaattttccactgtgatattagcaactgaatttcaatttgattttgagcttttaattagaaagcatatgtatttactatgactaattcataagaattttatcatgtcaacaaacactgtgtgattgttggtgcatgtttatgtttagattattattcttatgcctcaattttctacttaaaattttggcatgttgttactgtcaatattgtcagtctactacagttttatcaccattactgagataactatcaacttcttaaatgtggcagccaatgtgattttaagtcgctgaatttattcaccatgaatctagaaagaattatcttcaactatattcagtggttcttcatcaagtcttaacttttgtatgcaggcactttacttctgtgtaccatttcgagaacaatt

SEQ ID NO: 47331 - DNA, 386 bp, Manihot esculenta
  Intron number 2 from transcript cassava4.1_019540m (locus cassava4.1_017551m.g) derived from phytozome v7.0 (chr-ID scaffold02915; pos 125896 to 126281 reverse strand)
aagctgaagttggatctgccgccaaagtactatctctcttcttatttttcgcggtctatgctattgattgcttatatgattggaaaattctgatattctgcgtggttaatggattttgattgctaatggagactgaataggctgataatggaggaagctcagataatattatgcccagtaaaatataactccatttctatttccaatccaaaaaacgtagaaatctgtggatgaagcctcttttgttgttttctttaatttgattagtcttttgcaaactttattcaatatcattgtgttatctaattataatttgatggctcctgtgagcaagctagttgtgttaatcaacacttctcatctcattacctgatgacagagagaag

SEQ ID NO: 47332 - DNA, 888 bp, Manihot esculenta
  Intron number 2 from transcript cassava4.1_015428m (locus cassava4.1_015428m.g) derived from phytozome v7.0 (chr-ID scaffold05979; pos 152418 to 153305)
aaggagtttagggagcagctcaaatctaccagcaggttgttctttattattattattattattgttgttgttgttgggtaataaaaatgaattttatggttttcaatggaaattgatttcggaagggacatctacatccatccttggcagtgaggtttagggacaaaaaactttgtgtcatcattttagctgaagttgaaactcgaaagaagtggcttcaacctgaaacaagtttttgctcatcttttttgtgttattttgttgtttttatgactaaatcatgtcacatgttttaattaatttttaatactctataaccagctgagagcataaattgcattgttctcagtcaagataaaattgggttgagcttttcatttcaagatagcaataagttcaaaattttgattttattccctttggtttgtggtttagtcactgttatatgcagactaccaagagtctggttggcattgtttttgaagatgttttgagaaaaacacattctcaaatatgttaactataggtattaaaaaatggattatagttgaattaacatgttttagtcataagaactccaaaataacaaaacaatttttttttaaaactttttatttcaattgcatccaaaatcttgttttctgaatatggggcttaaatcttgctagaactgttgattaaaattatggtaaaatttcatatttcataatatggatttttactagattgagcctttctttttctgtgaatagatcaaatgtgggaactcaaggaacctagctcttctctaccatcttgttgtcactgtccaatttccttggaatctctagctcacgagttgtttcattgtcatgattttccagattcttcctaggatcaaacaaagta

SEQ ID NO: 47333 - DNA, 1016 bp, Manihot esculenta
  Intron number 1 from transcript cassava4.1_019835m (locus cassava4.1_019835m.g) derived from phytozome v7.0 (chr-ID scaffold07070; pos 109977 to 110992)
accgcagggcactgcgagaaaagtataatttgcaggtacaactaatttagccttgtgaagttaaaaactatatttttttatcgtgttaactggattatgtgcctgctttggccctactttgtgctgctgatataggacactagttttcctctcaaagatgtttaaatcaggtttattcttgtattgtgttatgaagttctgaggtcattaaagtaataaaagttgtattaagattaagagtgcagatttctttaattaataaaaaaatagtattaagcctttgtttgtttcaaggaaaatattttttcaaaaaaatatttttcacatttttttacgttttgggcacttaaaaaaattagtcaatggaaattattttcttagtgaaaggagaaattaagtcattttctgcactttgagaatcttagtgaaaggagaaattaagtcattttctgcactttgagaatcttattaagatctctatgtataactttgttaatatattttctcttttaaattaaaattaaatgacgaaaaataagttatttttattttctgatgaaaatgtatttcacaaaaaatattttctaaatataagtgattttccgcaaacaaacggagcctaagattaagattgcagattaaggaggtactaggtagttttggagattttatgcgtgttttgttaaagcctatgagttgggatttagtgcatactgcatagaataaaacaaaaaaggtaggagaagatatagagaggattagagcagagaggcagagactggaaataatttttaggtttgtacatcctgctgataattgatatttagggttccataatctatacactagaatgattatggctcgtatatagcctgaaggttctagtaataacattaaataacgttattcaggataaagttccattgctttgaaattgttcagctacctatatgacctaaaattcctagtagtaacagcaaatatacgtttttttgattgcttatgcaggaagcacc

SEQ ID NO: 47334 - DNA, 443 bp, Manihot esculenta
  Intron number 1 from transcript cassava4.1_015952m (locus cassava4.1_015965m.g) derived from phytozome v7.0 (chr-ID scaffold05214; pos 664401 to 664843 reverse strand)
ctacactatcaaaggcaccaacaaagttgttcgacgtatgtactctctctctctctctctcgctctctctattggtggaatctccattatttcttttttggctttaggaacccatgaatttctcatcttttttccccccttttagaacccatattctcatattgtttcctttttttgacgttaaagattttgaaaacccagtattaatggaagttttcatactttgtttttcatcatttttaatgttgggtcatttgttttcccgtttgggtctctctgaagaccgtggaagttgcttattttattgcttattctcaaaaaccccaaaatctcgtttttatgataatttttgaactgcccattttgcagaaatattgtctaatttttattttttgatcattcaatgttttgttcattttgttgcagctggtgattgtgtgttg

SEQ ID NO: 47335 - DNA, 880 bp, Manihot esculenta
  Intron number 1 from transcript cassava4.1_015634m (locus cassava4.1_015634m.g) derived from phytozome v7.0 (chr-ID scaffold12622; pos 169258 to 170137)
atcaggtacattctggtgctcttcttaattcattttgcttaggctactgtctaacatgcgtcagagtgcaatgcactctcagatctaaaactttagctcatagatccacggtccactgtttttccttcaccgctagaggggaaaaaaggacaaaatctataaatggtagtgctcgcatagtggaaactgattaaattttctaaaaatgatgcttcccattgttgaaatgctaaaatgtcggtgctacgctatcttgtttattgagaagagcgaagcaagcttgctctgtgcttctcaattgctggatctggtaagagtgttgtttctaatgtgataaacgcggcattagcgcttgagatgcacgttccagtcatcagtggtctgtcgccacatactcttcggctgtcactcgtggatctgcacaatacgaatactttctgtcattctggttcagttcaggcgggatccgtggttcattagagtattagatagcatatttgccttaaaaccaggccaagttgatcgattaacgaaatgtttgatatgaatgcaatagaaatagaaatttgtgcacaatgcacgaactcaccctccatgattgcactcccttcaaaagggatcgattcagttctcttagaagaacgatccattgttgggtaattgaaattttacgtcaaaatatcaggctattaactctttgacaagaaaaaatttcccctctaattgatttgtaatgtgggtggtaagctaccaattccccagtataacaaattagaaattcaaataaagtttattcttattgaattggggctgtgaaatgctgaatttgttgaatcaaattgcagagcggagcagagaccataaagagcctacacaagat

SEQ ID NO: 47336 - DNA, 936 bp, Manihot esculenta
  Intron number 1 from transcript cassava4.1_002060m (locus cassava4.1_002060m.g) derived from phytozome v7.0 (chr-ID scaffold05133; pos 103133 to 104068)
ttctccttttcgagatcaacttccccccttttcaggtttttcttgtttgcaatgcttctcttcttttttttttttttttttcttgatttgtcacgtcattgttgggatttatgatcttaatttcgcatctacttctgcagttgagctccgtaaccttttttccttttttaaaaagaaaaaaagaattcgtttgatgtgtagctgatatatattgttgattgtattatttgttctcttttagtaaaagaaatgttgtctattattaggttattctgagtatgtaattttgaaactaaattatcacttcagagtcgggaaattgatcgataactggcagaaataaatgaaaagttgagctgagaaaaagattgtatatttgaagttgagttcattgttatccatggaatttaggatggcaagggaaactgacagtaattttttgttaatttatccttatttaggaatatatgttgagtattttagtgggttacgtgagaaaaatggtaacatagcttttatataacaaaaataaacttatgcttgtaaatttctgtctataaagtgctgtgcaatgttacggtttcaatatcccacattgatcatctttgaatcttgcggtagataaaaacgtgggctccttttgctgagaaatggaaatcagtatgtactctttgcggattttgggggttgggttattttgaagcttaatttttcagcttcagtttgtgcttttgtctcaattttacgcggtgcaaaggaaaaaaaaagtccttttgcataatctggcatcacaatgtaaaagcttaatcttacgtgttgcgttacattaaagcttaatttttcagctttgtgcttttgtttcaattttacgtgttgaaatcaaaagggggaaaaaaaaggttccttttgcataatctggcatcatggtatgtgcag

SEQ ID NO: 47337 - DNA, 889 bp, Manihot esculenta
  Intron number 1 from transcript cassava4.1_012674m (locus cassava4.1_012674m.g) derived from phytozome v7.0 (chr-ID scaffold08265; pos 682715 to 683603)
ctaacaggtatcaatttcgctgccatgagagtttgatttggatcatttgtgtgataacgatttgctatgagccagcatcggcgatttatgtttacggtgttttttatttctgttcttggtgttttggatttaattactttatgaggatttgatctagatctactgtagtttcacctttcatttatctgagtttgtatcgaatttctcaatctagggttctatactttgtatttattgatatgggatttttttggggttcgtatgatcttccagaaaaatttggatttttgttgatttgaaattttaatttcttgaatttagattgcttttgatttttggatttctgctaataattgcgttaaatgtatttgttttctttttattttatttcaattaaatattatgatactatctgatagtcttaattaatttttaaaaattataataatttatttaaaatatcattttaatagttatattttttatatattaatattaaataatttaaaaattagtaaaaatagtaagaaaatatataaaaaaaataaaacaattggtaaattgaaacaaaaatgttctaaaatgacggtgattatcgtggaatacaagtaataactttaaatatttagaaatatataattaataataaaaatattattttcaaattttttgcaaaaaacttaaatgaggtctggattattttaaaattttgggtttatttgaacatgactctaaagttcaagggctaaaataaaatttcttcagtccttttttcaattaacaaaaggaaaaacagatttttctatttctctctcttatatatctaaaactcgaaacggattgtttactcgcagaccaagcacacgtacgcagattttccaaaaacaaa

SEQ ID NO: 47338 - DNA, 758 bp, Manihot esculenta
  Intron number 1 from transcript cassava4.1_011322m (locus cassava4.1_011322m.g) derived from phytozome v7.0 (chr-ID scaffold00823; pos 258639 to 259396 reverse strand)
aacaaatcccagctcgtcgatcttctctctagattgtgcgtcttcgcccctctctctctctctctcttctctcctctcgtgctcaattttaattttcctgggttattttctttctttactccttcctattttgtattgatttgctaagtaaaaatctacttgcaattataagttctgggattttgtttatttagttcaatgatcgtgggaatagtgaatgattagctaagagttgttctggttcatgagactcataacgattggagcctaattttgaattttgaaaaatctcaaaagactactaattttagtgaaagccaaataatttgttggtttcctgaaattgataatttctatggatttttattctaggcaacaaaaatagcaaatcaaacaactgaaaactaatgcctttttttcttttttttttttccttttgagaagatttcaatcttctgttgtttggactttactgcatgtatttgttagtttcaaataaaatatcaagcattgcagcattagactcatttggaagctctttaattgcatcttgagatcttgatgttttaatagcttatgttcctttatttattttgagagagtgagagagaggcagtgcatctgtttggagagggtgtgcatacgaatgttttatgctgttcaactgtatgctgtgtgattgactctgtgcatgtgtgtttggttgcatgttgacgcataaagagggtcacaatatccttccattgcagacgaaatta

SEQ ID NO: 47339 - DNA, 660 bp, Manihot esculenta
  Intron number 1 from transcript cassava4.1_010354m (locus cassava4.1_010354m.g) derived from phytozome v7.0 (chr-ID scaffold04043; pos 1500322 to 1500981)
ttcaaggtaacacatttgacgctttatatatatatatatatacaccttgactgctcgtggatcacagggactgggatgattctttcagactttacttccgtttttattctaatcaaattattcttggaaaatagccatggttatttcttttggcatggaaaaacctaaactttctttattagctttcacattgcacaactgagataagaggttcatctgtgctactcatgacatgtcaattttaaaatgaagaacttaatttttctgaactgcaggagtgaaatgctatgcgtagctaatggttaaattgagtgtgtatcagcgtatgctggtttaatcaataatccttgaatataaatggaaatgttgctttaaatgtttatttctataatggttgcctagaggccacaacttgattgtcctatgtatctgattaggtcatgaaactcatgcttgctgcacttgaaggtgttgtattcttaataccttccatctcttacctttctgtgaagaaaatttttaatggggttcgattgaaagtaggagactatttggcagcaatagattttgatcaagatgaattgctacttagctgccttatttttaattgaaatagtttgctgatctcttatttctttattcatttgtttcactgtagga

SEQ ID NO: 47340 - DNA, 413 bp, Manihot esculenta
  Intron number 1 from transcript cassava4.1_012400m (locus cassava4.1_012400m.g) derived from phytozome v7.0 (chr-ID scaffold08265; pos 1587916 to 1588328)
taattcttcaaagtactgtccttgagggaagactcgtaagtatctttaatcttattttcacattttttttttgtaggttttaaatgtagcttggagaaaaaggaaaaaaaaaaaaaaggaaggttgctgtttgattataatttcttctttgcatttcacggaaaaactgtagggaaaagaaacccatttagggattatattgctttgttagaaattttttgtggatttgcaactcttcgtagttattacttgttttcccctttgcaaattgtaaatttcgtaagggaaatgaaaagggatgggaggatttgaataatgctttttattttggtcctagtaactcttttaatggctgcgaattaaaatttgatttatgttttattagcggattccgaaaaaatttgtgaagaatc

SEQ ID NO: 47341 - DNA, 314 bp, Manihot esculenta
  Intron number 3 from transcript cassava4.1_002272m (locus cassava4.1_002068m.g) derived from phytozome v7.0 (chr-ID scaffold08265; pos 3333582 to 3333895 reverse strand)
tgtggcgttcctgaattgcagacttgcattcaaaggttttttcttaatgcgctgttgctgtttcgttaattatgtgtgtttcctgatgcatattttgtttgatattttcatttttggtaattggagataaaactctgctctctgatattctcaaaagaattgctgaaagtttactgcagttattagtggttaatggtggggtggccaactttctatgttcatgtcatttctatttctacttttccaagacaacattgttgataactttcttctctgctgattttcctttgtccaaaattacaggcttctttggc

SEQ ID NO: 47342 - DNA, 822 bp, Manihot esculenta
  Intron number 3 from transcript cassava4.1_015003m (locus cassava4.1_015003m.g) derived from phytozome v7.0 (chr-ID scaffold08924; pos 13189 to 14010)
gcaccttatagacgagagtctcgtcggggtttcaggttttctggtctttgataacttagtatattttcctttgtttttgccttacaagtgtcttgcgggatcaaacaaaagtagtagaatttgcttctagagatttctatttgataattatctttttcatatcaagtgaagttcttcattatgtgatggggaatcttttcaatcttaaaacatgtgaatctggataatcattatgtgctaaatgcaggctaggtgattctgtagaatcattgaggtttacttctatagcttaacatggctagtgagttttataggttggtcatctggtgtattgcttcctaaaagtctgataggtcggtcgtttgaggtttactgctccagaatgttgatgaacattttcttttcttaatgaatggggaggtggttttctaatcagttagttcttggtttcttaatatattattagagggctttcctatttcttgttttgtggtatcaagtggcaccaaaagaaaaaaaaaagatattttatttcattgttttttgttgtgtggaagaaggctgatttgaacaatgtcaatggcaatggtagaagtgtaaaatgaagaagttttattagttaatgttctctctcacacccatacaatacaagacacaagcacatcctccctcctttcttcaaggctgctttcaaaattattgattttcagaaagttctactaattcaacgccctagcttttttgctatattatgcttgttgttgaggtcgccttgctcttttagcagccaaagcaatctgtgcaagaactgcaaacgacctg

SEQ ID NO: 47343 - DNA, 753 bp, Manihot esculenta
  Intron number 3 from transcript cassava4.1_007496m (locus cassava4.1_007496m.g) derived from phytozome v7.0 (chr-ID scaffold02969; pos 198717 to 199469 reverse strand)
atataaagaaaaaagttccttctgataagtgagtgatgtactgttttcttaatgacaaccagcttgctattctcacttattttgatggaacatgttcctttctgcacaaggagacaattgatgatatcatgagttatgatctacagtaaacatagaaccgcagctacaccctagcaacaaaaaatttgaagataattaatgactttctttttcttaaaccagtattacatgcaggaattagatgcacgaattagctgcgccgcagataattccttagtaaaatgcagcttagaatgtatacttgatagatgtccatgcataaatttattgcttaagtaatagatgtaaattgaatttgcagttgagtgcaatgacttggtttcaattttattgtagcttgtagctatgctaattgggggaaaactctttacactattcaatccatcaattcctatttaaactgcatgatttgaaattgggctagaaaaccatttatgaatattgctagatttgtcaagtcagtgaatgcactgtttacgcattatttgatgtgagcatgaacaggtaacttggtcactcctaatgcctctggttagaggtttcatatttctttatagattaatgacataaattccattgaaattctgttttatattctgatttttaaatagttgcaattatctttaatgtagtcctcgtatatgaatgattaatggtttgtttcatatttcattttcatgcctttctgcagtt

SEQ ID NO: 47344 - DNA, 625 bp, Manihot esculenta
  Intron number 1 from transcript cassava4.1_007496m (locus cassava4.1_007496m.g) derived from phytozome v7.0 (chr-ID scaffold02969; pos 199802 to 200426 reverse strand)
gtatttcacttcatcgaatctggatagaatttgaggtaattgacgaaatttctgatcggtttgtgaattttttaattttgttttgattgtaaaattagtcgattcttcgttttctttaattattgatctctttttctcatcgacattgataaaatattttcctttttaaacacatttagggttcgtgacttttctgctccaaatcaatgtggagaattacttcagatttttttttttatttcgatgttatttttcaatgtttaaactaatatcttgtccagtttctcgttgaataaattttctattaattttccatttaatttcctccgtaatttctttatttttgtgttcaattctggaattcttttgtgggattcattttctaattaaaaccaagcaatttgccgaatttggagaaaaagggccgtattttgatctatgttctttatcgatataatttttttcttctcctaaatggacaactttctggcaagtgttgttgaaattatccgagtatgttttcactcaatataatttgacgctttgaatttttctattttctgttagaataatttgtttttacgtttcaggcatccaatagttgtaaggagcaattctgcattga

SEQ ID NO: 47345 - DNA, 698 bp, Manihot esculenta
  Intron number 1 from transcript cassava4.1_015056m (locus cassava4.1_014517m.g) derived from phytozome v7.0 (chr-ID scaffold06598; pos 456819 to 457516 reverse strand)
tccttctgctcctaataacccagtcacctgcaactgtaagctctatcacgattacttgagtattataagtgcatttgtctcttcttgtacatgtaattgaggggttttcttcttgttatcgtgagttaggtaaaattcttgttcggtgattagaatgaaattactggctatcttgttgtatttaagcccttaatgtcattgtgatgcatttgatttggtctcaaatggttattatcgaagtttgtttgctcattttgaaaaatccctttgattgctggatgtagctttttcagttcaatattcgaaggtttcgaactgattacgagagacaaccaagtgatcacttgcattgcgatgggcttaggagttaggattaatggcttgttgtatgaggtagtatggctgaaatgaaattgtgcgttaacattatggtggtctcaggattaatgttattgtgtgttataagaggtgcaatgtatggggaccgtgtgcttatgttcgtcatcttcttttcactgctgtactaacagatattgaagggattctctttttccattgttttaatttgttgcaatagtaatggaataagatcaacatgatttacgaagcatgcgacctcttacaaagctaatttagaattgacatatttaatttcttattctaataatgcctcgctaataatttgcttgtccttgtag

SEQ ID NO: 47346 - DNA, 618 bp, Manihot esculenta
  Intron number 1 from transcript cassava4.1_012847m (locus cassava4.1_011512m.g) derived from phytozome v7.0 (chr-ID scaffold02943; pos 708902 to 709519)
ggactctggtaatcctttttttttttttccttatcttgtatttctcacttctctcagtatttgtatgcatatatgtaatttagttgatgatttgctttttaagcatgtttatgctttttgggtaatgtagtggcttttgtgtgaattatttgttttggttgttaattagatagggagtctgcaatgctggtaatcgcgatattcattaatacgtgtaatttatgcaagatggtttatttaaaaatggaatgcaagtatgcgacttgatgtcatctagacatccaagatggttaattaaacaaatctattcttaagtttgcaaatttctaagaaactagtttctgttttcctccaaaattcaagtgaatcaaatattaaaagttcataaaactttgggatatttatgaaatactcaagaacttgccttctatttctagttccaaaattaaccaacaggctattaggttaagtggagtgtaatttaaatgcattggagaaaatttacacttctcttcaatataattgttatgtttgctttccatggatatgtttgaattcagattttgaatctcttttgtgaaatgcagtcaaagactaggaaagaaattctattggagt

SEQ ID NO: 47347 - DNA, 806 bp, Manihot esculenta
  Intron number 1 from transcript cassava4.1_007116m (locus cassava4.1_007116m.g) derived from phytozome v7.0 (chr-ID scaffold04043; pos 1492266 to 1493071)
caagtaagttccttgctggactttttcccattttgtgctgttgatcctattattttggttggatccacattataatttaggtgaatgaaaaactgtatttaatggggaaaatctgagaaacacgcttcttgtaaattgacttatagatgttcaatcaacttaaatatatgttgcccacttttcatgttattctgtggctttttgaggactagtagataatcaatgtgcagcaaatagtctatgtgatttgaacaatcttaaaaaagttaggtggcctctcaattgttgtaccaaggtgctcctgttattaacctgatctctagaagagtgggtggtttaagtttcagataccagaatcatttgatgtaatagcagttagtacctgctttttcatggcatccttgtgagtattaagtcttttagaccagtattctgattgatgtgcctttaagctgcaatgaaatggtctctttctttttgggatttttgtgctcacgttttttgtacgacaccaagttttgcatctgtccagaatttaatgaaatccgtcttggagctttgtcttctggacatgaacaaatttcaattttgctcttctaaataaaatagtgcgaactgagaagtacaatctttcttgcaattcttgacctttcctcttctggccaaatatctctttctaataaatctgaagctgatagatggtcttcttactactgatttggtaccaaaatatttaacttcaatagttcctgcagtacattgtgcatagaaataacagagttatttctttgtggaacagggtatca

SEQ ID NO: 47348 - DNA, 467 bp, Manihot esculenta
  Intron number 4 from transcript cassava4.1_010902m (locus cassava4.1_006469m.g) derived from phytozome v7.0 (chr-ID scaffold10563; pos 876503 to 876969)
tcaagttggagcttgccatatataataattcacaggtatcaaactaattttgctgactgtgcaagaaaattggataactagattcactgtgaaattaagtaatctgtgactttgctattttactgcagaattatttgtaggttttgtgactgccttagtgatacattttatatttgtccttaggtcttatttgaagtgcacttcatttctttgtattctatatacgggatattttgctcaaatattgatctttatgtctctaatttgtcagttctctaattatttattgtaatcagtttttgctctgttttgggaatttttttttaaaaaaaatcttctaccttaagtttaatggctttgattgcataatggctttagttttgcttgtccaagttttcatgtttttattgtttgaaggcctgaaaaattagaagttacttatgaactacttttaataattaaccagg

SEQ ID NO: 47349 - DNA, 829 bp, Manihot esculenta
  Intron number 1 from transcript cassava4.1_005736m (locus cassava4.1_005736m.g) derived from phytozome v7.0 (chr-ID scaffold07983; pos 5394 to 6222)
tcttccttttctctcttgctctatcttcgaaaactgtgagtgattttgatcttaatcgcttgattgctgtcgatttttcttttttgtttatcgttcttagtagtttgaatgtttgtaatttatatcgcgctatgtgattttcgttgggaattttccttttgatgtgtgaatttgactttctagttatgtttggttgcttagaatctgtgggaaaaaggaagtggtttttgtttgtgtttcctgtttttgattcttatgctacccggttaatatagtaatgcttttatttaaaattttacgaaatgctttgtggattgaataagcgtggatatggtccatttagaaaatttgttctcagatttttgtttatgattccatctagtagtagtttaaattctagaatgaatttagttcaacatcattatgttcggaagtttgccgaatgcaacttaagaaattattttgccagaaaagaaataaaggataatttacatcctaattgtttctcatttaggggaaaatggtagttgttaaaataagagttatttctctttcagttacaacttccacttctgaaagacttttttgtttaatctgtcttataacatgtctctgctgcgcctatgtgtatctgttgtatgcaagtcaagctatgttgaaggagtttagatggtatgatcttgttattgtgtgtgagttcgttgagaatattaaaggataaaaacgctttcttatgtgttcatacgatatttgtcataatccagctcagggttttgatcaataatgatttattttgtgtattgtgcctttgaattgctcagtcttcaac

SEQ ID NO: 47350 - DNA, 320 bp, Manihot esculenta
  Intron number 1 from transcript cassava4.1_003597m (locus cassava4.1_003597m.g) derived from phytozome v7.0 (chr-ID scaffold06792; pos 177810 to 178129 reverse strand)
cgtcacactgctaatcaaattcagaagcttgaagcgtaagcacccttttctttgtcactcacttctgtttggttcttttgcttggaaaactaataatattattgggttcttgttcttgtttaatggggaatgtgaagaatgttcaaggaatgtccacacccagatgagaagcagaggttacagttaagcagagagctgagtttggcacctcggcagatcaagttttggtttcagaacaggagaacccagatgaaggtgatgcctcttctccttctctttgttttcgtaaatcagttttctcaataccgtttcagtagatt

SEQ ID NO: 47351 - DNA, 474 bp, Manihot esculenta
  Intron number 1 from transcript cassava4.1_011802m (locus cassava4.1_011802m.g) derived from phytozome v7.0 (chr-ID scaffold04083; pos 243161 to 243634)
gccaggtaccatatatatgcagatggtttttgctttcttcatatctagtttgagttttcagatgatataaatttttgttttcagaaagtccatttcttttgctgatttctgcgatgggtttcctgtctttttggctttagcaatgttaaaatcttgtttaagctagaaagctaacttttgtttttgttgtgaaaacttttaccattacagtaaagtgatactcgaaaactggagggtaaattgtcggtcttattatgatcatatatgtaaatatttggtggtggtctcttgtatctacgatattgattgacttcactcacaagacaatatgattattagttccatcaatcacagttgttttcttgctgctccatcaaaattattagctaggaagcttaatccataaactcccacttacgaaacattaattatttgacaggagaggcacacttgttcaaggtggaaaaggtcctc

SEQ ID NO: 47352 - DNA, 778 bp, Manihot esculenta
  Intron number 1 from transcript cassava4.1_008793m (locus cassava4.1_008793m.g) derived from phytozome v7.0 (chr-ID scaffold05214; pos 99591 to 100368)
ttcttcaccaataggtatcctttgttttctttgcataaattttcagttgctgcaatattttgacaggtaatttagttttgtcaggattttgcatccattcagttgagttttaaggttgtcagaaatgggtgcaagcttgttttttttttttgggtaaaattctgagtctcttaaacaggatgtcgggatattgttctgtttacagatctatatttagctgattctttatttctatgaactgattttgtaagcaaatgtgtttcaatcaaatgggttccttttgaattaaactttcttggtctttttgacgcttattaattgcaaagtaggatggatccatatttggatttgaagcatatcattccaagtttgtgatttctacccttttttgaaattttaagttttgttggaaaatagcaagtcaattcaagtcttaacatgaattcacagccttctttcaatgctgccttcagttttatttaattcaatcactgccataatcttgattctatatatatatattgcagatgtgcttctgaattagtcattttatagcatcagttggcaggaaatggaaaaataaaagaagaaataactcctatattatctgtttagcattcaattcaatctgcagtttttggttcattttaattttattctcggaatgatttcacagaaaaagataaatagaaaattttctacctctaattttttcttttaatttaaattgttggctagttatgatgagatgctaatggggttgaaatggtgacaggat

SEQ ID NO: 47353 - DNA, 299 bp, Manihot esculenta
  Intron number 1 from transcript cassava4.1_034333m (locus cassava4.1_034333m.g) derived from phytozome v7.0 (chr-ID scaffold10493; pos 442269 to 442567 reverse strand)
acttccacctgaagagcagttccagctacctcaaggtgtgttgctagtttattcatctttcacttttgacattgttgttctcaaatttttcctcttgatatcctaccctagtacccttcttgttaatatttgattagaaaattgaaggagtcgtctagaatcttggcattctgtattataatctgttcctcataatatttgattaggatacagttgaaaaacacatttgcttagttctaatcatgctatattgaaaattatgtactttttcttctgataactgtcacatagacattctt

SEQ ID NO: 47354 - DNA, 401 bp, Manihot esculenta
  Intron number 2 from transcript cassava4.1_006864m (locus cassava4.1_006864m.g) derived from phytozome v7.0 (chr-ID scaffold08265; pos 2801642 to 2802042)
ccattttctccaccacataccgcagagcaatccaagtaatcttttttccttcttctttatgcccattttttgttgtttgtttgcgaagaaaaatcatgggaaaaagaatcaacgtaattattgtgtaatagaaaatgacatcctttgttttctgttcttttttttgttttggaagtctcaagaaaattaatttaataacatagatatggggaaacattccattgtaaagtggtaatattcttttatgatctttctgttttcttggattttcctcagcaacccaacaagatttattctttttatcttcaagtcaaaacagcattgattatcatcattaatatttatttattttttcaaaaattgcaggctaggactaaggtggcagaggctttaagcttgat

SEQ ID NO: 47355 - DNA, 945 bp, Manihot esculenta
  Intron number 1 from transcript cassava4.1_008870m (locus cassava4.1_008870m.g) derived from phytozome v7.0 (chr-ID scaffold03802; pos 339599 to 340543 reverse strand)
aaggtaaattttgaaatcctgctaaatctctcaattatttacatttcttccatcttgtttccgaggttttttccctccttcacttggggtttcttttgggtttctgctcggcttgcttttggaagtaaaatagcagcaaaaaattctttcatcttgtgaatcaatgctacgttgtacttttgctgttgttcaattaccttattttcccatctaaattacagagtttggttccagggaaagattagcgtaaggataggacataactgggtgtatatatatatatattttttttctggatgaggctatgaagagcacaagcatgagaatgagcttcaccattccatttgcatgtagattcgtacattcattacataaactttgattataatggttattaaactcgtttttacattaggtcgagcttatattagcgttagactcaccccccaccaccccccccccccctttttttgttgtctcctggatggtgttcttgtataagttgtcaagaatttggctgattgcttgcataagggtcttcagttgagataatagaaatcgaattgggatagtgaagtttgtagggccggataattgtctcattctgaattcacttaagggcatgtttcattgattttcaagtgagttgtagagcataattaactaatgaaaatagaagtgaagagaggattatttctgaagaatttgaatctttaaggatttatttacttgggagctatagaggcaagaaatccactcacatggtttgccttttcaatagtgagagtgcttcttggaatgtgttgacttattcttctaaaacagattcctacacttttgttttgtacttcaaggtgaccttttccctataatgtagaatagagggtaaaatgtttgcttcaattctcagacgctgtgcctgaaaaggaaactccaaaagaaaag

SEQ ID NO: 47356 - DNA, 986 bp, Manihot esculenta
  Intron number 1 from transcript cassava4.1_001867m (locus cassava4.1_001867m.g) derived from phytozome v7.0 (chr-ID scaffold10114; pos 126434 to 127419)
tgtgtttccttctctgttctccttttttacgtttggttagttcattttctctttctttaagttcttttcttctcttattctgtttctcagtgttcatggtgttgtgatctgctttagttgcctgtgtgcaaggctttctagctgtttcccttgatcatgctgccttattgttgttcgttatagattaaccttctctggcagctatagagaatattatgcagatcacgttactgtcaaagctaaattactgttaagatttgattagcatgtccatttgatctttgttataaaagtttgtatcttgacgaagaacaacttataatgtcggcgtctgttgttttttttccaacttaaaatggtggagaagttcagttccaatttccttttttcttgtcaaaacttcatatccattttcagagtcaaagaaatgaacttttccacgaggaattttctggctaccttcttttgatgattcttgcacatgtgtttcttggagaatttttttttctctgctctgctttattcttattgccggaaagtctttcctttatctttaataaacccagttttaagtaggaaaccaagtttgaggtttcgcttccgttcaccacagctgacagttcttttaaactaatcgtctcaggttctgattctgttgggaacagttgttaatttgtttagttatgtgggcagtgaccaatagatcttcaacatgcagtttcttgctgcattatttaagacagtattcttagttcaacaaacaactcttaatcaaatattaatttaaagtggttggcgaggtgttaggtttggaatttttttttccctcttctagaaacaatgtgattttgttgggttttgactatttggtgattatccaaatgcttatatagttacgttattagatttcttttaattacatctgctgcttacatttgcttcaaacttcacctgaaggtagttgtaagattttctgacaaggagct

SEQ ID NO: 47357 - DNA, 520 bp, Manihot esculenta
  Intron number 1 from transcript cassava4.1_020348m (locus cassava4.1_020348m.g) derived from phytozome v7.0 (chr-ID scaffold06598; pos 743879 to 744398)
tttggtcacaaggttggtccaagagcagtagttttggaggaattatttgttgttgtataggagggaaaaaagaacatatctttgtgtatgaatggatctcttctatcttgtattatatcttcttttataattgagctgctcaactgtgataacacatacttcatatgttttgctgatttaaattcagtttgttttggccttacatatggttttgagtactttttactggatcattgctttaaaaagacgtagacagtatttacaaaccaaaagacttctagcaagtccaaattgttaccaaaataaatgaattcagcattgtatatgatgttcactccacttgtaggctggtagctattcaagcatattgtcactgatcatcacccttaatgcttttactcgttttatatgcggaaccatattctattgaaacaaatggacgactcttttttggtaccttgttaatgtgaccctgttgcttgcagattataactaacgggaagtacaagagtgctcaaca

SEQ ID NO: 47358 - DNA, 560 bp, Manihot esculenta
  Intron number 1 from transcript cassava4.1_007572m (locus cassava4.1_007576m.g) derived from phytozome v7.0 (chr-ID scaffold06089; pos 232538 to 233097 reverse strand)
cacatcaacgcttttgcgttctctgaatccctcaggtattggagttcttttcgaactttcttctgattttgccctaacttgcaacattcacgcgatataagttgagacattcatagtctcttgtattctttttcttttaattgaaacactctcattatatacctgtgcataatctgggcgtttgttgttgtttaaattattttaggcttgttttatgtattgggtattgattcggtttggctagctaagtaaattctttatgtttcgctagctaagtaaattcttcatgtttggctagctaagtaaattctttatgttttatgtttgttctttaaattatcggagagatgttgtactcattggagacaatgtaatttttgatgttttgaatatttttcattgggttctattgcttccatattttattgttaataacattattattattatttgcttgagctggttaatgttttaaaacagtctgtattactatgaaaaatgtggtgttgcagtagtttgagggactgcataatttgtcctgtagattggggtagtgagga

SEQ ID NO: 47359 - DNA, 929 bp, Manihot esculenta
  Intron number 4 from transcript cassava4.1_005677m (locus cassava4.1_005677m.g) derived from phytozome v7.0 (chr-ID scaffold12753; pos 69252 to 70180 reverse strand)
gggacattgcagtggatcattatcacaaatatctggtgctcatttcacttgttaaccattttttataagctgaagctgctttaattttccttccatttttcccagtttatgaatttgcatacaaccaatctgaaaatagatatctataaaactgtaactccattgaattgtttgccaattgcagcacatagcatttcatggatgcatgatgcataatgtgatcactgtatgaataaagtatgcaatcacttggaacctttggtgacatatcaaatcatctgcagcataaagtagacagcttattgtgaacgcaacccatattcctaagccataattctaattagaaaattatgagccccacttgtatattttagtatcatagttctcttctccaaattaatactttatttatttatttatttttattgtttctgatagagtacagttccttttctgcttttgattgttactgacagaaaatggagggatccataaaactgaaccgattatgtccgagtcaccaaatcgagaagagaattatatgtttgcaattttgttctaacagacacacagtcctcagctgccactataaacctcataaaatattaattttttgggtcaaatcacaatttgatccagaaaacccatatccaaattcaggccacaagtaaaaaaaaaaagttatttttgatgaatgttatgcaaatgggtatatttaggaagagacaccattacggcatatggaatcaagtgtgctagttttcaagaaaaggggatgtgataatgttctgagaaatgtagatgatatttgaaaggcactgtttgataatctgtttctgaaatggagaagtatgaactcattgcactataaaggaaactgaccaattttgatctgcaatgaaatgagaaaacaggaagatattgatctc

SEQ ID NO: 47360 - DNA, 748 bp, Manihot esculenta
  Intron number 2 from transcript cassava4.1_018821m (locus cassava4.1_018821m.g) derived from phytozome v7.0 (chr-ID scaffold05378; pos 42783 to 43530)
atcaaggtattttctgtttcttgtctgggtctgtattgaggttcatgcacagaaagtaatcaaattttatgtgaatgtgaaataagaaatgtatttgttctagatatttagcatattgtctaggctttttccaagaagtattgattgttcatagttcttggattggtggtgagtctggtgaccatcccattccctttttatctattaacagatgaatataaatttgtttcaaagggctcttgcagttttagctacattatggcaatgaaattggcattggctcatgcttttttagcgagctcatatttccccccagaatcagattgattcaccttcatggacataataaaactaaagcagctgacttcctagcatttttactcgtacatggtttttacacctgacattgtaatcatttcttgtactgagaaattttctttcctgatttcaaatgggcaaaaaatgctggctgttgagttttggtaaaaaaaaaaatgtaataggaagaaattcttatatgctctgtattctcagaacttgtggcgatagattgattggagtaaggcattaaaagtactaatttttgaaacttgacttttgaaagagaaattttaaaattttaaaacatatgcagctgtgtaagcatgaatagtttattatttgcatcttgaaaagtggattatcctgcatagctacagctgtttttagattgtataatattttattgctctcttttttagtggacttg

SEQ ID NO: 47361 - DNA, 1046 bp, Manihot esculenta
  Intron number 2 from transcript cassava4.1_003403m (locus cassava4.1_003403m.g) derived from phytozome v7.0 (chr-ID scaffold09150; pos 524550 to 525595 reverse strand)
gagcttttgtgtgctttgattttgctgcaaggtacccacctccaacttcatattaattctatattatttatttcttcttctgttttttacaacatctaatatttaatttaaaaaaatttataatttaatatctaaatattatcattattaaatcattttttatatttttaaaaatctattaaaatattttttttcatcaacaaaataatttttatattatatttttttaaaaaaataaataaagaatgaaaagagaaaatttttaaaatttaattttatgtttaattaaaattatttatttagtttttaaatattactattattaataaaataatttttatatttttaaaaatttattataactttattaattttttctcatatttattaaaatatttttattatttttatatttattaaaatatttttatttttttttctttttatccttatcctctttaaacaaaaaaaaagaaagaaaaagaaaaaatgatgatgagaaaggagaagtaaaagaaaaaaaagaaaaaagaagagaaaatgagaagaataagacgatgaagaaaagaagaagaagaatttcctctgcttcttctctttttcttctttaaaaaataaagaattaaaaaaaaattaaaaaataattaaagaaaaaggagataaaaagaaaagaaggagaaaggaagaaaaaacaaaagaagagaaggaagagaagaaaaggaatttaatttttattatatttttaataacacaaataagtgaaatgattattttatttacagataaaaaatataaaaatattttaataaatttttaaaaatatatgaatcgagtaaaaataatatttaaaaattaaaattataaatctcactttaacttaataattattaatttagttttcatataaaatataatttcatatgattattattttattagggcggttctttttttttttttcctttctgtctaacttggcggttgtattgaacattttgttcttttgtgattgttatgcatgaagtggaccctacgtgaaaattgag

SEQ ID NO: 47362 - DNA, 622 bp, Manihot esculenta
  Intron number 1 from transcript cassava4.1_027483m (locus cassava4.1_027483m.g) derived from phytozome v7.0 (chr-ID scaffold01782; pos 73669 to 74290)
agtctcttcggcctcggcagcaggttctctctctcccaatcttccattttctttctttgcatgaatcaacctttgatttaattccgatttcccgtttccaaatttcatgcgcagcaatcggagaaatcttttttttatttttcgtttccgtaaatgctttgaaaccgagaataacatttgcatgtcgagaaacaggattcattttcaatgcacatgattatagtgacgataaacgactggtcgtttattcaggatggttgttttctcctttttcttttaggttcttttgaatgtgggtcccacattttatggatagaatatttatttggggatatagacgctggtaaggcattatccatagttaataaaatggcaaatgatgtcatcattgatcacctaatgccaccatctgtgttgataatgcttgtgtcgagattggcagacaatttaacaattagcctttttcctttttaatcctgaaattttgtgatttgaattctgaaattggaggttcttgttattttaaatgtgggaattatttaattccttgtttctaattggaaattcttggtgttggcttttaactaatgaagaaaccagaagacatttcggcctaagaaga

SEQ ID NO: 47363 - DNA, 810 bp, Manihot esculenta
  Intron number 1 from transcript cassava4.1_006687m (locus cassava4.1_006687m.g) derived from phytozome v7.0 (chr-ID scaffold02943; pos 918947 to 919756)
gagttcactgcattcaaggtttcatcttttttttttctttctttgattaattttatattaaatgtactggatcggtgtatgttctgcatctgctttgaatctaatcccttacctttctcaaagttgatttccttctatttgactgttaaatttaacaggaagtttttgttctggatctataaattgattggttgtatcttgaaatttgacttcttttaattcatagttttattagccaatttgcttctctttcgtttttctacatgttcaatttacctggttttgcatcttagatcgtgtggattggggacgaattgatatcttacaaaatgaaaattgataaagtacattaaattgggaaaacatggcatttttacatcaaagatcagctgctatggagccagtttgatttgttggatgcgcaatcagagcttaatatttcaaaattattattaatctgcttctcattatatacatctctaatgggaagcaagtaattagcaacgagagtttaattgggaagaaagctaccgttgttcagctgttgcttattaacatctgtgtttctagaagcgttagaccaagaattataggactccatgctttcaagtttcagcatctggtattatcttttcattcgacaatacctaaagacattttcctcaattgtcaaatttgcttcgagtatttgttgagtgtaaagtttgtctgctatgtgcagctttgtgtattttttttaatgcgttgagtgtatttcaattctctaagcaatggtaactaatgatgtaggggatctcacccgcaaaaaag

SEQ ID NO: 47364 - DNA, 777 bp, Manihot esculenta
  Intron number 1 from transcript cassava4.1_010132m (locus cassava4.1_007062m.g) derived from phytozome v7.0 (chr-ID scaffold08542; pos 426100 to 426876 reverse strand)
gtcaacttcacttaccaggtgggtgctctgttttgctactttgtttgtttggtgtcaattattgtagacttgagtgatagtagctgttgctggaaaaagttggcttgccctattatggaatttggtgtttgactttggctctacttttatttgttcttggtgaaattttctgaatgggttgctcttgctgttttatactttttaggctgcttagggctataccctttaatgcatgatcttatgataagtggtataaaagaagaaagggatatgtagcagccgtgcaatctaaactgtgccttggatattgaaaggcgaaaaggccaaatttgccctgaactatacaaaaacattgcacaacgcaaacttttaaatcctcacaatcttatttgcactaaaagatgaattttctaatttttgccccttgctgtatagtcgttcgaggtcaaacttgatctttttgtcgatatttatgtgccaagtgacaatctatttttaaatgccaagtctacttatggaagcatttttgtggtgatagttgaatttatttttattcacaaagaagtgctgcaggatcattagacttgtctacttctgaatgtttgacaacaaagccaattgatttaagattgtttttggcttcagtactagattaggcaataaatgttgtttattttgttttttagataagctcttttattatttcccaatgagtgatcttgttctatattttgctggttgtcttctagggtgagagaaaggaaaggacaatccata

SEQ ID NO: 47365 - DNA, 1025 bp, Manihot esculenta
  Intron number 1 from transcript cassava4.1_022038m (locus cassava4.1_022038m.g) derived from phytozome v7.0 (chr-ID scaffold08265; pos 2507547 to 2508571 reverse strand)
gtgttagaggtttattcgaggttaaatccaggtgagttttccttttctagagtgtaacaaaaaaaaaattattcattttgaataaagataaataataagtagattatatatatatggttttaattttttagaaatttttagcacgctattgtttaccatatttgttcagttgggttgttatttcctgcttggagatgaaaaattataatttgatttgtcaatttcaaagactggagaagatggacttgtaatcgttagattttcaattaattgtagggtggtgtaatgtttgaagataactattatagtgctttcttagggtgacgattgaaaatgagtgttagtgttgattttggattttttctcataaaccattgcattatagttacacttaccattatctgttatggtttgctccatttttaataggatgtttttgggcatctcatcggattctactgcattctacttgtatttcatggtatcttcggtgcagtgtgtgtgcgcgttggaatctttttaagaattagttgaaggaaaacaaaaattgagttgagccctgaactttgaaggtttttgcttttgagccctcaaactgaaatcacttttttatgaacctgcagagtttttttccctatttcattcttgtagatatttatttacaccatttaaataagaacttaataagatggaatcgaaaagattaaagggcttaaatagggaaaaaaaaagttatggtctaaggacttagtagcaaaagttaatgaagtgcctaaggacttggtaggaaaagttgatgaagttaagggctaaattatgtgtgatttagtagaaaggacaaagaagttgattgttgcaaactgcaggctttttggtaatttgtgtgatggcatgaatcatggcattacttttaatccaaacattagatcatcacttgaagaaatttactgaattatagaccagaaacaatttctttaaggaccaatttaattaatcaattctcttgtgtttcagtacatcttcag

SEQ ID NO: 47366 - DNA, 525 bp, Manihot esculenta
  Intron number 1 from transcript cassava4.1_009670m (locus cassava4.1_009670m.g) derived from phytozome v7.0 (chr-ID scaffold10586; pos 76897 to 77421 reverse strand)
tcaggcctcagttcttcttgcactgggtcaaacaggtttgtaatttgtaacttttcataatcattggtttttctagttagatatttattattatcattcatagacatttgggttttggatattgatgtataattttaatctattggtttccatttagcaacagagatgatactcaattgaaaatctcatcttgtaagtcccaacataacatttgtcataacaagagtttttttttttttaattttttttaatttttaattttgataccctttaatcattggatttgaattcctaactcaagttcttaacttactgactccaagcttgattgtcactctctttagtttctatagcagatgaattttgtgacccttggcatagataacttataatatgtactggattttggaaaggagaaagaaaatgaacatatcttttttcatctcaatgtccactggttgcaaatatttcttttcatttgggtctggctatgttgattgaagtacttgctatagacaggacctt

SEQ ID NO: 47367 - DNA, 369 bp, Manihot esculenta
  Intron number 5 from transcript cassava4.1_014573m (locus cassava4.1_011955m.g) derived from phytozome v7.0 (chr-ID scaffold07238; pos 38300 to 38668 reverse strand)
agtcagcaaggtgcgcatcaaatcttattagctgtcagcatcaatttttacctccactcatatatatatatatgtgtgtcttgagttttttcccaatttgtatgcatttgtaattctggggcttgtagctttataaaaatttgtgcctgtagcttgataaagttttatcttaggtttaattaatctcgtttctgtgaaatgatttaaatcttatggtggtttctttttcttctagctgacattgctattgtaggctggtttgtttgaatttgtgttcttttttcttctgcaatttaaattcagtgggctatgagtatatcctttccatgttcttcattttaattatcttactctttggtttgtgtagac

SEQ ID NO: 47368 - DNA, 326 bp, Manihot esculenta
  Intron number 1 from transcript cassava4.1_009767m (locus cassava4.1_009767m.g) derived from phytozome v7.0 (chr-ID scaffold12753; pos 46261 to 46586 reverse strand)
gttctgtcagagactctacgcttctgtatgctcatttttttcaatatttcttttaattttcctctcattttttggagtaaattaatttgtcaatgtgggtaatcagtgaaaatcttctgccttgtgttagggatccaaagcatatatttttctttttctgtagtttattgttcaatttcatttataagaggggaaggaaattgttgggaagtttcaaatcttaagatgctactcttcatttcgttgcttttagttattcgagtttgattttcgattcctttttatttacagggagcttgctcgagtcttgggtgacgaaggtataa

SEQ ID NO: 47369 - DNA, 953 bp, Manihot esculenta
  Intron number 1 from transcript cassava4.1_010054m (locus cassava4.1_010054m.g) derived from phytozome v7.0 (chr-ID scaffold00164; pos 44438 to 45390)
cctgtaagtatcttttattgaatgatataaaattttccccatctttcttcttgtggtattttatccaagtctggaagatcacaacaaactagcagtcttggtacgaaggcatacatattacgttatgttaaagcattttcttttgtatatatcacataaagctgtaattttgaaagattcttttcttttcagttggccaagagaaaataaattggttactttgtgagcttgtgttttaaaatattaaataagatcaaacagtaagtgaaagacctgtcaacttatcacgaattatggttcagggcatagaaaccagagattactcatgtatcttttctattgatatttatcgctaagtggatgcttgcattatgccttttctttactattgttttttgtaaaaaaatattaatataatttatcttcacttgtattattgctttttgctggagtcagttctaaatacttaggtctgacataacgttgaaccattgatgcacgctgacaacacatcccaccaactacatcatcgcatttgatgagaatgaacatgcacatactcagctggagctatatataaaatttctgaaggttatttctttggaaattagtaattggtagatctataaaacattatttgtatataggattagtttaaaggtgataactgtatgaggttatctgatatcttgattatttaaataaatcttgtctttgtcatggatgcacatgtatttttctgcatcttcatcttctgttttttttatatttttattttattttttattttcacatttctgttttatggaggggattggacctggttcagggatttgaatctcctgtttcctgtctcattttcttttccagacacagttcaagtttgtctttgatacgttgtcctgaactgaacaaaattttgtgcattaacagggacagcagtggtgattgtc

SEQ ID NO: 47370 - DNA, 637 bp, Manihot esculenta
  Intron number 1 from transcript cassava4.1_022907m (locus cassava4.1_022907m.g) derived from phytozome v7.0 (chr-ID scaffold05979; pos 118993 to 119629 reverse strand)
aaaccacctatctgcatcagcatcgttgcacactggtaatatggtttacttgagatttgtgtttatatatattacttgtttggttgcacaaaagggaagaatataaaagaagaacgaaaatctagaactttgcttcagtctgtttgagtaaccccatttgcatttatttctgtttggcagcatctttggggatactgagtaaaggtgtttaccaggaaaatataatagcttatctagttgctgaataggagaaattgtggacttgatttcttattaaatttaactaatgcatatattcctccatattcgaaggtgaaacaggttttctgttcatttctcttagggttttcagttgaagtaatctctctgtgaagatgctttccaactccatgtacaaaacaatcaactaatgtaaataattgcaacaaatttattgatgatgaggaatgaggagttttttttttttccaaagataactgcattatttgttattcctttttgttttcagcccaaaaaccaaagatattcccatattttttcccatttccatttcaatttagtgcacattcttagcaataggataaagtagtgcgtgatctaggtttaatttgtcaatcttaccatgttctgtttttag

SEQ ID NO: 47371 - DNA, 415 bp, Manihot esculenta
  Intron number 1 from transcript cassava4.1_024131m (locus cassava4.1_024131m.g) derived from phytozome v7.0 (chr-ID scaffold02895; pos 381351 to 381765)
ctgttacccctgacaaggtacttctctctctctctctctctctctcttttctctctgttttggtggggggatgtgaattgcgttctttagggttcctttttgctttggaggaaatgtaaggggagggaaaagaagattttgaagtttagaaatttaggtgctcttcattgtttaattggcggaggaattgctaatttatgctcaaaatgagcttaataaagcttcatttttaggctataggataatgaaacaagaaggaacttggacatattcttgggtttcattcttttgtgccttaatattattgagaagtgaaaggagaatcaactttagcttatctgtagtttgaaattttaatcataaagtataaatggttattcttacaggttcaagcagtgttattactactgggtgg

SEQ ID NO: 47372 - DNA, 721 bp, Manihot esculenta
  Intron number 2 from transcript cassava4.1_013437m (locus cassava4.1_013437m.g) derived from phytozome v7.0 (chr-ID scaffold06611; pos 97194 to 97914)
tcagataatttctctgttagttccattacttaacctttttctctttctttgtatggtttcatttgcttatcaattttggtcagtttcattatgctaatgcaaaaactaaagaagtccaatcaattaaaatcttatccaaataatgtctaatggtaatactaagatctcctgtattttttatatgggagaattactgtcaggtccctaggtttttagaaaattaactagttaacctatttcaaaatcactcaattaaaatgtcttcatattttgtaaaatcatactctttagtccttttgtcaaaaaaatacatgagtcaacttattttatcattggtcagaaggactaaatagtaagaatatttaaaattatagggtactaaataatagctatagataaagatataggactaaacagtataaataattcaaagcaactgacagtttttttaatggaaagactaaagagttggattatacaaaatatatgagcgttttaattgtgtgattttgaaataggaactagttagtttcataaaaactcagggatttgatagtaattaacccttttcttattgcatacttcagaatatgctcacctgttgaaataaaatgcttgatcattgttggtgagtacacattgaacttgtataattctcacattcttctcattttcctgcttttcaggttcgtcaaataactataacaatcaggtagccata

SEQ ID NO: 47373 - DNA, 966 bp, Manihot esculenta
  Intron number 2 from transcript cassava4.1_018954m (locus cassava4.1_017801m.g) derived from phytozome v7.0 (chr-ID scaffold06705; pos 371326 to 372291)
ggaccccctgataccttatagtgagcaccaattcctttatatatcttatgtgaaattttgaagtttcggttttaaatatcctgtgaatttttttctcttttttacctttgaattttgtttgagtttttagattatccgaatttgattatagggtttagcctcttttgtgcgcatgtatgtttagtattcttgttatttgtttgacgatggaattctaatgtggctgatttattttgttttcagggtttatgggtttttattagattgaacacagactgtttttggccttatcattgttaaaagtttcaatttcttgtttagataatataatttttgtgtctttgaagtttaaactgcaccgattattgattttgattatgattcaacacccttattgagaagctagtgttctaagtattagtattgatttttcacttagattatttgattatctgactttgattttgttttatgacggaattctaatgtggctgattgattttgttttcagggtttttgttttggggagtttttaccttattttttgttagacgtttcacatttctggttgaagtattcaaatttttatatctttgagtttgaactgcagtgattatagattttgattatgattatggtttaacactcttcttgagaagctagtacttaacatttttctggtgttgattgttcacttagattattttttccatgtaatggggccatctatgcatttatttgtttttgggcttcattgcttcggcatattttttgataatcttgacgcaaggcttatagtatggcacacacccgtttatacaaatatacacatctgagcttccagaaatgtagtttagtattttgctttacggacaactatattcagagctttcttgacaagaaaatctgttatttacttgaaatctcttctctggttgcagtgaaggtgggttctttagtgccatc

SEQ ID NO: 47374 - DNA, 1013 bp, Manihot esculenta
  Intron number 1 from transcript cassava4.1_009131m (locus cassava4.1_005735m.g) derived from phytozome v7.0 (chr-ID scaffold03241; pos 76563 to 77575)
cgtctgtccttccctctatcaatcgatcgtctagcgtgagtgatttgatcttaatagcatgattgctctctgattttttttaatcggttgatgaatctgaagttttgtaatatttaatctttctatatgatttttcctcgtttatgtttttttgggttttcactttgatgcgggtttgacttcctatttatgtttggttgcctagaatctgtgggaaaaggaaatggttttatttgcgtctctggttttcatttttatggacctggggaagccagtaatgttttcaattaagattcacgatatgctatgtgaattggatatgcgtcggatatggttcatctaggaaatttattctccgagtgtttgtttatcactccatataggaaaagaagggccgcaaaattacttttgtaggttaattggagaagggattgggttcaggacgattttattcggaagttcgccaaatgcaaattagaaatgcttgggcataaaataaatggaggataatttagacagtaatggtttctcatttaggaagaaattataactgttaaattcaagagttagtttattgtgtaattttcagttgtgaatactatttttttgtgtaagaaaactttttctcctctctgttctgtccgtcatgtgcatgttttgtatgccagtcaagcttaggtgaaggagtttagatagccatatttttttcgtgtgtacaaggtggtttagagcatgacacacaataaggttatttatgtcctcatgatattttccgtaatagtcttatttttttcgtgtatgagttggttgagagcaaaacaaataataaggcatttttatgtcttcggatgatattttccataatagtcttgtctttttcttgtgtataagttggttgagagcataacatatgaaaaggttttgttatggcttcataggatatttttcataacccagcttagggtttcgatcaattatgatttattgtcttcttgaattattcagttatcaac

SEQ ID NO: 47375 - DNA, 896 bp, Manihot esculenta
  Intron number 2 from transcript cassava4.1_009131m (locus cassava4.1_005735m.g) derived from phytozome v7.0 (chr-ID scaffold03241; pos 78182 to 79077)
caagtctggccattcaagcacctacaagaagagtttgttactgtttctcaattcattgtagtgtttgtggaattctgaactctctattacttatgaatttttgttcattaactcaaatgcatggcttttagctgaatgtagactttaccagaatggatgtgcattcatttttgcattttgttcatgcttgtatatgtagacaataatgttgtatatgtgtgaattcttgtagcattatgctatgtcagatgaagggtaaagtttgaaacagggagtgttttgggtaaccgttttggttttccttttgtatattctaattcactaataacatagttcctgtaagcttcatttatataaagtaaaaaaagaataataaaggtgagcaaattgaagatgttgatttcacagccaacaaagaaacaagaagcttgaaattgaagggcttataaccagccaccaatcttcagttagtcttccagaagagttatggtcctatgacattgtggagagaggatgcacttctttccacttggattaatcaccagttttcttctcttgactaaatagctctagctttgggcagttatatacctttctgtatactagcagataatggtgatgttaaatctctacttctaagtagtttgttagatgttcattgtgcattagatctttacctgaggttgtttttacataagctttttcagtgtgtattcacacaaaagattggttaagatgctattgtattggtagtgatgggacatactgcatcataaattatttatttgcataggattctgaatgatatgtttgtgatttggtaagagaaatttcttataggagacttcatgtgacataatttcatgcctacacaggaaaatcagcagacatccatt

SEQ ID NO: 47376 - DNA, 970 bp, Manihot esculenta
  Intron number 1 from transcript cassava4.1_032089m (locus cassava4.1_032089m.g) derived from phytozome v7.0 (chr-ID scaffold02644; pos 47627 to 48596)
aaagaaggtgacaccttctatttaatcactcagaggtaaccaagcctctctccctccttttctttgtcttctttttcttggtagtttcagtattatagtccaggaatcgaatgtaataaatttatattatttccttcaatttaaagaataattgctagaataatttggtagcatttttgctaatcacgcccaatagctacagactgcatttaaataaaaatcgttaaattttcattttggaatgccattttaacgtctttctgctgttggaagtgtattatttttgtctgatgcttaaggtgcttcatatcactttgactgcactacttagtgagttgagagggttctctctaattcaagttcaaagttggtatatgcatgaaaattttgcaattaggaatgatgaaagtaaccatgaacaattctggaagtgtttgtcagctgttttccattttgcctacaaaactagtaaatcagaggttgttacttatttcattcctctttgttatataaatggtgtacttaagtatttggttttgctgctgcaaactgctttttgttgtactccagattgtgaaatctctcctttattgttcccatcatatccaatgtttgcccaattgtctttgggtcctaagtagactctgtgttccttgttataaactattggaggtgcttgattctatcgtccattgaacctgtagctctttattttgttctctttatacaagcagggctgcattaggaatgcatactaggaaagttcaagtttattcttgaagacgtgaaaaaatgatgagtctactcgtctgtaatttttcaattacttgatggttagaatttttgacaaagtggtttgttaaagattttgtgatatatcctttacatttttcttttgccattctgaaatactgttctcaaatgtttttcttatggtttcttgacaggtggtggcagcattggattgaat

SEQ ID NO: 47377 - DNA, 573 bp, Manihot esculenta
  Intron number 1 from transcript cassava4.1_002989m (locus cassava4.1_002935m.g) derived from phytozome v7.0 (chr-ID scaffold07027; pos 431118 to 431690)
tggtgctacccagctcttcttcaaccacttatgttagtttatacatcttcttcttttgggttttttgtctgttattccagcttcctgcatgttagaatcggattctatttaattattatttgttgcatgggatttttttatgaaatgaatacactttcgcttgatccaggattgcttctttatgagatatattgtctaagggaataacaatttttaagggcttgtgtgtaattctttccacttggattgatcagtttctatttgtgatctttaaacagcagcttgaggcggtctggggttgaggttgggagctcagagaaagtgaataacagtttttagaaaagcattatttttaaatgttgtccaacagcaataataaataaagcagaattagttcagaaaatgggaatttgtttgattttgttttattgaaactgagttgttctgcaggggattcttgaaattcctattttatattttaggaagaaactacacaatcttgaacttcaatattgaatggcagtttactgtttttcagaccccttgtcactggttagggatcaccgggcaaag

SEQ ID NO: 47378 - DNA, 633 bp, Manihot esculenta
  Intron number 4 from transcript cassava4.1_016210m (locus cassava4.1_016239m.g) derived from phytozome v7.0 (chr-ID scaffold08265; pos 3556689 to 3557321 reverse strand)
ggtatggtatatatgcatgaggccatgcgcacatgcacgtgcttccaatcatgctacttgtgttaggtttaattccttcggagtctgcaggaactagacttgacatttgaaaacagtcatccttaacaaaatagcagaaaaggtttttgagtatcatataactgcttaatattgattgatgtgcatgttactcttatgttttgatgttcctgaacaagattgtagatatttccagcatgatgatgtaattagcctcagccttaatcattgatcccctttttttgtcccctattctcaatagttgatttttttcccttttcgttgtgagtgtttccatactttcttcccctccccctgcttttgtttgaatatttggatgataaatccaattgtttccatccttaactcttttcaaaagcttggattttctaccaaggttaatttccagaatatgactacatgcatctgtttgtgcttaatcattacatgaaactggtgcctttctttacaactgttattacaaggaacattttacattttattacttggtttagatatcagaattttttatacaactccttttgcatcttattgataataataatcactttgttctctgtgagctacagaacc

SEQ ID NO: 47379 - DNA, 897 bp, Manihot esculenta
  Intron number 1 from transcript cassava4.1_016210m (locus cassava4.1_016239m.g) derived from phytozome v7.0 (chr-ID scaffold08265; pos 3558224 to 3559120 reverse strand)
cactcggatcgtagttccctccattcttccgaaaggtaagcttctggatctccttttctcttcacctatttgcgagcttatttgatctcttctcttctctgttgctttgattcatcttttttttttttttgtgtgtgtgtgttaaatcttcgaatctgcgcttatctgatcccacttaaaacactcgaaaatccagatctcctatcgtttcacttacgtttttgctttaaaattatgattacagcttaaaaagctgtatttggtttgtttcaactttgccattacaaaacagagcacaaaccttatcattttcgttttttgaatctataatttttgcctggatctgatcattgcttttgcaaaaaaaaaaaaaaagacagatgttttttgttcatataggtttaatttctctaaggactcgtgtgatttatcagaaacggatctgctgcgaattgagtggaaaattcttctatatcaagtcatttcatcttctcgatagtactaactccactatgggctttgctttgacatatctaaagctttgtgtacaggttcatgcaattcatgcagatctgttgtggtttgtctgtgaatggctacctgattcttagtttattttgaaaatatgttggccttctcttgtgaaattaattggttaagaagtatttaatgttatagtttattgaattttgtcatctatgatgaccctgttccaaataatggattggttgcttgaatgcagatctttattctgaatatattaattgattttcattgaccatccaaaattgctaaattattgtcatacatttctctaacagctttcaatcctagcaattttcatgcactaacgcactgtgctgttgtttcttcagataaactagctaatagaaacct

SEQ ID NO: 47380 - DNA, 803 bp, Manihot esculenta
  Intron number 1 from transcript cassava4.1_026048m (locus cassava4.1_026048m.g) derived from phytozome v7.0 (chr-ID scaffold09000; pos 170713 to 171515 reverse strand)
ggttgttagtattttgacatctctctatctttctttctccattttcaatttaatctcttgcccatgtgttgaatctgctaatttttcaataaccatgctggcattatcagttctgttgcgtgtatatgtgttcctccatttttgttatttggaaggaggagttttacgttttcacctaatttgtttattagttaaaacattttggttgccgccctccatgtaattcttaggcttgtttggattttttttccctctctcaatattactaaggagagggaaaaagatgtgagaatttgaactttgacctattggactgtttagttattaattagaaatgcgtgggaatttttgagaaaatgattgtgatggagtgcagaattgcaaatgaacttgtttgaccgtaagatatggatttttgtttatcaaggtaatggaaaaagaattggttattacttggttgggaaggaaaatacccatataggaatggtgcaggcattttatcatatagtgaaagagcatggtaatttctagtttgtgttatgattcagttagatgcaaatgtagaatcaattgtatctttaatcaaaataacattactgtagaggaaaatgtgtccttgtactgcagaaaaagcttgaatttagattggaaatgcaagtggaagtgaatggataagtgttatatatatacatatttattcatttaggacagtataataatggcttttgtcattgaagatggtcgtttgagccttttttttttttcagtactgattgaaaatgtgcactgcttgttctgcagat

SEQ ID NO: 47381 - DNA, 505 bp, Manihot esculenta
  Intron number 1 from transcript cassava4.1_023342m (locus cassava4.1_023342m.g) derived from phytozome v7.0 (chr-ID scaffold11495; pos 657375 to 657879 reverse strand)
aggaaactggtaaatgaatttgctttgatgtgcatttgtttctgttgcaattggagtgcattgtcctgtactatttagtagaagtttacatgcagaccatattcaagggtgaccccaatgatctcttctgattcgatcggtgtttagagttgatagagtaattatctttactattgtggctgtcaattattcagtaatggggaactgatttcattatttgtcaagggcctttgtggaattatgtgaaatttgatgtctgttttgttgtgatgcttcttggctgtttttatattattttagatacctgcattatccttcttggtcacatgcgttaagcggttaaggtttttccaactccattcgattgttttggtttagctgctccatctgctctctctgccctgctttttctctcccctgtgattcactttcaactttttaacgttatgatgttgctgggacactaataaggattactatttttctccctgatcttttgaagttg

SEQ ID NO: 47382 - DNA, 752 bp, Manihot esculenta
  Intron number 2 from transcript cassava4.1_008275m (locus cassava4.1_008271m.g) derived from phytozome v7.0 (chr-ID scaffold02939; pos 23324 to 24075)
acaacgattttttctgcagtgcttgtggtataaaggttagtttttttttcttccctctcctctctctctctcatatatctttaggacttcatttttccccgtttgagacctcaaatgcttagttttgccatgtcaagatgaagctttacaatttgctcctgaaaatgcttaatgggctcgttaattccacgtttgatttaaaaaaaattaaggccaaaacttaagaacaagtccagacataggcgggcgacatggtaagcttcaaaaatctttttagggggtactttctcgaaccaagttggacccagaaaaacgttgtttattgtattttgttgtgagattctgcatttgaatacgattgtacaatatccgaagttagatgattgatcgaattagtttggtcttttttttttctaaagtgttgttttgcaaagtataggtagttgtttcttttcctttttgttaagattcctaatttgaataagggggcacttaataggaaggtaatttgaattaatagcaattttggatttaaagatcatgtttaataccgccaaaagatgtttctgataaagtctggtattttaggtgcttttggtccatgctgagtcttttcttttatacgaatcttcttttcttgttttgcttttccttatctgtcttctattctatctccttttttatcttggttattaagcatagatgcaaaaatttaaaacaaggtttggttgatttgcagttgtgcacctgtg

SEQ ID NO: 47383 - DNA, 476 bp, Manihot esculenta
  Intron number 3 from transcript cassava4.1_006253m (locus cassava4.1_006253m.g) derived from phytozome v7.0 (chr-ID scaffold04043; pos 987598 to 988073 reverse strand)
aagttagagtcaggtgtgcagctatcttagttgtgctaatcttgtttcttgattgatctagaaatatacatactgcagctttttgttaaacatttctttggaactttgaagttgccctgttctctgcagatcttctctgacaagcaaaattatgggtggtaggtgtagtggatgcatgtaatgcaattcttgtttgtgagtcattgatcacaccttaataacccaaaagaaatggaaagtgaaacaagtaagggacaaaaatgattgcctgactaagcatgttttggaagtaagcctagagtatccatgagttcaagaatgaaactttgtgtaaatttttgaaatcaaaatgggaaactttgggttttttgaaatcaataatgggaaatattgaggtccttttcttttgattcgagtcaaaggctcttatttcaaacataatgaagaaaaaattatgagaatcaacccctgcaggt

SEQ ID NO: 47384 - DNA, 545 bp, Manihot esculenta
  Intron number 1 from transcript cassava4.1_006253m (locus cassava4.1_006253m.g) derived from phytozome v7.0 (chr-ID scaffold04043; pos 988915 to 989459 reverse strand)
gggttgaattacttgacggtgaagctgtttttgaggtgagagtttcctaactcagcagccattgatcagcgcttctcttggcttatttctatttacctgcacttgttaattttttagtatttcattttgtttgtcgtcaaattgcggtctttgatttaatagttcttttcattttggcattggatgatcatttcgttgtagtttctttgtaaagctaattggcatactgctgtgtgttcggcgtttatctaatttatggttgctcgactagttagcatagttgcttctaatttcaatttctgtagttcaatcaccggttttgtgccaattccacctatttgcatttaactgtttaattcaagaatcttcatttgaaatttcttggttcacaaaggaacttttttttacagcatttaatttcttttaatttttccttggattattgtggtttgtcatttgaatccgctggtaaaatccttgctgttaggtatcctattcttaacttttccattcttgttcattttgaataacaaaggtatagaagc

SEQ ID NO: 47385 - DNA, 870 bp, Manihot esculenta
  Intron number 1 from transcript cassava4.1_025601m (locus cassava4.1_025601m.g) derived from phytozome v7.0 (chr-ID scaffold02895; pos 561195 to 562064)
acatcactggcaacgcttgccttctggtctacaaggtatttttttttttttgttttttctaggcatatacaaggtgaatattctaattattaacagtaatgcccggttaatgagggcggatgactatccctaagattattctacgcaatccttatataatataagatttgcgtgttaaatattattatgacctattataatacaatcgttctatacataataaagatttcttctttaaaaagtgaaatgagatttggttttcaactattaatcatctcaactttaatcgtgacctaataaataactgaagtttaaaaaaatattatttttaactaaatttataatttgaaaattgtatttaaaagtaattttttaaatttataattttaaatttgtgtttaaaattttctttaaagtttaagtgtttaaaataataattttttatagtataagtgtttaaaagttttttaaatatttattaggtcataattaaagtcgagatacatgataagtaaaaatattaaaatatagaagtggaaatatgcaatttgttaatagaattttatagagtttcgagtttgaattctatcaaaatgtaaatttaatttaattggatggtatatataaaaaaatgatgtcttgatgataaattaattaattaactaataaaaataacatgttttacaatatggcattataattgttggccataattttaatttatttaacaccgtgtattaaatttttatagaactgctgtactatttgcataattttatattttatttctaaatttcaacttttttttcaagtaatgtaaattcttttaaagggatgaatatatttgtttatatacttttcaggcaacag

SEQ ID NO: 47386 - DNA, 415 bp, Manihot esculenta
  Intron number 1 from transcript cassava4.1_010488m (locus cassava4.1_010451m.g) derived from phytozome v7.0 (chr-ID scaffold04043; pos 1048586 to 1049000)
tttagtaattccccgactcggattcctcaagataggtttgttttctacaaatctctgtactttttagccattattgttgaatgggtttttcatttttgggtttcttctttacgtttttgttaacccagtaggtaaccaactacgttggggttgccatctgttttctgcaggaaaaaatttctgaatttttaattttctgctcattctttcatgtttcattaccagtttattcccatctttttgctctgtttatatgtctcttatggggagatttgcatttctgtgtctgattttgttatttcagaatgttattggttttattcaaagtcctattaatggttgtttagtggataacatttaattacgttgtcttgtagcagttaagatttgcagttgctgcagtctctcttcgttt

SEQ ID NO: 47387 - DNA, 596 bp, Manihot esculenta
  Intron number 2 from transcript cassava4.1_002753m (locus cassava4.1_002753m.g) derived from phytozome v7.0 (chr-ID scaffold03241; pos 177298 to 177893 reverse strand)
acgctgagtcaaaggtatgcaggtctttagctggaaagtagaattacattagtgaaattgatttggattccgattggaaatgttggttttatacactgtaattacaagtattaagaatttcctccatttacgtgtagaaagtaatttccgtttggttgcaaggaaaggaagagaagtagagagaataaaagaatttcgtcctttgacttctgagtgaaggattaggtttatttagcttagttgttctatcaaagagagggtttattttattttctttgatttttttcctggtaatcgttaatcaaactgacgagggctgaacttttacttatcctttgatatgaaaaggtggaaattatcatattataaaatggatgtcttctatcattaatttgtttttctatctattttatttatattcgttatttttaccattagataaaccaatattcattcatttaatggtcgttatctccaagtaaaatttactttaaagaaaacaaaataaccatagaatttcccaaaaatgggtgtttgtcctttgctatcagataatcttctttttttaaatagtattgggatgatgcagggtaata

SEQ ID NO: 47388 - DNA, 755 bp, Manihot esculenta
  Intron number 2 from transcript cassava4.1_003213m (locus cassava4.1_003213m.g) derived from phytozome v7.0 (chr-ID scaffold06700; pos 35954 to 36708 reverse strand)
tggcatttgggatcaactttctattaaagaggcaggtgagcatttattactcggttttattactttccttttattatcattaattttttttgttggtatcaaatgcttcgattttatgaattcaaggatgtgctgctggtgtttagaattcagtatatagtggccttaataatttgctttcttccaggaatgaattggttgattttatgttatggttgaagatgtatctttgcatctgaagatctcaatgaaaattacagtttcatttgttctcgcgatgatatttaatgactatctacccccctttactgtttggcaatatcttataagttagtgtctgattgacgggataagatgggggattcttttgcattgaggctccgattctgctgctatgcaaatgatactataattgtggcaactcactataacagttcaccatcatgatactgtttgttccaggatatattatatggacaagcctcatttaagcttctctataagactttagtttcaaaatatgaaatgataaggcttttttttatataaaaaaaatactgctatctttatctttatttagtggcacactaaaccttttgtgcatgttgccaggtaggtttatcttcaagtcatctttatgggtctagtgactgttgataaccctgagatgctctggaccatttattctctatatggcttttcattttgcggggccgataacctgctctcattgctacatttgcaggggaacttgc

SEQ ID NO: 47389 - DNA, 500 bp, Manihot esculenta
  Intron number 1 from transcript cassava4.1_003213m (locus cassava4.1_003213m.g) derived from phytozome v7.0 (chr-ID scaffold06700; pos 36974 to 37473 reverse strand)
attatccaaatcaagagaaattcgagctctttcaggtttgtacgtaaatttttctcttttctagtgtttaatcgtgtttaggtttgcgtttgtttttaattattcttttaatttgggtcttaattccgctttatgcaattctggaatcaaaattcgttccttctcgttcgtttggtgactggatcgtttgcttagtttctgggagatggggattttttttatatgaaggagaaatgtttggtaatgggttttggggttcccaattttgtttcttttgttgttttttacataagctttctcggcaaccaggcaggagttttttatttaattatttttttatatattgatagggaccaataagcagtgtttaattttcatttcttctcatcattttcagataaaacactgttgcatttgaaagtgatactataataatgagataaaggaagctaattatagtgaatttatttctttatttttttttaattagggataaactc

SEQ ID NO: 47390 - DNA, 426 bp, Manihot esculenta
  Intron number 3 from transcript cassava4.1_028351m (locus cassava4.1_028351m.g) derived from phytozome v7.0 (chr-ID scaffold07330; pos 180080 to 180505)
cagtaggtttcaatatcttggtgtgtggtagagggagaaaatgagaaaatttggaaatggttcctaaaattactctttgaagatctcaatatagctgatagtctgggactaatagtagtgagtgactaatagaaggtacgtatttttattgtgtttagtgatttaattataattttattgttaaagttcaaatactaataatcttttttacacaaatttttagcaaaggcaattaaaaaattggtcccccattcagagcataaaaactatgcgaggcatatttatgccaattgataaaaaaaatacataaaggagaggagtttaagtccttattttggaagtcaatatattctacatgtgaggctatatttaagaaacatattcttaaattaaaggacttgaattcaaaggcttattgaagatttt

SEQ ID NO: 47391 - DNA, 916 bp, Manihot esculenta
  Intron number 1 from transcript cassava4.1_017910m (locus cassava4.1_017910m.g) derived from phytozome v7.0 (chr-ID scaffold08542; pos 182568 to 183483)
ctaagcgcgccgtcggcgttgaggttaacaagcaggtatatttagttttccgatttggcgtttttaggttccagaagttaattatggggttattctgtagttttctagcttgtttgaatttgcttaacatgcgagattgtgcttatcagctgggtgctggtgaactgatttattctgggtttcaagtgtcgttttatcggtgtttgtttgctagattatccatcttaggtcctctaattatgtagtggttcagatattttactttctcatttttttgagtgaatataataattgatgtggtgattatccaattatatttatcatattgctgatgatagtaccgttgattatgagatctgcttgaatgtatatgtgctttagctttttggatcttgtattgggttcacttcgatttcctacacttagtttggcattgcgcaactatttgtttattacagcttgagctaatactataagcggagtagagggctgttgaacccttggcttgattccctactctatcactgagattattattattacgggtgttctaattattctgctactaatgccactgagatttttatggtttgtttggtcctatactcttgctttcattttccttgctattatatctaatgccaatgtaactgatagtcgtctttgcaatgttatcctggagtcttctagacttgaaagcaatcgagttgaatgggttataatgtttgtgttgttataactgagtcctcacttaacctattttgttactcttatgtacttgtttaacctctcctctgttgttcgatgtctttttgttgccatctcttgagtaacaatgatggatatctgtgaattgtgatgatggttattgtttatatattataggtgggtaaccgaattatcagaaagaggatcc

SEQ ID NO: 47392 - DNA, 667 bp, Manihot esculenta
  Intron number 2 from transcript cassava4.1_034335m (locus cassava4.1_034335m.g) derived from phytozome v7.0 (chr-ID scaffold12793; pos 52747 to 53413 reverse strand)
tgcacactctgttcttgcgaaggatccaaattcaagtgagtttagtatttccatcacatcattcaatatttgaacaaattattttctcgataattttaagggtatgattcactaattatctgcagatttataattgagagatttaaatcaagggtcaataattattaaacttttgctttgtttttacttgattttttatttagtctactgcaccaataaacaaataaattggaagtgcagtcaaatttcatttatgtccagttcttctacttatatcgattatacctcttcccacccacttgcacttctcgagttcatttgcatctctcctgaatctgttcccctccctttctgtggattctatgagccatactatctgcactctcccaacctctaacttgcattacaattctggctgcattacttgttcaaccacatttcagatgtgctccaatcaacttttagatgtgaaatagcaaacccagctgaaagctcccaggtcgatcataaattaaatttggcacatatagaataagtaattggccataagttgatgaagaagtggatttatttagtgatcacctatttttcttcctcagtatgcttcagttataaatttaatagtttttcaattgcattgttgcagtggattcagtatcctctattg

SEQ ID NO: 47393 - DNA, 621 bp, Manihot esculenta
  Intron number 1 from transcript cassava4.1_014589m (locus cassava4.1_014589m.g) derived from phytozome v7.0 (chr-ID scaffold03237; pos 252935 to 253555 reverse strand)
ccgctgctgacttgaccgctcaggtgaagcaaaaaacttaagctccgtcttttactgggctcatttgagtatggttttggttataaatagatcgatggataggtgtttgattaaataaattcaatattcatatggtttttgttgttccatgaggaggatcatcagatattgttaacgttgagctataacttttccattgtgaagattaattatataagactgactgtaagaatgcaagaataccttttttaatatcccttttatgcttcttcgagcccttaattatggccttgtccaattcgtgttacttggttgttgtattttccttagtctgcagttgctgtcattgtgatattgataatatgtagggattgatacttattgatgtgataaattattagtcattttcattatttaaattcttgttgctagctcgctctatcaatttatgatattttgtgatctatgatacttcagtttattggtcatccgggccaccttttttacattacattgtatccccctctttttttcctttaataactcctagagcctttttctaacggctaatctattttagtcatataattcagtgatttatttattattgatatgttttag

SEQ ID NO: 47394 - DNA, 837 bp, Manihot esculenta
  Intron number 4 from transcript cassava4.1_017178m (locus cassava4.1_014479m.g) derived from phytozome v7.0 (chr-ID scaffold08265; pos 4447324 to 4448160)
agcctcaagataactcatttgaggtatttcttttgttttagtttcctttatttgcttgttgtccatctatagtcaaaatttgcagtcttcaataacatactggaaaaccttattagggataaattgcaacaagttcttgtgtgcaattaattgctcctttgttgctttgacttgttagtgcatttgcattcaaaggcatatatcttgttacacatgtgcacagaaaaagatatgttacagtcttcttgatgacctttttctcaccattattggaatttactcgagtcttgatgaatcttctgatttctctttaagcccatttcttgaaattttttaaaaagatgttaatccatctctttacttgttggttaattaggtatttgtgcactgtttgggcatttacctgagttggattcattatgtctactgattttattgctcattcattgatagtctcatgcatagccaggatctggccattattctggaacttccatgattggcattagtaagggttgagaccttcaactttggtgcattttgaggcatatcgtggatgagttttgtttcagtgataagtagtaattcctttaagatatttggcaaatataatttgttatctcattcctatgtaattcttttcttgtgattgcaattacctggaaaagaacaaattttataagacatcttatggtcattataatgtcagtgctgtctctcaatcattgaatggacttgatagattactgtgatatcgtagggcaacttgctcttttacttggagtaacacttgtattttcaggcaagggctcttatttccaagttgactgaggagaa

SEQ ID NO: 47395 - DNA, 435 bp, Manihot esculenta
  Intron number 1 from transcript cassava4.1_004530m (locus cassava4.1_004530m.g) derived from phytozome v7.0 (chr-ID scaffold08265; pos 710459 to 710893 reverse strand)
gccaaacgctcccgtatcatcgaattgtctagaaggtgaaaatttcttgattttcctcttttataatttctcttgcttgttcttctctgttttcaagtctacatttggcatttaatctgaatctcattcaatttatgcttacatttgctttttttctcgagctttttccttttttcttcttaaaattgttaagttttgacatttagttccctttttttttcttctgatgcttgtaacgagtaattcatttttcttctatgctttgtttgaataatgggttatcgttgatgattatgaaattgtttcttcttttttttttcaaaaaagaaaaacttgctttgtttcagagtttattgtctaactgaaatggcatgctgttctgttgattttggaagtataggttaaggcatagaggtcctgactggagtggcctgc

SEQ ID NO: 47396 - DNA, 377 bp, Manihot esculenta
  Intron number 3 from transcript cassava4.1_012984m (locus cassava4.1_012984m.g) derived from phytozome v7.0 (chr-ID scaffold09000; pos 379017 to 379393)
gcatcaagggaattgtcttcttttgcttttggcaggtaaatatctatcctgttctgttgcttgttcttctgcttcttcttttgagggtggggcgctttgtaagccaaagctatgtaagaaacttggaagggctccaaggcacaaaaaagagcctccaacagaacagcggtcgaaaagcaaatcatttgaccttgcacaaccaattcagtggatcggggcttaaattaccttttacttcagttgtttaatcaaagttccagaatttgaagaagtgataattttggaaactatgaaatgagtgccatattacttgttcagaaagccatatttgataatgtgcagggagtggtgcttgacatactagttgccttgggtgt

SEQ ID NO: 47397 - DNA, 769 bp, Manihot esculenta
  Intron number 2 from transcript cassava4.1_029922m (locus cassava4.1_029922m.g) derived from phytozome v7.0 (chr-ID scaffold11919; pos 206339 to 207107)
agcttggaaaggtactattcaggctttctctactctctttaatttattagattaaaacttcttctctgggtttcacttggacaggctactatttggtttgctttggaaatgagaattgaatgcatcttttggtttgtttggtgtgagaaattcaaatttattttatgatcttgatctctttcttggcatgattcagtttgcaagaacataatttaaaatgaaaattttaactcattttaaaatgaaaattttttaagttaaaaggaattaaattatttcattccaaacaagagaattgatataaaaaaaatcaattgaattgcacttttgtgaaattcctaattccaaatggagggaatatgaattttatccggttatttttcaaaataaagatggaacaagattcctgggatatagatattcatttatattcacattcagtttccaaggaaatagctataataggtcaaaaaatcaatatggtttatgtactagtctgaaatacaatctcatggttattgacaaggtgatcaatctgcaaggtttgaaggaattgaagtaactattaataatatttagcctaataattagcatttttgtcctgtccaatgtccatccacttggtgttaaatttactttattagagccattaggcacataatttaatttcaagttacaccgtactggagtgagtcctgtggaatagcaaatgggttcttcttgaattttaataagaatatatataattgcctgaatcaacaggtgagtg

SEQ ID NO: 47398 - DNA, 811 bp, Manihot esculenta
  Intron number 1 from transcript cassava4.1_006774m (locus cassava4.1_006774m.g) derived from phytozome v7.0 (chr-ID scaffold04065; pos 364332 to 365142 reverse strand)
agcactgctgttcttcttttctcagcttcaatcaggtacagaatcttctatcggatcttcctttcttttctttcctcgcaaagatccatcaggggtaaatgtaaaagctccaattttgtttgtgaatctgctattttttttaattcccttttaatctttaggattttgtttgatacaaatatggtttgtgttgtctaatctgatagatattttgggatcatgatgttcctttgttcgagtgaaatgaagtgaacaggtgtgtcggtgggcaatcaattgttaggatcctggacttttcacttttgtgatagaatattgtttattcttgtggtggaaaaacagtattggttggaggaatttgtttcactgcctgtttttctgtaatatataccatatgttaattgtgtgaaatgaatgtttttaattaattgatgaatatagattcaacttttgagaactttgattgaatgttctcaaatctgaatggaggacgtggagtgattgggaaatttgggaatgtgaaatatttgggagaggggaaagggtcagtttgatcagtatttgtcacttgaatttctctcttttaatcgaaaccatggatcaagatgtaataattcatttctttataatttttttggtgcaagatttttgacactattcccttaaataaatgtttgtcttcactcctcctctgttttcttcttgtgtctagcttttcttttgatgtactgaagttgttgcctattcttcttcttcttcttcttcagcattttctgggttcaatttggaattacggaccagggagttttaa

SEQ ID NO: 47399 - DNA, 734 bp, Manihot esculenta
  Intron number 1 from transcript cassava4.1_004858m (locus cassava4.1_004858m.g) derived from phytozome v7.0 (chr-ID scaffold08265; pos 1156346 to 1157079)
cttgcggtgagtttctctttcgaatttcattagctcctctctttttattgccttcattattgttttctattttttttttttttgtttctgggggaagatttttatgatgtttagaatttactagatgagataaggcagtctttttcttttgtttttttttttttaatggtggagtgcttgagatttcagaattgaatgttgaattatccttgtatgtcttgcttatgttactttatttggggctgatggaaatcctctaagatagccattgcataaacggtagcgcccactattcattttgcttctttttgtgtatgtggagtggttcaaggttcaaattacttctgttctgcatgtgcatgttcgggtgaatgtaatttgaaagaaagcaaatgaaaatttaacagaattttcatttattacattgcattttactatgtttaccaaatacactattatcatattttcaatgtaggtgctgatgggtgtgttgccatttttgttgatcaccactgtgatggcacagaataggctaactatatattatgtttcagttttttccttttcttccccttttgttatgaccaattccctttacccattgaaatttcaaaacggcatttatatgctatcactattgctcaaattctgcaattgtttcagttttcccctcattcattatgtactgactgttgctttctcttttccgtagaggatacactgggctgcattgt

SEQ ID NO: 47400 - DNA, 617 bp, Manihot esculenta
  Intron number 2 from transcript cassava4.1_010873m (locus cassava4.1_010873m.g) derived from phytozome v7.0 (chr-ID scaffold11495; pos 191171 to 191787)
tggagactccctgtgcctgcagtgggagcctcaaggtatatattcatttaccaattttcttaatttttagttttaatattaggatttgtttctttggtcaatgcatgtcttatgcacatattaatcttgagttctaaatttatttttttttgtgcctattttttcaaaatttctgttttttgcaatttaaaattttatatttgctgtaattttgtgctatttggacaatatttcgaaccagagtattctaaatgatttctaatttttattcatatatacgatctagtttgttatttacagtcttcaggatggatggaatttgtctacctacctgcttaattctctgaattttacatggaatggtccactacctgcaatttttggtttattatgagaacgctgagaaaatttaatctcatatgagcttcagttctttacctattggttcctattatctatatggtccatccttaagtgatgtgtcagtagctcaaaacttcattctaatccagccatggcttccatacgagcttgagttttccatagacttggccatgttatttttacttgttagacattttaccctttattaaaggctgcgatttcttttatccagt

SEQ ID NO: 47401 - DNA, 905 bp, Manihot esculenta
  Intron number 6 from transcript cassava4.1_013673m (locus cassava4.1_013624m.g) derived from phytozome v7.0 (chr-ID scaffold08265; pos 2063219 to 2064123 reverse strand)
ccagttcacaagtataaggtcactgctcttcaaaggtaattttttaggtttcatttgatagtgtgtagttccatactgttgttttctatgctggtgttaaatgaagcacttaatccaccttgcttcctatctggaactgtcctttttgtgatggttccttgtgcatgttttcctttgttcaactaactattggcaaatctctttgtaaatctcacaggaattcttcattttcaaagtaaattgtcaacaaaccttaattctctggtatttggggtttttattttgttttacaatcctacattcatcgttgctgcggctaaattcaattatcctacattcatcgttactatcgtcagacatatccgataaagaaaaaacaaatggaaattttctttccttgttatttgatatttttctggcgaagttcttgtccctatttctgtgataatgctattgatggttaccaaagcacaaggaggaaccaaattagtttttattatggtaaagacaaaaggaggttgaatatgcattttgccttttggttatttcgtaggcatccatggccatgactagggaaaccatgtcgtatcaaatatatagcgtatgtgatatttaaaaattgtaaacagtctgaattgggtcagcggccttaacaattttgagcaataagaggaagtctctctgaatagaatctttgatttttttttttctcattgaatgttaactttttgagcttgtttaagaatatgaaatcagtatgaaaagcagaaacctgtagttgtctcatgacactgttgcggaatatttctttttgctattttaagaagtatttaaaatacttgaatatttgtggacactgataaattgacgacaagcgggctattttggacagtggtggatcttca

SEQ ID NO: 47402 - DNA, 603 bp, Manihot esculenta
  Intron number 1 from transcript cassava4.1_013673m (locus cassava4.1_013624m.g) derived from phytozome v7.0 (chr-ID scaffold08265; pos 2065099 to 2065701 reverse strand)
ccatatagatccggcgtcgttttctccgattaaatgtacgtcttctctttcccatctctcccttttctgcattttacaacgggcttatcatcagatattgtatcgcattcaatacgtttctcctttatcttttaagtaaataattggattgctttcattgatcgggttgtttcgctggcttgattttggcgattagggatttagggtttcttcatttatcgattatgtgttataggctgaattttctttttattttgttctattacgtgtcatagcttcaataccagcttaagccaagttaatcaaacgattttcgattatatgtattacaggagttgatagactttaatcacatttcgacttttgaaaaatacgaactttctcttagaaagtgacggagacgaactggactcacttattcagctaacgttaacttgaaattttataggcacttgtacttttttattttagttttcaaattttatttttatttcagattgtctaatgccatagaattggtgaattgtttttttttttcctcttcttcttattttttgttaaatttcagtggacttgagtattggtggtttttacattagcgga

SEQ ID NO: 47403 - DNA, 683 bp, Manihot esculenta
  Intron number 1 from transcript cassava4.1_012222m (locus cassava4.1_012236m.g) derived from phytozome v7.0 (chr-ID scaffold11495; pos 149408 to 150090)
gctttttaaggattggattagactttactgttctggtgcttatcttatttgatataattagagtatcgatgaagattcagattttcttttttggtgtactcgcaagtgctgcagttgtttagaactttgagtgtctatatatgttttttcttgcttttctgagtggttgcagaagtttggcaactggcaaagtagtgtctggcatgtatatgctaaatcttgtttcgaatattggtactttgagtttctttttaatggtaacttaccaggaaagagtgtctttgtcctacctttttctcgttttttattcttcagggagttctaaaattttcagggttcaaatctgattttatttgtattttttcatactgtgtatatattccctctctatgtgggtatgagatgtgcccttgagcacaccccttttcccattatcattccttggggctttttcagtttgtaatccttaggattttagtgggttctgatttaggttatttgaagaaagcactaatgctcagccgagaatcaatactagattgtatttttcccatgcttttgtgtctgcaagtctctgcctgcagcttctttttcttttcttttttcttttttttcttgttctaattttggttattgtcattcctgcaggataagagattttaagtccaattttctccgctatt

SEQ ID NO: 47404 - DNA, 341 bp, Manihot esculenta
  Intron number 1 from transcript cassava4.1_006299m (locus cassava4.1_006299m.g) derived from phytozome v7.0 (chr-ID scaffold02943; pos 783030 to 783370)
gatccctacaaggtactcttctcatcttcctcgttcgatttattgatttatgtttttagtagttagtcttttggcgtaggatcatctctgtttattggtatttttgaaaccagctttggtcttcttatctgtttgattgattttgagaaaaaaaaaaaatctatttcattgatttcgactgatttcgattttcatcgtgagttttggttgttttagcagagcttgaacggattattattattgtttttgttgttgttgtgttagtgagaacctgattatgctcttcttttgattctgatggcatagaaccttccatcaagcgctcataattgctctttctg

SEQ ID NO: 47405 - DNA, 954 bp, Manihot esculenta
  Intron number 1 from transcript cassava4.1_030282m (locus cassava4.1_030282m.g) derived from phytozome v7.0 (chr-ID scaffold03264; pos 666109 to 667062)
gtaatttaaggagaattgtttgcttccacgggtaagttattattttgcttcatttggaattccacaaataatctaagcgattttttttcattatatttgttaattagcgctaacgtgaatactcaccgtacaatctcttttaaaaaattaatttttaaaatagataaaataaaatattacaataaaattattttaatacgattgaaccttattgatcggaaatgtaaattttttttttgaaatggcggaaatgtaaaattttaaatgtatatatatatatatatatacatataaaatataatttaatttaatgattaaaaatatatatagatttaaatttccattctcattctctacttaaaagaattctttatgggatattataacgaaggaaactgtctgtcagactagcaacgtccagcagcgtcataagggcgggcaacagtttagtttgtcgaatctgatttgtcaaattgaaactaagtcaaacaattaaaatatgggataccgacatcttcctaaccatgttagatatttttttggcatttgtggctctgcatgtcttcataataaatctaattaaatgctgcttctttaatttccctattcttcctggtcccagaaaatcattttcttcaatttcccaaatcgaaccaagttgtcgggtcaatttgaatccgacacaatgagttactaccttaaaccaccaagttaattttattgtctgtttgtgaccttgcagaaagaaaattttgaagaaatgccagaagaaatggataaagtggaagatcattataggtattgcacatattatgttattattaaataataaaataaaaaagcgtatctatttattaattattttattaacgtacgtatctttatttaaatggttggtagtactaaattttccgtgaagtgtactaggatattttttttttattttttattttt

SEQ ID NO: 47406 - DNA, 611 bp, Manihot esculenta
  Intron number 1 from transcript cassava4.1_012953m (locus cassava4.1_012955m.g) derived from phytozome v7.0 (chr-ID scaffold08265; pos 2872910 to 2873520 reverse strand)
agcctatcaaaaaactcacggtacggtttctgtttttctggaatttcaatttgattcctctattagtttccccattttcttctctgtttttggtgtgattggctcttattattgtatatgaagataaaatagaaatagacgcaatggacattttttactaaatttaggtgacagttatatatatatatatagataaattaggtgatgaatgactaatttcatagcttctcaagtttattgcttctcaagttcattttttacatatgggtttttaatctctaatttgaagtggtgatttttagctcatctcccattatttgcccaaatttaagaatatattttttcgggttactggttttgagttctgtggggtgtggaccggtgatcatgcaatcaacaacagaaacatgaggttgaatccagtagtcgtgtctctttgattcttgatattcagtatgcaatctatcaagtttgagtgcaacaaatgggttgctgtgttaacctctctgacttagtagcttcattgtgctcagtggtttcatcaagttctttttctctgcttgtttatgctcttgatcaattgttacacctgcaggtggttcttgacttgg

SEQ ID NO: 47407 - DNA, 640 bp, Manihot esculenta
  Intron number 1 from transcript cassava4.1_012488m (locus cassava4.1_012488m.g) derived from phytozome v7.0 (chr-ID scaffold02943; pos 997870 to 998509 reverse strand)
ctctctagggatcctcacgtcgtcaggtactgtgtttcttgtatcttttgtctctcttccaccatctctatgttctttttcttttcttgaattccaattatggtgatacatgtatgttttttcataatattcaacatttgtttctcgctatctatagcagtcatttccaagatttttctgttctggttttgggcgattagggtttgatttaaacatgtttcctcatttacttttccgttgtagggtttcaggtgttcttctttgttcttttttggcatccttttcttctgcctcagtttggcactcactttttccccctttttcatgagcttcatcacggcacttggttctctagtgtcaacagaatttggactggttcattaacgtttgccaagtgatttgctccatattgtttaattcttttcggaattgtctaatggccggtgatccctttattacttgtgtcgcccttcgagtgatttgctctgttgcttatatgaggttcttcttaatggcgaaatgggctttgccaatgctgctcgcagttgagctatgatcactgttcctgttctctctgcttgtatttatccttagtagagaagtaaattttgttgctttgattgttcttttccgtagattg

SEQ ID NO: 47408 - DNA, 697 bp, Manihot esculenta
  Intron number 3 from transcript cassava4.1_025779m (locus cassava4.1_025779m.g) derived from phytozome v7.0 (chr-ID scaffold06598; pos 198364 to 199060)
caaggtatgctataataaaccctgattagagtttgaagtcgagacttctcaattttaaagacgatttcagcaccattaagctaaaattatgatgttggagcatttggttttatttgagcttttctctctagactaatcccataaaaaaaaaatgaaatttttatatgaaagtgtgaatataaaataaattgaataattatgcaattcctgtgttagttaggaatgtagataatttgtaagctggctagtgaatagaacttaccatacatataaaataatattttgtgatacaaaattaaaccaaaaccttgaaataaattagaaattttgaaataaaaaaatcgatagaatcataagattttttttttttaaatttcccaagtcactttcttctgtgcatatttatacatacatgtcagaaacttatcatataaaaggagaaacaaatcgaaggctgcaagaacagtactattacacgagggttattaaggaaatgttgtcttttgtgctatgcatgtggaattttccttgtggacttcatgtatgcgtatgtcaagaaagcatattcgagtaactgattttgcaggatgtaatcatattcatttagtagccttttctgatcctcttgaatgaccaactttatagtattttgtatgaattttatatatttctttgtgcatggcagcaaagaagaaac

SEQ ID NO: 47409 - DNA, 436 bp, Manihot esculenta
  Intron number 3 from transcript cassava4.1_016820m (locus cassava4.1_016820m.g) derived from phytozome v7.0 (chr-ID scaffold08083; pos 53358 to 53793 reverse strand)
catctgttttgggatttcttcccctgtggttgacggtatgagtccatgcctccataatattacttccattagtaactatgaattcttttcttacaaaataaatcaaataccaaatggaagcttagaatttaccctgcagaatttctcttggaaaaaacagtgaaactatgtttttttttccttctttttcctgtctagcacactggctttcttcttcaacaacatgattagtaactatgacgtggcttctatagtcactttgtccaaaacaaagtaataattaatgtttaaatttttttgatagatttaaatttaaagtaagatatagaacatttcttaataattcaatttccatttgttggtgttttcttcataatctttaggtttaaataggttcatgatcaattttctttggtaaaaatgtaggttctattac

SEQ ID NO: 47410 - DNA, 923 bp, Manihot esculenta
  Intron number 4 from transcript cassava4.1_001018m (locus cassava4.1_000773m.g) derived from phytozome v7.0 (chr-ID scaffold02264; pos 732330 to 733252 reverse strand)
gcaaatttagcagctgctgggttgccattgtcaatgtaagctgatccaatcgaggttacacgtttgaaattcataggatatatgcgtagaatggctgcttgtagcttacactttcttatcttaatacaaatttcttcagattcaccttctaaaaagagagagagagagggagaaggaacaaaaccaaagaacatgatataatttttctctctctcactctctcaaccatatttatctaaagcagaaaattttctggtttatccctgtgagttttatagagaaaccgtgggttacatgaaggacctgcctctagaaggttccgaattgtttttctcccctaaaaatatgttgacaccttttgcaattagccaattgaataaaatattatgagtttgattacaatttcagaacctttgatggtagtttaaacttgggcacatgcatgctgcacgtgtagataatttggaaatgttgatcttttgcggtttgcttattgaattttagccagaatctggattgcaattaactcaaaagacttgcaagtagggacttggtgatatttgggtgccttccatgaccatgctctgtctcagaccaatccagacactgtaggtccaactccacccaaaaatttgacattgtgaagcttttagaaagatagtaaggaggagaaaggaagagagaacagaaaaggcaaaacacaaaagactatatttctattaacatatgttattttcatattatatgggactatatatttataattgaagatctataatatatattgaatgctatcaataaatcataaattctaagattttgctaatcaatctcatggttttctcataatcatgagattctcatgatggtatctttcagcatattagtatattacacttcaaattctccttttaccaggtttg

SEQ ID NO: 47411 - DNA, 536 bp, Manihot esculenta
  Intron number 1 from transcript cassava4.1_010854m (locus cassava4.1_010854m.g) derived from phytozome v7.0 (chr-ID scaffold04587; pos 39555 to 40090 reverse strand)
gtggcatctcttctgtaaatttcctcaggtttgccccaagttggatttcaatgttcaattaattaatcctttttcccctttctccttcttctttatgtggtaattgtttagttttttcactaaggaaagtttattggtatttgttgagttcttctatgtggtgttatcttctgatattatgattctttaattgaaaaatatacacttcaaacacgtttgatttgcattggaaatgagatgggaatgaacttagatgttattttgacatcctagtttaagaatcacatttgcttttgaatatgctctaacaagttcgtttataattgacccaatgttaccaaaattgaaccaaaagttggtaaaatcatagaaattatacttgaattcatgttcttatttgaatacttctggaattgcattctacttctatttcctgtttggatctcatccatataagcttggaggaactctgtccatgtatgtgtatggggcaatatcaatgcttaaggtgttgtttctgctctctgattacaggg

SEQ ID NO: 47412 - DNA, 757 bp, Manihot esculenta
  Intron number 1 from transcript cassava4.1_014849m (locus cassava4.1_014849m.g) derived from phytozome v7.0 (chr-ID scaffold03802; pos 563303 to 564059 reverse strand)
tcttcatctgctgatccggcgaaacctccgtccaagtatgtcttcttctctaaggtttttgctttcattacttttatatttttccgtgcgttgtttctttgctgtgtctgagataagcatttcaattagtacagttcatattattagctatgaacagctacggaagatctcagatattcaactccgatcagatatgcagtgaatgtataattaaattttcttattttcttcttttccaaagattattataattaacaatattggtggaggaattttttggagatatgagtgcattataatttccttagaaagtggaattttcatggctttagtttggttgtcgggaggagagaaaaagaacaaaacatagggaatctttacttttctcgacagccaaacaattcaagataaaaggaaaaaaaggattaggtttaagtctgctacagctaagctaagcaaccaaacgtacgtgtgaataaaattaaagaatcaaataagaaaaattgagctttttttttgttgaccattaattatatctatattacatatttaccctattttcatttattgctaggggaccaaaagataaatatgcagtctatattacaaaacattaattcatattctcaatgtaaaaataaaatgaaattaatatattgaagacataacactgtgcttaaagctgtggggtttaagattgttaatattgacaatgatttcagggcacaagttgtgggttggccaccaattcgatcat

SEQ ID NO: 47413 - DNA, 446 bp, Manihot esculenta
  Intron number 1 from transcript cassava4.1_011209m (locus cassava4.1_011209m.g) derived from phytozome v7.0 (chr-ID scaffold10563; pos 427060 to 427505)
ctccgcaaggtaccctgcaaaaatccatgtctcctgcttcttttcagttttagctcccatattaaacccaagaaagaaaaggtgaagaattctatgtgctagtggaattcacgtcctatttgtgttgtgtctgtttggggtatttggagagaaaattccctacttagttgaatttaatgtctcatttaaatgggttatatattaacttgatgtatgtgtatcacgtatagtcggaatgagttgtatataatataagatgtttagggataaggctgttagtgtacgattacgtgtgctttgattttgtaatggtgagtactggagatttttttgccatttgtttctttttctttgtgggcatgcagtggtggtgagaggggcggtgtcctcgttctgtgtttcaattgaatgctaaataaattttaattcctgctaggaacttcctc

SEQ ID NO: 47414 - DNA, 977 bp, Manihot esculenta
  Intron number 1 from transcript cassava4.1_013134m (locus cassava4.1_013134m.g) derived from phytozome v7.0 (chr-ID scaffold08265; pos 4520311 to 4521287)
atttccactcaggttcagttcttatttaatttcttgattgctgcattttttggttttttatttgtcactaatatttgataatccaagtcctcgttcgagctttatattcgacaacaattatttttaaaaaaaattaaattatgttaaaatatttatatatcagatatttaacaccttctgttaattcctcacttgtgtaaagattgcttgagattatttttttattatataattttctttatatagaaacagctgtgtttgaaatctaatactttcttttccaggggtcaatacaagtatttccattcatgaagtattaagaggcatcagcactttggaaatttggtttcttttttttaggcacttaattttttttatgtctattttcaaaaaaaaaaaaaaaatcttcatgtcattcttgtcttgtgtcctatttttttccgttgtatttatcttttttttttttaacagcataattgaactttttattttttattccttaagcataattaccaatattaaatattctggtggaggggaaagttgttttattccattatttttttatgattagataaattgcacatatcaattatgcaattggcagacttaaatgccttgtgagttccattattaatggttgatcagattccaaaaagaagagatagatggaatctttggataatcattccaactcctatagaataaagaatctaattttccttttgtcttattatcactcaatgaactagaaataacaaaaattatttcactagtaatcagaagggagattttattctttcactaaatcttgctccttatcttaattttttatcaagcatgagagagagagaaagctttcagaaacaattttatatggtagtggcagctttgtttagtctgttgtcaagccatttgcaaaggactaattccattgcttttgcttttgatggttgtattagattcctccaacgagg

SEQ ID NO: 47415 - DNA, 964 bp, Manihot esculenta
  Intron number 2 from transcript cassava4.1_012128m (locus cassava4.1_012128m.g) derived from phytozome v7.0 (chr-ID scaffold02892; pos 1017788 to 1018751 reverse strand)
gatcggtaagtgccactcttttattcccttgcattctgtttatttctgatggttcttgcatttgtccctgtgctttctggttgaaccttgtcgggtctgggtatgtgaaactgtgggatattgaatgagaggaggaaatggtctgggttgaaatgtttaaaaaaagttatgtttagtgatgaggtagaagacaaagcagaagtttaaggccttatattctcttataactacaaactgcttagggatgtaattgggcaaggtacgctaaaattaaactaaataaaatccaaactcgaatcctattaagtctcatgtattctaattatcaatttatataaaaaatatttttactaataattttcattttaaaaatttaatatttttagaaaacatttaaattttaattttaaataaaatatataaaaatattataaatattattataaaaatatatatttttatattaaattaattatttagtactcagagataaaattcaaaatcaattccaacatatataatttattttattttattaaaatttaattagatcggataattaaaaatatccaattcattaacatccctaatcaggcatgtaagaaggctgctcattctctttcgaacagatgagaaaagcacgtctatttaaaaatttataggtacccgtacatgtcatgatcttaacaacagatattttatatgttatcattattctgatgtgggcagttgagcataactcagctccatagatctttacgtgcacatggaggtttgaatcttttctttgcaactgttcatgtgtgtgcaagtgcataagctttaacattgagcagaagctggagccacatttgtattttcaactgttaactaaacatcaaatgtgacgatgaaattggtaatcttttactgatgttgatggtcaccagcaaattggaggtagaactgtgagggtgaacttccc

SEQ ID NO: 47416 - DNA, 783 bp, Manihot esculenta
  Intron number 2 from transcript cassava4.1_010518m (locus cassava4.1_010518m.g) derived from phytozome v7.0 (chr-ID scaffold03060; pos 278287 to 279069 reverse strand)
aaggttggtgcttttgtcatcttttttgcttgctgttgaaaatattcaagctctgatgttgttctttgttttgtaaaacgttattttatctgtattatttttcaccttacctgctggatttgatttgagtgctgtgcttttaaatttgatgttttttagaattctctgaataaattgcaaatctttttttttttttctgctttttaccgatttcaagtgagatcttcagtgattgatttaaagactcatgaacgtaagttactttatgacaaaattcagcacttgcatttttaggctaaaatgtttgctataattggagttatttttgctaaagtgtaaaacaattcacaacaccggtgtcattcctatactgttattttctatcctgattgaccccgtaaagaccccttatgcatacatgatacattacttaatgctctatatataaacccatacagaaatagctggcgagactgtgagcgagaggttaatttgagatagattcgtttcaactttgggtcagaatgtaactgttgagaaaagcacgtactatttttcatttattccatgcaaaaatatcatttcttttatcaacttgaattaaaatgtgtgatttgcacagctttaaggtagcatttctgttattagcatggaatcctcaatatttacttccactttgtcttcttatcctttctgttgacctgattcttttttttttttctgttgctgtaccttttccttgttataggagcgttcatcaggtcgctctcgtggttttggata

SEQ ID NO: 47417 - DNA, 699 bp, Manihot esculenta
  Intron number 1 from transcript cassava4.1_001825m (locus cassava4.1_001825m.g) derived from phytozome v7.0 (chr-ID scaffold03150; pos 324342 to 325040 reverse strand)
ataggaggtccggcggattcctcaacttcgcattggtgagttttgctcggcggtgtattttttaatgataagaagctgagtgccattagcttgtacattcagcatccctattgactttacaggttctttggctgattttgataataaccatgggaaggtgatgtttgcgctgatttgttggtttgatattaatcaattatgtgtttgatctctccgagtgtagactagtaactgaacatttgagttaaatggatgaccaacgtgatcaagaacatagtttagtatgaaagatattgaatttcaaaattgggactttgttcagttttggcactgatctttaattgatcgtaacatctgaaattttactttaactagagcatccctttggcagccatttttgtcattgttgctgctgttgaattgttggcagcatgatctgccactgcttcatttcatgattttttttttctatgctccaacgtctacctctcatgtccatatttacatggataataatttattttgactttgtttcagggttaaaaaagcacattaacaatataatgaactgaattcatttgtgcgccactcctgctttaaaaagttggaaagattaaacaagttgtctttttgaagtcctaacaactgaagtttctcatctctgacttcatctgttttgtgcagatagctttattctat

SEQ ID NO: 47418 - DNA, 973 bp, Manihot esculenta
  Intron number 1 from transcript cassava4.1_012431m (locus cassava4.1_012431m.g) derived from phytozome v7.0 (chr-ID scaffold03150; pos 304726 to 305698 reverse strand)
cgccgtgggtattgaagcatttggttgagaggaaggtatatttgagtaatttactgtagtgtttgaagtttgtagatttgtggaatgtacttgtatatgtgtgaatgattataactgcagatgctgttttgttttcgtatttatgttttcaattagttttgtgtttatttcaattcttgttatagcagaggagtatgaattggtttaactacagtctacagtgtgttaggatcacttggtgtttggttggatttttttttttgtttgttgctcttccgcatgggcttgcattaggtatatctttctgccccatttgttgaaacttcctaattttcatagttataaacgtcatctacacttgcgtctctcttgctaatcaattcatgcaaaataacaataattgtttaatctaatgagtgtcagatgttgtatgtcagcaatctatcctttttggttggtatggtttgttttctgtgggaagaagtctagacctgtgcttatgttttgtataccttctgtggttctttcaatagctgtcttgtactgtcagtttattagtggtgttcattatgaaacaataagtggtgaagacatgcttgtaccttttaacaaaatatgataggctttctgatacaggtttatatagtgattcttcctagtgttattgttatgttcatccttccccgttatgggcagagggtggctgtaatgaatcacagctggtgaaacacttcatggtcattcatatattggttcatctctatcttattggacacaatgctacttgtcatagactctgaggtaaaatttttattttatgattgtattgaacgttatgcatcttttgtgtagatgcatgctgttttagattatttattacaattatatcagctctacaagctgaagcatgatcactattcttgtgtgaaaatgtgaagcaaggagttgcggccagtggggcaaagacagggct

SEQ ID NO: 47419 - DNA, 635 bp, Manihot esculenta
  Intron number 2 from transcript cassava4.1_025682m (locus cassava4.1_025682m.g) derived from phytozome v7.0 (chr-ID scaffold05214; pos 1247057 to 1247691 reverse strand)
ccaattccttccacaggtattaatcggttgccttcactttctatccctcacaaaaagatgtgacaatcacatagtaaataataaaataaaatacaaaatttaattatttaatataaattcaagttatttattcgtgatacaattatatcaaatcaattccactacaaattataaatatattagttagtctctctcattctcttataaaaataactcaatatatctactttataactatatatacactaaaactaatgttttcaactgctcactacacaaaatcctgctatgctttaggcaaaaatatttcaaaaatatttctcttcctccatgagactgtactacattacgatgggcgaaaacctctctgcataatgagcaaaagctactctctataatgaaaaatagttttctctggacttggtcaaaactaaattactctctataatattcttatttatagtattaaatctttctgtgctaagctaattagaaatcacatataataagagatttctaactctcttcctctaattaaaaaagagaattttgctagaattatgaattacaaatccaagagaagacattgtttctgggtttattttgataaaaatttaatcaggagctatttggag

SEQ ID NO: 47420 - DNA, 481 bp, Manihot esculenta
  Intron number 2 from transcript cassava4.1_015643m (locus cassava4.1_015167m.g) derived from phytozome v7.0 (chr-ID scaffold01441; pos 201034 to 201514)
taaagatatctttgaagaatttggtaggaatctatctttcttctttgttttcccaattagtacaattcatttagcagtagtaaatacctgtgattaaacttaaatgtcatcatgctcttgctttatatgtggaatttaggcatcaaaatctttccttaaagttactgtgacataccgatgtgcacagcatattgttaaactaaaatcagtactcagtttttgctcaaatttacctgacaattatggagtaagtaattctgcacttagattttacaagaaaattcccctgcaatagtcattaaccatggcataaatttttgatcctatgagcatttcttttatatatatatatatatacacattaaaattcaaaatcctcattatttatgtgacatttgtgtattcagatgtaaaaagcacacatatctctttatattttaagcacttgcaagaggtaagcattcattatatatgtttgtag

SEQ ID NO: 47421 - DNA, 855 bp, Manihot esculenta
  Intron number 1 from transcript cassava4.1_003331m (locus cassava4.1_003331m.g) derived from phytozome v7.0 (chr-ID scaffold08265; pos 1751255 to 1752109 reverse strand)
aaccccatcaacaccgtctttggttagtatttcttgactcagaataaaagtttagaatttgtttctttttaaatttgttccctgtcgtttgcttcgttgtttaatggtttttaattcaaatctaaggatttgaattctaatggctaaaatgtgggatatcttggatgagatctaaacttcagattgatttggagtgggatttgtatggtatgggttagatcttaatgggttttcatgcgaatctgaggatttgaatactaatggcttagatttgggattattggatgagatctgaatcttctattgattttgagtcatgttttgtgtggaactgacagatcttggatctgaaatcctcagtcggtgaattttttttctcgtttattgttattttaaagtgttacttgtggttcaatgctctgcaaggttatggttctgttcctatgatttttgaattttaactatgttaattacattaaaagcaatcattagtatgtgttaaatttcgaatttgttgtgaatattgcttccttgctaacttagctgtctgaaagcttctagtggcttgaaccaatctggcttaatatttggtatcgtgtcatgtccattctcattgacattgcttctgttcgtgtttaataacctattcatgtattttaattctgttttgtgaaacaaaataaaagcaacctttcatttatatcaagtgtcaattttgtttgtgtattgcttctatgctatctttgctggctggaagtcttcaagggtttgagccagtcaagcttaatactttgccatgcatgatgttcattatcgtatttttatttaataacaattttcgttcttttgatacag

SEQ ID NO: 47422 - DNA, 797 bp, Manihot esculenta
  Intron number 3 from transcript cassava4.1_016367m (locus cassava4.1_015593m.g) derived from phytozome v7.0 (chr-ID scaffold04083; pos 405165 to 405961)
cagcagaggacaatcaaggcctagattacaaaacggtaagtaactcgaccatgaatctgctcatgctcacatgcgatctgtatcaaaaggagatgatgataggattaaaaaaaataaagatagaaaccaagtccattatgggtacttatcttaaaaaacctactcattgaatctgattattacttgatactgttttattggctagattttttcggttttcctctaagtcgtgatgcttgactaactgcacattgttttgatgcttagcaaactttagagcagcattttgttatgtgtgcctggtgacagtgacgagtgtagttcattttgtaggttatgggaagaattcatgcagtcctttctgatggaactgtggtcacagatgttgaagtatgcctccattcttagcctttgtccatcaagtctgctttcagattagtagtcctgttgctatgtcctccttaatgtgtcctactaattgtttccatgaatcttgctgctataaggtttaggattttgtgaagttagtggatgatcaagtaaactgtaaaagctaaatatcagctactgatatttgagcttgaactctagctcaagttctccatgaactgattaaaaaaaaacttcttgatgtcactattgctgttctatagaagaggttcagttatagatttagtgacattatcagaacaacatgattttgctcttattaatctatagattgcgaaacccatataagttgagctatttccaaaacaattgatgttattgacaacttcaggcatttagaagattat

SEQ ID NO: 47423 - DNA, 486 bp, Manihot esculenta
  Intron number 2 from transcript cassava4.1_019806m (locus cassava4.1_019806m.g) derived from phytozome v7.0 (chr-ID scaffold07330; pos 212439 to 212924)
atataatttctaaggcttttcaggtgaagaacttgaatctcttatatctttctctttttcatttttctagattttctagctatttgtaatgggaattaaatcaaacatgatacttgctgttgtatttctttctatgatgtggagatctgtgtatatgatcatatgattgaaatggcaaattgatagagcgattcatttttgtggacgcttttctttccttcaaagtttctgagttttggtgagaagaagggcttgggtgctgaatggacccatgaccctcaccacctgattggttttttgacttaaagaaatggaaataacaataaggagaagaattttttcatttgggacattgcaggtttgataacaatctttcaacttctagaggttattttaatggtagaaagttataagaagtgttcaacaatcttttccatcattttgttcatagggaaaaggtggcagagcctttctgttttcgcacgc

SEQ ID NO: 47424 - DNA, 501 bp, Manihot esculenta
  Intron number 1 from transcript cassava4.1_011840m (locus cassava4.1_011840m.g) derived from phytozome v7.0 (chr-ID scaffold06659; pos 303601 to 304101 reverse strand)
aggttatacagttaaggccactgttcgtgatccaagtcagtatcatctctcttgtttgggttctttgtgttctcttttgagtttaaaatttgttgtttttattttgtttcctgcgttatttggagtttttagattctgggtttctatctctttcgcttatagtttctttggtaatctcaaaagagattagcgtactcagtttcagtgattttctatgtttttagattctgggttgtattctattttctcatcacccaaaagggccacagctagaatcccacttaatctcttcgttgataactaccgaggttttcttgatatgggctagacaaagctggttacttgtagatttaaatgttaactgattatatcacaagcgattagttttttcaaatgaaatttctaatgaatgaaattgggatttaggtttctctctgtttattgaccttgttaatccgtgtaatagaggatcctaagaaaacagaacacttgcgtgcactt

SEQ ID NO: 47425 - DNA, 686 bp, Manihot esculenta
  Intron number 1 from transcript cassava4.1_024211m (locus cassava4.1_024211m.g) derived from phytozome v7.0 (chr-ID scaffold09000; pos 111329 to 112014)
agattggacgaggaggctttggaactgtttacaaggtgctcagaatttacagatggtttagcacattaagctaatggaaattgctgaacttgatattaactgtttgaaaggcactcagaaaattgaattgatatttgatactactcctttcaacttgtttcttatgtaagtttgatggtccaatgttttgatgtatgattgttataacttaagtttattgaatggcctggctcaaaagtgattgttccaaaaatctgaagcatgtgataatacaaatcatttattcttggacatatgtggattcttacattagttatagctggatgtgttgagtacacatcattacacatgtaaataacaagcttctccatcgaactcgtaacacaactgtaatggggaaaaggaaaacctgtagcatctaggctagagagatttgatattctcatattgctatattgtagtttttgcttaaacttgtgaacttaattttcatgaagaacataaattatcatttcagataatcttctttttcaactttcctttttccttcagttatcttaaagtctcactcttctattagtatatataccagctttatttcttgtttatgtcatgtttgtaaagcctttcccttatttataatgttatcagggaaccctcaaaagtggaaggcaagtggctgtaaa

SEQ ID NO: 47426 - DNA, 866 bp, Manihot esculenta
  Intron number 1 from transcript cassava4.1_021077m (locus cassava4.1_021077m.g) derived from phytozome v7.0 (chr-ID scaffold08542; pos 377247 to 378112)
agacctaacattgtcaccgaggtgagctatcgatcttcagtttccttcttcactcgtcaatcccaatgcatagcgttagggtttcttaattctaaaattttcctcctttggttgtttggttgttggtaaaatgtgggaaaagcaatgcaaatttttaatctctcttttttccttaagagaaaaggaatctcgcaactcgcaactgattgagcgaaggcttcgcgtaactctgttaattactactgtttgacttggttgacgatttctctctctctcttttttccttccctggaaacatcactgaccttttttctctttaatcgctctatctactcttaacaatcaagcagagattatgggaattgttttttggcggaatttttctgttactgcacttgttagctgtttgtttatatgttaatgtttgacgtcttgaaattatagaccaagaaaatgcaggaagaattatttttttcctattctaattgggatatatgtagatctctattgcaactttctttcgtttttttttcttttttcttttctggtgttttgaaatggtgaaattctgttttatttgatccattccttactatgaggaggctgaaatgaactaacttaagaagtggaattgaaatggcatctaaggatgaggaagataggagattcctctggctttttaatatagttggtctgttaggctaatatctttgccaaattaacctgaaattattttcagtacaaaattagttagaaaacatgcaaatcaggtctttctatgagaattatacagcttttcttatgctttgatcataccctttgttttttattggtctacaggcaggattgcctactagagtgggaca

SEQ ID NO: 47427 - DNA, 935 bp, Manihot esculenta
  Intron number 2 from transcript cassava4.1_011984m (locus cassava4.1_011946m.g) derived from phytozome v7.0 (chr-ID scaffold12439; pos 54493 to 55427)
tcaaggaagtgagcgaagaggttgccaagtacaaggtggagtagcttatttcttttttattgattctcgtcatttgatagtttattgctgttggacatgattatctttcctgattggtttcagtaggatttccgctgatattgtaaatagaaatagttttctgtcctggtataaatcggactttatgaactttcgatagttttaattatagaattgctgttaaattttatttttgcagtcgattacaattacattagcatactattgggctggcattcagaacagtataaaattttgaaatgcattcttgccgtactgtagcatctatgaacttgttatgtttagtaatgttgtatgaaacaatggagaaacatcctttgtaagtaagttgtttctgtagacttcaatggatcatttagtggggagagtaaaacattttgtttgataaaagtagtggctttagatcttctcatgaatcaaggacgaagactatctgttgaaatttttagagttaatagagacttccagacgggatgtgtagattgaattacagatagattatcaattgctgtcagcagctgatattgtttgtgtaacatgatatcttatagtgatgttccgagatccagagagagagactgctgtcagcagctgatattgtttgtgtaacatgatatcttatagtgatgttccgagatccagatgagagacagtgtgtgtgtgtgtgtgtgtgtgtgtgtgtgtgaaattagaggtggtgaaaaatgtattgcactagattacattcacgccatgtgctgatatgattacatgttagggcaatgtatttgtcaattgtgctagacttttttttttcattcaattgatatttctgttgtgttttgccctgtgaatgatcaggttggagctccagctcgtgttggtttagttgcccc

SEQ ID NO: 47428 - DNA, 1048 bp, Manihot esculenta
  Intron number 1 from transcript cassava4.1_009728m (locus cassava4.1_009728m.g) derived from phytozome v7.0 (chr-ID scaffold02969; pos 317654 to 318701 reverse strand)
cgtcttcttctttctctgatttcttagtttttcaggtacgtgtttttgaaactcaaggacctgatttagtttctcatttttgtttatttaattatttgttttccttttcaagttggttttgcttctaagtttagttcttctctactgagatcttgtttctgtttcagttctctggtaaatgttgttagtctctccttctccattttctttttatttaatttttgttttgagagacaggttggtgtcttaatgtgttatgcttttttttttttgtatttatttgcattttccattaattttaaatgaagatctcttgaattgaagatttttatcgttcgattttttttttctgtatgtttctgtggaatctgtttggtttttggttgctggaaaactcgagtaaaaaatgaagctgaaatttcatgcactaaactgggaaaaaaaacaaaaatagaaaatcttccctcatttttgaaaggaatatagataaagcgcggttgacctccgtttatatgacactcatgtatttattagcgaacccacctgaccggctgacgctgaccccaggcccggtattaatccctggtacttgaggtgctttttgtaatcgtaacccgccataactcgagcactgagtgaaaccggggatggccgggtcagtaacgcgggggtgtagtagtttgcgttgaggtcgtttcggctctaatggctaaagaaacgacaagccaattttttctgtccctgtttttcctttaggtcactgctctatacatttttccgtgctccaaaacggccgataattgatgattaggtaatcttttggccggtattgtgttttattgttatggcaagatcatggttattaattttatatttgaactcaattttctggtgtctataaaattcagacgtttcatttagatttttttcccattctaatttcttgggctagtattatttatcgggggaatgaatcataaatattgactttggatttgactcaatctaagcagacaaataaaacctaaagagactaatctgtgaaggt

SEQ ID NO: 47429 - DNA, 802 bp, Manihot esculenta
  Intron number 1 from transcript cassava4.1_004198m (locus cassava4.1_004198m.g) derived from phytozome v7.0 (chr-ID scaffold01195; pos 105549 to 106350)
tactgtcttggctattggcaccgagtgcgatattggtattgaagttctagtctttttgaatatgtttaaaatgactactataaatgctctctttaggaatctaatgaatgaacatgattctggattttcaagatggaatataaatgctattgttcgttagaagatatgatgtgcgagttttattgggttggttggataactgttatgaaaaactggacagtttgagctttctggttttgagtatgtaggaggaggggaatgtaagaaacgctgagtttcttttttttgggcttacttctgttctgaaggaggttttaaattctaggtttacttatagattttggcattttattgaaattatggatttgttgtcatgtgggatagccttgatagtaaaggctttttcattatattttccttaaaaaagagagcgtggcaataaatttcattcactttaatactgtgatcttaaagatcataaaactgatactgttttcctagttcatttttcgcatatgtctgttgaaatgaagagagacctaagaactatcttaccctgattactgctcctagaattttcttggctgggctattatttgacatccttttgctttctttgcctgttcagttgggtgtttatgaatgcactaaagcataaagaaaaagaaaagatttttgaaaatatatagtttcaaattaagcagtatcatggcgcactaatgaatatctttctgtgaaacattttaatttttttgattgtaacaattcccttctttcttgatgctagcattattgacggtta

SEQ ID NO: 47430 - DNA, 507 bp, Manihot esculenta
  Intron number 1 from transcript cassava4.1_006848m (locus cassava4.1_006848m.g) derived from phytozome v7.0 (chr-ID scaffold08265; pos 3656074 to 3656580 reverse strand)
gaggtaaacaatttctgttctctctgtcctttttcgcttggattttgtgtaagataaatttcttttctgctttaatttcatgatgatcggtagctatggtattattgaaagaattgatttcactgtgattttccttcgacgctaaggtaggcttcagaaagccaagaaaattgaattttgatgaaaataatagaatcttgagatcatcacatatttacttcatcttttacttactgatttgtaatataatgattgctctatgtcgcttatcgatcctgagaccaagcatcaagtccgccacttactctgacgcttttgacttttaatggttacaagttgtacttctgatcaccgaaaacctgcaagttgtgtaaatgataacctattattatacgacgattatatatgctgttcttccttttctttttattggttatgtggaactgtttggaaattgtctggaatagcataaactaaaatattctgaacgtgtttttggcttttcag

SEQ ID NO: 47431 - DNA, 868 bp, Manihot esculenta
  Intron number 4 from transcript cassava4.1_004870m (locus cassava4.1_004870m.g) derived from phytozome v7.0 (chr-ID scaffold12793; pos 151626 to 152493)
ttgccagaagattatcgaaaacgcataactgggcggtatgtgcatcacattgataatagtctatgaattaacgactatgattataatgacatgaaggaaatgaaagcttttttgatgcagattctcatcactttggcttggaaattaggatcccatgaatccattttagtactttcatgttccaaaatcaaaatactcaaacttttatcctcattgctttttacgctggaataacattatagtgaatgcataaatggttacaagtggtcagactttttctcattcgtaaatttaacatgttcatgttcatcatgaacctacatggacagtcactggaatgctaaaggaacctctctaataatttgagtgacttttttgtataaccggctagagagattgatgtaaatgaaaataccaattgaatttcatgtgaaattttgattcttgctagcaatgaacagaaagattcctcccttttcaaatgaagaacaaatgaagaatttggtgatctgttatatcaaatttgcaagtgaaattggttatatttcttccatctgccactatgtccatcttgctctaaaactttatttgaggattatagtcgggaaactttgaacacttcagatcatctcagctgtggtttatttccacttacttttaagtcctgtgattaactaatgaaaacccatgtatcattggatgattgccagttattttttaatttttagagattaatgctccaataagtcttatgatcatatgatcatgtaagtatgcacattgtccttgtgtctctctgtaatatgcatgactgactgttggctagttcataggttgcactgaaaaccttaattgtcatccatcgtgc

SEQ ID NO: 47432 - DNA, 928 bp, Manihot esculenta
  Intron number 2 from transcript cassava4.1_026354m (locus cassava4.1_026354m.g) derived from phytozome v7.0 (chr-ID scaffold02892; pos 79787 to 80714 reverse strand)
gagaatctgttgctttgcccaagcaggtatctccatctttagtttcataacaaatcctgaagagaaatgaagaattccatcctatgtggatgttgagtgtttgttctaatgtgttgattcgcttttctgttttgcttggatgatacctcagttaccatgcgtatttgatttatttctgctctgccaccgaggaaatgaaagaaatatgctgatgatagatggagtagccattatggtttaaatcatgtgtatcagaggctgcaaactaaaacattaggttcactttcctatgtagacggcctctttgcaagcatggtccttggagaaaagggagaattgactagttaaccatggggacatgatgaacttaagtacaagtgcttaaaatagtaaaataatctttaattcctaacattttatgcattcaaatccatggtaagatagttttttcccccttccatattgtagcacttatgttgagtgatcatgcgtgatagcaaatactttgctctgagaagtggttttatttcccacagttttgtaatgggtttagtgcatataaatgtcgcttttttctttaaccttttggacccacaatcctgaaatgccatggcttttatttaggtatttggcataaaatataatttcgacttgaaagcttcctgctacaattttgtagagagacctattttgacatgtcaagtgaagctgaaatagtaaggttattaataggtggcttgtggatctagctattctttttcatttgtaatatcaagaggatcatgcttagtctgtaataagcatcctgtgctctttggaattgataatggatcctttgtatgtggaaaaggaaattactttgctttcatagcttatttcttgatgcagaacagctgtgggttttggattctgtccctggggaagtagg

SEQ ID NO: 47433 - DNA, 388 bp, Manihot esculenta
  Intron number 1 from transcript cassava4.1_026160m (locus cassava4.1_026160m.g) derived from phytozome v7.0 (chr-ID scaffold10493; pos 437177 to 437564 reverse strand)
ggcgagcaggtgtgtttgaatgttatgaactttctaaggtttaattttagtttgttacttgtcgatttaaaattcatgaatcttgggtcttaattgtaaactttctgcatttgaggacttctatgactggtttagattgggtttatcggctagttgctgtttctacaaaagaatctgaaaaaaacctaagccatcataaagcctctgtctggaatttgttaaaacctaatgactagaaaagaggcaaaatatggcttgtgaagatctttatctttgtttgttaaaactttttttttttataataattttctttgatccttttggtctcaagcaatacactatttggctaacagggttcaattctaggtgttgaggtggaagttcctgg

SEQ ID NO: 47434 - DNA, 728 bp, Manihot esculenta
  Intron number 1 from transcript cassava4.1_025407m (locus cassava4.1_025407m.g) derived from phytozome v7.0 (chr-ID scaffold10878; pos 316560 to 317287 reverse strand)
ggggtaattatcttatttgtttcgtagatttgctcttcattttgcttgtttgccttgaaaaataagggaatgaaaatgaaacacattaaattgaacccatttagccgatagatatagttattatcggtaaatggctgtgtaatttttagcaatatggcggaaattcacacatttcaggcacttcagtgttcattgctgggaatgacatttataagcatgctacttctgagaggatagagtgttctttagattgccgtggggcgtgagaacaaacagaaaaattaggaagaatgacaccttcttcgcagttccttggtaaatgataatcaaagtcagttaaaaggtgcaacaggttttcttgatgctattgtttctccatactataaatttaggattgtcttaaggaagaggtttttaatgtgtcttctttggtttgttagccgttttgtactttggttcaaatgagagcattttgaagcgcttttatgtatttgcgctagtgattagggcatgtaattatgtgttactcacgctttggtttatcatgacctaagtggcattggtgtatcttctctctctgttttagcatgaatgcgcttttttcattatcaaataatagagactacttgctgcatccattatcttgtaccattattttttcatgctagtccttcagttattaaagatccttcatttaggcattggattatcgccgctcacaaggtatt

SEQ ID NO: 47435 - DNA, 848 bp, Manihot esculenta
  Intron number 1 from transcript cassava4.1_012480m (locus cassava4.1_012480m.g) derived from phytozome v7.0 (chr-ID scaffold09000; pos 316011 to 316858)
aagaagaagttaatcccttttctgtgagtctttccttctttactttcctttttgggttatgattttgggttttattttgtttgatgaatagttgaagttgaatttttgggtcgttttgtttgttctgctatggattgtggaagtgatgctaaaaacacttgcgaattctaagaattcgagggttttggacatctttcgtggttgatgtagcttaatgatctggaatttgtggtgtcattttggtgctttgttatctgttttttttttttccagtttcaaaatccactcctccctgtatgttaggctagttcatggattctgctacaatattttctgattttgagttggtgttatttcggacttgtaattgaattaagaagataatcgattgttgtttgatgtactaattttcgtgtgaataatcattcttcttagtaatttaacggtttgtggagaatccaatgcttggattgtggttctgtagttgggatggtaatcttatccgagtcctgatcgtgcatggctgtctttttctttaaatgacgttaattagctaaggataattagctaaggagatagccgatgcagcccaactgtgcgatttgtgcaggtttatatgcatgcttaatgtgctcaaagcgaaactgctcaatacaagcctttatcatcttctgacagtttaggaacgttctaaaatgaaatcaatgtgcagaagcttggccatttgaaattttctgccttatatatatatatatatattgaacactatttgaaagtaagctatttattttttaatctaatttttgtaaataggatccagctgtaagggggaaagcatcaggtcagca

SEQ ID NO: 47436 - DNA, 677 bp, Manihot esculenta
  Intron number 1 from transcript cassava4.1_033977m (locus cassava4.1_033977m.g) derived from phytozome v7.0 (chr-ID scaffold00867; pos 192468 to 193144)
ctttaaccccaatactcctgctaatagtccgtcaggttcgtttcttttccttctcgttattttgttttcgttttgtgtttggttgatgagaaatgggaagaaaatgacgagatgggaggaaaacttaatgggcattttgttactgagttttataggacgtaaaaaattaagggtttagtttacttatctgtttgatttagctgggaaaattagtggtcggaccaattaattttgcacgctgtgaaccagactttcattttggtttgtttgattatcaagaaaaaaagggagataatatgggaaaggattggaaaattcttggatatttcatgttcttgtatgagatgtaaagaaatcggtactcttctgtgtcttatttactttgatggaggctagtctctaggtaccattttgtggaaaacaatatcggcagtaaatcttgtagaattttccatcccttttagtaagtttagtttaaatctttattttcttgggaaacttttatctgcgattattttgttctgaattaaagggtgaagtttgacaaagctgtgtaatttttccactttcttggcaaccaaatagtgtagcctaatctggcttcctggttctcatttagtattgtctttcttgaattggcagattatccgcgaagaaagtcccttaacggagaaaat

SEQ ID NO: 47437 - DNA, 290 bp, Manihot esculenta
  Intron number 1 from transcript cassava4.1_029671m (locus cassava4.1_029671m.g) derived from phytozome v7.0 (chr-ID scaffold03150; pos 448460 to 448749 reverse strand)
ttcctgttgttactggtgttgtcatcgccagtggggtaacaacttcaaccttttcttcttaaaaatataaacatctgctgatattaatcctctgttttgttaatattgtttgttctaatctacttcttgtgatatttttgccaatattgtctttgaaattgctaaaaagtccagtgttatatcattgtcaattattggaaaattaagagaatttaataatcttggttttgattttcccttgttgcatgaccaaagggagaaccaagttttcatctctttggttttatagt

SEQ ID NO: 47438 - DNA, 653 bp, Manihot esculenta
  Intron number 1 from transcript cassava4.1_011107m (locus cassava4.1_011107m.g) derived from phytozome v7.0 (chr-ID scaffold12677; pos 4341 to 4993)
ttgaagcaccggaacatcaagaagctgtagacaaggtaagctctctatttttccctgcatattcaagtacttttcccatagatttcgaaaattaaattggtatttgatgctgtatgtgttgatttttcgtttttgcctatcattgtagtttctctttgcggggttcatattggatgattttgtttggggataatagatgctgtgtttggtttttattatgctcttccgatctgagtttgttcccgtttctgtttttcttttttcttgacttactgtttattttgaagcttttatacagtgtataattaaattttccacaaatcaaattgttgagttttctttctagggtttacgttgaattattattaatattattattattattagtagtagtagtagttttgttcttccgctgcgattttttgttttaaactttgttttattttttctctttctcaaatatcgtatatcgtagggatcaatatacttagtaacatgcgtatagagaagtaatttctttagatttctctgccttcttttttatatattgctataatattgacaagtttctatttttgtgcattaagcatctaattttgaattgttttgacatggcaggttggtgattcctgcttgtgcttaaatcatagtaa

SEQ ID NO: 47439 - DNA, 471 bp, Manihot esculenta
  Intron number 2 from transcript cassava4.1_025324m (locus cassava4.1_025324m.g) derived from phytozome v7.0 (chr-ID scaffold06140; pos 44347 to 44817)
aagtttctttcaaggagcatcttgaaaaagacaaggcatgacttctttctttttctttccttttacttaacaaaaaaagcattattatttgtttttgaaaaattttcccatcataaaagaatgtttctcatagtccctatatttttattgttcaactctttaatccctccatatatgtattaattttgatataatttagagattaaaaaagtatcctttctaaaatatttattaacagtaattataatttctctcctttgaatatgtctactaacaaaaaaaaaaatgatttaaactggatgaagaaaataaaaagtgaatgaaacaaaaacagaaggactaattaatgtattttcaatgaaggattaaatagttagatcattaaacttatggactaaatagtaattttctattttattttatcgctcttttaattttcatttagttatataatcgcgatttctgtgaagg

SEQ ID NO: 47440 - DNA, 538 bp, Manihot esculenta
  Intron number 1 from transcript cassava4.1_018575m (locus cassava4.1_018575m.g) derived from phytozome v7.0 (chr-ID scaffold04209; pos 618299 to 618836)
tgcatttactactacttagcctatttggtgatcaagtgagttaatcttgatttgattctctctctctctctctaattttcagttctttccaatttgttatccttttatatgttagtatagagattttttttttaattctagtttctaattgcacttttaggttttggttgtctgctgattttcttttatagctcagatctagtactcattactttatattattaagtttttttttgtctcattttttgagaccaaatcttttctttaaatgtcaaaatatatccatttatccatgtcctcggatctttcattattataatacctttacttcatatatatatatatatatatatatatatattaaacaagaagaatggcaaatgaattgttgattatgcggagaatgaatttcattacgaatcgatttgtgaagaatagggaagtgtggctttggaagctgaggtgcctctctgtgtgaccctgatcatttattctattattagctttgcagaactactggggcagaagaggcctttag

SEQ ID NO: 47441 - DNA, 741 bp, Manihot esculenta
  Intron number 1 from transcript cassava4.1_016907m (locus cassava4.1_015790m.g) derived from phytozome v7.0 (chr-ID scaffold02264; pos 883808 to 884548)
taagcgatatcaatcagtccttcaatcgcgatctggtgagcttttaagtctatttggatactgaggatataatgcgaaagggtactaaaatgaatcaaactgttaaattttggttttatgatgggtttactgctttatatataagataatcaaacctggacttatccccttttttgttatgttttttatgatgggtttactgctttatatataagataagaactaaggctatttttgatcggctgtattgcaatcaaatttgctagtgaatttcaataggagttttggttgcattaagacatatctaatatagcataaggtttagaatcttagtcacaaatatatttaattttgtttcaactgaatatgagatagatattagcttgtggcttattttctattttcattctgagttaactaaaacatagtgtaactaaagctttgacaatatgttctgagatcatataaatatccttatccttatctgagccttactgaatctatggagcttaagcttcctattaccaatatatggaaaaatggggagtataagccactttgcataaaaagaggcaaagaattttttagcaagctttgagaaccagatatttggttctatcaattttgttctgttttcttttcccttatcactgatttgtcaaatggaggttgagcatctctatatgtgatcgttgaagctttctcttaaattagaactaaattgttgctgcaactgcagat

SEQ ID NO: 47442 - DNA, 461 bp, Manihot esculenta
  Intron number 1 from transcript cassava4.1_001733m (locus cassava4.1_001733m.g) derived from phytozome v7.0 (chr-ID scaffold10493; pos 1157570 to 1158030 reverse strand)
ctggttctattcattacccaagaagcactcctgaggtacttataaaaatatgacttatttgctttttctcattctttgtgtctctcagtttttcattccattttgaccaatagctatactccttgtgtcctttttttctctttcttcaataaaaacattcttaaaatttcttcttttactaaaattcaaacttgggttttacttctcttttactgtttttatctattacatcatcaaactttgaatgtcttggcagtttgcaccaaacactaatatgggtttggccaaaaaattcatgaatgtatttcttgacatttaatccaaggtgaaaataaaaattcaatgatgtaaaagaaagaaataatcaactaaagctgcttttttttttttctgtaaattgcactaaaattttctgcatcaaagtttgatgtcttcatgttctgcatatgtataatatacag

SEQ ID NO: 47443 - DNA, 725 bp, Manihot esculenta
  Intron number 1 from transcript cassava4.1_002149m (locus cassava4.1_002149m.g) derived from phytozome v7.0 (chr-ID scaffold07301; pos 260957 to 261681 reverse strand)
ctacactgtgggaggctataggacgggtgagattttgaactcaatcatataataaatatagttactatatataatattcttttatatatataagctctctgctgttttcttcttgttataatgtggtgtgagttatggaacagtttgttccttaggaaagaaagcttattaaacttttcttttttgggtcttgtaaatcacacttatcctcatccagctttatgcagcacgtttatgcttggtaggtcatttaaaaaatcaagggacgaatctcatcttacaataaacaaaaggaaccccacttttaccttttttttttaaaaaaaaaaaaaaacaacacaatgttattgtattgtgggccaaaaacattattccctaaaaatcgtattatttacagcaaaattatcttgcaatccataaatttcttccataattaaattatattatatactttagtaattaaggtgcccaactttgtaaatgatattgtatttcataaccactgcaaattaagtcaagttatgtctttaattatctctttacaaagcctgaagctttttactttatctaatggggtcattaaacgatatgggacataattattttttatattaggattattaaaaaaaatattgatacaaatgacactggacaagttgctgatttgatttattataagatatatagatgctaaagtagaggcatgtgtgtgcaggttgtgtcag

SEQ ID NO: 47444 - DNA, 903 bp, Manihot esculenta
  Intron number 1 from transcript cassava4.1_013547m (locus cassava4.1_013547m.g) derived from phytozome v7.0 (chr-ID scaffold05378; pos 25944 to 26846)
ttgtgttgttctggaaaagtctcggtaagttgcaaaacttgaagctatctaatttttaattttttcttttttaacgtttagtttagttttggccggcctccagccctccagtcgatttccgaaaaactttattgaagacgaatggctagtttccaattacaaataaaacgttggaagaccacataatcaaaatgagttgaatgtaaaaattctctaacgttttgtttggaaaattttctagagggatggaaaataaataatattttcatttcattatttttctttccctaatctggattagcgaaagcaaaattatttaaaatattaattggtttattttatattaattcttttatttaaaatataagatatttaatttagaaaaaagaattatttaatttagctttggtcaaagaaaaagtgcggtatttatgtcaggcctcaacaagcgagcttttcgtgtgcacgagtgagctccttttaagctaattctcttcccttctcaaaagcccaaccagaatcctctcagtctcgggctcttgcacactctcacagaaaaaggtccgtcatagattcttcttccactgctcatctactgcacgcaccgatcccgattccgattttcatccttttcgcctttctgatcttttcatatcatcatatttttttaattattgttattattattttggttatatatttacaattcttctggttttttatcttcatttctgctgatactgttgaatatttctgaaacactgcgttttttatgtagactctggaatcgatttagttgattatgagaatatctgatcttaattactcaagttaaatagcagagaaattaattatttgttttgctctggaatttaatttcattattagcagaaggaagaagac

SEQ ID NO: 47445 - DNA, 977 bp, Manihot esculenta
  Intron number 1 from transcript cassava4.1_029109m (locus cassava4.1_029109m.g) derived from phytozome v7.0 (chr-ID scaffold08265; pos 1372797 to 1373773)
tcggcatcgtgggatcacaccgctgtatctggtaatactgctcctattgaccgttagacaatggctacactctgtcgcatctctttgtgtggatgtggatcgaagcacaggtgctattcttctagccaattgtgtttgcatgtagttattgtttgctttcttctgtgttaacttttttgtgcatccatcatctgctcgtgttgctgtcctctgttttgtgatggaggggatgagatcatgtacgggcagtggggcggttgaatggtgatctggtggtttcttaggtgatatttatctatttttttaattgttttgtttgatttgagttgagttggatcgactagttttgctttggtattattatttttttaatttaacgtaatatgatcaagtcatttgaataatttttatattttctatataattcaaaaattttgtgaaatacaaattatagaaaaaacttaattaaatgatgtaataattaaatataatatactacagttttaatttaataataaatatatttcaatttagtaaaattaggagtggatttttttatcttataaataagaaaaataagcgcatggagaataatattaggaactaattgataaattttagaataatatttggatctttcttatactcttttggactcaagcactattaatctaaaaaaaataaaaataaaaagatgggtttgtccaagaaagcacatccgccctttaaaaaaacaatttcttaggaaaatgattcctttgttagattcactcactttaaaaaaacaaaacttattcaatgaaaagcactagttatggctacaacattaattggaaaacaagcttacccaagtagctctgattttcgtctcaaaggaagaggaggcatgatcgacacctctgcactacgcagctgaaagaggaaacttgtttgtttaggcagaaatttttgggagttgggctgaagccatccaagat

SEQ ID NO: 47446 - DNA, 682 bp, Manihot esculenta
  Intron number 1 from transcript cassava4.1_007922m (locus cassava4.1_007922m.g) derived from phytozome v7.0 (chr-ID scaffold09150; pos 53141 to 53822 reverse strand)
ttttgctattctctttctgaagattctgtttactggtaatccttttcctatctctcattactggattttgtgtctgtatatgctttcgatctttgtgctttgatacttttctgatgttggggttttggattggtaattcttttgatggagttagcttgtgaacaattgaagaactgcaagcaatttaagttaatctgtatattcctgaaatttcaaaagatattccaatcttactgtgaactctgtctctttcttagttctactctccctcagatgctaatatgtttatatggaacctaacattttaggtagatgaagcttgcatcttttcttattctttagcggtccaccccatctgggcgatataagataaattcgtattcaaaatctgtgctgcgttgccaagtggctaaaatttgggtccagttttatgttggaactgacatgccatcttcgtttgaggcttaacaatgaacaaaatttccagttggaggactagtgcaccctccttttttattaagtttgaacagtacatcatcattagttactagtaatgtttctcttggtcaaatcacatacattatatagtaattaattttgtgttcttgatattgcttttttataaactgtcttctattttttttttttttttttgtatgtaggtataaacctccttgaatcc

SEQ ID NO: 47447 - DNA, 909 bp, Manihot esculenta
  Intron number 4 from transcript cassava4.1_013827m (locus cassava4.1_013827m.g) derived from phytozome v7.0 (chr-ID scaffold00421; pos 19604 to 20512)
gtaaagaaggaactgtcaccacaaggttcctttctttcctttttttggggcattaaatttttaagatacctttctgtcttttggtgagattgtttctaattggcgtaatggtaatgattatcataatataaatgcttcagaaaattcagtcaaaattctgagatacctttttcttgtgtaatcaactcatcatcattttgcttgtgtatgctagcatttgttcctgctcttaaagtaaggtaagtcatgtggagtatcttaaagaggaaattttctcaaccaactaatttgatgagatggaaaatcaagttttctggagatttttgaaaatctttatttcttcgtaaaaaccatgggttctaccaaatatagatctaaagatttgataccttgaaaaacctccgcactaatttttaaaacctcgttcaaaacaaaggctaaatttcatgtcattgttgtaagctcagccataaattgttagttacccttaggtcccccccccccccccctgtttttattgtttttagaatgcatgtcgattgttattgtgaaagaaccttactcttcctggggtactttattttgtattcgctggtcaaaagtcccttctattcatggattctaccaagtacatttatcttcctcgttaaactctaagctttttagtactcataacaggatgtatgcattaaacgatttgttcacttttgggattaaaattatactcagcatgactattcttcatatgccttagaagcattctgaggttagtcccttgcatttcttggacacttggacgctttgatgtgaaactccctcactttgttttttgaaaagaaaaatgtgagttttcctgaattctcatgacttgtgtctctattttgtgcagggatatcgtggtgcaattta

SEQ ID NO: 47448 - DNA, 963 bp, Manihot esculenta
  Intron number 1 from transcript cassava4.1_021475m (locus cassava4.1_021475m.g) derived from phytozome v7.0 (chr-ID scaffold03104; pos 16913 to 17875)
ctctggacgtgggtgatcgcattctcgcagagaaggtaaaaattcttgctcttcagcttaattcagaattcatatttgctatgaactatatggtgcttatctatcgaggatcaaatctatcttatttcaatcaaggacgttttaacattatattgtagttcttgggttgggcagttgtttatggattctcttcttttttttttttttttaaaaaaaaaattaataaagaattggactagcatggtattgtgtttggaagattggagaagaaatctacgtattgatgtaaaagaatttctaaacttactgttatgctataattttaattcttaatccttgttctttatttattctttttcttcaatcatgttaaacatctttgattctagagcagctgcaaaatttcaagcagctgatagctatttaaagttctgaccccttggataataactgatataactgtgcattgttttatggaataatattaaccccttagaataatattttctttcatgatgtttggttcaatattgaaaatgagggtaactattaacccattaacaaaatgagaggttaaaatttaatccatttaatcattcccgatgttgcactagatggaggtagtgcaatgagttaaaataccagacatttaactattacccctgtaatatataatcttctttaacctcgtaccaaacataccttttgtgtcataagtttattttgttttccactgatgcttttgaattgtaataatgtggacttttattgagaaactggtgctagatgattgccagcactttgaattgttatctgtaggagattatattgatggtaaaggttcttgttatatgctggaccaagccaaaagaaatacaaactgcaatatagtgttggaagcatgaaactctgtttatcttgtaaatgatatgattccccctcttttggtatgttaggtttcat

SEQ ID NO: 47449 - DNA, 573 bp, Manihot esculenta
  Intron number 1 from transcript cassava4.1_032645m (locus cassava4.1_032645m.g) derived from phytozome v7.0 (chr-ID scaffold08597; pos 167095 to 167667)
taggaggaaaaacggtaatcacccacctattgcaggtatgttttttttagcatctatttcatctcgcgtataaattccatgccatttaataagttgttaatttttcttctattttattttcttttggaaatcatagaagaaagttctattccaattgaggcaactgtcaacaaagaacaaggtatacaatatcttgtgaaatttcatcttgcatacatagttcttaatttttcttctattttattttcgtttagagatcaaagaggaaactgctattccaattgaggcaaatattagcgcagaaaaaggtatataatatcttgtgacgtttcatcttgcacataattatcccacatataagttcttgatttttattctattttattttcttttggagatcatagaggaaagtgattttccaattgatgaggcagctgctagcagagaaaaaggtgtaatttttttattgattgatatgttttgattaacaagaaataagtagaatttttatatttaattatattatgtagtagttcaggtgttcggacattttcttataaggaactagcaaaa

SEQ ID NO: 47450 - DNA, 569 bp, Manihot esculenta
  Intron number 1 from transcript cassava4.1_006720m (locus cassava4.1_006720m.g) derived from phytozome v7.0 (chr-ID scaffold02892; pos 145150 to 145718 reverse strand)
aacatcctccattttgcttccactctatttcgtcggtacctctcttccctgctctttgcttgatttatctgtgctatatccaatttttcacaatttttcccctaaaacccttatctgttaaaactattatttaagcttaaaatttcaattttagtggttttttcttcttatattcagctcctttcatcctagggcaaagttcaagatctgaagtagacgcagttcttaatttgattttaattatggcatattctagatggtttacatgaaagaagaatgaataaagtaattcctttattcaataaacatctgtttttgcagcaaggatttagtcttaagctcttcccttgtttttcttggtatcatttatggggaaaattgtactgatttctattattttttaatctgagtttgaggttacttgggaattttccaaagttcttagcttttgggttctcctcttgcccacttaccttaaatgttcattgtgtctgctactctgttttgtgatctttgctttggatatttgtgcagtagtcttccgtatccaatttatcagtaaacttggc

SEQ ID NO: 47451 - DNA, 115 bp, Manihot esculenta
  Intron number 2 from transcript cassava4.1_030630m (locus cassava4.1_030630m.g) derived from phytozome v7.0 (chr-ID scaffold08265; pos 33891 to 34005 reverse strand)
cccagagagttggcaaggtagtctcctcaaccagtgttttttaccttttatttttcttttcaaaattagttttttgtttgacttgatgtttgctgtgcatttttgtctcaggatc

SEQ ID NO: 47452 - DNA, 597 bp, Manihot esculenta
  Intron number 1 from transcript cassava4.1_020552m (locus cassava4.1_020569m.g) derived from phytozome v7.0 (chr-ID scaffold08265; pos 2496014 to 2496610)
acgcttctgcgattcaagtagcagcagttttgcaggtttattgtagtcgagcgccgtaatatttcaactttgtctttaactctttagtttctttaatttagcatcgttaatcatttatctttccgaaacataaatctgatttttgaatcctccattctctctgcttttcttatctgtttgtcaaatttttagctcagaaaccttaaaaatctgcaatgggtatctttcatttgaatgatctatgcatatgtctgcttttttttttttctaattaattttgtcattttcctcggattttggatataattttatcattaggtattgtgctttcctgaaaagcaaacttgattgcttgctgatgtgctttttctttccagtttactggaaacgggtcattaatactagcttcaatttgatctttctattgaagatctgttgataatgtagcttaattatgagacagtttggataatgacttttttcttttgtggcttgttttaaatttaaaaaaaaaagagaaaatattactaacaaaatatagggcaatacaacagaacaatccatattaatgagcgagttcttcatcctgcagtgaac

SEQ ID NO: 47453 - DNA, 964 bp, Manihot esculenta
  Intron number 1 from transcript cassava4.1_000795m (locus cassava4.1_000795m.g) derived from phytozome v7.0 (chr-ID scaffold06598; pos 105547 to 106510 reverse strand)
cccatataggtaatttagctgattatgtagttttatatcaagtgtgtttgagcatatatataataattatttaagttgttcttggttgcactgagtttggttaaggttccgaacaaacaagcgtaaccctgaccacttgtgtattattttggtcatcataatctcatctgggtatgtaattttgaatcttttgttccttttgttgttaaaagattacgggtgcttttggaacataacgaaattaagaaattaaaattggcagggattatgctttgaggtgaaattttgagatgccttgagtgtgttcttatgtgaatgaggctttatgttgctgaaataagttggcattcagagattgaataatgagtggctctttatcagggtaattagcttttctaaaatattgtctgtgaataaggttgacctaacattggctgcaactcttaattaagggcacccgcagacacaccataatgataccatctgcttcttctgtgtcaaagaaaatactcactttttttttcacacgtcccaaagtataggccattttctctttacaaatggtagtttatttattggtttacttatatgcatcgagaatttaaaatcattagtttcaagaatatttgaattttaatgcagcaacgtatttggatggtattttcaaaaagattaaacaaaatttatgtttaactatactgcctatattttcttaaactatgtgaagatagaagtaggtcccatttttatgggacaaagagagtactaatgaaattactactgcttgggaatgtcaagaaatgtttattttgccatattgtgtatttgtggctagtctgaaagtgcctgctacaaactaatatatgtttggttgcaggagacctttccttttgatgtgacacaagttttagtctttgaatcattggcaggacaggtaggagtttctggttgctgtttatctatt

SEQ ID NO: 47454 - DNA, 593 bp, Manihot esculenta
  Intron number 1 from transcript cassava4.1_014569m (locus cassava4.1_014213m.g) derived from phytozome v7.0 (chr-ID scaffold04767; pos 103377 to 103969)
gaactaccaggtaatcttgcttgaacctttaatgtttgttttggcattgcttttagttcttttaattgcccttttagttcagtaacgttaaggatgaactatatattggtttgagctttttgaatttttgtggaacataaattatcttccaagtttgatctccattaatttcaaagaatattatcttgttattgctatttcatgttttgttgctgatttaagctttttactttagatgtataggtcagatattagttttaagatccatctcctctttttcttcaaggtacttgtgagatgtgcaagtttttattggatctaaaattgttgcattttcttgtattcagaataatttgagcatcctggattagatctccaaaagtaggcgactgtgttaatatcttagttgagattgaacttggaactattttcaagacagccaccattgagttttatagctgcaaatttaattgtttctttggtctgatgcatctactgtcttttaccatttatgattatatatttttttctgtgtggctgttgattgtgtttgtttagaatcaagcttccttctggagctaagaagattgtgc

SEQ ID NO: 47455 - DNA, 1012 bp, Manihot esculenta
  Intron number 1 from transcript cassava4.1_015919m (locus cassava4.1_014565m.g) derived from phytozome v7.0 (chr-ID scaffold04043; pos 1285639 to 1286650 reverse strand)
ctcttcaagaagtcccactttcaatattctttcgggcaagtaaacctcagtttcaaattttaattcttgtatgttttttgttttcatttgatgcttctaccctatatatttgctgcaattctcaccaatttttgttctttctaattgttggctgctatttttaacattttctaggtttccttgactgatagaattcattttcttggcacgttgttgttgattctgcattgtattggctgtatttgtgtttgctcttgtaattgctggacaaccaaagcaaacccctcgttgttttgttgtttgtttttaatctgtttatgatacaacaaatgagtagttgcctctacatccagtagctgtgaatctgttgacttgacttctttatttggattttcatctgtttctctcaattgatcctaaaagtgtctgactaataaaacaggtgatatttgcagggggtagttttgagctccttcgatggctgaaatcgtagttatgaattatcatttaagtatgtgaaattagtattgtcttcagtcaccaaaagttcaatcatgttaacttatctgtcttggattttagtacaagagtaatgtggccctctaatatccaacatggccttctttttttctccttaccatttgtatgagttgataacttaataattattctcattaatattttttaaaggaaaaacaacaattaatcttcttttcatgaatggcaatggaaatggtagacacttagaagtgataaaaggaagtaaaaacagaatctaaggaataagtagctgctagtttgtcattcagtatggatagcaatagtcgtaagtgtgcacattgctgtgctccgctgacaatgaagtgactctttgctatacttttctgtgactgggcttgatcttctaaaaaattttcaatggattttgaaacttactatctatgacttttagatcttatgtgagagcctgatttagtgcctgtgttaggaaggtttcagatactcaaagatc

SEQ ID NO: 47456 - DNA, 274 bp, Manihot esculenta
  Intron number 3 from transcript cassava4.1_010830m (locus cassava4.1_010830m.g) derived from phytozome v7.0 (chr-ID scaffold06754; pos 210808 to 211081)
tgttcaaggtatgtttcttttggtgttttcttttatatttagcaattgattgtcatttttgccgaagacttcaataaaaatgggaatttggttatttttaaagggaccacccttttgcctttttgattaaacctttcttgcatacctcctgaatgttgtaattgataactatacaagaaaaagtttctctccgcttggtagaatttcttgtaatttacaagcttgtacatttcctacagggaagagttagtgttgttgatatcattggatttac

SEQ ID NO: 47457 - DNA, 902 bp, Manihot esculenta
  Intron number 5 from transcript cassava4.1_010830m (locus cassava4.1_010830m.g) derived from phytozome v7.0 (chr-ID scaffold06754; pos 211370 to 212271)
gacagctgagctttagaggcaagagggtacttgaggtaactaattaagttactcaaatattttgctgctggatattttctatgctttgactttatgttttaacatcttactggttgcattcagcaaaatccaatatttgataatacattggacacatgagatgccatcatcttaacattagcaatcatattatcattggaaagatgttgtgagaactggttctttgcagcattattagatggataagaattgtttgtctttgttcgagcttgcatttatttgtttaagattatagtaacatataaattgactattatgactctatttaattttatcttatttccaaaacaacctctcattaattgttatttttctaaatgagtattcaaatttatttaagatgggtataattggaaagttaataaaaaaaagtatttttcttaatatgtgtgaaaaagtaaagtggacaaaaattattggacagagagtatattttgtgattttataatggactaaaagaaattggctggcattgactagattaaacctaattcagcatttattatttgttattgagatctaattccaaaaactatgttgttggagcctgtgattataaatttgtatttatatgctttctttattgaataacttttttgattctgatcaatgtcctagttgtgcctttgaattctcctattaaatttctttttagtgttcactggtcatttttgaacaattaagcacggacattgctttctttcccaaggagatttagaacctactatattttctggataccatgcttctctgataactcttttttccatttgaagtaatgaacaatatcagatgacagatgatctctttatttgtgttttttttacagcttggttgtagct

SEQ ID NO: 47458 - DNA, 815 bp, Manihot esculenta
  Intron number 2 from transcript cassava4.1_027033m (locus cassava4.1_027033m.g) derived from phytozome v7.0 (chr-ID scaffold07896; pos 99389 to 100203 reverse strand)
tcataaaacggacattggaagggaaacccttcttggtaagatcaaacatcgcaatattgttcttgttgtgcacaaatgatgttgttttgaagattggtgaaatttaagaggatgctagagtatatttagatccaatgcttgtttcaattcaatctagattttttgttggattgcaaaatttttctttcaattgttaggattcacttcaaatttagaatggtcagtcactgattccatcagctatctgggttagctccctcatggaataagccaaaaatttcaaaattttccaaaatcaaacttgcaactttgctattaatgcaaatatgtgcgtgtttgtgtttttttgtttctggcttaatgacttaatcacagaatattggccccacatttctttcctgagaacttgcataagatgtgaatttgaattttgtcattcttaaatgccttctaaatatatgaagaatcatggatggagatggtttgtctttgctgatgccatgctttaacaatcatttgtattcatatttgtgtaatgctggactcttattaggtttagaatcttaaacaagaggatatttgtagtgttgctgatggtatctttctatttagtaaaagttctattctaacacattcttgagtttgaaaattgatatccttctctcttgccttccccctcttttatcttggttactgcatttattcttgtgacaacttggtcagtgttagtttccaagtggacattcttgtttctattacttttagattttaatcatggttactatagattgcaaatttttccattgttttcagga

SEQ ID NO: 47459 - DNA, 452 bp, Manihot esculenta
  Intron number 1 from transcript cassava4.1_027033m (locus cassava4.1_027033m.g) derived from phytozome v7.0 (chr-ID scaffold07896; pos 100292 to 100743 reverse strand)
agcacgcctccatcaccaggtgttgttattcttccccctccttttatcttcacgagtgatggaagaattgctaaaagttattttatttatttgtttgtttgttttgattttatatggaatcagtatgtgcatcgtcagaatcaatattgaatttgatatcagtgtcttccgttttaatcacggttttagttatgtgaattggtgttttgtttgtttcgtgagaaaatttgaacgagaaaataatcatagctttaaatattatggtccctttttatttgaggtaaccactattcaaaatgtttggaaagacgttttcttttgttttacaactttaaaacttttaagcaaaaggggatttgcattcaatcatctgtagtaaaattgtgcttagaattgaaaaagaaagtagaaggtatgaccttgtgcatctttgcatcgctagatttgtgaag

SEQ ID NO: 47460 - DNA, 1002 bp, Manihot esculenta
  Intron number 1 from transcript cassava4.1_020299m (locus cassava4.1_019524m.g) derived from phytozome v7.0 (chr-ID scaffold03237; pos 246513 to 247514 reverse strand)
aggtgtcgctttgcgtattgggattcgcaaacgaggtaactctatgctttctgttagttaatatccgtttttattgctcttctcactgttctatcgctcactttcgggaaacttactgcttgtctggcattttcagctgattgttttggtagtttattgcatgcaatggcaggaaattttcaatcataagatgttcttttgaattgctcagtttttattaagccacttattttatgcctctgctaaattcaaattcaaattcaaatttcccccttttggggcagggaggtattagttcatattggtggttcttggagctgatggggacgctaggtcccggtgttatatagaagttgtcagtgaaaatttgagtgcctattttctttaaatgtaatttacttttcatttcgatgttaagttcgtttctgtgctggtttcactaggttaattcaaaaaatagatctagctgaactcaaattccactcagttatgagttagttcaaacaaaatacagaactgtaatataaaatgattaaaagcattgtcattaaacaaactatttgcaattttgtgatgctctttctttctgtggaaaactttttgactctgaatagtaggcagtctgctattaccacattgtgctgggcagcgaaacttgaaaccggtagtcaaaaccttgatctttccaatcctcacatttgttgtcaaattaaacgttctccctgcaattgatcatgggagccaaatcttgatctttttctatttttatagaattggtcagcgacgtgagggctacaggattggggaggatacccagttgatgaaatgtccttagtaagacacagtatttattttggagaattagatagttccttaaaaattatctatcatgtccagtgtgctttttattatttcttgatttgttgcgtttgtttttattttattttttaatttttatctaatgtttcgggggaacaatgatagggctactgaagctgcatc

SEQ ID NO: 47461 - DNA, 420 bp, Manihot esculenta
  Intron number 1 from transcript cassava4.1_033750m (locus cassava4.1_033750m.g) derived from phytozome v7.0 (chr-ID scaffold08265; pos 745051 to 745470)
tacgataaattcgacactacttaccaggtcatttcttctcttatttgtttatttctctcatttcctgttacttctcaattctctctatgtttttcttgcctatttttccttgtttttggttgaattcttcttgtttgttatcggagaattgggttctcatttaattttgattggagcaaattgaggaatgcaattgattttttttatcttcagatttcagatggatctgaatgaataatttcttttaaaaaaaattatatttattggaggatttgctggtttaaatgaaagatgaaatggcctgcttgctggagtattgtttagatctatttcagggaactgcttattgtttttagtttttctttaatcttattatgaattgcaggcaaccattgggattgattttttgtccaaaacaat

SEQ ID NO: 47462 - DNA, 815 bp, Manihot esculenta
  Intron number 4 from transcript cassava4.1_013964m (locus cassava4.1_013964m.g) derived from phytozome v7.0 (chr-ID scaffold03235; pos 418767 to 419581 reverse strand)
ctcgtttgaagatttgtgattttgggtactccaaggtaattacttattatctacacttcctcttctttcactagccccctcctattctcattgttattatgttacaacatctgtgggccattggacctcaaggtttctggtgcacaatatcaagtctgagatctatgccattttgaataatgaaaatgcactattgatataggacgattcaagaattctggtttttcgttgagatgctttatatcacaatgaaatgctgaaatgattgagataacttcaagttctaaaatcttatgggcaagatgatttatagtgttggaattggaaggggacaattggtacttcatcgattctatggaggatgtcacatgactatttcttatttaggcaccatttagttaactgcttactagagttacctttttgggtttttgctgttttcaaagcaaaaagcaataactgacaagcaacaagcaatcattggttagagaatcattggttagacaactaaaatattactgaaaagccaaaaaatgtgtttacaaaattagaaaaattaattcccttcacattttgcttttctcatgtgaaattgtgaattgaaaattcttgcaagcatacatttttattctcttttctttcataatgaattccgaacttcagcaacttgctaattgtcttccttctttttatgagtatttaggaccactaatagtaatagtagttttttttttcttttaattatttttatttttattgcatctatgggtgtttttccagtcttcagtgcttcattcgcagccaaagtcaacagt

SEQ ID NO: 47463 - DNA, 633 bp, Manihot esculenta
  Intron number 1 from transcript cassava4.1_012022m (locus cassava4.1_012022m.g) derived from phytozome v7.0 (chr-ID scaffold10563; pos 1210185 to 1210817 reverse strand)
ctcttgaccctccctcttcatcacccgattcccaggtaatttccttcctttctattgatggtttcattatcaatctcctgtttttccctcatatttaaagaatgtagatctgacacaatgtagttatgcaattgtatttgtgtgtgatcttctggattgttatttggttttgttggctcttttgattgaattatatacatccgcagcaaataataattgggtattttaacttctcccatttttcgatccttgggaggaaaaggaaatcactgtcatggcctacttgatactggattgttctatttgagattactttgatgttgctgaagtatggatgtgctatctatgtttgtattatatgtttggtagctcagaaatattgacaagaggaaattgaagacttgtttcgtagctgaattaagaaaagtagacagaaaatgcattttttttaacccaagaaaacccaaaaattaacattttgttgtatctattattcaccattttcgaggtattgcatgcattatagataatataattgattttacttttcttttctattttccttgcccttgtgaattatataattttgttgtgatacaagatgtttggatgtgtaggccgggtcgttctcta

SEQ ID NO: 47464 - DNA, 434 bp, Manihot esculenta
  Intron number 1 from transcript cassava4.1_018804m (locus cassava4.1_017968m.g) derived from phytozome v7.0 (chr-ID scaffold05214; pos 614609 to 615042 reverse strand)
ctacactatcaaaggcaccaacaaagttgttcgacgtatgtactctctctctgtcgctctctctattggtggaatctccattattcctttttggctttgggaacccatgaatttctcatcttttttccccccttttagaacccatattctcatattgtttcctttttttgacgttaaagattttgaaaacccagtattaatggaagttttcatactttgtttttcatcatttttaatgttgggtcatttgttttcccgtttgggtctctgaagaccgtggaagttgcttattttattgcttattctcaaaaaccccaaaatcccgtttttatgataatttttgaactgcccattttgcagaaatattgtctaatttttattttttgatcattcaatgttttgttcattttgttgcagctggtgattgtgtgttg

SEQ ID NO: 47465 - DNA, 435 bp, Manihot esculenta
  Intron number 1 from transcript cassava4.1_026129m (locus cassava4.1_026129m.g) derived from phytozome v7.0 (chr-ID scaffold10493; pos 266421 to 266855)
acagcactggtaagctctatttgttttctttaatcatttttatttctgcaagggtgtttctgaagattagcagttactgataacatgctaaatatttgtgtagacctgttgtactatgaatttaagttattttcaagatacaaataaatggatctcagcataaaagaaaaatagatgaacccatttcaatatttattgagttcataacatatccactaactaatctgcttcaaaagttttctcaatttcctgaatgataattatgttgtcttattttggagtttaaaaactattcaatattcttttagatccccattttaaaatggaaaattcatcattgcattcaaatgataagacattctttgttcattagttctgccagtattgtttaagcttgcgttgggtgattttgcaggtgaagtcattaaccactga

SEQ ID NO: 47466 - DNA, 469 bp, Manihot esculenta
  Intron number 1 from transcript cassava4.1_006016m (locus cassava4.1_006016m.g) derived from phytozome v7.0 (chr-ID scaffold04043; pos 981504 to 981972)
tcccatttcaagccgatcaaacaccagtatcagaggtaaccaactcctttcttttgtagctccagctccctcttgttctttgacaatgttgaaacttcttggttggatttgagccctggtttgtctgtgtgtttgatgtgaaccgaagtttcagtttgctttattctgtacgtttgagttcatgatggtcgtaagatctttttgattacttgatttactgggtgatgatgtcaattccttcaagaacccagcaaaatgaacttcggtttgcaccttctgttgctcttctaaaatacatcgagtacgaatgcttggacctgtgtttggtaacttgagacctcaaaattcaaatcactgtaaaactttgctttttgcatagcatgatttttccggtcattacctgtttattctattaatgctttgttgttgtgaatgaccttttggttttccggctgataggtgagaagca

SEQ ID NO: 47467 - DNA, 750 bp, Manihot esculenta
  Intron number 2 from transcript cassava4.1_004413m (locus cassava4.1_004413m.g) derived from phytozome v7.0 (chr-ID scaffold02264; pos 149409 to 150158)
ggttcgacccccaaagcagaaggtacattctattttatttttaatctcatgtgggttctgcttctgcttttgctttattaattatgaaatacttgcttcaatttgtgtgctggtactaaatagattattagaataatatggaatttaaaaaaaaaaaactgattagtatatttgcttcaaggctaatacgttcactctgctttcttgtttcactccattaaattgtttactcagtttgatatccttacggctgctgatgcttgtgattattgactatgactactaatctctgttgggcatttccttatcgaacatgcatgcgttatatttggttacatgcaatgcattgatcaggatcatcgatacgttggtttcatatttcctcgctttctttctcccgtgataagcaccgtttcaaatcaagtctcttgtagtatccttgccttagccatcatatttttttttttagtgttttccacaagaaaagtttgtcttttacatcatattcaagaagaataaacctaatattggctgtcgtgaggtttttctcttgcaattatcaataagcaagtacagtctctgctaaatattcctcggaaaacgatattttttcttctttgtagcacagcatattcatgttctaatatcatgctcttttccctcattcatttaatctctctctctatcgatgttattacttagatttttgactggtaagtttgattttgtcttcttgtcctttcaaagaga

SEQ ID NO: 47468 - DNA, 689 bp, Manihot esculenta
  Intron number 2 from transcript cassava4.1_001263m (locus cassava4.1_001263m.g) derived from phytozome v7.0 (chr-ID scaffold02871; pos 518219 to 518907)
cgtccacttctcagccgtccgactccggtaagcttgtcaattttgattggaatcatgttccagacatagtattcatttgtaattggcgtttttgcaatttttgctgttcctgcttttgttttatttggattgaatactgtgtttggaataaattatacggaattcactcgcaattttatataagagggtcgagcagattctccaagagataaacatgagagttaggatagcctaaatcatgagctctttcttttttcgtttttggactcacattttcaaggtgcttatggttgctctgaatttgaggcattagttgcattgttttgtttatttattttttccactttaggtgtttcggtatttgaatctagcagtaatttaaagttgtaatttggaattcgaagctagttcattctgttgtaattgagaattctttattttcatatagacttgtaagatgttttcccttttcatagttcccaaatgacaagcgtacaatttcataactagaaaaagtaacatctagcagtgcaggagagatattttgtgaaagataagttctcaaacattcctgttaaatgcgtttgcatttcttttatgttcattttctttgctttctatttttcctacttggaagctttttggttatttgtgacatgtgcaactcaaaactgtagcagttttatccc

SEQ ID NO: 47469 - DNA, 575 bp, Manihot esculenta
  Intron number 2 from transcript cassava4.1_016420m (locus cassava4.1_016419m.g) derived from phytozome v7.0 (chr-ID scaffold03572; pos 111811 to 112385)
ctccgatatcttctcttggttcactcaatctaaaggtaactgggttcatcttagctcgcattttgtgtcttttcagtaatttgggatggaaactagacctttaatgcctcattgaatttattataacaaaattttttaatatatgtttgttcattaatagtatgaatcgttgatttcagtaggaacaacagtcttcttttctgccttgctccctggatgtccttttagtctcagaaattgaaagaattttgttcttatttgcgtccatgatgtgaattattttggtaattggtcgaattctattaatacgtttaacttattttcatagctttaattattactcaggattctcttttcatggttctgggttttgagtttcaaattctttaattgaaagttttttactacatgcataaaatttaggttttacttggatttaaggaaaacaacaccgaatctctgatcttgactgttattattttctttgtgatgatctgtgcttttaatggttcttgttcttcctcctgtttcttatgtaccttctgtactcactctcgcagagccactctacatcg

SEQ ID NO: 47470 - DNA, 536 bp, Manihot esculenta
  Intron number 1 from transcript cassava4.1_020177m (locus cassava4.1_020177m.g) derived from phytozome v7.0 (chr-ID scaffold08265; pos 3712402 to 3712937)
cctagggtttctgctcttcaaacccatccaaagtactttctatgatccatttctatcttcatcttcatcttaatctatgagattaattatacattgttctgtgtttatgctttgttctctttttctgcgattgactttttttttttttaattacttgttttactttcttattgccttcagacacataccctaagctcaaagttcattgctttataaaacccattgtgttaaaattgcagaggtctaggctctagctagattgtgccttctgtgcaagaattcactatgcctgatctcgtttctttaatgttacaatttgtatttttaatttaaactgaatttgaattctgtaactcatttatttttccaaacatgttaattggaccgaatctataattcactctacttttaagcatcacaagacgtctgaggactatcaattttctccccgtgtgctattacagctaatattccttttcccccctcttttgttttatgcagaccaagaggaccaagaaggctggtattgttgggaa

SEQ ID NO: 47471 - DNA, 922 bp, Manihot esculenta
  Intron number 1 from transcript cassava4.1_021025m (locus cassava4.1_021025m.g) derived from phytozome v7.0 (chr-ID scaffold05214; pos 163821 to 164742)
gaactggtgtgagaagtttaccattgtagggattagatgtcctcattgaatgtcctttttattgatgatgaaagtagttttgtttaattttatcccattggcattcacatagtttagagctgccagcacagccaagatttgtgtttccaagtccaatgacatatgggctgcaaaaggcttaaatgcattttaagagatctattatatgtttctttgtgatgattttaaggtaatttttaacttttctcaaatttccaaaagaatctgttagcctccatttggaattaaaaatttcgcaagaatttaattcaattgattttttttttctgataattctattgtttggaaagaaagattcaattctttttaatttaaaaatttttcatttcaagagaaattgaaatcttgtatgattttataagaattcatttgaattcttttcttacaaaatgaatcatgcaaaagcgaagggtaagagaatatggatcataatttgacctttatgtttaattgatgaaccacatgaaaatatgggtggaggcattggattcccaagggttacttttgcgatgctaaaccgtactttagtcttgaagtatttattgttgattaaaaggtttggctgtcctacttcagactacttgatacaagctatcaagtttctggatcaatgattaggctgagtgaccatattcaattttctttcttaccagaacaagtaaaatggtagtggtggttaaagtaacagtgagagacagtgctaattacttgagaaatttgtgccaatattctttggcttgcaattgtttgaaatgcttctggtcatgtacatggatcatataaaactaacatgtgtgttaaattttttttttcccccataaaacattgttacttagtttgcttgtttccacgcctgcacagg

SEQ ID NO: 47472 - DNA, 955 bp, Manihot esculenta
  Intron number 1 from transcript cassava4.1_015362m (locus cassava4.1_015362m.g) derived from phytozome v7.0 (chr-ID scaffold09218; pos 40847 to 41801)
agcatcccgagaggaggctcaaggcctcgtttaaggtgcgtttggctgcatgctattgcagagtcttgagattgcgtttgtgtatttattttttcctggtatatattgagattgcttttatgtattctgagattgtgtttggctgcatgctaatggttttgttgaaagtttgagaattttcgaaatgttctgatggttttggaaagggtaataaaatgtgggggaccttgctgtgtgcagtcttgcccaaacttgttgggttgtttggaagttgtgggctttatgtttaacagaactgattagataggtgagtaatgtgaatccgtgtgtaaaattttcctattgaagaacatagaagtatacatatggagttggacgatcttcctgttttttggatcacatagctattacgtgaaatacaaatttcttttaaagctagttagatggctattctgtccaatcatggattggcagactaagtactctaattttgggaatacagggatggctatcttgagttttgaggagctggagtattaaatttgtgtgagattttcaaatatgtaatgagagtttgtttgatcttggaaatttaatacgaatgaaagaaaattacttggatgccctcattttatgatttgtaattgaaaatctatttctgggggaattaatgttttaaaaacttagctgagatttccatttcaaggtgaactaaatgtgtcctttaggcagggttgcataggatatatagaagttaagtgctttgtggtagcctgtgaatgttctatggtgtaggaaagacttttcagaaataggaaactgtagctataggaaatacaattttatatataaggacatgtaaatgctttttttgccgccttcttttgttgattgtatgtcaatgttttatatgtttgtaggcttttgaggaagttgagcttcctaaactgaagga

SEQ ID NO: 47473 - DNA, 653 bp, Manihot esculenta
  Intron number 1 from transcript cassava4.1_014760m (locus cassava4.1_014694m.g) derived from phytozome v7.0 (chr-ID scaffold11960; pos 76364 to 77016)
ctctgccttcttctttcgtttcctctccattttgggtatggctctgtaccttttctttttggtgggtgtttacttgcataattcgtgcttctatctccatgaattttatgtttctttacttgatttgttgcttgttgatcttggttactctctgatgattttattatataggaagtagaagtctttagagaacgatttagggctttatagttttgttttgttttttttttggcttagcttggtctcttgatgaattgcttatttgggggaacttctgcttcagctaaaagcaatggtttttaaggttccaaaataggtttttttaattaaaatctgaagaagattttggtatagtagggatattcttctttcgttcttagatggaagccgaaataataaaccacttaagactgtattctgctattaatgaagctttgaagttgacttttgagttcgaaggagatgccaaagtaatgaattagagtagaaaacgtgtacacaaggaaatatagttcaataatgatatctgattttagaagtaaaaacatcattcctggtggaaatgattttttttttttggatgagatgcagcaaaatcagttctaagttctacttatgacaataatattcagttctttttagagactacaact

SEQ ID NO: 47474 - DNA, 814 bp, Manihot esculenta
  Intron number 1 from transcript cassava4.1_017595m (locus cassava4.1_017595m.g) derived from phytozome v7.0 (chr-ID scaffold09274; pos 7992 to 8805)
gggaggaactatctgtgctctgtaagcctcttctatttactttttgaaatcctgttattctttgcaattccagctttgattgccaattgttactttcttgactgctctttcaacaagaggacgaaattggggcctttgtatattgtccaccaagctttcgtataaatgcattaatgagaatctgcatactcttaaatttttgtgaagctattgctgaatttcagtgatttcatttttggctaattcttgcagagttttgacaacaccccctctctctctctcttttcttttgatgtttatttttttttttttaatttcagttctgctttgtttttgtgttgaaagtaggaattggaatagtgattgcataagtgctttgagggtccatactggatttctttatcaaatcagctgttacctaggattaaatgcttcatgcaaaactagagattcaatttatgtcgctgcttatgataatcacttgcacattcttttggattacttctgttgctaaggattagtgattcatatgattgtggcacagaaatgggaagttttgtgctaacaaaatacattgtgaggtggattgggcagtgatcctcttggatttataaattttaatggcttttccctttaaaatccaaatacgtgtcttaattcattcctcattttatagttcatatcaagatagtcttgaatgtcagagacttcattcttactctcttgttttagcattctcttatttgagtgtgcttattatttttctctttactctacagatttttgttgatccttaatcgaacaggacgtagat

SEQ ID NO: 47475 - DNA, 805 bp, Manihot esculenta
  Intron number 2 from transcript cassava4.1_000207m (locus cassava4.1_000207m.g) derived from phytozome v7.0 (chr-ID scaffold02871; pos 266109 to 266913)
cttactcaattagaggtaaaatcttctattgcaagtaatttcgcctttaatctgatatgcttgtatatatcttgcagcctgaaggcaatgaagtgttgctgtcaaatatatgcattcctattgattgcatctgctgttcaaatgtccgggtgttcagtggttttcctggctactgattattggactgtgggtcatcattgtggaggctattattgatttcctcaggaattaaaccatagaaaaattaattttggagaaataaagagcttatcattctcaaattttatgaaggtcgtatccaatggagcaatctctgaaggccgaaaatgatgctctatttatattttgcttactcacataactttctacataagtctttcaattcctatgaaatttaccttctatatttgatattccccttacctaaaattcctataaatttaccatctatagaattgcaatgggtgattttgttggcttggatgctaattgcggtgagcaatgcctcttatgccttattttggcagggtagagctggcttccctaaaatttttgagatgattcagtcagactgtagtctttatgtgtagcctccaattctcaagactttatggcctggtaactggggttagtgattctggttgggacgctatttgtcttgagagtcattagattagaatgttcagctttcttagttactgactctgtagttaatgagtttatttttctttctatatatattcctatgccctttgtattaaaaatatttacagtggttactatcttcaaatgtagcttcaagttg

SEQ ID NO: 47476 - DNA, 949 bp, Manihot esculenta
  Intron number 3 from transcript cassava4.1_009631m (locus cassava4.1_009568m.g) derived from phytozome v7.0 (chr-ID scaffold02892; pos 1170632 to 1171580 reverse strand)
agtatcacctccagtgcatccttgagtatagtataatatattatcaactctactcatttttttccttttggacgcttataatttctgcaaaaagtgctatttgtgttctacgatattaatcacacttaaatcgaggctaggaatttgtggggggggggtgtgattgatgcatcattatcttttttttgttttttttttttcatttatccttaagaactgataggtttaaaactgtttagcctatggaacttggtaatttgatttagagggaggaggatcagaggacttatttgtaaatgggaaaaaatagacatttgaaacaactaagactagttgttgcttgacatggatagtaggcaacatttaactttgatatctccaatggtatgttttgcttctggtccaatgcaataggtggtgtatagtttgttctttgttataaagccataagttttctgatcatcctactgccatttcccctttcttccattggtttatattatatctgcagtttctctttttaactctttggttggtatggtattttgtaaagatttttgtaattagtagcgctctggtagttttaattcaggcttctttgtgaaattcctttgggctttcttttgttggtattttacctgttttcctagtttcaatagcccttctctttcttccacaactatgaagtgtgggtctcaaccagttgaattcttttcatatgttgcccgagttagtgctctctgttttcttcaatagattatgatttgtggagtatttggtccactttatactttacatccattatagcctttcataatggaaatttatcagatgtcaatgcgaatcaatgaggtgtaaaagagtcatggtgaaggaaaggggaaagaaaactttgacattttgcatgtgatttttcactcgtaggtgtcagagaagctctgagtgtccc

SEQ ID NO: 47477 - DNA, 946 bp, Manihot esculenta
  Intron number 1 from transcript cassava4.1_009631m (locus cassava4.1_009568m.g) derived from phytozome v7.0 (chr-ID scaffold02892; pos 1171853 to 1172798 reverse strand)
ccattttctggagcttttccaatttctcattggaggtaaactcatgtttttcttctctcttttccctgttgaatttccatgaattttttttttgtctcgctcccctttctgctgtaaacgctctgttcttttgatggggtaattcattttatgttcataattctagctaaattttgttggatacctttgtgcctgtcagtttgtgttttcaaatgttctgattgcggttctcttatcagtttgtgaagggagtaaactatttgccttagcttcctggatcttaatacccttttggtgctgaatttttcattcagccttagctccatttgtatcactaaaaatattatgtaggaaaatatttttcacattttcttacgtttgggcactcaaaacaattggtcaatgaaaaatattttttctgtcaaagaaaaaaattacttccgaactttgaagatcttgaagaccgctatatataaatttgttaatatattttattttttaatagaattttaacaatggaaaataagttatctaattggaaaatatttttcaaatttaagttattttcttcaaacaaattgaatcttagttttagtttgacaaatagggtgtaataagattaagctcaggtggagaagaatattgcatccagtcaccaccattagtttggccttgtttggtaagaaaatggatttatttactttttaaaattttcagctcattggagatgttagatgcatttgagtttgcttatcaatttaaggaattaacttttaggaactgcttggagttgcaatttcctttttttttggcttaaaaatgttgtattttcgtgaaaaacatgaactgaaaatgttagttggttcagttgagcaatattttttctttttgaagtttggctcgttttgaacttcacacagattttggtgcttcaaaggttctggag

SEQ ID NO: 47478 - DNA, 621 bp, Manihot esculenta
  Intron number 2 from transcript cassava4.1_015996m (locus cassava4.1_015996m.g) derived from phytozome v7.0 (chr-ID scaffold08924; pos 135270 to 135890 reverse strand)
agggggtgacatttattcaagaagtaaacgtggtatccatattcttcttctctttttgtttaacttctgtttctagttccaacctgcttgcacttagagaagtgtccatgaccatcactcatttttatctcctagaggcggctagatgtattcctttatctgtaccttttttaaaataccttagacaattttttcaatgtgctttgatgattttcttgattcaattaacttattcttgtattaaatatataagttaagaaagataatgatggctgtaaagcttttcaatatgatagctaaaagtgtggcagattgaggttatcttttccattggggattttgcaccctggatagaagagggtgcgtgggaggatttgtgacttaagtaatcagattattgttattattattttttaagtttctttgcattcagttgcgtaggtccctattgtatttcaattagaatgttctttgtttttctcctctgcccctttttggacaagcacagggttctttattgctcttttcccataaacttcaatattctgttcaaaattaatcgtgtcatctcaatttcatattgcaggcattagatttcgtcttgtatcctataacattttg

SEQ ID NO: 47479 - DNA, 477 bp, Manihot esculenta
  Intron number 1 from transcript cassava4.1_033661m (locus cassava4.1_033661m.g) derived from phytozome v7.0 (chr-ID scaffold05133; pos 9570 to 10046)
tgtcactattgacttccaggtattcttccagaacttcttattcttattgatgcatcagattactttgaaaatccgaggtttgcttgattatgtgaactcttgctgaaattgcattaggcttcatttgataggtgtgaatttataataataaggtattcaatttggatattatttgaaagtttataattataatttaaaagacaaacccaatcatcaatcatttaaatgcacaccaacagattatagattcataagtcatagaaggatattttgcaaaattagaaggatgtttgtgcatctctcattttttcaagagctgagtgggacatttaaaggagtgttttactgtaatatgaacattgcaaagatcatctaacgtatagggttgaaattatcatttggggattcctactgttcatgaggcttatcatctgatgttatttgatgtggttggcacgtgcttcaggtcagaaaata

SEQ ID NO: 47480 - DNA, 437 bp, Manihot esculenta
  Intron number 3 from transcript cassava4.1_012451m (locus cassava4.1_012451m.g) derived from phytozome v7.0 (chr-ID scaffold08265; pos 4652956 to 4653392 reverse strand)
gggcattaaattataaatattttcttctatttttggtaagttatgcttcactgcctatgctcacacatcttgtttttttttaatgtgtagctaagtggggagctgtctcttcttatgtacttacaatattatttcaattagttttcttaaatttgagagaaaagaaagcaaatgcttttagtgaattatttttcttaaggtcctggaaaatgcaaatggatagagattttctaactgagtttctgagtaaacaatcttggctctgattttgttttcttgatgattatgctcttacacttgtatgaactatggtttctcaaagtttagattcagtttaattttttggtaggatgggaccttctcttgacatttccttgatagtaatcttaattgttaatgcagttctacacatttcttgagacaagtcttgtgacttt

SEQ ID NO: 47481 - DNA, 476 bp, Manihot esculenta
  Intron number 1 from transcript cassava4.1_003715m (locus cassava4.1_003715m.g) derived from phytozome v7.0 (chr-ID scaffold08542; pos 231239 to 231714 reverse strand)
cgcattttcagttctgatcaaattccaccaaacaggtttctcttcctctttctgtggctatctctctaccttctcttctttttaatggtttctagctagattctggatgttaattttgcttcacttttgctgctttttgtcttcaaaggataatcaaatgtacgctgtcctcttatttatttattattttgctagcttttggtttgtctaatcgcattctgttgattgattactgttatttatgttttcaagatcttatctgatttctttgcttttagattagtataccttcttagcttttttgcttttgatatcgttttttgtgttttagttgaactttttgatttgatagcgtttttttcatgggttattgtaatgcaccattttgttttgggatttatattgtttgttttggcttgatcttttttgcattgtgattggtttcaggttttttatctggaatttttatagagtac

SEQ ID NO: 47482 - DNA, 479 bp, Manihot esculenta
  Intron number 3 from transcript cassava4.1_008732m (locus cassava4.1_008732m.g) derived from phytozome v7.0 (chr-ID scaffold06814; pos 590104 to 590582 reverse strand)
cacatattcactggtcatactggtaagtttgtggaacttttatatctattctgttaaaggattcctttttcttttgtttctgcatctgctctctgtagtaaattgaatttttttaacattttaatttgaagatgagaaattttttgaaattgtttatatgggcaaagctcaactcaaatgcttgacatgttcataagttatttcttaaccaagaagaaagactataaccaaatttaataatcacagcttagcctgcaagggaattttttcctcgatgttgagattggaaagtggacttagagttagggttatcggtattattgaatggcacatattttaattttctttgatttgatttttgtataatttcattatggaaatggtgtatgatatagattcaactttcatgcattataagtattctcgcttcccttctctgcacaggtgaactctatacagttgcctgcagtccgacagat

SEQ ID NO: 47483 - DNA, 546 bp, Manihot esculenta
  Intron number 3 from transcript cassava4.1_019052m (locus cassava4.1_019052m.g) derived from phytozome v7.0 (chr-ID scaffold03037; pos 6064 to 6609)
gaagtgagctcaaagtcatttactgtatctactttaatttttctcacttgtatcctctattcatgtttgaaatttagaaacagataccttgcatttattattcacatacctcttacaaaggcaactttgaattctcattgtctagttctgtcttgcattctattcttatttcctactgtcctcacacatcaagcaaagttctttggtttctgtattagtttttgcttcgtattttctatatacgagtactgttcttatttcctactgctctttgcatgtgtcaaacaaagttctttgatttttgatacaaatagatcttccctgattacctctgtgatttgtataagataatgtagacatggatcctgtcatttgtttgcaatatcccagatcagttttctgctaggcatcatattaaactgcttgattcagaattttattctttcttgttaaaaccattaagagaggatttgagctcacagaagtttctatctccctgtcaaaatattaggtgctatagcgtgttcccagtgcaaaggaacaggt

SEQ ID NO: 47484 - DNA, 217 bp, Manihot esculenta
  Intron number 2 from transcript cassava4.1_017647m (locus cassava4.1_017647m.g) derived from phytozome v7.0 (chr-ID scaffold09294; pos 266955 to 267171 reverse strand)
aaaagggttggatcccttgccttgaattcgatcaggtaagatgatgggttttcttttcttccccagaagatactaaagactgctatgattttttgctttttggattaaagaacgtataattttccaaaaaaatgttaaaaattctcctgttgagtttctattatcaaattaaattttcattttgttttatttatttactcttaactctaggtgggac

SEQ ID NO: 47485 - DNA, 623 bp, Manihot esculenta
  Intron number 1 from transcript cassava4.1_015223m (locus cassava4.1_015223m.g) derived from phytozome v7.0 (chr-ID scaffold02936; pos 96966 to 97588)
ggaccgtctcttctccatctccgatctaccgctccgtaagctccgatctattatttaatcattcatgtctggtcatgtcaaataatcgatttgattattgaggcttttagagatttattgattttttttcttttttctcttgcgcaatctcatatgcatgcaagtacaatggtgtgaatagaaaaataatttgagaacttttttaatttgtatgaatgtgcatactgaatagtgtattgggctgctgagagaactgaagaaaatgattctaaccttgcagtgtttattctttcatttaattaaaaaattgaaaattcccagcttgtgtagatctagtttatacccagaaattcgttcttttatttatatgataaaaattttagttggattgatccttttccctccatgtggctgtgattcatttcaattcaaatgaattcttatgaaatcttagattctaaacaaggcgtttatgattcaattccttgcaaatcatcaacacttgttaattggatttagttatagttgatcttggtttatgctggtctgtatttgttattgactggactacaccttttttctacttagccttaacaaaggcatatttccaggagagagatcaa

SEQ ID NO: 47486 - DNA, 824 bp, Manihot esculenta
  Intron number 4 from transcript cassava4.1_015223m (locus cassava4.1_015223m.g) derived from phytozome v7.0 (chr-ID scaffold02936; pos 98284 to 99107)
ctagtatgttcttaataatttgaaatatgtgctattcttctttgctttacatatatatatgtttccttgtacattgttaaatgtgcatggaatatttcttgatttttcaatgttaaaatatgcaaggtatatttcctaatattttacttgtgttcctcctcgtcactctatgatactattacgttgaggttttatactgtggggccactgatggccaccaagtgtcagagataatgagtgtttagcagccacttgatttaaaggtctttggtcatggagtgttagattcatgtgcatttttatttttcttgtccttctgttttctctctccctctctttttttatttattttactaatgacactttgtagtccaagtgcaatttcaatcatacttcaactaaatactagcatgtttaagatttaatatagcttctttctttgtttgatacttgtgtacctttaaatactcatgtattgttgattattttcttctttctggaatgttagagggagagtagggggattaaatcttttattggtgattttctcatgaaaatactcactttgtatctttgatagagtttcaattacttaaggaatacatcaattacaataattacagattatataaacatgtgccttcctgcctatattaggcacaaagttaatgtgagtgttgtcatcggaattctaattacataaatagataaggtgatctctggtgcaatattagctgctgtgcctttgtgcattctcaaaattcttaaccagtattcgatattttgtagaaaagcaaagtaagcaaattcgcctttgcacaaag

SEQ ID NO: 47487 - DNA, 567 bp, Manihot esculenta
  Intron number 1 from transcript cassava4.1_014257m (locus cassava4.1_014257m.g) derived from phytozome v7.0 (chr-ID scaffold03235; pos 231502 to 232068)
gccctgacctcagtctcactactctatctgaagaggtaccattttttacacttgaaagaatcaataggcatgaaaaggatttgatttaattaatttattcatctcttcaaatggcttctagctttactgtaaaagtttcaaatgaaagtcatcatattttaatcggaaatgatcacatgagaagaaaacagtgatttttacatgtgtaagaaagttctcaaggttgaatttaatgacgaaagaattccaacggcggccggaaataacaaagacaataatattatatgtgtggtggccagccgccagcggccatcaccatcggattacctctattatcgtgttgtgttttattctatctttgacacgtgtaagtacaccaattccctaaatgctaatattttgagaaattatactatatttcaataacaagataggattgttagatattgactcttgatatagtgaaacaaaatttttatatacaacgattgcatattataaatttcttgttgcaattttttccgtttgtgattattaattggtgataactatttctgatgaaacagt

SEQ ID NO: 47488 - DNA, 690 bp, Manihot esculenta
  Intron number 1 from transcript cassava4.1_017958m (locus cassava4.1_017958m.g) derived from phytozome v7.0 (chr-ID scaffold03241; pos 376020 to 376709)
gcgcagcggaagcgtggtgggcccataacccacaggtcccaggatcgaaacctggctctgatagagaagagtggcttccaaaattgtgctgtcaactttttgtaaaagtctcaagtaatttcatgcaattattaaattactttaaattttaatacttattaaacaataccattttaaaagttttttttcttcttgagtttagtgtagccaagtaattaaggtagctattttaatgtagaatgaagtttgagtctctcattctcaaatttcccttaaaagaagagttgttacttccactttcaattttgaaagaaaggaaaatagatggatgaattttgtttgtatcagatgcaagtatacctcttcaattgtaggattatttgtatttttattaagaactgattttaattattattttactgaaaagcacaggatatttaaaataaataataaatgtttcaatgagaatccataaaaaatacaattataacaacttaaaatttaaccatctggactaatacgggcccttaactgatggaccggacgttgttctatttttcagttcccaaaatgccctcaatcattgtaatttaccacccaccggccccggtctgcctctcatttcctctttcacttggtgctgctaaaaccctagcggatccctcaaatctctggcctactgttcacggt

SEQ ID NO: 47489 - DNA, 494 bp, Manihot esculenta
  Intron number 1 from transcript cassava4.1_016843m (locus cassava4.1_016843m.g) derived from phytozome v7.0 (chr-ID scaffold07301; pos 271117 to 271610 reverse strand)
aggttcgtttttctttgttcctgcggtcatttttcattgaataatttggttgattactgtcttcgattttatatttaaaaaacattaggaaacggaacgcaagtttgacatctgtgatttgtttgttcagtaaaatctttcttgtaactccgaacgcgcgaaaatttagcctaggcatttgattttctctatctattggcattaggtagacataattgataagaccccgtttgggttgaggttaagaagccaaaagaaaacagaatttttgaaaatgctacagcaatttgtgttacatatgtttaactttaatgtcttattattattattgttattttaattttggaaaaacttatggaacaattcagttgaaattctctgtgtatttgtgcatgctgccgatctcttattagctacactacatactggttttacttaactgagtagtacttatttcagagattggctcaacatcagcctactcaatatcccac

SEQ ID NO: 47490 - DNA, 646 bp, Manihot esculenta
  Intron number 1 from transcript cassava4.1_019984m (locus cassava4.1_019984m.g) derived from phytozome v7.0 (chr-ID scaffold03693; pos 274483 to 275128)
tcttcttcagcaaagcgcatttaccaagcctcaaggtattctctttcacaaagtgagaactctgtttggttacttcagatgctggggattaatttttttaattgaatggaagattctttcccgcttgaattttctgattcacactctatttggaattaagaatttcacgaaaaaaatgcaattcagttgatttcctttctaacaattctcttgtttgaaatgatagaattcaattatttttaacttggatattttcatttagagaattttgcatgaattcttttcttgcaagatgagtcatgctaaatgttcttaatttgacatttgttggcttagccagcttgcttgttgaatttagtactttttgatagctgtggtgagggtagaatccttttttcgacgaggtaaggtcccgttttttttttttttttttttggggttttgggggggggggtaggggttggggaaggttggatatcatgtgtttgataaaattactaaactaagtctcgttcctccaccgaaaaaaaagaagccaacaacaactaagttctcattaatgaaacggaggaggggaatatgacccgactgtttattgtttcattgctggtttgagttcaggttacctgtagaattgagctgcttg

SEQ ID NO: 47491 - DNA, 357 bp, Manihot esculenta
  Intron number 1 from transcript cassava4.1_003427m (locus cassava4.1_003427m.g) derived from phytozome v7.0 (chr-ID scaffold09294; pos 197518 to 197874)
tctcttacattgaacacactcttattctctctcaggtttccctcgctttattgctattctggttaaattcgattagtggcgagaaaattttaacgatttaaactgttttcttgttaatcgaagagaaaattacgtttttctttcgttttatttttttaaaattgtagtttttacttgctgcagttcgaactaggattatggttttgatgagacgtttatatggagggtttgagttgaattcattttgtagtttggatctgtatagggagtagggtgtttgatagttcagggagtgaaattatgtgttttggtttgtttgcagatctgggaagctagggtttcggtgattgggtgaaa

SEQ ID NO: 47492 - DNA, 564 bp, Manihot esculenta
  Intron number 1 from transcript cassava4.1_022966m (locus cassava4.1_022966m.g) derived from phytozome v7.0 (chr-ID scaffold11872; pos 25911 to 26474)
gcctcaactggtaagtttttactctgttactctttaattttagaaaaaaagattgtttagttggagatttgatggtagtttacttgtttttgttggatcaaaattagtgcaactgtacctttaaatgaattatataaaaaggattgcttttttttttttttttacgcttcatattggtttttgggattaaattataatgagcatacttattgaaggttgctatcttgttccttagctagtgtcaactggggccttgttgaattgaacggcttgtgtttgtattattgctccaatgaacttaccttaaggggatgctattatttattgtgggaaacttgcaaaattttgttctgactggttttttgaaagaatgtggctttggacctttcatctttccgttttcctgttgatatcttagttttgagttgaggtacaagacaaagccttttcatgaatattgaggcttttatttgtaggtgtttggtttttgaggtcgaatgtcgttgtgcatatcatatttggttgtaattttcacgggagctcaatcttctaggtggattcctg

SEQ ID NO: 47493 - DNA, 468 bp, Manihot esculenta
  Intron number 2 from transcript cassava4.1_029678m (locus cassava4.1_029678m.g) derived from phytozome v7.0 (chr-ID scaffold08265; pos 2580108 to 2580575 reverse strand)
acttcttgatcggctgtatcgtattatatccttttctgtccttccttttgttgatttttccttcttcttttttttgttgtgtgtgtgtgttgctcacattcgttaattgggttttagaatttgcaaattagtaattgcatgatcctgcagcctgcagatttggttcattttgcttgtagtttatttattttttttagaggaattttcagcttttagaagctgaggaaataaaattctctgcttatctaaggtccagcatatcaaatagtctttttcaaaaccaaaatgatagggattgtgaaatttagaatttatacctcaggaaggaggatgattttttttcttaatgtgataatttcaattatactggcccgttagcctaattcaggttttgtttaacatttgactctggcaagtatatagtcttcaatggattgttgcagctgattgcatacacaaaagtgaaga

SEQ ID NO: 47494 - DNA, 577 bp, Manihot esculenta
  Intron number 2 from transcript cassava4.1_009000m (locus cassava4.1_009000m.g) derived from phytozome v7.0 (chr-ID scaffold06598; pos 730449 to 731025 reverse strand)
ctcccacaggtattaatactattacacgcttcatgaagcaagaaaatgcaatacatcatttcttatcttcaattgctgatgtcttttccctccatttggaataaatcgttgaatccttacgccaacaatcatacacattatttctatgtcttttaaaataattcttttaggttaaaaataattgaattattctatttaatatatgagagttaacaaaataattaattgaattgaaattgcacgactaattggatcatgcattgtcggaattaaagaatagttgaaccacaaaatgtgtatacaatttacaatttgcacttatgaggaaactattaccaccatatgatcaaaaagaaagttggcattcttttcctcttgcacaagtggtagagagacggacttgctatcaaacagaactaaatggcaaaaatctaccacaaatagtctggaattaacgcatagttgttattattgttgttgagaagtagccagccagaaaattttcctccaaactttgctttatctcttgtttgtttgtttgttttttgtatgcagacgcccctggagcacctaggca

SEQ ID NO: 47495 - DNA, 785 bp, Manihot esculenta
  Intron number 1 from transcript cassava4.1_013706m (locus cassava4.1_013706m.g) derived from phytozome v7.0 (chr-ID scaffold04043; pos 71381 to 72165 reverse strand)
tgtaccaccgatcttttgattatcttccactgcgggtatgtccctcctttttttgtttcacaaaggaatttacgttttttttaatctgtggtgcgtttgatagtgggtattttcggatagaagcttagggtttcggattatagtgtcagtagagttctctctatattttttattagcaaatcagtttttagggttgtttatggctatgaatttcattttttttaaaagaaaaaaatgttttagttatttgattgtataagccctattttggagatagtgaaatattaaattgatgtatatgcaccttcgtctttggatgtgaagaaaactgcggtaagggacagagttttctttattgtgtgggtgtgttattatttgctttattagcttgtttagataactgtgtaaattatgtaatattttcgcgggcttaatgattcagtagaaagtttgtgagtctctgcttttgcgagatcgttcttatattggggaataactgaagcttcttatttttggatgtgaagtgtagaaaagattttaaccagtaaaatgaatagtttttttataatctgttatcttgacttgtttatatgccagtagatggtgcatctatttctgttacgacacttcaatatgagatccatatagttgtgcacccacaagttgaattttcttggaccaatggagtgtgtgagaacaatatatattttttactaatttgcattgcggcttgttcatatctaattgcaggtcttctcactaattttctcctaagaagattgtgc

SEQ ID NO: 47496 - DNA, 629 bp, Manihot esculenta
  Intron number 2 from transcript cassava4.1_002340m (locus cassava4.1_002340m.g) derived from phytozome v7.0 (chr-ID scaffold05214; pos 298247 to 298875 reverse strand)
atcctcctgtaaaagtgtatgtgtacattctctgattattaagtctctggcttttgtagtaatgataataattattgatactacttctggattacaatgaaggtttcacattattagtatatggtaaaacttaaatcttgctaattatattcaagtgtttattgtcttgccatggattgagtcgtgaaataaacatttattaagaggatggatgaaagaatcacttaaaagaaaaaaggtaattgggttatgattctgagaacatgcaacaaaagtacagtggccaattaagagaattttgctactttgtcaacctaacatgacaaatgagcaaacactttaaccagctgaaagtgtatccaaatttttatccatttgattcttctgcatgtaaatgttccagtttttaaatatcatgagaatggaggatttaccaattaggaacacaggcgtttacacattttagtcccatatttgtttgatcaaaattgatttctgttattaataccagaactgtaagggattcaccagcttagaattcttgttatatatatatgtaaatattttattggttctgatatgaacatgcttgttgtttaatattttaaggcctcgacgttggaatttgc

SEQ ID NO: 47497 - DNA, 756 bp, Manihot esculenta
  Intron number 1 from transcript cassava4.1_020633m (locus cassava4.1_020633m.g) derived from phytozome v7.0 (chr-ID scaffold06089; pos 118361 to 119116 reverse strand)
attcccacaaagacacgcgaaatcttcaccctcaggtgtcacttgtctattcttttgttttcgtttaattgatttcccccttactactattttgtttatgctttctgtttgtatgctttaaaatttgatcttatgagtaaaacccatgagcaactatatggaattggaagacatgtaagggcaccaaagaagttgggaactaagaatagtgcatagcttaatttgaaacatgactatgctgatgagaaattacatgatttgaggaaattacaagtgtgctttgagtttatctatgtttgttgctgctgttcggaatttgtattttctttgaaggataaaatctatactgcttgtgtaggaatatattcataaggatgatcaacctcaaatttgagtgatgcttagaatttttgcggtattctcagctggagcaaagcttaatatgtttttgtgttaactgaataaattgaagctttgattctgagtttgaggtctttattttacctaatccctttttcttttgtacactcttagagaccagttcctttgcaaataagtgataggcaagagaaatgagttcttctaaagttatactaatacaacagagatcagttctttgaaagttatttcagctgtacatgataaggagaaagaaaacattgagattctggccctcaccttgcaatttttgttaatattttgcatggtcaagaagaattacttttctctcatgcataggttcaatttccgattctc

SEQ ID NO: 47498 - DNA, 840 bp, Manihot esculenta
  Intron number 2 from transcript cassava4.1_021269m (locus cassava4.1_021269m.g) derived from phytozome v7.0 (chr-ID scaffold04313; pos 184525 to 185364 reverse strand)
aacaagctgcaaagcctcttgcgagatcagttagagtaagtttgctattgcagatgttaaaaagggttttagaatttgggattgtgttggctctcggttctacagatattaattaattttggataacaaaactttaactggaggtaggtatgcagtcaagtttgaaatgttttgaacatctgaaactttgacatatgaggaactgtgatatttgaaacttttgttgcatgcagaaaaccattttctaggcatttggaactttgacatattttgaattatttttatattttactaaaattaattacagagatagttcgaaatatgaaaaacaaagcctatggagagagagttcaaaatatgaaaaacaaagcctatggatcggagaaactaattcttcataccctcatggtcctttgtactattatgtcttattggtgaatgtggaactcttcaaaggagtgtaatgatgcatcagtgtacctacttatagatatgtgaagcctgagttctaactgaagcccatattggagagtgggatgtattcataatttttttattattctgttggatgtcttaggaaaaagctctattaattaatcttttacttttatattgtataaggtcgatttagcaatcttatagatttgtttcactatataagggatgtaactgacggcattatttggtttcatttgattctacttcatcctttttttgccaaagattatacttcatttggatgctatagtgtaggggttaactccattaaaaattcatgatcagaattacgtttctgttggttttctttgttttttcttccgctaaaggcttggattctag

SEQ ID NO: 47499 - DNA, 516 bp, Manihot esculenta
  Intron number 4 from transcript cassava4.1_011277m (locus cassava4.1_007995m.g) derived from phytozome v7.0 (chr-ID scaffold05979; pos 314863 to 315378 reverse strand)
aggtattgtatgttttacttcttgtgttaggagttctgttatcatttgaaaattggaacgtgacttagaaattttattttccttatgttttagtgagtttacattaccttaccaaatatcaattcatattcaagtaaagtttctcaagaattatcaatagtaaaaccttaatcatttgattgagaagaatggagttgataaaaaacgtagacattgcatgaaattgtgaattatcataaactatatagtcaaagttgagtggctctactgggtgctaaatacacagaaccaaatgtaaactgataattaattatggatttcaattctttctccagtttttgtgcagaataatagtattgtcactaacattgatacttagccttcagttaaactgcacaagtgctagcctatatatggtataggatttaagcctgtagaataagttgatctcaatactggctgtctaatttccatgtccttttcttttaccttgttatgcagaacatagttgtgcaa

SEQ ID NO: 47500 - DNA, 605 bp, Manihot esculenta
  Intron number 3 from transcript cassava4.1_019125m (locus cassava4.1_019125m.g) derived from phytozome v7.0 (chr-ID scaffold11960; pos 135065 to 135669 reverse strand)
gttttggagacgatcctaatgtaagtagcaccatttacataacatattttactataacaggttttgttcccgttacacttggagttgtttgacatttctattagagttgctactaagagaagcaaatatgttgaactgagagcaataaaaattgttttttcagtaatatttagtcttttaaaccctaaagcagataacaacactttgaaaatgtttgtctgcttttaaagtggggatttttttaaacaacagatgatctctaaccttgacaaaaggaaaggaataagaaaaggaaggttgctattttctaagatgttattctaattggttaactggatacacgcacaacatttcatgtatggctaaaattaccaatcttctgctgtcgttgtattcaactctttcttttagttatgcaattttttttttgttgtattgtcataatcaaacaaccatttcgtttattatctacattagatatctcagtataagtgttgccaagtttctgcatgttagattgttttgttttactttcaatacaattgtgaattgcttttactgcctaatcagcctcttcctgaaaccgtggcacttgtggaggatat

SEQ ID NO: 47501 - DNA, 740 bp, Manihot esculenta
  Intron number 1 from transcript cassava4.1_015373m (locus cassava4.1_012930m.g) derived from phytozome v7.0 (chr-ID scaffold04902; pos 21264 to 22003 reverse strand)
cgacatttgtcaggcatgtctcgcttcttctctctctctctctccctctatattacctgttatatgcatctctatgtccagtggttcctagaaaatcccggtacccatataatcttgcttctgctgatcaataatctaatgtttgcctacaaaatcttaacttttacctggaaaatttaggggttcgtctattagtcaattaaagagagagccattattgtctctgtttgtttttagaatattgtggctattgcatgttgctggtttaggcgtttcacatatcgtcattgtagagcctgatagagatgtaaaatctcttcttggatcctcatcagaagcttgaccttctatgatgagtatatatttgagttggcattagggtccctatgaacaatagctttaagtctccatcatattaatttagaaaaattagcttaatttaaaaaacgttttagatttctacttgtccgtgcttcaagcccagaggatcctagagatagaagacttatactttggttctccaaaaagcttgaactttcggtttgaatagcttttgacactgccaatacctgttgacttcatcaatgaaaaggtaaagcatggcatggtagttgaaatggagtttttcttaagtttgtcggtgtatgatttattgaactttctctttgttgactgctaatgatgtaaatcactcatttgatacaggacacagctggctttttcttttgtctagaagatcg

SEQ ID NO: 47502 - DNA, 527 bp, Manihot esculenta
  Intron number 1 from transcript cassava4.1_003750m (locus cassava4.1_003750m.g) derived from phytozome v7.0 (chr-ID scaffold08265; pos 640440 to 640966)
ccacaaggtaaatggaatatctacatgagatgttcttttttctttttcttcttgttttccagtattgttgttacaaataaaactttctttagcagtgacaatgatggatttatttgaattttctattgaaaactgcttactattgaacttccttcctgtcctattcttgtctggcacaaaattcttttttaattctcattgtagcaacatttgtttactataatagtttttcaacattgaggatgatagggtggatgtttgattggactatcttgcttactatgaaaattactgcttgagttaatggtggaacttttgaagagtggaactccttataatttacccataaattagtgaataagatgttgtggaagatcttcatgccagaaatgcttttcaaatagggattctaataccgttaaatatttgctttggatattcaaatttagaagctcttgttttttctcttattgttattccccggttttataggtgatcgataaggcagtacctgtccttgttgacct

SEQ ID NO: 47503 - DNA, 452 bp, Manihot esculenta
  Intron number 1 from transcript cassava4.1_012988m (locus cassava4.1_011908m.g) derived from phytozome v7.0 (chr-ID scaffold07238; pos 199769 to 200220 reverse strand)
gcttcaggtaatctgactctgccatgatttcattttccctttgcccacgtaattttcggtttcgtataattgaaagttgtgaatagatacaatattttattttttgtcttaatcaacaaggtgtggttggtcggttaatggaagtacatgatcgagctgagatatatatataaggaaaatcaaatttcgattagtgtatagctaatgcagatttcttgaatttgatccttttttttttcttaaagaaaattttcaagtgttttagattatatggaattttataaattgacgctttagtttatgatttgctacgttctctagcaatccaaacaactgcaatggtttttttttaaaatttaattatcctgatcatatttgtttcttccgctttctcccccccccccaaataatctgtagattttacttttcaagttcctgctgagctcgagaca

SEQ ID NO: 47504 - DNA, 481 bp, Manihot esculenta
  Intron number 2 from transcript cassava4.1_016144m (locus cassava4.1_016144m.g) derived from phytozome v7.0 (chr-ID scaffold08265; pos 2707515 to 2707995)
ctttggttcgcagaaccgttagaaaactcctcaaggtcattccttcataaacactagcatacacaaaaaagaaaagggatctttaatagtttgtttgatagctgagtaaatgttgggatggatgaaaagtcacttttcagacaagggaaaaaggaaagtatatttcgtcatctgtgaattatgtaatgtgcttattatcgtgcttctattgtatgtgttatactcgcatgtttggttgccgagaaaatatagaaataaagtagtttcatcttatttaatcaaattgaagttgggtgcctttccttatctgagaaaatgtaaggaagtaaaagcgtctgtttgtgtgccctgaaaacttcgtttgtgaatttagaatggaattgagcgcagaaatgcccatttgtgtttcctggccttctctactgccgagcagaagagtaaagtggacattttttaggcttcttgtttctgaaacaggctt

SEQ ID NO: 47505 - DNA, 537 bp, Manihot esculenta
  Intron number 2 from transcript cassava4.1_016234m (locus cassava4.1_016234m.g) derived from phytozome v7.0 (chr-ID scaffold07301; pos 241419 to 241955 reverse strand)
actattgaggtattagccttgtgatttgggaatccagtgtttgtttcaaatatttacataacctgctgagtcaatatgtatcgtcggaattgagttcctaatgcttttagaatgttgaactataatttcatttgagtatatcttttgctgttgcgcctatcttttgcttggttgttgagggaactgagagaaaaggtaggaatgagtttccccccacttttttaatctaagtttgttttttggacttgttggaagacattgatacattcttggttaaatctttgaactgtatataattgaacggaaagttgggtactaagtcacatccatttcatcgtgaataaaaaaattgttttcctcaacttctactagaggacatacatggttatcagtcaatgctaaatagtggcattagcttcagctgatgttggtgctttttttttttaatggttccaattagaataattctctgaaaaatacagcgagtttttctttttcttaaacttgtgatttttttgctttgacttggcgatttag

SEQ ID NO: 47506 - DNA, 277 bp, Manihot esculenta
  Intron number 1 from transcript cassava4.1_016234m (locus cassava4.1_016234m.g) derived from phytozome v7.0 (chr-ID scaffold07301; pos 242132 to 242408 reverse strand)
ttcaagtacgtctatgtcctttttaatatcatgtacctagttaactgtgattactttagcttatgctttgtaacttgaattcaagaatcagcattaaaaatggaaagcttttacttttgtttggtttcttccaatgaaatatcagaatttcatacagtttaactaacttcaaatttaaaacttatattttctattttttttagaattgtaatagagaaacaataaatttgtatggagatcaggaatctaccaaggcatcagtttggcaatttgcaaa

SEQ ID NO: 47507 - DNA, 850 bp, Manihot esculenta
  Intron number 1 from transcript cassava4.1_027028m (locus cassava4.1_027028m.g) derived from phytozome v7.0 (chr-ID scaffold06598; pos 336538 to 337387)
gaagtaggtatcagtcttggctttttgcttttgggcatgacgtgaagaggaggaccactatcttgtaatttccttaaattctcgtctttcttgcttttagctcgtgaagatgagaaattcagaaatatcaagtgacaatatccaataaaaggttgttagtagagctcaaattgttaaaactgtagtattcatacatatatattctcataccaataccaaataattgcccaagtgtttaaaatttttacctaataattagtgaacattagaaagatgttgtgggtcctacttctggtataatagccgtcaatcaatttcattgactattttaactcgctatcgtgagccccacagcagcacaccgtttttatctcaaaacagttttaggagaaaattagaacacctgaaaattaaaatatttgtgagtcttacttctcctagcattgctcatgagtggagaaattttctcctagcattacttttgaatggggaattctcttcccctgctcttgaatataaatggagaattctcatcctgctcattttaaatatgagaattctcccctttcttattttgaatttctcaagcacacagctctttctagacaaggaggagaatagttaattttttagaaggagaaaagaataagagactcaatacacaaattgatatcttaattttattcatgatattgctatttataaaaataaacataactgaaaatattgaaagaataaaaataatctaaatcttaatatattgcatcatcttctaaaatcattcagtttatttagcctaacaatcataggctaagtcaattattctaacatagatattaggaaagagtcc

SEQ ID NO: 47508 - DNA, 505 bp, Manihot esculenta
  Intron number 1 from transcript cassava4.1_012770m (locus cassava4.1_012770m.g) derived from phytozome v7.0 (chr-ID scaffold03150; pos 352153 to 352657 reverse strand)
gacagaggaggagcacaagtaagtttttcttgcagttttatgtcggtgctcgttctatgactattaccattatctttttatctttttttttttaaatttcagctgaaactttatgtactaggaaggaaaatatcaatttgagaggaaaggaaaaaaaaaaataacagagtagttgtttttttcctttgaaatattgtttgtcttgattttaaggatggtgaatgtggaggaaagctgtagcagtacttgtatcaggttttgggtagagagcgaatataatctgtgttagaatctaatctggaagacagcataattgtactaagattcttttaattatttcttctgttcaattgatatttggaacttgtactacagacatgttttttgcagctgcattatctttattttaaaaaaattctactacattttgctgcctgccattctctttgattagtgttcatcaaccacaaatcataacacatcaatttgctgcaggctgttcctg

SEQ ID NO: 47509 - DNA, 942 bp, Manihot esculenta
  Intron number 1 from transcript cassava4.1_009765m (locus cassava4.1_009765m.g) derived from phytozome v7.0 (chr-ID scaffold06598; pos 135534 to 136475)
ttcttcactaacaggtattttgagtattgggtttctactgcttcatttaaatttgtaaacttttcagttactttaattgttgcactgactgtgtgatgcatttatgtccacttgggtatcaataagttattgcaaatggatgcatttcaatgagatttctttaagttctgtgaattaactggttcttgatgggtgggtgtgcttgtgagttagatcaatgtgttatatgattgaagttggcctctgagaatttcttcaaattttaacctgaattgtcttgtcggtgtgttcgatcccaaatgctacgaacaactttgacttgagtgttgtagaataaattgtctgttttccacttagttcttgaattgggagattttggagttaaatgccaaccatttcagtccttacaataactactatttcgccaccgacattatccaaacttttgggtaaaaagttattagcatattctacactcagcaatctaagactttgtctggagagttcaaaatgttgcctttgctggaaattgggtcaagaatgttagaaaaggaccttttttttctcactcttagtttgatttttcattcccttaattttggttgctcggaaaattgtgaaaaaggaaaggaataacttctaaaatatcttcccattttctcagatcagtaagaattcaaaacttcacctatttaatcagctaatattgcaggcctggtttaattctacatttggttttacgttactttcagtcacttaattctaccgttgtttgtcccaactgttagaaatctttgtttattcttttctgagaatttggttattttctgatttttttttttaactactctccttttatgagcctgtaattctttaatgagtaacaaagcgattccttttaatgtgaacattttcattgatcaagaaatgttttatcaggat

SEQ ID NO: 47510 - DNA, 946 bp, Manihot esculenta
  Intron number 1 from transcript cassava4.1_024680m (locus cassava4.1_024680m.g) derived from phytozome v7.0 (chr-ID scaffold11928; pos 54759 to 55704)
tattggtgtttcttcacggtcatctgtttattttcttgtagccatataagcattttctatcaattttcagcattttctgcaagcttctcttttgtttttctttcaactgtcttagtctcgttaatgtcctttcttctactttttagttgtaaaatatgtgcatggcccccatatttttcatgaattcttaatagaaataattatgctcgcttccatcactgattattatatttacctttttacagaattgctcaatccatttacactgtaaaagacacttagataaaaaaggaagatacttaatgtccaatatttaggttaccaggtccacaacccaaaaaaaatgaagtaatagatgagactgcaactcatagaatcaaaacaaggtaaatgatatgcgagcataagatccttgacatagtgaaatatataagtctataaaattgtggtgcaggcttctatgttatatgagaatgaatgtttaacatctaatctaaggcataacatatgagagagatatggatgttaaaatggatgttttgtattacgataaaaaataagataggaatggtcacatcttccaatgagggcatgaagcacacattggggatagaatgatgaacatcgattatgatagtttgatcatgttaccagtgtattatccagcgtagagaatcaaatgttccagtgagatgtgataaatttgtggtggatggaatgggaagagaaacatagagacctaaaatttatatggattgttgtggtgtaggtgtcaaataaaactgaatgacgaaaaagaatccatacagctggctctacctagattttgattaaagcttggttgtaaaatctgcctggtttagttgaaggccttatttattgtcaattgaagtttgtgcaacttgatgtagggatcacctcactctggtcccgtgctcactccagc

SEQ ID NO: 47511 - DNA, 644 bp, Manihot esculenta
  Intron number 2 from transcript cassava4.1_005387m (locus cassava4.1_004609m.g) derived from phytozome v7.0 (chr-ID scaffold04083; pos 411100 to 411743 reverse strand)
actgaggagaagaggaggaggtttaatttgaagaagtgagtttttttttttcttaatttgttggattgtgattttatgaatgagacgaattgggttttgttcagtttctaaacttgattgagattgtaattactaagtttgtgttctatgatgaaagttgaaacacaagtcaaaaccttgccaccttagttgaaattgcttgcaagtgtgctttgcccatgatgagtatcgttgaaattttatgagaaaaatttaaattttggatggacttgattactgattttctttaagcatgttatttagagaaattgattttggttgttctgttaaagagacattaggatctctaaattgcacgggggaatggtgcttgtgagttcaattaatgaattttctactttgtgtatcaacttcatgaaaattggtgtgaactgtgctttttgtagtggaacgtgaatgtatttctgttgataatttttggtaattaacaaacgtttctttacaaaagatcattcttgtcaataccttttctttggatcttaatggctattaaaaattttgcttgtaatggttttcttgacttgctctttcagcaactaatttacttctttttaatgttaagtgtggttcaggaggtgattaag

SEQ ID NO: 47512 - DNA, 708 bp, Manihot esculenta
  Intron number 1 from transcript cassava4.1_006073m (locus cassava4.1_006073m.g) derived from phytozome v7.0 (chr-ID scaffold06089; pos 245458 to 246165 reverse strand)
aagtgagaaatttggtcgttgctgtgttcatataggtatgctcttttttgagttttatgtatttatggcatagttattgcaaaattttcggcgatttataaaagctgtaatgttgattttctgcagatatttacttccatttgttttatatggatcggtgcatgtttgcgttagtgttttattttttttttttctgatagattaatgatgattccaaattcttagctgggttctatatagttaagtgttgctatttgggttgatcgttattaattaccattttcttggtaattttaattgctaagtattcatgaattttgtagtttctgatgatttgttcatttatttgtgattagattcaagaaagctattatgcgcgaaaatgatgaggctatgctaggctggtttagtcattctttttatttggtcgaattatagaatcaaaataaggggaattttctacaatctattccctttcgttttttttttttatgggggggggaggggcggggggggatggggtgtggaatttcggtggaaatggacataatgtatactaaaaaaaccttaatttatggagtttaaatgtgtgtttgtcttcatatgactcccaagtgaaaagtcgatatggattctcactaactcatcattgttatgtttggtgtttgtgcagcgagagaaaagtcctcactgttacttaaaattctc

SEQ ID NO: 47513 - DNA, 878 bp, Manihot esculenta
  Intron number 3 from transcript cassava4.1_014319m (locus cassava4.1_014275m.g) derived from phytozome v7.0 (chr-ID scaffold11960; pos 139910 to 140787 reverse strand)
aggtgtcgatacttttctttttttcttctttggtctttatcactggtagcattagcattactatggtctcactttgcataatgaggataatacaaaagcttttgttaacaccatctatctgtgaaccccgaatataaattataatgccatcaagaaattttttggttaagatttctcttaacagagagatcatgggctgggatgcaccatatactttcattttattgataaacatggttaccatattctttgagttgccagttggttgattgaaagctaaaagtgtcttctctacttgtttgaatattttagacaattgcagactttgaagtttgactatcaatttggtttacttgattttgttgtatattgctccttatgtttcattattgtagcttccttcctactgttcatagttccatggctcctttaaataaaattttgatgttagaatgcaagcttcgagatagatttaatgattggaggagtgtgaagattagaaagtgattgttgtagctgtggctttttcaattatctaatctgatggaattcagaaagcttactaattttgtcttatggaatcatattgtgattaaatgtaatcaatctgatggaattaagtgattgttatgctctgataccaactgtagagaaggggagtgaaagagagagaatgaagagagagtaattgtggttttgttaaattctgaattgaattccatcagttacagtaccattcctgttagacaacatattcctctatgcacttctattctccttattatcatagcaacttgttatagagcaaatggtttaagcaactctttcccccttggtttgcagacagctactactgctgcagagtctgatttgccccc

SEQ ID NO: 47514 - DNA, 537 bp, Manihot esculenta
  Intron number 2 from transcript cassava4.1_019425m (locus cassava4.1_019425m.g) derived from phytozome v7.0 (chr-ID scaffold07301; pos 27628 to 28164 reverse strand)
gagcgtatagccaaagccccagaacaagtgttgaggtaatacatcaaagtcgctgtttgtatgcatttatggccctcatgtgaatggattcactgtttgtacactcatcaagctctgcaattagtgcataataattggctaccatatggaagatagaaatacgaaggaggttccatttggtcgatgactttagaggcccgatggttcttaattccataaaaatcacaaattttcagccgcatgcaaatttatacacaattattatttcatccaagatttcaaacgaatatttggttaatagtgtttatcctacaacattctatgctggacagcagccataagttgcaatctgaaaaattggttcaatttctggcaaagattttgtggtccttttatcctacaatattctatttgcatttcacagttatatctttcttccttgcctttcttttcttttcttttcgttgttttttttttgtttatattcaatcttaattaatgttggtataattgtttactataacaggtattgcagaa

SEQ ID NO: 47515 - DNA, 900 bp, Manihot esculenta
  Intron number 1 from transcript cassava4.1_022229m (locus cassava4.1_022229m.g) derived from phytozome v7.0 (chr-ID scaffold04083; pos 282290 to 283189 reverse strand)
aagttgtaagtttctcacgcttgtttttgcaaaatttattagatgattgactgctttttttttaaaaaaaaaaattgtttatttatgattattattttgtggcaatctcttttacatctcatatcattgggacaaatgactgtgattttgacttattgaaagaatggaatatgctttcattgaccattatgaattaacctttagatttacatgagagggcatgaagttattccgtggtgaagtaataacagtgactcaaacaacacgcgaggtgaatgccttacttggagagtagcaatagtgttgactgattataaaactaacttaatctagttttgatttaataaaattagctttcactgttgtgttttataaatggagtgaaactgttaaaatctggcaggacacagaagcatagggagcatcatagttaacagtagtggagtaagtgtaggaacagttttattattggctgcaaaagtttattgggagcatcttgcttcaaaataatggaggatataaatagttttatgaccagctgcaaaaagcaatagggagaatgatggttacgaataatggagtattggaaatagttttgattggttgcgaagcttgaattcaggctctggcaagcttttgctggagtattatagaagatttaagtgagaagttttttattgcactcccaggttctagttttggtgagtgtcctgaaccttagatgatctatttctatatttcttgctggcataaagttgtttcagtccttgtggttgacagtgtcctgctcctgaagaataatgtgcgttcaccagattttgtgactgcaatattgtatgattgacttggtagtgatcttctctatagaaattcttacctgttacgttcaatctgtccagg

SEQ ID NO: 47516 - DNA, 998 bp, Manihot esculenta
  Intron number 1 from transcript cassava4.1_018455m (locus cassava4.1_017085m.g) derived from phytozome v7.0 (chr-ID scaffold01195; pos 179287 to 180284)
gaaaactcgctcaaaaattcaaacttcaaatttcggttagctctttccctgtatttatattttttctatctataattgttgattctgttctcagtgatttattaattggggtttaattgattgttgtagacttagatcttaaaatccatgcgtttgttttgccaattttggggcagcatctgcccttttggtaattgattggatttttttgggtctttcgtgaacatgatcaggttgctttagatgaatgagaagagatttgtatggaacaagaaaagtatatgcattaacttcaatttggagattgacatttcctaaaaaaatttcatatgctaccagaaagcaagtttgtgagagtgatttgttgacaattaggaaaacattgtggatgatgatgatgatgatgatttagatctgttgttgatgccattacatagataagctttatactataaccagcttttccataataatttgagttacttatgagttatttatggctacaataagaacagaacaaaagtgggggaatacccatcatcttgatacttatgaatactttgatgaggaggagtttggatggcagttattaatctgattattcttgtgctaaactgctgcatgatgagtagggttgtctcttctttagtctgcttaactgcccagttgcctagggaattatataagttattattgcacatcaccatgctcaactgttttttctgtcaatgattgatgtatcttagtggaattaaatttctttttacaactactgaaaacattattataaatagacaagaaaaaggaactggttttgaagttttctgcagctgatgaaaattcatcaggtactgaaaatttgaagtttagtagacaaacaagtctttatttacttggtgggaaaggaaatttgtgttattttctgtaggaatttattttgagttatactaaactatagtttttaagtggcaggctcagaaccaaggaatatttattaa

SEQ ID NO: 47517 - DNA, 626 bp, Manihot esculenta
  Intron number 1 from transcript cassava4.1_016162m (locus cassava4.1_016162m.g) derived from phytozome v7.0 (chr-ID scaffold04504; pos 22717 to 23342)
cttcgtttcttcctcagtcggctgctttggttgcggttagtattctaaatctatcgatttcatggatgtgtttgtttggttgaaactcacgtgttgtaatgttgtttgttttccgttttccattatgcgactgtcctctagccatttggttgttgaaatttcatgggtttgtgtttgtttggttgaaattacatgttctgtttcagtctaattgatgggtttgtgtttgtattgatgtttgttgcgacttcatgaagatcatcattatgggtttggttgaaatttcagtccaaatctgaaatttcagtaattaaaaatgacagattgagaatgtgctgcaaacggtgtgttctgaatatgaaattggaaattcttgttgtatccactcttgtatacgggcgaatcatgcttgctcttgaagggtttattttgtgaaattgaaggtttatttcgattcttctcactttaggccttcgttttgcttttgccttttagggtttcaaatttttaattcttatatggtctattgagtccccttttaggccattacctctgtgaaaatgttgagaacttatcttggtttgattagatattgtgtgtactgaaaaaattgcaggtagaggtca

SEQ ID NO: 47518 - DNA, 537 bp, Manihot esculenta
  Intron number 3 from transcript cassava4.1_012926m (locus cassava4.1_012926m.g) derived from phytozome v7.0 (chr-ID scaffold07670; pos 164835 to 165371 reverse strand)
atcctgctgattataggcctgacattgtttatcaggttagtacattttaggattcaatgctgttgtttgtcaccaatgctttttctttaatttccattgaattcttcttgactcttctaaatttcttctattaatgatattggagggtgtgagttcctttaatgaccatagtttcatttcattaacttttctccccttcttttgggaagaaaaatcaaagttaaaatttgttaagagtggcagtaaaagcaaatgatttaaagttattgaaataaagatatcctctactctctctttctcttatgaagtgtcatgctttgttatcgttacatttggttcctcgcaaaatcaaatggcaaataaactaaatggaagctaaagttgacaatgttctctgagatcgttttggaataggaatgtcaaataggctttttagccatgctgaaacctcatttcaaattaattttgtttcttaagttgtgattgttgatgatgatgccaggctcttctatcaatcttagatagtccagtaaacaa

SEQ ID NO: 47519 - DNA, 724 bp, Manihot esculenta
  Intron number 1 from transcript cassava4.1_016679m (locus cassava4.1_016679m.g) derived from phytozome v7.0 (chr-ID scaffold08265; pos 3214181 to 3214904 reverse strand)
aggtaagttatcaatccttctcctatattttcttcgattctcagaatttaactctttattttgatcgatttctggttggggtgctggtttcctttaccttttagctcttttccaggttctacttgacgtgaattttggtttcgacttgttttttccaatttgcgcttctgtttgcttatgcaaccatgtttgtgtctgtgctttgattccccccctcccccaaccctttttgtggtttgtgctatcgaggtttagaggtgaagttctcaatgtgatagttttcttaggcttatgattttgtctgtcttattttcttgtaaagaattcatgtctaaaaatgcaaattggattctcgctaggactgatgatgggtattctcaccgttcaccgccctccccatcttcctcttttcttccttaactttgtaatgtgctattttcatttgcaaaaatgaaactaatatggtttgattcagactataccacgtgtctcggtgctgttgcattatgctttttaaagaagtatttctttgttgttgggattgatatgatggaaggagtcggtgattctatttagttaaatagaagaagtttgcctattgagatttgaccttgcagatttgattctctgttttgataatattctctgtgattttgcttctgcttagacaaagcttttgtctttttcagtcgtcatcctgaggtgaagtgggcccagagggtcg

SEQ ID NO: 47520 - DNA, 657 bp, Manihot esculenta
  Intron number 1 from transcript cassava4.1_028650m (locus cassava4.1_028650m.g) derived from phytozome v7.0 (chr-ID scaffold02939; pos 192908 to 193564)
ctgaggacattgcgagagtaagtggttctcgaatttctgccttcttactgtttcgtggctttttagattttctttggattccacttctgctgttttgaagataacccgtttctctcagtcctcagttgtttataaagtgatagctgattttgtatgaagttcattgataccagttgatatcaagtttgcaattactgattttgattttttttagaaaaaaaaactacttttgccccattaatccaatgccttttcagattatttctaagtttactgcttgttcataattagtggttttctttttatttggtaaacgatcacattaatgcaaaatgctggttaacttttggagttttggttatccttcttgccttgatgtatttttctctacagttatcatcaattagtcctttttcttttctccatcacctattagtttctagatttcagagcctgtcaatacaactattgcatgaaagtttgcaactttgattctgcatgaataatccgactgccaatccttgagtgaaaggaatagttaaatccgcaaaagcttcaattttcttctatatgttttagattttcttatgcttttataatatatggctgtaaccaatcccaggtgacttctgttaaagaactgagtgggcaaatttg

SEQ ID NO: 47521 - DNA, 898 bp, Manihot esculenta
  Intron number 1 from transcript cassava4.1_013516m (locus cassava4.1_013516m.g) derived from phytozome v7.0 (chr-ID scaffold06814; pos 223765 to 224662 reverse strand)
ctgcctcgtaccatttcagatcttcgctttctcaagtatgcttatttcccacctttttgtttgttggtgggtttgtttgaattgccatgcttagatgtgggtagaattattttagcgttgattgcttgaagattttgattgtaaggttttgtaattttgtgatatgtgaaatttcaactaaaaattgatggaaaaataattactttagttttgtggattcattttctgggttatatggaaaaaaatttgctggttttcatgaagggttgaccgttgaccataaggtgtattgtagaataggacagtcattcaagtatggatgagatgttgcataagatttgcaacgctatctatgaggattgtgctaataatttcatgggtaagggcttggtcatgtggtgggatttggaaatggattgattattctgcctttatgagttatgtttacaaaaaatccaatgggaaaatagcagagtatatgttgtttatagaaggattgtttaactttttgtcagataatgtcattggtgaaatgggatacgcttcagaaatttatatttacgctgattagtcatggttactactttttttttttctgtttctgataagttattatatattgcttcaaaattggtggccaactaattctatattttcacctgattatagtctgaaagcatgtagaactctaatgtgatatatgtatgtttgttgtttttggtttttaaccttatatttgcatttatttatgaaaaccttgccttatatagcttttctttatcgaacatttgacctgtttgccaggaaagcattattgactttagtttttttatattcttatttcaattcctctttcctgaacttcattttatttgtttcagggaccatcttgcgacat

SEQ ID NO: 47522 - DNA, 522 bp, Manihot esculenta
  Intron number 3 from transcript cassava4.1_012015m (locus cassava4.1_012015m.g) derived from phytozome v7.0 (chr-ID scaffold03150; pos 566695 to 567216 reverse strand)
aatcggcaatacttgtgagtcacgtaagaaaccaggtaattgctgaagaaaattttagttttgcgttaaaatattggtctcttcttttgatttttatggtttcatagggagttgggagtagttagcttctgggtagaatggcgtatctgctgccatcacctatccatctagattaggtttagattttatgttggtttgttgtgatttggtggaatccaaattgattcctgttaacctaaatttcagaggtagcagtgaccaaattaagtttgataagtgtgagctggaatcatcctccatggatggtccaccagttgttaatttggaccttccacaaattaattccattcagcaaactactgagacaataaattaatgaactcccatataagcaattagttgtgcaaaatcttgattacaggcaatttaaaaatgaacataaaaatacagttgaactgatggcatggtctggtttttcttggagcagggtgttccactgttcttataccggcaagagttgta

SEQ ID NO: 47523 - DNA, 507 bp, Manihot esculenta
  Intron number 3 from transcript cassava4.1_031788m (locus cassava4.1_031788m.g) derived from phytozome v7.0 (chr-ID scaffold06377; pos 73811 to 74317 reverse strand)
caggtaaactcggtggctatcctcaatgaacagtcaagtgaatttagggatactaggaaatgcaagtgtcaagtttctggctggataaccatgcatgcatctggattgcacacttggaagacctgtcttaaaattaatgggaatgacttgattgctgaatgctgatacatctaaggactctagagcaattgggtcaaatttggcattacttgtatctagttatctattgattcagtttatttgaattcgttgtttccatggtgcttagatacatattatgcggttcttaatagtcattctttattgctatttatttgttcatcctcgtgaagttcagagttaaaattgaattgaatggtatgcacgaggtatattgttcatagaatttatagtcaaagtcaagttttcggttgccattgggttatttgtattgaattttttttcttacaattctagtattattgccttataggtcttgccaaaagaagacattgaagccttaaatat

SEQ ID NO: 47524 - DNA, 679 bp, Manihot esculenta
  Intron number 1 from transcript cassava4.1_027641m (locus cassava4.1_027641m.g) derived from phytozome v7.0 (chr-ID scaffold03283; pos 182420 to 183098)
gctggaacaaaaccttctaggtaacttttctctctctttccctgtgatttcgagaactgggttttggcagcttgaaattggatccctagatgttctatgattagtgggtagcacccatttggatacttttttttttaatgttgcaaatacttgaatttatgagaaattctaatttttttgatatgattggaatttgtttatctagtttaaagattaaacaatgcaattccagaaaaagaaggcttatgataatctgatttattgaagccatttataatttagaagcatgtgaataagaaaatgtaatcagaggagaacttaattctgatgaaaagggcaatcttcattttatgcttcaatagaatttagtatttttcttgtattccaggttaacccaatcaaaatgaaaaaaatgaaaacctggatgaggttttaatttcccaaaatctgacttggtttagattttttgctgaaatattggcaaaaacatgttaaatagcaaaaccctgaaaattaaatttaatggctcagtatagaaaatgaggggaaaaaaaaggctcaatggatttttccttgtgcacaccaagttgatgaatatattcatacaccaagtcataacccagtattcatcattgcatgactaaaatactgctgacagtacaaatttcaattcgcagat

SEQ ID NO: 47525 - DNA, 963 bp, Manihot esculenta
  Intron number 3 from transcript cassava4.1_011643m (locus cassava4.1_011643m.g) derived from phytozome v7.0 (chr-ID scaffold06814; pos 957424 to 958386)
tgtacccagttgatacaataaaaactcgactgcaggcaagttcatattataacatgtttttgctctatttattgcaggatattgcggccacgttcttggattatttatggatagttttggagtttaatagtagaatctgatggatacccattttcttattgactttgttatgcggttatattagatgtcagcatattttgatcatgctgctcttggctagatggaactatggacactagagtgttacgattatttcttttatctctgctttattggtcttagtcccaaattctgtggcagcatggctatttgtcaaaattgtaatatttccttggttctcgggtcattgaaacaccctttccttgcatgacattttcaacttttgttttctcttgttggagttgggtataattatttggatgtcagattcttttggcaccttctcttgcaaatctttttttgcgctgaccaaggctcctcataatttgaaggcttttattctgtcttctgtaagtaattggattaatattaacaatatgtttcaggtttaaagacctcaaagttatctcctttatgtgttatttgcctttccttataagttatgtcattcattgccatcattaatttgcactattcttttgtttgcctatttggagcaggatgttttatagttggcaaagtgggtttcatgaactttggtggttctacgtttgctttcttatgattttgggaggtgacagaagaaaaaatttaaactgtgctactttgataatggcttagcatatttgagttgagagttgctagattttttcctttttttcttttgaggaccaatgtctatctgtgtgttttggatgtgattaatctacttgttcaaacttaatatacaacacttccaaatttgtgtatttattttatttagttatgatattcgataactgtggttccgatgctaggctgctc

SEQ ID NO: 47526 - DNA, 611 bp, Manihot esculenta
  Intron number 1 from transcript cassava4.1_012861m (locus cassava4.1_012861m.g) derived from phytozome v7.0 (chr-ID scaffold07670; pos 259659 to 260269 reverse strand)
gcccaagtattcttctatacttgtgtattctcttatttggttttctgagatgtttgtgttctatataacttatgatttctgaaagatcattcactgtcctgaggttttggagatctttgttttctatgctgtaatgtctctttgtagatggttcttctggtaaattgtatcttttttaattttttttttttgggtcgggggagtttaccaacgtttctctaattatttagttggtgtttttgaacagcttttagtttcatttgaattgtttttcttctatattgcaacagagacctgattgtttatgtgtatgaattggttttattttatctctgtaattagctttttttgttgatttttctttttgtgcaatctgggttttgttcatcagactcttgaattgtttctttgtattatctattaaattttctctgtaatttatgttatatttggtggacttattcttccttctgcattaatgattttgcatgtatttaacagattaattcattcatatatatataaatatatatatatatatatataatctggtatacatctgatgtaaattactttgttgttgtagatatatagaaagattggggagaagt

SEQ ID NO: 47527 - DNA, 756 bp, Manihot esculenta
  Intron number 1 from transcript cassava4.1_014325m (locus cassava4.1_014325m.g) derived from phytozome v7.0 (chr-ID scaffold01723; pos 50217 to 50972)
tagggtttccatctgcacatctccacactcccgtaccttattcattttgctttcctttccatatttatctttctttgtgtatgcattgatgttatttgacattgcggtatgaagtgatccatctttgcttcccatctggtagctttttttgaatttttgatgcttgtgatgatgaaaatatttgaatggttataatattcggaacctcatcattttactcatcacggttgttttgctccatcaagtaaataatatttgtgggcagcgatttttgaaaaatcaagggtttgaggtagtgaaatgctcattgtgccatatggagttccattgctatcttataaattattagtttgaaaattgctattggagctgaaattgtgttgctatcttacaagtttagggaatgtaatgggagtatgttttctaggaattaaattagatctttattttcttcttggacctctcagtttttactgtgcattatgaaaagttggaaagtgattataatgctagaactttttgattggacgtattaacactgtaaatctggatgcaagatttttgttattgatctttgactaaacagtaacagttatactgaaatttttcatcatgtaattgcttttttgagttgtatggctctttagcagtcatatgtagttgttatccctctttttttccttctattttgtttcatctccatgtaaaatattttttacaggctcccaaaagaggtgttaaggccccagtactttc

SEQ ID NO: 47528 - DNA, 755 bp, Manihot esculenta
  Intron number 2 from transcript cassava4.1_022668m (locus cassava4.1_022668m.g) derived from phytozome v7.0 (chr-ID scaffold11786; pos 111991 to 112745 reverse strand)
gagagaaagtttatccctccaatagggtcagtataatttgtataaatcttaaattttcttttcatgaattcataacattgattggttcgaagatactttgatgatggggcaaatgagtgaagagtatataaagaaatacattataaaatttacactctgtttggaaggagtaaagttaaaataagtttttctaaagcactttttcatgatttttagatcttgataatcttttattgtttatgagaaagagaagtttttttttttcttcttaatttattaccaatttggtaggttgaaatcggagatttttagtttaaaaaataccaccttctcccaaatacagattcaaggtttgtaagcctcaaaaaaccttctattaccttaaaaaatcccttcccaaacaaagcttattgttttaactatatttgttacattttcttaattgatgtgaaaaaaactatgaggctatatttgtgggacagagaagtatttaattaactatactgaactttgtatgagaagtggcatccattttcaaggcaaaacaaatgttccctagaaatgttgtcctagaatttataattgctttctggacttaattaaaagagcttttgtatcagttttaaaaaaaaattctgtttcagcaagctgtatttttcttgtatgctaattgcatataagatgagaaactaatcctagttttcttggttggtaatgaaatctttcttttctataggtgccagctttggaacaca

SEQ ID NO: 47529 - DNA, 693 bp, Manihot esculenta
  Intron number 3 from transcript cassava4.1_001202m (locus cassava4.1_001202m.g) derived from phytozome v7.0 (chr-ID scaffold03241; pos 51028 to 51720)
tgataataaaaagtggaaagggtatgacatactttgttcctagatatatataacaattggagtttagttattttagtagaaaccagtggaagataattaataataaatgttaactaaaagtaattcttgttgagaaaacatattcaaataataggcgaatcctcaactctgtaatctttgattattctctattatactaaatttgaatgtcatgtatattttcctcgtcccatacttgatcagaattcagaattcgactttagggtgttgcttcctattcttaggccaaatatataaaatgctcccctataatttcactgaaaagtatgatggcgccctgcatctcttattcaatctatgaggcacatagcatatatttttgtatatattaaacaccaatttatatgataaatgggtcatgtgaatgcagatgtacgagatacaagcaaaaccattataataatattgatatcagattttgtttcgtctattaattatctatcttttgcaaataacatgtaatcaggcatatcgtcctgaacatgcgtagtaagcttgtctatcatcgagatagtttgctatacttttattttttcctgttttgataatttactataacattttcttactgtacttggtggaagacacttttttgcagcactagataaatctaaaaagggaacatattcagag

SEQ ID NO: 47530 - DNA, 457 bp, Manihot esculenta
  Intron number 2 from transcript cassava4.1_001062m (locus cassava4.1_000732m.g) derived from phytozome v7.0 (chr-ID scaffold12793; pos 116889 to 117345)
ggaggatttggaacttagctcgccaaaagaagcaggtttttgttaatttttttaaaaaaagaagtttatctctcttttgattccttcccactcccaactttttagaatcagatttgttgttttgtgtttctttgtgtgtaaatcagtgatcacgggttgttggaagcagaaatattaatctgtattaattagtgggtttatcaagtatctagttttttgttatcatatctttagcctgatttattgcttttttagcaaaattttgatttattccgtttttttaagtagttacttttatcagcgggttatatttttatttgaatctttgaacttttcctttgtcattgtaactgaagaagacgatcagttcctaagcttatgaatgattcatgaactcttaactattgtctttgggtttgcagcttgagggggaacttgcccagaggaaagctaaacg

SEQ ID NO: 47531 - DNA, 506 bp, Manihot esculenta
  Intron number 1 from transcript cassava4.1_003071m (locus cassava4.1_003071m.g) derived from phytozome v7.0 (chr-ID scaffold02892; pos 305650 to 306155)
atttgtctgatccatctcatagtcctgtatccgaggtagtttttattttatttatgtttggattttgttttgttactgtttggtatctcatggtttttgttcgtaggatcaaaatcttcaaagcaggttaggccttgctatggctaaagcagaatggtatagaaagagggggaaaaaggaaatatgttttgaaatggaattttttggttaggtaaaggaaaaaatggaaaaggaattttagatatggcagttgaagctcaagggaatttgtatcccttgctcttttgtggagttctgttaatgaattgagcttttataagcttcatgtgtgattctggatgacactaccatagtggaaattttagttttttctatgagctcgctgaaaagttgttgctatcatgtccatgctggacttagtttgtagttttcttttatcattgggtaattcaagaacctaacttattggttttcttgttgaataattgatgattatttcacagagg

SEQ ID NO: 47532 - DNA, 1041 bp, Manihot esculenta
  Intron number 2 from transcript cassava4.1_010213m (locus cassava4.1_010213m.g) derived from phytozome v7.0 (chr-ID scaffold00164; pos 25965 to 27005)
gtcaaggtaatgcaacctttgatatttggtctctctacatttgctttgattttttatgagcaatgaattcattaagagatctcatgcttaccatttgctaggatattctttttcatctacagccaatcacaaagataaatagacaatattatatgaagaaacagtgctctattttgtcttatgtattttgtgattttgacactggcagcaaaataattttattacttgtccttttatggcctaagatttagatatctaattattactgattttttgggtgaagaaaatttacacttataattgtgtttttcaatgttttaataagttttcttgatgtagttgtgcagacagaaagaaagctacagtatagaaccaaagatggcctttttgcaattgcataacagcctatgcttaaagcaaaacctgttaacttttatgtgcctatggacaaaatgaatttttaataataaaattgaaataagtaggataatcgtggctttatggtactagcacaaaaaaaaatttgaaaaatgaaaatggtaaatgctcaaattttcacctctatacttgttgagggtgttcaaattagcccatttttcaccttttgtttgaagtttcaatataagctcaattagcccaattaaaaataaaatcttttagctaaaagtttcttgatttattgatttagagtaaagattaagaagctcaatttcattattcttgagctaaatttcttgattcatcccagaagttaagaagctcagtttcttgattttcttgatttctgggctaaattgagcataatgtgctaggtctgaaaggaatattctatggtttcattttcacttttttagtttagaaattgttgtgtgcatcttttacttttattatttaccgcaatattacaaatatattcctagtatcgcaggtatcctattgtcttgctgttgatgttaatgagtatcccagttccagagcaactgagcttatcccttcttatgaacaggtggtacattagctctttattctttgctttgccgg

SEQ ID NO: 47533 - DNA, 974 bp, Manihot esculenta
  Intron number 1 from transcript cassava4.1_000666m (locus cassava4.1_000666m.g) derived from phytozome v7.0 (chr-ID scaffold03802; pos 23833 to 24806 reverse strand)
tttaaccaagaaacgagacgaaagggtacggaaaggtaatttcataaacgggtacatttgagtttagctacaatgaactttatttgcattctagaatcaagcaaaacaatgattaacgctatattgataatttatgtgacttgagtggtttaagttgcttaagtttatggtgtggcaacgttcaattatttttatttagagtactggtttttctttgggaaatacagtgggtaggatcactttaatggtgatgggtaaaatcacttgatggccatgtagcaagcaagcaacatctaataactttagcttaaggcaactgctaagaactgaggtggatggtgctcgttaagggacataatactgctcaaaatgttgtccactgggccaaaacccttaatcatattagtgtatgccctagaggatttctagaattacaaggtggaaactcagttgaatattgtttaatacaatttattgcatgtaccccctatttggagattttcttagtttcgtagttgtagtacaagtaaatttgctactaggttgccccttcttctctttatattcttggacccatgtttgctttcatggatttgatattctgtgttctactatttggcattgagatttagagccaaaaagtgtttgttgaaaaaccaacgttttgcttgctattgaaaaaaaactgtttagagaagaactgtttgttattttagtgttcaaaaacaaaaagcatatttaagttgctattgactaaaacatgtcaaatttaattttaagttaatttttaatatcctctaactaacatatgtgaaaatggtgcttttctcatcagcaattccaatatctatgcactctgtggtgttaggcactactccttgttcataattctgttacttatgttgaatttcttatataagcattttaatgtacttgcagtgtgcaaaaaagctccaatctctctagatctgaaa

SEQ ID NO: 47534 - DNA, 480 bp, Manihot esculenta
  Intron number 1 from transcript cassava4.1_011133m (locus cassava4.1_011133m.g) derived from phytozome v7.0 (chr-ID scaffold06611; pos 1546 to 2025)
ttagccacatcaacaccagatctgaggtttatatcgattatttctttagtattgttattttctttgcctttcgtttccttatttccttatttgttgctcttctccattgcttaaggtgtttgattagtttagttcgtattcgggtttgcctattgctagtcgcttcatttatatacttctgggtgtctttttagggctgaatctatcaattctggttattcatcagcatgtgtttgattatttttgttatagttttcatcccctgcttgttaaagttgtttcatttttattgtgtttaacattgtttatctgtctttagagttgagcttatctattaggcaatttattttgattctttctggtggtttcgttttatgttttttttttgggaactcttaattgttataattgatttttctgtcttaatgtgaatttcagtaacatttttctttaactcttttactttaggttaaaggatac

SEQ ID NO: 47535 - DNA, 407 bp, Manihot esculenta
  Intron number 1 from transcript cassava4.1_012387m (locus cassava4.1_012387m.g) derived from phytozome v7.0 (chr-ID scaffold10563; pos 1257597 to 1258003)
gtttcccaagagggtggatcccctacttctgtcaggttagtgaaactgaaaaattcttctttcttttgtttctattcatcgctctgtttggttgataagaaaagtcaggagaaaatttaaaatttgatctttttatgtattcttatgtgttttgatatagtaagccaactggttatacaaaatctatgcaatatgctatatatcctgttttattgttttttatcctgttttcaattcaatctatttgccattttttattctatttatctggatttttttttgttaaataattgtaatttgtctctgtcatttcatagtttatatcctaccgattccaataatttcttatagtaaattgctttgtgggagcagtcaggttgtggggtggcctcctataagggcttata

SEQ ID NO: 47536 - DNA, 900 bp, Manihot esculenta
  Intron number 1 from transcript cassava4.1_012551m (locus cassava4.1_012551m.g) derived from phytozome v7.0 (chr-ID scaffold06050; pos 148948 to 149847 reverse strand)
aaggcggttttgggtatgattccttttgtctgtttctccttggtaatgtgggtaggttggtaagaaggtttgatcaatttgattcaaatattaaaaaaatgtgactaatttgaagaggcaggcattagtatttaataatctggtcgcacttaactgcattttaatattgggtgatggggtttggttttggaaaatctgattaggcaagctgcttataccacataaaatgaaaatggttcttagtttacattttgctccaaccggagcccattgctaaaaaagtgttcttagttagttgtagttagttgggtatcatgtacgtatatgttagtatatcaactttgacattaatgctttttatggagagttaaattttaaatctaaagattgccatagtaaacttagagagtttttaggccattggtccttgcattgccttttccatgtcaatggtttttggttgccataagattgactttgccaatggtttcatcttcttgtgcaattagtcaattaggctgcatgaagcttttgaattctcaagcacattacttgcagtttggtgaagtcagctgcgagttgcttttattttaatatatcttggaaagatacatttatgtattttgaatcttgctgttgaactgaagccatagtataaaaaaagttgtcaatttttaccatatgtttcctattctagcattttgaattgcctttacttgtacattctcttttgatccaagtataataatttccttactggttctgactctcttttcttctgtgggtttttcacattttatgttgaatgacatttggcctttgtctatgctcttatagatgcaagtatatttggaataaatactggtttgctttatgtttctttgtatggcatttctccag

SEQ ID NO: 47537 - DNA, 994 bp, Manihot esculenta
  Intron number 2 from transcript cassava4.1_009253m (locus cassava4.1_009253m.g) derived from phytozome v7.0 (chr-ID scaffold02908; pos 69556 to 70549)
tattggcattcggcttgaacaggaatttggatttggtatgcatttctacttaagttttatcacctgctaaaattctgtagcagaatggagttgatgttttcttgttaattaatagagagttgcaggtgataacatcttactttttaatttgactaattcttagtgaatttgtttgaaatgaaaaaaattgttagaaacacttgaaagaataatcagagggaagaaactaattaaactttttactgaggtgagattgattctctgtggaattgtaatttattatgaaagttaaggtttcacaaggaaatagatcaattatgattagtcaaatgctttgtgcagattttgcctatgattttgatttgtggcctcctagttagtgcactttgtttaggaattgcagaatctccgagttttttactcttcaaaaccacaatctttaatggctgcaatgttggttcgtgtttcatgctcatctaatctaattcttcaactattttggctttaggctgtcaaagtgttacttccactgtttagtgcataatggtttataatgcaacatttgcctcataataatttccttttcatttttattcatctttgatttttctcctttaattgtctgcatggacaagtctgcatctgaaactgtctcctttcttattctcaatagcaggttctaggtccatttttaggaatttgctggttccttcaaatatttttcttttgtattctttcatttatttggtcttctcttcactgaaaccgtgtatctgttggcgcataaggtgtatgtatgatgtagcctgagatatctttcatgccattatacatatgtactttactagtgtcgccttgttttctgctaatttgaatccttaataaatgaattgtttataataaattctgacattttttttactaatacttctgctgcatttctgtttggtgctttacagttaagattggattgctatatatcatctctggattt

SEQ ID NO: 47538 - DNA, 838 bp, Manihot esculenta
  Intron number 3 from transcript cassava4.1_027663m (locus cassava4.1_027663m.g) derived from phytozome v7.0 (chr-ID scaffold08265; pos 4049850 to 4050687)
gaggggtaagtctacttctcaattctttttccttctcatttataggatacaagtgtcctgattccaactttatgcggtctgcgtcttcgttcaagacaagttgttttgataaaatatctgaattaagagccaattagcccttgtatcatgggtttaaatggcgtttgttgaccgcggctaataaaaatagtcctataattactgtaacgtaatgataacggtacggagttatgtaaattatttttaaaaaatttataaagtccataaatgaaatgatattgattaaacataatatatataaatatataataaatataaacacataatatagtttaaaataaaaaaaattaatataaattttataaatagagtaaattaataactcaaaatataattttaacttaaaattaacactttaatttataaaaattttaaaaaaataattaaaaattaaaatagataaaatttaactaattttttaaaagaaataagtttaaaaattgagtaattttatgatggatctaaatttatataagaaatatgatgggcagattgaaataaaaaaaaaaaaaaaactgaaaaaatataatttttgaaacctgagaaatgagaaaaagatgaattttaattattgataacagcgtccgtcgataatagccgttaatgtaatggtacgcctgcaaatcacggagtccgttataagttgtatgtaacgataatggccccaaaatcagttacataacctaacggcctttatttaaaaccatgcctttgggtgagtgtttgatgaaatgctgctgaaaacaacgtattgcgcagggcaagagtccagactatc

SEQ ID NO: 47539 - DNA, 969 bp, Manihot esculenta
  Intron number 1 from transcript cassava4.1_017810m (locus cassava4.1_017810m.g) derived from phytozome v7.0 (chr-ID scaffold02943; pos 871778 to 872746 reverse strand)
tcctaccagaaatccccgggttcagttctctcctggtaatactgctctttctctctttttcatttctttttctgattcttcttttgcaatccaattccttactactatatggataagttctggatttccgacatcttaaattaatgacttgttctttttattttaatttttgagcatgttatatgagtgagaaaatcaattttagcatcacttgtttggtgcatatatcgagaaccgctgctgttaaaacgtttaggatgctggttttaggttgaattcgtcacaaattctaaaagtcctttgcgtcctcaatcaaagaattacgttttactaaggatttgagtttatgtaatcagcgaaagctgagattcttgaaaaactataaattcgaatttaagttcccaatatactgcatattttgtttgggaatgttatcctgggtatgtgactggggccttatcactttgataacttcaaaacaaagaatggaatctagtaacttaaatccctttgaaatttttagggcttgtttcctccaacaaccagatcatcgaggcattaatttagatcaacaaaatgttaatttccatcgtgcaaaatcccatgccattgagggtctggactgtcctggtcctggatggcaccatactgacacattattggtagttctcaattataaataatacaacacatgtgtatctcattgctcttattgtcatatttttgttatatgaggcaggaaaccaaaatttcttcaaatgttaaacctgtctacatttgaactatcgaattttcatgtcctttgtgaattctccatactcgaagtgtcatattcagaatgcatatatctttataagttctaggcttagttcgtctctgttttgagctgtgaatcggttcattgaagatttcgtggctttcatattatcttgattggtttttaaatttttttctagtcccattggatat

SEQ ID NO: 47540 - DNA, 559 bp, Manihot esculenta
  Intron number 1 from transcript cassava4.1_010967m (locus cassava4.1_010967m.g) derived from phytozome v7.0 (chr-ID scaffold07027; pos 66089 to 66647)
cttcgttatcatcgtttgcgcgcttatatagtaaggtgagattctcctgcccaatttctctattatctaaagtttgcttctttattgcgtttctttatttctttgccattatttttcgttcaggtatgtttctttaatctatgttttcgcgtataatgtttttcacacattcttaactggcttttatttatgttgcgcctgagattttgatgtgaattaggctttggattcgccagttttgaccatgggtttgtaataatagcagtcatcttcgaatacagatctatatttgcgaatgatgttgatttaatctgccataaaagctttcagctggaacatgattatgaacttgttgaatggccttactttaagttcgttcttctcaccttttctttgaccgtgaggaaggaatatgctatattctgtttcctaatgctccctgctagcgtagattttcgcacatggtgcctttctctttttaccttcaactattgctggaagaagcccttttgtgcattttttgtttccttacatcattattgggacttgaattttcaga

SEQ ID NO: 47541 - DNA, 425 bp, Manihot esculenta
  Intron number 1 from transcript cassava4.1_006005m (locus cassava4.1_006005m.g) derived from phytozome v7.0 (chr-ID scaffold00506; pos 179710 to 180134 reverse strand)
ggaatctcatatctggtattttatgttgatttttttattattattctttggttcatcggttttgtgttttttggttgactaatagaatcctggttgatctcggtaaattttgatgggttttgacttggtggttgaatttaattttacgttctttacttgaggattaggtcagaatttttttgaatttggatgtgtttggttgtgtggactgtggatgaattgaatttttggtgtctttattggaaaattttatgtcagtcgaacttattttctttcggaaaagttaagttagcgaagaaagtatgttcaacgccaaagtgatctgttttgttttactgaatttccaaatttggatggttttgttaatcatttctattattttcattttttcttgcagggattgtgggaaacaagtctatttgggt

SEQ ID NO: 47542 - DNA, 924 bp, Manihot esculenta
  Intron number 1 from transcript cassava4.1_000846m (locus cassava4.1_000846m.g) derived from phytozome v7.0 (chr-ID scaffold03802; pos 261217 to 262140 reverse strand)
agtggcttgacccgtcaatcaaaaaggtactctctgcttctatattcttcaatttgtttttagatacacacacccctcttcatttgcacttgtatattcatatgtatgtgttcaacttcattttaatattttagaaatgttcagtaaaaagtgctccaaagatgggcacctagttgttctagttaagcatttattaatttagcataaccgttataggattttgaaccaccacagtatacaaatttgataataatgtttactgtctaatatctacgatgctgttgaaaaaaaataaattgaatcttaatttttttgttatttagtaaggattttggttcttgcctttacaaaattatgtacatatcaaaaatcgcatcttctttaggaaatggtggatagggcgtggagttgaatcgctgtttttgacatattatgggaaactgaaaattagatattacaggatacttctttttggaaagggtgattcttattctatgcatgaagtgcctttttgggtttttgaggatgctgggagatgatgatcgttcacagttttggatttttatgttttatggaccccattggttattatctattttctcaacccaattaaggaaactagataagttttgattcgctaagaaagccccttattcttaaccctggcctcgtagtgcagtatgtttagtgaagagagttttttttccctttgaacccaaatatggaaaattataagccaaattctcaccctttcacattgtcaagtcacaacctgggatccaactttgtgatcatgagcattatatttaatgttattttctagaaataatggtactctgctcgaagtagctaccttcttttttatgcagagagattgatacttttgttccatgataatgtagactgagtggaccagagaagaag

SEQ ID NO: 47543 - DNA, 324 bp, Manihot esculenta
  Intron number 1 from transcript cassava4.1_032561m (locus cassava4.1_032561m.g) derived from phytozome v7.0 (chr-ID scaffold08245; pos 22492 to 22815)
ttattctcggtagctttctttcgtcttctcaattttcgtccctaggaaacttaatggaaaactaatggaaattttttttttggtgcaggagatgaggttatcttattcctttctttgaatttggataccggaacctgaaaatctattaaactcgttataagattgaagaataatgttaatgattgccgtaatttaggtgctatatagagtttaattggtctatgcttcttaatccttagactaattcctataagattgttttcattatggtacagtaattgctatgagattgttttcaactatggtttgaatctgagttagtca

SEQ ID NO: 47544 - DNA, 708 bp, Manihot esculenta
  Intron number 1 from transcript cassava4.1_008854m (locus cassava4.1_008854m.g) derived from phytozome v7.0 (chr-ID scaffold02831; pos 347635 to 348342)
aagagcttctctctggtttcgtgcttcagtactcggtttgttctcttcttctgtgtgtgttttgtttgggtgtgttgcttttaagttttatccccaacacaggacccttcttctaactgcatctcatttatgctttcagcttttttctattacgttgaaactgatctgttttgcttaaattttacgcgtaatgttaatgctaaggatcaatcattatattggcagttataactggatattcttgatgcaggctgcctttcagaatcagaaggggatgtttctacccaatgaaatgtgatttgggtttgatcttgttgatataaagtagagtttcaagcttttaaaactgtagcctgaagagttctaatatgcttatttctaaaggctaaactctcaatttcgaaaatgatcagctcatctttaatccatatactgttagggcatacttagttatgctccgtccagcctaagtaactttatcaaaaattatcacgagtaatggtacttttaatgtgttgatattgttcccttttattgaaagttaaagagtaacatgtgggaaaatggtctgcactacagcatcagtgctgcaaccagttgtggaagatatgttcaatttcatcttcttcttcattttttttttttatctttctcttcctttttctttttgtcaatgctaatagttgagttggttgttggttgcaggtg

SEQ ID NO: 47545 - DNA, 387 bp, Manihot esculenta
  Intron number 2 from transcript cassava4.1_012301m (locus cassava4.1_012301m.g) derived from phytozome v7.0 (chr-ID scaffold03823; pos 33354 to 33740 reverse strand)
atctctctgtctcctgcaaaattttccattgataggtgtgtttgatttgattaattataattttcactgaattgcttggtattctggtgatgctctgtttgattgccgagaatcttaaggaataaggaagaaactgaaattgctaataaatatatttctagtttcagaacaagaaatacagaagcaatcatctttcaaaaataagtctaatcatcatcattttggcctagggtagaaaaatggcgaagtgatgttgaaaatattccaattgctgtacttttcctcaggtttctcagcaaccaaacaagagcaaaactgaagaaaattagaatggtgatgattttactttgttctttgtatttcacagtgtggaatcttcggctgcag

SEQ ID NO: 47546 - DNA, 897 bp, Manihot esculenta
  Intron number 1 from transcript cassava4.1_024412m (locus cassava4.1_024412m.g) derived from phytozome v7.0 (chr-ID scaffold10493; pos 584722 to 585618)
ttttttgttttttgtgttttgtggggtgtgtttgtttttgggtgttcttaagatttgtgcaaatgggtggtttggatctgtccttgaaagagcttcttctcaccaggttgcttcatacaacctgtttcccttgtcgcatcgttattgcatttttacagtagataaccatgagagtctataattgttgaaagcttcaatcgatgaatttcttgtcctaattgccaattctttcctatcctagaacacttgcacccacttggctgagaaaatggcttttggctaacggcagatcatgggcagcaggaggagcatggctggcgccataggattttcgtgtcatatgtaaaagtaaatacctctagaagcttggaactgtgtcttattatttttctccaacaaaagattaaaactctttgtgaaagtatggtttccaaccgtctccttgaagaatttttagcagggcttccaatactgaactggtcttctgtcaagctcagtaaaaagttttcagtttctttatccatggtatcttgtaaagtgaactctaccgtgcttttagatgcgtatcaagcaaattttggagtcaaacaaaatgtattttgatgctgagtatgttatttcttaacaagtatcaatatggcaaatgatatggtgtagattttggtaccttaggtctttagatatttcatttccagtgaacttatctgctttttttgttgacttgtttctggcagtctaacttctcttccaattattttatcatatatatgaatttgtctgtgcaactatatgcacttgcaatgttatttattctgcttgtcagtatagtttatcttgcctgaagttctgcattttaaactaggatatacccggttccctgactcagttgcatcacaa

SEQ ID NO: 47547 - DNA, 163 bp, Manihot esculenta
  Intron number 4 from transcript cassava4.1_020924m (locus cassava4.1_020924m.g) derived from phytozome v7.0 (chr-ID scaffold08542; pos 174577 to 174739 reverse strand)
ccttttttagttggggtatgtcttctaccttattaattttcattttgaatattttcagcaagaaaaccctactatttgtttctgatactaaatcactggtgtcatcttagattcactttgacttataattttttttttttgttgacagcttcctcccctgcta

SEQ ID NO: 47548 - DNA, 161 bp, Manihot esculenta
  Intron number 1 from transcript cassava4.1_006999m (locus cassava4.1_006469m.g) derived from phytozome v7.0 (chr-ID scaffold10563; pos 875262 to 875422)
ttaaagctctttgcagggaaggcgcaggcctcgaggtaccaatttctctctctttctctctattattatttttgtttatctgtatttgattattgaatttttggattatatgtaattcttcttctttttttttttcctgtcgttgcagtggcttgacagag

SEQ ID NO: 47549 - DNA, 937 bp, Manihot esculenta
  Intron number 1 from transcript cassava4.1_032602m (locus cassava4.1_032602m.g) derived from phytozome v7.0 (chr-ID scaffold03241; pos 456671 to 457607 reverse strand)
ttaaagttttgaccgtgtgcagtgtccttcttcaggtattctttattttctccccattaatttacttgtatacatctctataattctacttcattattgttttgtctcttaaccctaatatcttccttttttttcttttcagatcaaattcacttgctcattctatattttataagtttatttaataacattatttgattactcacttataattatcatgcatattatgattatttattaaatgtgcttgattaaaatttatatttaaaaaaaatcaagatatttgaattttaattgtatttatttaaatgttatttttattataaaaaaatttaaaaaattaatttaacatcttacgataaatgtttaatacttcaattaatgatatttatagttattagactataattatattcaaaactatttattataatacttcaattaataatatttatagttattaaattataattatatttaaaacgtatcgattatacgcaaggttataattatttttttatcacctttagttttgagtaataaagaaaattatacattattattacggattagattgaggaaattgatgtgatcacactgaaatcatttcttttaccttgttaattatgtattatctcatggtcatttgcacacaaactttgatgtggtggtgcagcttattccccaaggagaagaaccagttagtttgaaatctccgctaaatgtccgccatctgatcttgaaaactgcaatgcacgcctttgaattttatgggattaatttcatgatcagaagttgtccaaagcttaagatcctcactcttgacataggccctgcaaaaattttccctgtgagtactttccattaagcgatcatagcaagctgtgcagtgctgtattaacttgtcttgtgtttatggttggttaattgcaggatt

SEQ ID NO: 47550 - DNA, 728 bp, Manihot esculenta
  Intron number 1 from transcript cassava4.1_015802m (locus cassava4.1_015802m.g) derived from phytozome v7.0 (chr-ID scaffold10695; pos 265395 to 266122)
gggaggagtaagcttccttctttctaatgttttcctgtatctgtatggcttgtcttcatgggattgtattgttcaattttgaaatttcgctcggattctttatggatttgttttcttttattgttttcgtttgtttgagcgtgtatctgttttcgaattggttgcaaattatcttctttcatcttatagggatagatggcatgatctgtttatttttcattttcttttttgttggaaaccctgttagtggttatccctgttaatgcactggttacgtacgtgttagtgtagcttgctccctagatcttgatttgtattagaattatttccgtttttcatatgtagaaactctgaggaggaattttagcaagtcaattatgtgggtaatattgaatattattgaaaaactaggatttttgagaactgattgatattgtgatcagtacaatttggtgattaagtgctgtgaattttgattcttcagatcttttgttaaatctttatgttgttttgtgatgagatgaacttatatctatatcagatgttttttgtcactttttattaatttgaatgcaataggatcgaatatatgttcttttgtaattgattttaatgagttgtattttgttctacaagctttggttgtgttggggactgaattttgaatgggagtgttatctacactgggttgatcttctattgtttctgacttttgcaggaccagcaag

SEQ ID NO: 47551 - DNA, 896 bp, Manihot esculenta
  Intron number 2 from transcript cassava4.1_006794m (locus cassava4.1_005739m.g) derived from phytozome v7.0 (chr-ID scaffold10493; pos 981558 to 982453 reverse strand)
aagaggttgccattaagcttgtaagtgctttttcctttatctcctttccctgatttctgttcggatctcgtgaatttgttcaattttacttgggtgttttactttgtttttttgggtgttcctctggaactttgcttgatttctgcggtctcctcttcttacttagtcatgtaaataacatgggttcatccaaagctgttatttgggtaagttgctatgcagcaaattatgcgaaggaaacgttacaatggactactttgagtggcaacctttaagttaatagtgtttagtagacaatcatgtgttcaaccgtttaaaatttaatgcccagaagtaactggtgaaacctgaatttttttgcattgccaataattactggccattgtgactgagcccacttgctatcaccccaataccccattagcgttagaagaaaattttatccttctgcttttcattctgaatagaaactgaatttgagatggaatcatagaaaacatcttatggatttagtacataagaactgaattttttgtcggcaccattaattcttttcctctcttttgcttacaaggacactaaaggaaccattgaaattgagtcaaacatttgttcttcacttccactcaattttatgtgctattaatcattgcatattacttttaccgtgaagtaaaaaacatttattctttgcacccatttatctttatttgcaaataattcatgtgtattacttttatgtgttgaacagtttgactatcttaaactttatggttccctgctgattatttctttctaaatgttttcgccataaccagttcatgctctgataaaatgctgaaattgatttctaattctcaggaaggtgtcaagacaaagcatcctcaattgttata

SEQ ID NO: 47552 - DNA, 889 bp, Manihot esculenta
  Intron number 1 from transcript cassava4.1_012920m (locus cassava4.1_012920m.g) derived from phytozome v7.0 (chr-ID scaffold01441; pos 212193 to 213081 reverse strand)
cgctctgcttcctctgctctcgtcgaacaagaaaagtaactctctcactcgctctttttgaaaagctaatcagagagagatctatatcattttcctcacttcgtctttcagctagggatctagcttttgtattgttgagtctttgatgggtgcatgtgtgttttgattttgttctgatataattatatttgcttgattgctgttggactacacttctactctgagtgatctcgctgtttcatgtagtattaagaggtgattttgttggattagcccgaatctagtagatttaatagttgctcttttaatttgtgatctgtaccgatcaaacttctctccctgtctccctttgggtttttgtctgccttctcatttcctcacatttttttcataactgttatgacatgatcatgctgttgttttgtataataggatgctgaagattacttctctattgcatttgaattctaatcttacttccattgatgacgttttgaaatcatacctggacttatgtaacaacactaatcgagcgtcccttccaacaatgcttatatcatatttccagttttcatgttatgaactgcaatattgctgccattacttttaattttcccatatatgtttattgatttatatggtaatgtgatggaatagcacaatgttgggcccccttttcatgcatatgctgttttcttccaccacgtgcaattaactctatcactttcacttttatcaattgaccacaatcttcatattcttaacatggacgtgcttgtttgtgtggaactatggatatcacctacaacttcatggttaattgaccaaatttggcttatttttttcaactgcagatatctttcagagctactggcggagcggcataagc

SEQ ID NO: 47553 - DNA, 451 bp, Manihot esculenta
  Intron number 1 from transcript cassava4.1_024358m (locus cassava4.1_024358m.g) derived from phytozome v7.0 (chr-ID scaffold06814; pos 745292 to 745742)
ttcgcattctctgatagacgggcgccctaaaagcaagtgttctgcatattaaatatagtgtctagatttctgagttttactttattacgtataggtttatgaaatatgcactagagactttttattaaacaacacaaaaagttagtgaccttgcagttaccatgctggaaacccgtagatagagcagctgcctgagcatgttaaattccatcttatcattgtagacttcccatatatatggttgattgaaaggaagatatgataagcaaaattgttgactgagagaaacatacacattttaccctttattaattgtatatgctttttattggaacctacaccctttacagattaaatactcaaagttgttagtgaacgagtgatttctagagtgatttctagctttatattatcacatttatctttttctttcaggtggtaaagatacaga

SEQ ID NO: 47554 - DNA, 1003 bp, Manihot esculenta
  Intron number 3 from transcript cassava4.1_011196m (locus cassava4.1_011196m.g) derived from phytozome v7.0 (chr-ID scaffold12439; pos 140175 to 141177)
ccatctcttgtaggaacagctgcatctcaagtgagaattttttttaactgctgcttataattttcaatcttatttgttttttttttttgttggaaaagtaagatgttaataattttgtttagttactgatgaatatgatagtatggattgctataggtttaatttgtttaacaggagaaactgaaaggtggtttagcagattcatgaatgtgttcaattatagtgcaacttggcatagcatggcatggtttggttgtaggtagatgtattgggattttcaatgaaattggtatcgtctcctgaggatagtaaaatctgtgcactcaattctgtgacatttttcctgattcactttgttttataactctgttcctaataacgagggtaaagaattagaagagatgacctcttaagtttgttctatttctggactctgatgttagatttactgttcaaatgacaaccatagccatggtgaattacaaattttttttaagatagtattgacgagaggtcaaagttatattctttattcatggaggtaatatgatattattgggatatgtcaagatgtattccagatctagctcagagctatatatgttgttttgaacatttgcttttattttcctccgaggttagattttctgttcaaatgacaaccatagctatggtgaattacaaattttttgaagatagcactgacgagaggtcaaacttatattctttattcatggaggtagtatgatattattgggatatgtcaagatgttttctagttctagctcagagcttttgctgtgttgaacatttgcttttcattttcctaggttgaatgccttagttctgcttgctaaccatggtttgcaactttgcataatcataaagaagttctcaatagtgtgtggtgtaagtttactccgctttttgtgatttcttataatgcttggcattcttttatgatacagggtgtttactattatttctatcaaatattcaggga

SEQ ID NO: 47555 - DNA, 900 bp, Manihot esculenta
  Intron number 2 from transcript cassava4.1_002865m (locus cassava4.1_002865m.g) derived from phytozome v7.0 (chr-ID scaffold02943; pos 891568 to 892467 reverse strand)
tctgcagagattaagagggagggaagacgtttcaggtatttcactctattccctttctttgctgttgtcctttctaggaaaaaggttcagtaatttaggtatcagattcagccaatggcataaacgcttgtttgttttagcagtcaccagagggccctaattaaagtggatggtttgcataatcatcttcaatataacttgggattatagtttacttatcacaatgagttatttccgttggagcagatgtctggattattctggctgcttcaaatcatcaattttttagtgggtcaacttgaaattttattagtagtgtcaaaattaaaaacttactacttttcaactgaatgtttgatacataattcttccgaatgttaatatgtttctgctaaatagttttaagttacttattggaagcattaaagctccctctttctctctctatttttattattattttatatcatccattgtccccataatttacttttgcatggatgccagataacttgctttgctagtctcaaaagtgatatggaattaaaattcttttatagaatatcctgtttcatttgccgtggaattccgatattttcacattgttattggtctgcctcgagtctgatgaaaaaatccttacttttggatttcatgccgagatttatagtcacatgtttgtggttagtttattagaactttgagttgacattatggcagcatatcctctctttcttttttttttctcagatgaaaatagcatgcaacaggttttcagattggttcatgtatttaactatgtaaaaatcctattgttggaaatttctaatcatccttttcccattgaagtagcttatgataaagtggatgttgctaaagcttctatgatccacaggtgag

SEQ ID NO: 47556 - DNA, 714 bp, Manihot esculenta
  Intron number 1 from transcript cassava4.1_002821m (locus cassava4.1_002821m.g) derived from phytozome v7.0 (chr-ID scaffold11960; pos 168912 to 169625)
agggctcatcagaggttggcctctctttatcttaggtaagtcgccttgtctgtacaagattattcgtttctaactttaattatttaatatttttttgtgtgttgagtttttgtttgtcttggatgattgtgattggtctatgtttctctcgtttgctcatgttcgcgttggttttggtgaagatcggatcttttattttatggtccgtttcttctctgcatgctttcttcttgttgttgaagttttctgttctttttactcggtgatctaggaagttcatcatagggtaatctgtgttgttgccattgtttggagttcccctatttgaggaactagctaaattatgggagatcctctatttagttccgggatttggggtcttgtgtagattctttgattgtgttcaatgtgccgcatcgtagattcaggttcgatgttttttttttgccctgcttatttgattctggagttatgtgcaatcttttctgaataccaaattctgctaatgtgactctcttttggacttgagctcaaaatgtcttgggttctctggccatgatcttttcagttctccattgtagttccatcgatcagtggttatggattgcttctcttgttgtttttgctcctgtttgcgtcaattattaatttgttatcacagtggatctacaatccttaaacgtgggtagttcatcaggttaggacaagctgaaa

SEQ ID NO: 47557 - DNA, 709 bp, Manihot esculenta
  Intron number 2 from transcript cassava4.1_017752m (locus cassava4.1_015287m.g) derived from phytozome v7.0 (chr-ID scaffold06089; pos 551101 to 551809)
gaacaggagggagatctcaaagtatctcttccaaggttcagatatctctcctctaattgtcttgcttgttatttgttctgatttattgtttgcctgtccatttcagatcattcggtagcatagaaaattattaaagacaaaaaaggttctgatttattgtttgcctgttctgtttaaggcttaaaatgcatttcaaagcttttattaatcaaatgaattccaagaaattttatacaacttcgtatcctctccaaattgattgaaattttgaatgaagcataataggagcattaaatatatcaaatcttcataatggttccattttttggaatgatttctctgaatgaatgtacaggataccaaagatgtttcacaaatgaatttaaaattcattatagtgaaatgatttcaaccataattgagctgctgggatggcagtagatatgtttggtggttgaattaggttctctttctttttttttttcctgaaaagaagagccaggttctctttctttttttccttttctgtttgtatgttttccatttaatatagaatgaagctagtatgctaaataatttaaatcaagttatggaggggccttgtgtgtttgttttatttttggtaattgattgactacctgaaattttcatgcattttgccattaagtaatgggatcttatttctggtgaattatagagggagtttgct

SEQ ID NO: 47558 - DNA, 856 bp, Manihot esculenta
  Intron number 1 from transcript cassava4.1_014429m (locus cassava4.1_014429m.g) derived from phytozome v7.0 (chr-ID scaffold08265; pos 2238727 to 2239582)
atcacgaccgagtaagtacttgttttggatttttctcgcttatgggtttttgttttgttgcttagaaaatgaaaggaattaaaagaaaaattatgaaaggggctgtgattttaggctatgcaatttaagggcgcagttgtgcggttatctctgttttctgtgtattgttttagttcaaaggtagaaagttatgtaattgatctttgattatgtgttctattgctgaagataaatgggaacaaatgagattttgcatgatgtgtttgcacttgatcttgaattgcaaaaaattggaatattacaattcaaagttctcagcttagtttggacttacctttgaactgtaatctttgctttgtattggtctttgataatcgatagggataaggtgaaatcgaaatttgggatttaatatttacatctcatagaaatttgaacattttttttgataggtgaccatccatgcaagcctctagagaggatcccccccttttgaaggctcctaaagaaattaatatgttgttataattgattgcattttctgtcgattcaaacaatggacttgcaaaggagtccctgaaattgacttccataaaaattttgtgaaatttgcatttccctagcactctattagacatagctttgtcaagtatgggtttaagtttttatttttatgattttgcttatctggtgagcaagcatagtccttttcagaaagaagtttgttttaaacctaggcctaattcaatcttatatatgcctatttaaaatagcattttgtgatcatttgtgttgtttgttttctgatatgtgcttaataggctgaagagcttccaaaagagttccctttcaagat

SEQ ID NO: 47559 - DNA, 445 bp, Manihot esculenta
  Intron number 2 from transcript cassava4.1_022326m (locus cassava4.1_022326m.g) derived from phytozome v7.0 (chr-ID scaffold06814; pos 795132 to 795576)
aatcagtatcctgttttgcgcaaacagctgcatttttgttcttgatttgctctctgaattttgtaatttggaggataatttgttgttaatttgcaatccgtgttttccatttttttggtctccgctaagctttgcattttcttttggattttgttgaatttaatttacatttaactttgtcattgaattttgcgatcaatgtggtagaatgatataaggggagatgaaaattaatttgaggcaagtttagtcacagattaggatttgcattcttcttatggtaataaattttgtgttttgttttttttttttgaaaaaaactttattagtagctacagaacaaaacattatgcttttttattttttatttttattagattggtatgtttttcccttaatttcttacctagatacgtgcataagaagtttagtctacagtataaag

SEQ ID NO: 47560 - DNA, 1004 bp, Manihot esculenta
  Intron number 1 from transcript cassava4.1_000161m (locus cassava4.1_000161m.g) derived from phytozome v7.0 (chr-ID scaffold04083; pos 326892 to 327895 reverse strand)
cttcatcgctgtctcctgctaattcgttttgcaaggtgtcttttttttttcttttagttttcctcttaattttcttacccaattttcccgttactttggtttatgttttgcttcagtcaatgaagggatttcgggaggtgttgacggtgtggattttgggttgtatgagccggtagcagatatgatttgcttttgagggagttaagcgactgaagaacaattcgtttgtttacggtgtcgttagatgtgaactggatgaatttttattgtaaaacacctggtgttgtttggcttgtgtagatggagaattggggagacgaatggctcgatttgtgtgagtttaagagtgaatctgattttggagaattgtgcttgatgacttgtttcatataggatttgaagtaaattctaaatttgagtttttacgtgttttgattggcatcacaattgacttttcttataaactttaggcgttgctcctcattcccttgatgaggtgatctgggaaatagacaagtgatcaatcgccaatatgaagttgttaatgatgttttccttgcttctattaaatgaaattttgatgggtgcaaaactgctttgcagtactaagaaattcattgtattggtcagtaaataattttgtttattcataatattctgggttcagaagtctctgtattactgttgatctcatacaaagatggctccatgggttgaggctgctatatgcaacttttaactagttgatcatggtatcgagtataatggtgaactaatgagtttattgatgtataagactgactgagatgtatagatttttatttcagaaaccactgtctctattattttatacttcattgagaactatttactgtgttctactgatttggaaaggcagttatatttaattctctcttcagttaagttgtgtgataatccactgaatttccctgtttttttcttcaacaggacggacgcaagatcactgttggggattgtgctct

SEQ ID NO: 47561 - DNA, 607 bp, Manihot esculenta
  Intron number 1 from transcript cassava4.1_009594m (locus cassava4.1_009594m.g) derived from phytozome v7.0 (chr-ID scaffold08542; pos 633203 to 633809)
ccatatagggagctcttatccaagtctcactggaggtaaacccatgtttttcttttagtgcaatttttcttgcccctcttggttttccaagattttgtgttgttgatgggttaatttctttgttaatttcagcgcttagattcttatctgggtttcatctgtgtgtctaaaattccagctaaattttgtttagaacattttatacctgtaagtgatggaatagttacttttctttgagttttcaaatgaatcctcatatgctacttgcgaatctcttatgaattgtaaaaggaagtaatttgccctgattacttactgctcttttttgcttatttattgattgagccttatatttgggtttgacaaatagtgggtaacataaggttaagttcttggtggagctgaatgttgtagccaaccaccaccagtgaccttttttttatttttctaagtttggtccctaatttaggtgagaaatgattaacttttcctttttaaattttggagatgttatatgcatttgagtttgctttagttgaactataaattttagagtgtttgcttattttgaactcatgtggattttggtgtttgtaaggttccagag

SEQ ID NO: 47562 - DNA, 990 bp, Manihot esculenta
  Intron number 3 from transcript cassava4.1_009594m (locus cassava4.1_009594m.g) derived from phytozome v7.0 (chr-ID scaffold08542; pos 634102 to 635091)
aatcacgagtatcatctccagtgcatccttgagtgcagtacaatgcatcactaattctcttcctttttcacttttgacaattatcatttctgcaaagcatatccattttgtgttttacaaaattaggcacacgcattttggactaagaaattgaagaggacaagtactatgcatcattcattttgtgttctgtttttattttatccttgacatggataggtttaactgtttagctctgtggaattcagtagttttgtttttgagggagtagggatagaggaattctttgtgatatggaaaaaaagtagcatttgaaacaagacaggcaggttactgttgatgccatggatcctaggaggtatttaattttgatatgattgtcgtatggtgcatagttttgctctgtgtcgttgggctgtgaaagtgtttctaatcttcctgctgtttgttttggcggcatagtactttgtaaggatttttatgaatagtcatccccaaaagttgtcaactgtgcttctttgttaagagttctttattaacactcttgtttttcatagtcttcctttcataagtatttgactgtttttctggcatcaatggccctctggggattgtctatgatgctcctttttccagataactcaactcaagtatgatgtcaaactggatggtttcataccttatctgagttgtatttgttttcttcaatagataatatgacttcgattgtaaatttatgtgaagttttgtttcctcttttttcctttaatttaaaatcactgcattttcaagttatcctagttgatcaatcctgaaattgtaggaatagcatcaagtctctagtatagtctttcttaagggaatacttttctcagaggttgatgtggaatattgaggtgtacaagtgaaatcgagaaggaaagagaagatacccttgacatcttacacaattttttgacttgtaggtgccagagaagctcccagtgtccc

SEQ ID NO: 47563 - DNA, 554 bp, Manihot esculenta
  Intron number 4 from transcript cassava4.1_001953m (locus cassava4.1_001953m.g) derived from phytozome v7.0 (chr-ID scaffold02943; pos 357006 to 357559 reverse strand)
gataaattgcctgatattggttctgagtataaagggtaagaatttttctttttcttttcttttctcctctccctcaggcatagtggttaaaatcaggaatcgactgcttcaaatttggaaaggatttgctatataaaatttagcagtaaataattttccatggatcgatagtggctcaagcagatcgtaaatataattaaaggaaaattttatttattagtattaaaatggcttaaaatttctccaattcacctcataaggtttgatccataaattgtttgacttttcttatgctgccacattgagacctaatgtggtttggtaagtcagaataatcactgtcacgtcatattttggtttcatcttaggggtttaaagtgctttctatcagcatctttttctaatgttatacaccttgaattttcatttttccattagatgttatagtttgatgttttaaatcctgagacttgcaaataatatttgataagcagtgtttttttttaaaaaaattgggatgcacatttgaatctaatcatattttttctgcagag

SEQ ID NO: 47564 - DNA, 459 bp, Manihot esculenta
  Intron number 1 from transcript cassava4.1_022167m (locus cassava4.1_022167m.g) derived from phytozome v7.0 (chr-ID scaffold08542; pos 185583 to 186041)
tgttctcctctctcttctgcttttactcatttcaggttcttctcttggattcttatgtgcagttctatatatcagttgcatatgtttgtcttctccttctctctctctctctctctctctctctccaagtgcacacacatttctgaagcaaaatatatcttaaaaattatttttttttataactcattttgaaaaataatgtgaaaaaaaagatttcatattgcagaataatttttcaaaatatatcttaaaaaagattttcaatttaataatttctcattaaaaaaaattaaaattttgcataatttaacaaacattcatttgaattcttttccgcatatcaaacaaaatgtatatgaagatcagagcatttgtttctttaaatttggcttttgggtaagatcaaagttcatactgacaaaagatttttttttggaaacagctgagttcacacaatct

SEQ ID NO: 47565 - DNA, 873 bp, Manihot esculenta
  Intron number 2 from transcript cassava4.1_004509m (locus cassava4.1_004509m.g) derived from phytozome v7.0 (chr-ID scaffold08542; pos 517715 to 518587 reverse strand)
gttaaaaggaagaccccgtcagaactgagagtaagttttgaactcatgatctcttccttcatgtttttgctctataacttgtactgcagttgctatttagacagcctggtactcttatcatgtgatttatatagacagaaacagagttggatggtttacctttggcaatttttaaatggtgatgtctttatattttggcttatcaacgtgatttacttttattgagggtgctattgatgatacacttaattgttgtctcacttcatgatcagtacctattatgaagactattttcattccttcattcttgagtctgaattatttgcctttttgtggtgttatcttcacttgttggtattgtataggaaaagatgaaataaatagaagccgttgtgctaggaattaggaaaataattctactcagctgtacgttcttgtatcagtttcttattttttacaactcctctgtttatgttttgtgactgatttaagcttattttggaagtgtttgagtgtcttctaattgttgttcattttgagttgcaatattgtatagatctatacaaaagttattgaaagaaaaaggttagaagtagaatggcctttatccatcagtgatggtgtggccataggatcccccctccctgttagactagacacgaccgcaaattccaaaacactggataatctgtaacaatgtcgtagaaaatgaaaagtgctataaattagcttaatgctcacaaggaacagtgattaaatttatacggttcaaaattttatttctagaatctttttagatccaagatgaatgagaaaagtctcatggttttattgtaatcatcggcatgcagggagagcaattgaagaggacaa

SEQ ID NO: 47566 - DNA, 850 bp, Manihot esculenta
  Intron number 3 from transcript cassava4.1_016601m (locus cassava4.1_016601m.g) derived from phytozome v7.0 (chr-ID scaffold10563; pos 1169800 to 1170649 reverse strand)
aggctgcacaggttcatatctatcttccacccttccatctccctaaaaagtgccctgtctatatcagaaattgaactataaaatttgcaaaatgtccctaatcaattggtttacttttagttgttgcacctcagctaataagtctaattaaactaatttcatcttgtcaattccacgctacgggatgctcgttttctccacctagagttcatgctgtctaaatgctaactgcattctcttattatgattcaaaagatcccatgccaatccccaggttggtgctttcaaggaaatggcaaatgtgatatcttataacattggttggacaaagactaaatacactgaacaacaaccctaaagtacaacactaatttaattctacaagtcaattggagtttgcatacttgatgtgatcatattgctgactttcacaaattctagccttctttcacttctgaatctctcgctcgcttgctcctttttcccaaaagttatcattgtgcttttattctcattattgactcttgcttgcttgttagtaggacatcaatgtattttcctgtctctttgtttacttgatcacatgtatgtttatcatccttatctaagttgctggacatgtcactgctagatccttattttcaaggttagttcttattatttatttatttattttaatgcctaggaaaccattgtgtgcccagtttctttccccccttcaatgaaaagtaatttttatcatctgaataatacttgattattattcaagttgctgaaaagtatatacttagtttattcggcttatatgcatgagcatatttgaataatggatttgaattgcactatgtag

SEQ ID NO: 47567 - DNA, 373 bp, Manihot esculenta
  Intron number 1 from transcript cassava4.1_016601m (locus cassava4.1_016601m.g) derived from phytozome v7.0 (chr-ID scaffold10563; pos 1171024 to 1171396 reverse strand)
gtctacacctttgacaccgttgaagaattttggtggtatttattatatttatctctctctctttctacgaacattcccgtagatctgttcttttgtttgtttttggccttctgttggatgttatcctgaggttcatgaattattggtttcgttgctttgtttctgaggtttccttgattatttacgtttctactggttttttcttttgtcgtgatttaatttttgaatgatcttcctttctaatggcttacgttagtggtgtgcattcttagtgtgtttggttgttatatttgaaaaaaaaaccaagaggtcaattgaaagttgaatgttttatgcagtttgtacgatcaaatattcaagcccagcaaattgc

SEQ ID NO: 47568 - DNA, 951 bp, Manihot esculenta
  Intron number 2 from transcript cassava4.1_001940m (locus cassava4.1_001940m.g) derived from phytozome v7.0 (chr-ID scaffold07238; pos 403446 to 404396)
cattcaggtagttcatttctctctatttgtttctggtttctatgtatgtgcggatggagaaatgaacaaaactttagccgtttttgttatgcttatgatggatatggctagttagtgaggttttatgtaaatgtttagtatctggaaaacggatttatgcttatggaaaagcggtttctagtggttttttgctcctttggaatttgagtgctgcttccttttacactagtaaaaatggctaaatattgttgttagtttgatgatttttacactcaaatgtgttgcagaagcagaacagtaggtgtggattgaatctatttgcattgcttgaagaattattaattctgtaggtctaatctaattctactgcttgaaattttttattttaaactctgatatctcttatgaggccttaataaggatgaaaagttactttctactgcaaatgctgccaagttttgtttcctgaaatgaggtatggggcctctgggcattaggtgctctgcaagtgtcacatggctacatgcaatttatcgattatatcttttgccaaagaaaaaggaaggaaaaaaaaaaactaatcttcaagcaaagttaatcaattttgcattacagttgggttctttgtgactaggttagggtcagtaaatactctggaaacctaattaaaaggatttaaacttgctacctttcgtacatgcattaatatacaccacatggatacacatgtagacatcttctcctaggcacacaatacacatgtatacacacattcacatttttcttatagtggtttattaaataacttcttttgtgtgaataactatttccgtgtacatgcatgtgcacattcaagtgggtttatgtggtgctcatttgcagtgaaattccatttattctttatgccatgataattgtataaattttgttgtagattggttttcaccagcg

SEQ ID NO: 47569 - DNA, 788 bp, Manihot esculenta
  Intron number 1 from transcript cassava4.1_007695m (locus cassava4.1_007695m.g) derived from phytozome v7.0 (chr-ID scaffold07238; pos 22182 to 22969)
gccttggggtttaccatttcaggtattttcttggatatttatttttatatttaattttcttttgggtattgggattactgtattagaccttaacatgattgatgaaacagttgaatttgtctttgtgcttctgaagttttttttttttgaagtggttgctttggggttttccatttcaggctaaatcttcaacttaaatttaggtttttttttttaaaaaaaaatcttatgatttttgggtaccatcatgttcgatatgggtttattgttttgactgttcataattagtaaatctgcaagaactgtagtgttatggattatttcacaaatctcttggatatgcagttacaattgtgataaaaaggtgaaagtttttattaatgaaatggagtttccttgtttttccttttctgtttgtgttttgacttttcactttggaactctatgttctgctttcaacggtgatgaaagtagtagataatggtatgggatgaatttctcatgctatattttattcttcgttgggggtttaaaatctgatttatgattgctttgactaataaagttgaatgtataatatttttataaccagttaatagcagaataaattttaataatcgtatcagttgaatttccagctatggatgaaccttgaatattttagaggccgttgttctgcaactcaatgttattgcactttgtagtgaaccaatgaaatcttttattttattttatttttttgtttgacatgataattaagtgatgataaagttgattgcattgcagaa

SEQ ID NO: 47570 - DNA, 505 bp, Manihot esculenta
  Intron number 4 from transcript cassava4.1_017414m (locus cassava4.1_017414m.g) derived from phytozome v7.0 (chr-ID scaffold07680; pos 20723 to 21227)
ttgcaaacctaagaaggttagtgagctctcaaccttgcatttatcttgttagttgattaattttgagataaacttttttgtattggtttaatagccatgaaagtcttaaatctttacacatttgagcaatttgtccaaaccttttaatttttagtattttttttatgattttaaaagttagttggacaggttaaaattgaaaaataaatgtcaccaatgtgaattaaaaattagttgaaactagttgcatgttgcaagtcctcctccaagatataagtcaattaactttttattcaattgatcataaaatattttctttattcttagttataagttctttgcagttggacatatttgtatctaagtttttaaatcatcaaaatttccaaaatagaaatatctagactaaactgcaaaaacacaggttttttccattgctccttttattttatcaattctcctatccctttctttgtaaacagggaagctactatattggtccaac

SEQ ID NO: 47571 - DNA, 976 bp, Manihot esculenta
  Intron number 3 from transcript cassava4.1_017619m (locus cassava4.1_017619m.g) derived from phytozome v7.0 (chr-ID scaffold02264; pos 807319 to 808294 reverse strand)
gttacggtctgatcaagaggtgagttatgatctgtgattgtgattgatatacagctggccaacggggtagattatggcctgaatctgtgaatcggcagtttaagtttaaggaaattaaaatttaattatagggttttatttttgttttgttttgatttgattttaattttattttgttttgatttgattttaattttattttgtttttttggtttagttgtaattaaattaacgataattttttcaacattttatttaaaaataaaattttgattcgttaacaaaatcaactaatttattcgaagtaaattaatttttggttagttcaattttaattctgaattaatttttaattggatttaaattgaaaaatgactgagatgtgatcattgatttgattttgttttgactttatataaagattttaagaattattaaatttgtttgaatgttataatagagatgcctttttttaattgtatgttcattaaaaataaaatttattaatttttaatgtatcattgaaattcgaaggcatataagtaagcaaaatgtattattttgattataatttttaaatttatctaaaaataaaaaataatattatttgcttgtttaattggaagatgtgaagtaaaaaaacaataaaatgctcgatttgtcttaatttagatattgttttaaaatctttttgttctatattatttataattttaaaaaattaagaaagcattagttttttttatttttgaatactcttgtcttattatgtttgatgtgtacaactcatagaaatactatttacacaatgaaaataataaaaatatgccaatggtacttgctacagacatatattattcaattattaatatttttttttcttctattatgtgaaaacctttgaaatgagatgaaatatgctgatttgggtttatttttagggcatttcttgggagcgtgagcaaccattgcgccc

SEQ ID NO: 47572 - DNA, 562 bp, Manihot esculenta
  Intron number 2 from transcript cassava4.1_000380m (locus cassava4.1_000380m.g) derived from phytozome v7.0 (chr-ID scaffold08265; pos 4564573 to 4565134 reverse strand)
acaaaggcctttaccaggtactttctcatcattcattttactgcttactgttaatggttgaaattatatagttgatcgtagttcttgctgcaccttagttttctataaggagtctgttaatagacttttattttgactgaagttaaatatctgactacgtagattgtacctatttgctcaaatagcttagaagatttccatttgttgattcatagaaccccataagcacatctttgattgatatatgcatggggatcttaaagacaataaattcatttgagaaaacataaagtgaatgggcctcaatgataaaggtacatgaacatccatttgagtactgactgtgcttccaaggaagttataaatgagcataagcaggtttctcgttgtgatattacggctcatggcatggcttggcaactttacttatagggtttatatcaggctagagcctacagttaatttccacctgttcggtgttaagccctgcattatgaccgaaagaatttttatatcgtgcttgcactgacatgtgtatgtgtgtgtttctctttgagcttta

SEQ ID NO: 47573 - DNA, 1015 bp, Manihot esculenta
  Intron number 1 from transcript cassava4.1_015323m (locus cassava4.1_015323m.g) derived from phytozome v7.0 (chr-ID scaffold04223; pos 28083 to 29097 reverse strand)
tcctaatcactggctcaaccaaaggttctttcacttttctaatttgcttttgcttagtgggatttcagttttaagttccattaatccttgaaattgaggttgtgttggttaaaacgttgaaggctcttgaataatgttgacagtatggtgaaaactcttgttttcattgtcaataggagagtagttttaaaacccatatgaaatttagctcacagaaaaggaaataccagcactttgaattacctggtaaaagtggagccctgagtttcttacaagtttaataggaagactgatgattgcttagtttgctgtctctgttagattaaaacatctggattgaggttgcaagggattgcttttgtttttcatcgaggcttaagaagaattctagaaactataatctcaaagaaagaaaattatttggtggctaggttagttttggggaatatgacgttgttgatcttgttttctgagttgaaaatttctgttgttacttgccactagacagtcaaggagttgttgtggagaagctgtttagggagacacagggcatgtgcttctgaaaattaattggagaactatttttattagcattagaattgtatggggacgattgagggaaagtcaagtcaagatagctgcaagttcatttcctgctatgaagaagtgacttattataaaagggaagaagaagcatgaaaaggatgagatagggtaaaaattaagaaggataccgttgtaacttagccaaaatattgcattcaattggatacaacttactgtgactggtaacgaatgtagagattctagagcagttccattgttcaccgtctttagtagtttagcttctaaatcattgcctctttatgtcaatatttagcttaaggacataaatagcatatgctttatgaactaattaaaaatttttaatgtcttcaatctctctctttcttaaactggatggtcatgtatgtcaaatatgattcatctgtttctgattattcaggaatagggt

SEQ ID NO: 47574 - DNA, 621 bp, Manihot esculenta
  Intron number 4 from transcript cassava4.1_016279m (locus cassava4.1_016279m.g) derived from phytozome v7.0 (chr-ID scaffold03241; pos 249242 to 249862)
atcgtgacagaaacaaagctcctgagttgagacaggttctcatctttcttctgtcttaatctggtttcgttggaaataaattgaacatgcttcctgtttgttactatgaagaaaaataaattttgttgcatgttattttacatttttactgcaattggaaacttttgttaatttagtgaaaattctttgtttgttttgtctgttgaaattgatccggctaataagataaactgttgtaagaaactaagaatcacttgttcacttctaggaaataatacctaatactcacttgttacacacttactgcatttttatcaactattggctatcaaatattattatatttctagcgttttcagataattttgaatttgacttgctgttataaatttataatactaaactaagacatagttaatttaattaccagaatgatagaccgtaattcttgtaactgcagataaaaaatcatatttcaatctccagtctttcctagctgcggaagaattaattgttctgcatgtgcttaatttttatttctatcttgttgcttgatgttctttgctatgaaatatcttcttttaaggtcatagctgcaactgtggccagtgatccagagaa

SEQ ID NO: 47575 - DNA, 1041 bp, Manihot esculenta
  Intron number 5 from transcript cassava4.1_016279m (locus cassava4.1_016279m.g) derived from phytozome v7.0 (chr-ID scaffold03241; pos 249902 to 250942)
ttgtgcttggattcttgactcagagaagtggggaggtgtgcataacttattccctcctgttaactacatgcttcattatttagataccaaattaccaaaactagaatttgagaacgtgagatttattatctagcatgttcaatataacgcagaagctgtatctgctgaaaatcttccttccgtaaactgaattttttaaaaaaatttagaacattagtttttctcaccaacattgcctatgataagcaacaatgttttcgtctaaggcctagcataggatgactgctacaatattagtcagaattcagcctcacactcaagaatttaagatgcaagaaactggtttgcttggatgcttcttcagatatttgatgcaccttttcatgaaaatttgggcacggaaacaattatttatttcttctgaaatgttaaaactgaaaaagactaacaaaatagttcttagatgtactttcactatggttagtaatgtatttctacttttgtacttttctaactgaaggcttatattagttgaacttaactgctgagtcattttagcccttgagtttgtttcttactttgctgttgatattttgtgggagctagaaacctcatctgtttggctgtaaatttctctgttgttagaacggactgaattattttgtcctctccttttctctgcttaacgggtaaaacaatcagaggcatagtgtgaaattcgttctttatcctgtcttgagaatgttaaatgtcttctgagagtaagttgttgaaatttgagtcttgcactgtcttaacttcagcagtaataagaaattgttgaatctagaatgttttattggcttatagtagacatgttcgcatagtttgatcagatttgcgtaaaatgtctgctttaatgaaaatcttcaagcattcttattctctcttttttttttgggtcaagcaggagtgctgtttcttcactaattatactatgccgctgattttctttatttgttcgtaggtgccattgagctttcaatattagcagattattat

SEQ ID NO: 47576 - DNA, 631 bp, Manihot esculenta
  Intron number 2 from transcript cassava4.1_031009m (locus cassava4.1_031009m.g) derived from phytozome v7.0 (chr-ID scaffold06871; pos 782507 to 783137 reverse strand)
ctgcgaaggtgtatatgctacgtttgttatgtatgtgctgtgtaaattcaactgttaggcataatttatggtatgtacattgttaagtataaaaaatgagcatgtggaagacagtttcacttatagttacatatatacgttgtcatattaaattcttcattcagtcaaatatgctgcaattactcaatggagtacaatagattttgccgtcttttttgttgttagtgaaaaataaaatccacaaataaaagataatatactagataaaatttacttattagacacttttagttatactccttaaaccaagggaaatgctgcagtaacacagatattttatcacttgtgttacttgaaggctggcatagctacagattatttactgtttgaatgtaatagtggtatttgttgctgaggctttgacctttcgaaatttaaaaggtttatgcctggatatttctctcaagctcttccccccaacccctctcaaaagaaaaggaaatttcatttatttgttaattttgggattgcctgttatgtacatcatgaaattacattaaaagatcttttggacttttactaatagttttaattattttcagtggaaaagaagtggagcctttattactgg

SEQ ID NO: 47577 - DNA, 910 bp, Manihot esculenta
  Intron number 2 from transcript cassava4.1_005806m (locus cassava4.1_005806m.g) derived from phytozome v7.0 (chr-ID scaffold07845; pos 11913 to 12822 reverse strand)
cagggattttgtttcagcaatcttgtttgtccaaggtaatttcactgttataaattcatgtcttggaaattcgttttgttttcaacgagatttgaatataatccatcttcaatgtttaggcttatggcttgtcataagtcagccttaaactatctatagacggcctggattaagcatgagttccactatttgatagacataatgtttgataaatatgtttggtttttcatcaggtcaatgatatgcttttcttgatggttttatgtgtactcatgcagtgttttttaagcatttgatttactactgctaaaaccatgtctaatgtggatgcatttaattggttgttaaatttcaggtgaagagttttactaatggaagagattttagcataaatgtaatctatttatggaacttttcacttttctacatgttacccaaatatgttgaagttttaaatgaacttgtctataatgttttatctcatggagggaacacattacttgagcaaaaacctatgaactattgttttatctcatgagagtgattctgagaattggaaggtttatcagattatcctattttacgtgaactagcattgttggtgttcaatgattacaaaaatccttaacatgaggagaactcaatttaggcaataatagacatctaaaatgggaatgagaaatagaatattcagagtgttgcaaatttgttgcccttcacaccccaaatagaccatccaaatttaatttgtgcactccacttcattagcagcatcattatttactactcttttgtgtctgttaacttattttattctcttatatgtaactgatattttttatgctatttgagttatgatttcagctgatttatgtttgttaaaatcaagtgcagatctacaccagctgct

SEQ ID NO: 47578 - DNA, 439 bp, Manihot esculenta
  Intron number 1 from transcript cassava4.1_016381m (locus cassava4.1_016381m.g) derived from phytozome v7.0 (chr-ID scaffold07070; pos 35260 to 35698)
caattaggggtgcttccgaaagtggccctcaaaaggtaaccaactctttacattcccaccttctcttctgtgtcactacccacctccaattttcaactgtttagggcttagtttttccatttaattttgtttatttatttatttattttgagtttcaagctgtatttcaggtctttgagtatgatttgaagtagttgattttattttttgaaggtatacttttttgcttttcttgtttctttgaggattctagggtttagttaggtaaatttggttggaaattgaattgctttgttggccatttcttgtgattcgccttgaagcaagattttttttttcccaatttgaagcaggattttagctggattatgtttttattatgctttatagtgtttctattaatggttaatttactataaatttttacagagcaagtgac

SEQ ID NO: 47579 - DNA, 712 bp, Manihot esculenta
  Intron number 2 from transcript cassava4.1_016381m (locus cassava4.1_016381m.g) derived from phytozome v7.0 (chr-ID scaffold07070; pos 36059 to 36770)
gacgaacaatacaaattggaggaaggccttaacaagtaggtagtttttttttgggatacgcattgtcttctttctttttctttcctagataactgttagccatattttaatttcttacttattatgatgatttttgtgccagcactgttgtaacactgttaaagtatcagccaaggtggttcaaccgtatttttgctgacaaaaataaagattaaagaataactaaagtaaataaggatgtagctgttattgctgatatagtggtcttaattatcttgggggtaaacttaacttctttttttttttccttttttttccctcctctctcaaagtgagtgatgcttttgacttgttaagtaggagatatatgtgatatttctttagatcaagaaacgaaatctgctggttttaacttattaactgccaaaaagtaaaaattgtagcttctgttttgtgtgtacaattttacataatgtaataacttagccttgctattattgacaattgtttctccagccttcttgtcttcatttccttataagatttatattgcatggttatgttacagaatgcttactatgtttgtttgcaatggttccccttgtctttcatttatttcacactgcatgtttgttttcattctgggctaatttgctttttatacgttagttttgacttgctaataattttattctaacatataggtttgctg

SEQ ID NO: 47580 - DNA, 1066 bp, Manihot esculenta
  Intron number 1 from transcript cassava4.1_017437m (locus cassava4.1_017181m.g) derived from phytozome v7.0 (chr-ID scaffold08086; pos 67315 to 68380 reverse strand)
gcattttcgggttcttctccccataagcagtataggtatagaattgcggaaccttggaattcttgggttttaatattgtgctgacaaattttttgttgatttgaggtttctgtcctgtttattgatgtgataaaaatgtgttttcatatttggctgtgggttcaataccaatttataaatcctattaatgaaacccaaattccagaaaagcaattttgaacatgggctctatattaagtaatgattagaaattggggagttgtatttccgtgccattgcttagctattagaaaattgaagcattgtacttgttatgaatacagattgttctttttttatcacattgttgatagtttttttttgctttgttgttccttttttttcaattcttaattttgcagaaaattcaaattcaagggttggacagtaggatcttatcttggattccgacacaaggtcagtcatagaaactatgtttgttgtatttttcttgaccacatggaattagaaattgtgagcattgtcttggaaaattttgttggctttggctgtgttctctttgtcccacctcttgtatgctaaatgacaggtagacagcactgtttggagctgcttattagaaatatcaagttttggaagaaaaaattctagttgctttctttgatatgatcaagtgcatatgcaactgaaaattacttgaaatgattgaacgcatgttgaactctagtgtatcatattagcaaacaattagtctttaattaaactttttaatggactggaaaacaattaagaatttacaaattcattttgaattccatattagtatatattataccaaataaaaaaaattcatttgcaaatgaattccatattagatttgaaccaaacagggtgctttggaatttactttgatgttttttctgtgcttcgtggtaatatatctttgtgattttccgttctttgtagtttgcattccttgtggaagatgcacctgctgtaaatgaacattaatctggtttccgattttgcaggtaaaagggaaaaccacaaggcttgtgcatataat

SEQ ID NO: 47581 - DNA, 235 bp, Manihot esculenta
  Intron number 4 from transcript cassava4.1_003743m (locus cassava4.1_003743m.g) derived from phytozome v7.0 (chr-ID scaffold08265; pos 3578173 to 3578407 reverse strand)
tgttcctattcatcttagcatctactctccaagtgtgtaaattactatgttatttcatgctatttgaattcatgctggggacttcattgtccatgaaattccttatttgtgttttttcttctagaagttgtgcatcttttgttcgtgtttagctcaatgtcaaagagataactgtttttcttggttgcattgttttgcagttgtcaacttaacgctgattgatttacctggctta

SEQ ID NO: 47582 - DNA, 825 bp, Manihot esculenta
  Intron number 1 from transcript cassava4.1_027353m (locus cassava4.1_027353m.g) derived from phytozome v7.0 (chr-ID scaffold01448; pos 4116 to 4940)
ttaaggtactcaaatatctcaacatattttcttagttttccatgtctttctgtcttctgtactactttcttggaatccaatcatctggttttcgtttgatgatgttatgttgtaaataactagagtagagattggggttttaatgggttgtttaatctgattggtggattaactggaatgcactgaaatgatctaatggcccttttctttgtcatgaattgttttcccttcaccttctgaatttaattgaaatgaactgttgcattagcgttttattattcctcttcaaaatgatcaaggaggaataagattaagttttttatttttaacaatttgaaccacatttcaatggatggttttcatatttatggtgcagaagagttgtttgattgaatgaccatttgaaggagcattcatctctttgaatgggaaaatctattcactgcatgtttggagtcacttatacaaataatgtcccagaggactcattttttagagcttcaatttcatgataaaaatggactgcaattgaacaatgtgaaactccagcttgaccaattccaaaaatgctctgtaaaagaattaaagatttgttcattagaaaggatgaataaggaaactcttttaatcatgctttttgcatcatcatttggggaagtacaatccttttactatttacttcagctgattgcatattcaaaaataagcaggttgaacttacagtaatgactgttcattgaacttcatcatctttattttctggttggctgttttcattttgagtgtggactgtctaatattaggatccagtggttagacctcttc

SEQ ID NO: 47583 - DNA, 313 bp, Manihot esculenta
  Intron number 1 from transcript cassava4.1_026813m (locus cassava4.1_026813m.g) derived from phytozome v7.0 (chr-ID scaffold03060; pos 315747 to 316059)
gaggtttccactttcttcttcttcttcttcttcttcttcgcattgtctacttattttgctttgaaaccacaagcctgacttctgatatgttgttttcttctatttgcagggatcaaatgctttccgacttctcttcattggcctcggtctcttcgttgctggttgttccagtctcaaggttcttcttcttcttcttcttcttttggttatctaattactttactccattaatttaatattcatgtccttttatttttgtgtttctgtgaatcgtttagctgggagaaacctgctcgtcaggtaacgtctgcga

SEQ ID NO: 47584 - DNA, 645 bp, Manihot esculenta
  Intron number 2 from transcript cassava4.1_017420m (locus cassava4.1_017181m.g) derived from phytozome v7.0 (chr-ID scaffold08086; pos 67315 to 67959 reverse strand)
ggacagtaggatcttatcttggattccgacacaaggtcagtcatagaaactatgtttgttgtatttttcttgaccacatggaattagaaattgtgagcattgtcttggaaaattttgttggctttggctgtgttctctttgtcccacctcttgtatgctaaatgacaggtagacagcactgtttggagctgcttattagaaatatcaagttttggaagaaaaaattctagttgctttctttgatatgatcaagtgcatatgcaactgaaaattacttgaaatgattgaacgcatgttgaactctagtgtatcatattagcaaacaattagtctttaattaaactttttaatggactggaaaacaattaagaatttacaaattcattttgaattccatattagtatatattataccaaataaaaaaaattcatttgcaaatgaattccatattagatttgaaccaaacagggtgctttggaatttactttgatgttttttctgtgcttcgtggtaatatatctttgtgattttccgttctttgtagtttgcattccttgtggaagatgcacctgctgtaaatgaacattaatctggtttccgattttgcaggtaaaagggaaaaccacaaggcttgtgcatataat

SEQ ID NO: 47585 - DNA, 227 bp, Manihot esculenta
  Intron number 1 from transcript cassava4.1_002109m (locus cassava4.1_002109m.g) derived from phytozome v7.0 (chr-ID scaffold10563; pos 1419086 to 1419312)
attcatcatcagcctccatcttgcgcccgtcacaggtcttccatatcaagatatccaaatttcaatcaatttctggacgttctggttttcttaactcggtttctctcgtttatttttttgtcgcacgattaaattgtgatttgatttttgttgtttgataaccattgaatttcgtttctccgattttgcttttgataattcaatcattggttttttcagaggcgata

SEQ ID NO: 47586 - DNA, 869 bp, Manihot esculenta
  Intron number 1 from transcript cassava4.1_008692m (locus cassava4.1_008692m.g) derived from phytozome v7.0 (chr-ID scaffold02871; pos 443596 to 444464 reverse strand)
tgattctttctactcctccattcagctctcaccaggtatgttttctagtttctttctttcttctcttcaatgatctttccttttgtcttctttcttcaatgtggggtgactactgctgtttttattgtctgtatctcagttgtaattttgggtggttgttctttttctttgatgatttgtgcatgaggcttttgggttaattcatatgattctccttgtttagcaatcttcttttccctgctattggtgaaagatttgccttgtttttctgccaaactgcaagatttagctgcttgatgcttgttttctacttgttagaatggaatctgttacaagaatatgaatctagagtgaaaaaaaattccctcatttacccatgatattatttgctcctttttcccttcttcctttctcctttttgttgttgatgccaatttcctcgtgccttctccccataaacaaaacaaaaaaaggttcattgcttgatccccttttggttctttcatcttgctttttcttttctttttcaagtttaggctgcagtctcttgtaatttattctcaaattgcctacttttattcctacctttgaagaaattctctcttttctggcgtttgtttatctaaaagagcaactttgtctagtgttctcttgatgaatgaaaatttagaaaaggaaatgctttgtaaaccttgttttttcaatttgctctcaatttttacctggtggtatggactaaatgcataggataccacttaagctttctttcatgatcgtgtatttaattcttctaagttctgtttctgcattcacgaataacttcattggttctttttatcctcacagttgatattttcaagttcttatcc

SEQ ID NO: 47587 - DNA, 906 bp, Manihot esculenta
  Intron number 3 from transcript cassava4.1_016309m (locus cassava4.1_016309m.g) derived from phytozome v7.0 (chr-ID scaffold08265; pos 1949263 to 1950168 reverse strand)
tctattggtgagtttgtgtgtataaaatacacatgcggacacacaacataaaagacattactctgtgtgtgtatagttgtgattcctgggtttaggcgttgatttttgccttggtcacagattcctaaatttgtttttggtctgatgctatacatctcattggaatgaactgtgaaccagtcaaggagggactcttttttgcataacaaagatggaaatatttagaggggttgatgagtactaaaattaagggttgttaacttgttattattcagtttccatctcatattattttattttatttttgttttgcctatacattataaggaacgactgcatgtctatatgtcatctaaaagccgccaatagaattctagattctcaaggaggatttgcttctctaaacccttgagatgtttgaactccaaaccacttgcatactgatgcatcttaagaactggaaaaacaataaacacgcatcaaagattcaaatgtgagcgtcattgtaaagatgcaaagattcaaagatgcattataacatgataatgcttaagacctacttgctattagttgtctccttttcattcaatcagcttcagctattcattaaaaatactctttaacaatgtgattgtttattgttatatgacaaatagaagacgttttcagacagttccaattttgagcatatcttctgtcagtgtcataattttgaagttagctttaattatcaaatattgcactttttgccttctctgtctcgtaagaaagattatgaaatctcaggactaaagagttttagttccatctggtagaaagtaaatattatgtcataatctttattagcgttttttttttgtttgtggatcagaaaatttgactcgggttttggaaggggaaagagat

SEQ ID NO: 47588 - DNA, 982 bp, Manihot esculenta
  Intron number 1 from transcript cassava4.1_032990m (locus cassava4.1_032990m.g) derived from phytozome v7.0 (chr-ID scaffold08265; pos 4629184 to 4630165)
gctaatcttcaaggttagttgctaagttttcgttgtaaaatcgcagtaacagttctttagcttgtttacttctcttggaaatttgctattttgcgtttaagttctatggccttctgggtttctgcaagttgctacatttgggtttaaacaagtcatgtgaaaggcggaaactttttaaccgaaaagcttcaatcttgtatgttactcgattttcattataatttttgttattactattttctatctggtgctttttcttacttaactttcgttatccttttatttatctttttcttcaataactttgatttctgattctttttcccctagtctagttatgaactgggcactgggtagcgttttctcaaaacactgaattgcttatcattggaaagcaaaaagcttgagtatatttattttgaaattctctaaaaattaaagaacttgaggctaaatagaacgcaataatgctttcgcattaattgcagatcctgggtggtttattacttacgcccaataacattaaaaaattctcattcatcaatagcagaagacaaacaaacccaaaaaaaaaaaaaaagaaagaaaagcttaaagacaaagggaaaagtgcttcttccatgtctgcctgaatgattagctgaatagtgacctccattattacttggtagttgtattgtgttatattttaatttgagactttattatcatttaatcttttgaaataagcatgctgggatctatgttttgcactaccaaaaaggaatgaccaatcgagagcttcgtctttaaaaaagggaacatatatatatatatataagaaatttgtgagtctacttggccttctcattttagaacacctgctatcatttttaagctcataactgtagccaaatgggaaaattttccaaatgaccctcaatctgattttctttttgtttaaccagttttgcagctgtgttacaataagttgactgggagt

SEQ ID NO: 47589 - DNA, 827 bp, Manihot esculenta
  Intron number 1 from transcript cassava4.1_001463m (locus cassava4.1_001463m.g) derived from phytozome v7.0 (chr-ID scaffold03572; pos 62748 to 63574 reverse strand)
actcgttagttctgtcaactgcagtgactcagcaggtgattctctttctttaatttctctctttatcatgattctttgattattcttctttctttgctagccagtattgatcaccttggcagtgatcgatgtagctgggctatgagaaaaccaagttagcatcatggttggtattgaagaaaagaaagtagtatttcaagaaaaacaaataggagaaacccatcagctcggtttcaagatctgggattgttcatgtatttttatttttgtgtttttatacttctcatctctatcgctctttcttcctatgagcaattgaacttaccactttttctttggagacaaaacctgataaagtgaatcatattagcctcagacctcagtgcactaacagacaatgaaataggacccacttgtggtaaccttagtttgtatacatccatggtaagaatagaggctgtgcctgcacaaagtcacagccatatgttgctaagactttctagaaaaagattgatgaatgtcagatgaggcccaaccagttccagctgttgttacccctcaacaaagagtcaacgatagaaaattttctatattaattcaataactaccaagtcagagaactctctcctcaagattttatggtatttaattcagaaattgtgtcatagtttagctcataaagcaagacagttgatattacagaaattttctgcaacttcctggttggcaactttcttgattttttttttcccttgattaacctgcaaactaattattgtagactgccagtaactagaatggtgcatatttgggttcctttgtagaaa

SEQ ID NO: 47590 - DNA, 761 bp, Manihot esculenta
  Intron number 1 from transcript cassava4.1_015244m (locus cassava4.1_014952m.g) derived from phytozome v7.0 (chr-ID scaffold06089; pos 180516 to 181276 reverse strand)
ggattcggcaactaccgggtaagttattcctgtaatattagaacttcaaaacataataaagttacaatatataccatcatatggataaatctcaattcagtcaatttgttaggagtatagttgttaatttattagccctttataacagtcccttaatgcaattgccttttaaggttttgtcatctagcctagcaagactactttcatctttgttctttcttttcttgcttagcatggcgatgaactgatcatatgattgttaccacagacaaattgcaggcacttttgacatgactgcaaagtttttttcccacttttttgattattcgtcacatgattaaggatttttctgcatagttgtgtacgttgcaaagagataccttattttcgcttgatttggtactttgaggctctagttggacttgaattttggtgttctaatttctctgaagatgagtagtaattcttgcctatgctgtttgatatattgtgtatgtgttttcttattccccttttctttttgtgggggtgggtggagaattgtgggatggggagggagcagggttcagtgcattagtccgtatactgtttaaaaattttccgggaggctctttgtttcccgtactaaaggagctctcttattgacaggcatccttcttggaccaagtttcttaagggttatgtgtggtagctttgtgttcctatattgattaaggctgtttttcattttattttcctgtagttcagttaacaacctacct

SEQ ID NO: 47591 - DNA, 1001 bp, Manihot esculenta
  Intron number 2 from transcript cassava4.1_018896m (locus cassava4.1_018896m.g) derived from phytozome v7.0 (chr-ID scaffold02892; pos 554158 to 555158 reverse strand)
gcattgacagaattcagaaaggtaatattgcttgtttatgaaatttacattgcagaatagtgaatagcctgtttgatcttgatacagcgtttgcaggaaatacaatccatagtgttataagattcatgcaaattctataacttttcatgtttggaaaataaaaatattcattcggaaattaaaattccatgcaccgtttaactgtaaaattaattagagttaaatgcatctatcttttatttagattaataactcggtctctctttctctatattaaattattaatgcatatagggttctgggaaaataaaatattacaaaaatcagcaacttggccttgctacttttgattgaacccggtagaagagaatgaaaccaacaaccaattttttatgaaacgtaaagaaaagcaatgcaatctagaggaaacaaggcaaggaactgaggtgtgatggtaagatagaagcgacagacctgtgtcacctgtattattttaaatatcaaaataatataactcagtaacataaatgttggatcaattagtcactctttattctaattcaattttcaaaaacctacccaatagatctggtttttataaattttaaaccatagccaatgagattgacctggaaacaacagcttaaccggctccctacaagttcttttgctcaggtcggcaggttatagtaggctaatgaaaacccctacttatccccccctgcatgaagagtaacgtgggaatatttaatttcatggagatttagtaatttgaaaacgttcacaggaaacaaaaacttgaaagcattgctatttctctacttatctcatttaattttgtatgttcacttgtaggtacagtaaagcatatgccgtctcttctccagcaaaacatttaagtgtacggcaatattcacatgagagttctaaagtatgtccataactttgtgttacttatggttcttttgtgttagctttcggaaacaccagattgggcattc

SEQ ID NO: 47592 - DNA, 739 bp, Manihot esculenta
  Intron number 2 from transcript cassava4.1_032045m (locus cassava4.1_032045m.g) derived from phytozome v7.0 (chr-ID scaffold08884; pos 17474 to 18212)
cccagtgacccaaatctcagagaatacttgcactggtaccttctggattcacgcacagcagtttcatgtataaatgcatggacgtttgagttttacgtttgatatatatatttgtgtttttttttatcttccttgcaaacttcaataatataatccaagaataagagctagcctcttcaactgggcatgggtgaatagttagtggctcagagagttgatggaagtgggcaacataattacagtaattaacatggaaaccatgaagccccacacgaaagctggatgagctatctatagaaatagagatgtggtagtgccaccttattacctgaagtagacatgtacctgttttctgttcaaactcctatctcatatccatttaagaattaaatagaaatgactcttatttagtttgggtaatcctttctttaaggtagggctaaatttatccatttaatcaaattctaaatatgatttggatagtgttgattgaatctaccttttctttccattgatctccgtagaatttaaatccctttaattggaattcaaaatcaaaaatatattttagaagaaatattttttattttatactcttactattaattaattttaaaatttgacagatcatctaatggtaagaggaattaatccaactcaaggtgataggttggtcacttactctttctatgaactttttgtaggttggtcactgatattccaggaactacaggggcaa

SEQ ID NO: 47593 - DNA, 806 bp, Manihot esculenta
  Intron number 1 from transcript cassava4.1_005490m (locus cassava4.1_005490m.g) derived from phytozome v7.0 (chr-ID scaffold08265; pos 3796632 to 3797437 reverse strand)
tgaggaagttcaagcggtacaagcaagctctggaggtaaatttgaaattttctggtttctactgtactccttccttggtctgattggtgaatgttgttgatgttttagtattagttcttgtttggatacttattttccataaattaaagctggtttgttcatccgagagtattcaactattatttttcaatattacaagtcagctcgtacattgcaatttggattcggatgttttatatgagtggttatttcgtacactgaatgcatttgcaccagccgacctagttgggtgtaggataattttggattcggatcctctaatgtttgtgcaacatgatctatcgtgtttgaacaatcttagctttggattcaaaatgaattattgaggttttattaaaaaaattcaaggagtaggtggtatatgtgagaaaataaaatccaaaccatttggctgagattgctcaaatatgacagctcatgtttccataacatgagaggatttttatccggtaattttacctcgctaggctacaaaatgtcaactgtttttttagacttttttctcatacaccggtaggatatgttagctgaaaaaattgttttttacggttactttgctctcatgaagttgttacatttctattttaggacaatcatgatttcaaagctaaaggtgtcctgggttctgttatgtttgtgttccgcttcacgggtttaagatctagttcttaattcttctgtttaattttattggatttggtttcaattagtaactggtgcaaacgagtatttcatcttgtaggttt

SEQ ID NO: 47594 - DNA, 818 bp, Manihot esculenta
  Intron number 2 from transcript cassava4.1_010519m (locus cassava4.1_010497m.g) derived from phytozome v7.0 (chr-ID scaffold03802; pos 254135 to 254952 reverse strand)
ccaccaccactactgatacaggtttctcctgtgattccaaactttttaacttttcatgggttttggacactgcatgacactgcacttttagaaccaagtggacaagcttcatgatgcacacactcacacacaaatgttcatgcatgtccacatgtgttctagtagtttgcttggttcacttctttggattcttgttcaagaattcatttctaagttccttaagaccacctccaaggattccatcagaacgcacagggattctttgaatattataaacctatttgtgtaaattcctgatagagttttgcatgtttgaatggtggggttaggtaaggttaggtaattaggttgctgctttgggatttttcctggatttaacccgactactcttggtttcatagagttgttaagactctaaatttgggtaaagttgaattacttagattttgggtttaattcagcttctttgggtgagaataatttgagtgtttgcttaggcttatattttgatattcttgggattattttattcataagggagatttaggtacttctgtaatctattacattttaacttgcttctgtggtttattcagaaaaaaaaggttgcttctgtggtaaactagttccctttttatataggtttactcatggtgctttttctgtggtggagtttgtttttcttctgtgtttattgttgatagttctgttggatttttgttaaaaatttctggttttagttaagagtttgaccgtataatttaagtaattttgttgaagttttcatgtttactgcatgtgtatgtacactacaagga

SEQ ID NO: 47595 - DNA, 692 bp, Manihot esculenta
  Intron number 1 from transcript cassava4.1_028064m (locus cassava4.1_028064m.g) derived from phytozome v7.0 (chr-ID scaffold08542; pos 31018 to 31709)
ttagctataatcagctccagaaggtactacactcttcttctttgtgtctaaatatgaattgggattgaattggattactgtttttctatataacttctatttttttttcttgggtttgttttggtagagattggatcttgcttctcaagttattctgtgatgattttattttctggccagtccttgttgtttgggtgttattttagcgtctctctgtgtttggattatgagtgttatgttccccagatccactataagaccttgtttatgtaatatatgtgcagttcatttgctattagagtttatgattgtggggcagttacaattgggtatagttgtatcagctttttctgttatggatttggtgaccggataatttcatatagaatccctgttgaggaaatggctttccagtgtcttgcctgtttgcttagaagactaagtattaaggttttgatttctatgtttgttcattttaatgacaacctgattgaaatgcggttacaaaactttgccaataaaaaagcgaagacaattctctcgttattcatgtgtgaatgtttggtgcatagacccagtatgcatttacaagtttgagcaagctatgttaattgagttgtgatcagttagtaacaaaattatgtacttgtggcatagttctggagtgagctgtcaccacaagctagacagaa

SEQ ID NO: 47596 - DNA, 531 bp, Manihot esculenta
  Intron number 1 from transcript cassava4.1_004598m (locus cassava4.1_004598m.g) derived from phytozome v7.0 (chr-ID scaffold10563; pos 1299896 to 1300426)
tttttcgtcctagcgttactttgcccccaaaacaggttcttttctcttcactgtttcagttctttcttcctttgtgcattcttttactaattttcagtatttttacgtaggaacgctttatgggtaccataagaatcccctatttagtgtttacgttgtttatagaattgtatttgctcattttcaagtgttttgagcttgaattgtctctggtttgcgataattttagctgatatattcattgtaaattcggctcttttacttgttttcagtgtttttgattttcttgtttttccattgtttatttggttatacttgctcattgtcaagttgttttgagccagatttgtcatctgggtatcttataattttagctcttgtgttcaaagtaaattcaaagttttgaactttgtataagttagtgtccttctctccatttttatgattattttcttggcaatgactgtttacttattacccctttgatgttttgcagagccagctgttgaattgttggtttctactctctaa

SEQ ID NO: 47597 - DNA, 441 bp, Manihot esculenta
  Intron number 2 from transcript cassava4.1_027686m (locus cassava4.1_027686m.g) derived from phytozome v7.0 (chr-ID scaffold06814; pos 238061 to 238501 reverse strand)
ggatatccaaggtaattaaaattgctctcctttttctccttttctagtacgattactttgtgtgttctttcagaaaaggaatcaaagaaaagtgaacaccactataaattttaagaaattttaagaagaaatgaggctgctcctgacctatgagcatagagctggcgaacacccactattgaattattagcccattgactatggagttcacctttatacaactatatcacttcatttatgctatgacatgatgagccaagagagcaaaagagtagtgggaattggcctatagaggaagttgacagtactatattaagctaggtggggaacaagagtagtggaaatatacctaaaagaagtgtttgatttgaaaaaagtttgtgttttttttggctaattaacttaaagatgtataaatatattcctgactcttacagcaag

SEQ ID NO: 47598 - DNA, 310 bp, Manihot esculenta
  Intron number 1 from transcript cassava4.1_008345m (locus cassava4.1_005636m.g) derived from phytozome v7.0 (chr-ID scaffold05133; pos 143742 to 144051 reverse strand)
agcttctcatagaagagaccctatcaagtcttcaggtttacttcttcctatcattcttctagccctttttgggggctgctgctgctgctgcttattgttagttaggttttctatatcaactattaagcagttgcagattgaattatttcctttcataatttcccaataatcaaacagaagatttttttgcattcaaaatgcattatgcacttgagtttgattggattcttagactcctttttgagtgaaatgcttgctttgtttgatttgggtagttgggagtgttgcggcgcagaagagacggcagaat

SEQ ID NO: 47599 - DNA, 1006 bp, Manihot esculenta
  Intron number 1 from transcript cassava4.1_003702m (locus cassava4.1_003702m.g) derived from phytozome v7.0 (chr-ID scaffold00506; pos 69540 to 70545)
cagactccaaaaggaaggtaatttctctttttatccttacaggctcatctccttgtgttgctttgttatctaaggactgcataataaatgcttctagtttttgttggtggttcttctctttttaatccctatttggtatgtttgtttagttgaatgctaatggggcactatagagatctttgctgttaattgatgggtattgcttgttcatattctggctggtgaagtttcccttttgatgttcttgagacccttcaatctcttattctgtatttctccttgcaactttcactatcaagccacaatttttgtctattttcgaaggtgatggtctattccttgaattgcgattgattcctttcattatcaaaactaagatattgggactagttgagactgtgctggcctgctggggcatctcagtaggccttaaaatatccagtttttaattgttggggccaatctttttgaattattgttgcatagttagatgatatgttattaaatcagtttattactcttccttaaattgtttataaataattcttcaatctccacaagattttagaaatagtatttgattccaaattccatttggacatcatgggcagctcgattagctagtcaagccatcagttagaaaacaattgagtctaatgattgattctgcattagagatggatgtgtaaatgaatgcaagctttaatcacccattctgtgcatgatcttcctggagagctccagaagccaatggaggatgatctatgggggatggcttggtcaaggctttgcatcaaagtatagtaataaaataaatgtagaggcttcacctgttaccatctacttgatcatgtatttactcttagcttagtgttcctgagacaatgcatgcaaagattttcccagaaagctatgcttcttggtgtaacttattcattatattacctgttgtaatttgacaattttgacagcagaaaagactcctcagaagcaccacaaagagttc

SEQ ID NO: 47600 - DNA, 658 bp, Manihot esculenta
  Intron number 2 from transcript cassava4.1_014176m (locus cassava4.1_014176m.g) derived from phytozome v7.0 (chr-ID scaffold10563; pos 963544 to 964201 reverse strand)
tcgttgtcatcgtcgacgtcattgaccagaaccgagtacgtatattctgtgcatttttatacggtagaaggggatatcataatctttattctttttcaatcatatggatttagcaatcgatcaaaacttggatagattaatcacctagaatttttttttccttcaattgttcatttatctgatggaagctctctattgataactaattgactttatgaagtgatacaataccttgtagttttaatgggagactgcttgtatttctattgcctaatcgcatatgggtgcctatctttgtgtgtttcctgctcatgttgtgtgcttgtttcctatttttgtttttttggttgtcttctattggctagaaactttggcatcagcatcctgccttttcttttcttgtaagaagctaagaattatgctgatggtgagggtgggagcctcttgcattgatatggaggtgggttttaggcttgtatccagaagaaagagaagcatgtcgaacctttgggatctgttgtgaatgatgtgcccgcatttaacattgttggcatgtgatgccttttatatgtatatttgatgttcacttaccgaaaatgggtcatggttgtcttaaaaaaattattggttgtttctcctctttgacaggctctagttg

SEQ ID NO: 47601 - DNA, 810 bp, Manihot esculenta
  Intron number 1 from transcript cassava4.1_014865m (locus cassava4.1_014865m.g) derived from phytozome v7.0 (chr-ID scaffold07238; pos 466117 to 466926 reverse strand)
cctgggtttgattcaagcttctcattaaaaaaggggtatgtgactttcctacgaaaattttatttcactgattagttacttgatcgatttgttttacttgttgactgccaatgctcgagtttgtttatacactttttttttactagctgtcggattatctaggattttgattgcttgaagagactgatcaagttgaattacacatgagaaatgcgatgccgtgcattattctgttggttgtatcgaagcaaatgtatgccattttattgtaatttaatttaatttcttatttatgaacttgctatttgtcaagttccttttatttgatggataatgatgtcgggatcgatagctttatgtggaagtttgcttgattgagtggctggcctaatacgccatcatcatataacattatggggaatgtgttgtggttttctcaatgccttgctagagtcatattatcgttattaataggacatttaggtccattgcttgatggaaatcactcattgcagtttgcattggagtgagtttatacgtttagagtctgagagatatgatgcttaactataaagcataaatatatattggaagcttttttgaatcccatattttatagcctatcagttgtctttcgggcgttatttgtgactcattctctctgaatatatcttctatggaatgtgctattttggttcttggggatttttcacttaatctttagctcccagtgtcctcctaaacacagttttcaaaaagtgcgcttcaagcagttcactaggctccaaccctaacacctaatgcacctag

SEQ ID NO: 47602 - DNA, 1039 bp, Manihot esculenta
  Intron number 1 from transcript cassava4.1_016375m (locus cassava4.1_016375m.g) derived from phytozome v7.0 (chr-ID scaffold06814; pos 1027218 to 1028256)
gaatctctatctcagatctgtgtcgtccttttcaggtatttgattttctcttactttcccgagaaaatcttatgttatcagtttttttcagtggcagtgagaaaaatagttcaaaaggatttttgctttttttttccccccttttttgatttgttttctatgtggccaaacaggggtgtgaggattatgtgaagtgaagcggtgcatgttggctaattgttactatttcgaataaacagatctttactttcctttttcccttgcgaaatgaggatttatacttaaaattttttgtgatttagaggaattctctgtttatctcgaaactattgaagacgttttatttgtttcaatatttgtttttattgcatttggatcagctgtcgaaagcgtctggttctgccattattgttaagttttttcaagtatatttgaaggtaattaatggtaaaagatggtgtgtagttcttccacagattgtgattcttcttccgattttctgtttctgtatcatgttttgataatcatgttaagttatgttgcatgtttgtgagctttgggatgcatatatttaattgtttgacgctttccatgatcaattatcatttgtcaatccctgccaatttttcctggtcaaaaattttgttgaccatgtctgatatgacttgaagtagatttgaagtactcttaaacctgcggcagattggttctctgactaattgaatttagtgcaatttttattgccaccttttaaaaaaaataaaataaaatttccccttagtcttcttgtttcattcttttatttttttgtggtttgatgtttcagctagtgagatggttggtggggtgtatatttataattattcgtggcacatcacccgccatctcaagttcaatagccaaaacttgttcatagcagcccttgcgaactgcagaagtcggattttttctttgccattatcaatctctctctctctcttgatattgcatttctttttcacgtctttttgcagtctcgtaggctgtccgactctgagat

SEQ ID NO: 47603 - DNA, 933 bp, Manihot esculenta
  Intron number 1 from transcript cassava4.1_019731m (locus cassava4.1_019731m.g) derived from phytozome v7.0 (chr-ID scaffold04402; pos 1229 to 2161)
gtaatgaaagggcttgattgtgtaaaaactaaatcagtgaccattgtttggttgctatttagtcggtatatggagaccaaaaacactatcgtcgctaattatggcagaaaatagtaacgcgaaatatcggtgaccaatctagcgacgaagctacacggttgcaaatttaacgaccatattgcgatgaagaaactactacataggcgacaacacaacgacctcactaaataatttctatgctaaatgttttattcataaatttagcgaccgaatgtttgtggtcattaattagtaaccgattagcaaccaatagtaaaaaatttgagtaggatgacatttcaaacttcacaactaattagcgaagggtagatagtcgctaaatattgtgactaaagagcaacaaaacattgattaaaacattaattattttaactaaattaattaattaattaattaattttaactaaaaaattaattaattaattttaactaaaaaattaattaattaattttaactaaaaaattaattaatttttaatcgaaaactaatacatttctaaaataacaaatccttatagattctttaaatatattttttaattaaattgtaaactatttttttatgaatatatatctttatcaatatatatatatatataattaagttataattatttattctacccattttaaattattattatatattatattaagttaaatttaaaaaaaaagaaaatacaatttcatattgaaaccctaattctataatcaaattgttcttcctatcgactatctccttcctccttcccttactctcaccgtcgacagccccttccctcagtcgctcctgccaatccaccgacaacttctttccttactcacttcctatggacagatagccccctcctctcactctaactcacttgagct

SEQ ID NO: 47604 - DNA, 748 bp, Manihot esculenta
  Intron number 2 from transcript cassava4.1_002626m (locus cassava4.1_002632m.g) derived from phytozome v7.0 (chr-ID scaffold06089; pos 166330 to 167077 reverse strand)
aattttccacaggagaagtttgtgaggttagttaccattggaatgatgttgaaatgcttctattgtctttgccatataattacttcttgctgcgttgtatgcttgagtttagggatactgttaaggcattttagccttaacttaatcttgcaagcacaactcaatcatgaagaggaaatgaatattaagcaggtatacaagtacttggaattaggaccagaggttgttaaatttagaaagcaaatacagagtataacgagttagcgccagagttgttaaatttagaaagcaaatatggagtatagcaatttttagatagtgacttgtatatattttattttctttatgtgaaagaaaatcattcattttcaaagtgaaattatggccaagaccttttcattgtgggcatctttgcagcaaccatgttcagaccttgaagtggtggttttgcccaccactagagcctgcatatgtgattatgtttttgcaattttcaccatctttttgtctgtttgtgtcacaatcagtttctctttgtcccttggttctaagattattggattgaatcttatcgttagcatctgagttttattctgagatgttatgtaatttgttttagtttgaatttcttatggttgttgtgacgtataggatttttcaacttcaagtggatgatgtagagtgacggttcttgttgataatatgttattcaggtttcaggattggaagtcagagaaaagtactgaag

SEQ ID NO: 47605 - DNA, 798 bp, Manihot esculenta
  Intron number 1 from transcript cassava4.1_002626m (locus cassava4.1_002632m.g) derived from phytozome v7.0 (chr-ID scaffold06089; pos 167162 to 167959 reverse strand)
cagtctttgatcaatttctgatattttcttccttggtatcttctatttttctctcttcagtttctactccagtttttcaatttgcttcgattactttacttgtttcagtttaatgtgcctgaaaatgattttctactcccaaattagatttgattactaattttcattgagtcaataaagtttttccttcaaaaagaaaagctaaagaaccgttcttttttttttttgggaaattttcaatttcctatcttttgggtgtgcactgaagttgggatatcttgtagtagtaaatcttcctgtaaccaaaccctatctttttcaaaaaaaatttccgccgcatgtacggatatttgtgggcatctctatacatgtcagtacggtgggtattgctatacgcctgtcaagatattttttgtgaggatattagtggcatatctgaaacttggtatattttgagaaagcatacctcatcttgcttttatctaataatcctaattttaaaatgctttatattaactctgctgtctacttgaatactgcaatttacagtaagttttttttttttggtgaatttggttctttaaatgttgcgctgatggcagtactaattagttccatttccttttttttttttgttttaacttccactcagttattattatatgtaaattttactgtgccttgatattcagtgaaggttgcatttgggtttaggttgaaaagaggagtattataatttataatatatttttctttcaaatttttacagggattgaaattgggctaactttccagttt

SEQ ID NO: 47606 - DNA, 608 bp, Manihot esculenta
  Intron number 2 from transcript cassava4.1_024028m (locus cassava4.1_024028m.g) derived from phytozome v7.0 (chr-ID scaffold03569; pos 74087 to 74694 reverse strand)
aaagtcaattgccagaagaagaatatccttcaccagttgcaaattgtctttttcctcttgtattgcttttgatatgtattctattattctttccttcaagcaataacgtgttgcagatatattttctgtccattgtggttttaaattctgtattttcgctgaagcaccctggcattttatcatctagttttgatttttcacataatcttgaagtttgaagtcctgatgttgctaagcataggtttggaacctaaactaatctcaatgatgcattttataaaaaattacaacttaagggttcctgtcggttttgaaagatgtctagaattcattctttctcactcctattgtcagtgacatctagatttaattcctcttgtcaatgatgcactaaatactgatgtcaagaattcactgttccttatgttctacattcatgaagtggataagtgtcctgtgttatttccttgactttattctgtcttccactgggaactgttttttctggtgagtccaatgacaagcactgcttttgtaattatcattaattatgtttatctcatatattttgctgatatatttggtttttgcagaggaagattcagaag

SEQ ID NO: 47607 - DNA, 873 bp, Manihot esculenta
  Intron number 1 from transcript cassava4.1_028118m (locus cassava4.1_028118m.g) derived from phytozome v7.0 (chr-ID scaffold10493; pos 247487 to 248359 reverse strand)
agcgatattggggttggaagcgaagggaaggacacgtaagctcttttgaattgacaatttgagaaagtgcaacattatgaaaaatatttatatttttctctctttgggagctaactcaacaaagaaaccctctcaaaactgtataataaagtcaagttagattctgaggaagtctagaagctcaaaaacagtaatttcataggctaattttcattgaaatggggtaggttgttaagtctccagaatgtggcagtcatgaagaatgcataatttcatacttactgtaccttgtttggaaggaaggttcagactgacctcttttgaaataacataaactttgacataattaggtgttgtcttgagtagattctgaagaccagaagcccataagcagtaattttggaagtttctcctggacttaccaatcctctcccattgagacagtatactgaatgttgcttgtttgtttggccaattggatctctccaaacttgaatgagatcaatcatccaccaaggaccttttatgctcaccagataaactgtacaaacagttccgcttcatcttcttttgtggatacttagtttgcttataaataactaatcactcttgtcttaaataatttgattcctaatttataggatgaaaatttttattgaaatttgatatggtatgcactgaagggatatgacgctcatgatgacactcatattatatgaaattcatattatcatctgcaccgggcttcaattggagtctagaatgcatcatcatccttggttaaacatgccatggcattcgtccaatcatactttttggatctgaacgtctttgacaatgttttcaggatatctgtaacatttgtggataagg

SEQ ID NO: 47608 - DNA, 1039 bp, Manihot esculenta
  Intron number 2 from transcript cassava4.1_018494m (locus cassava4.1_018494m.g) derived from phytozome v7.0 (chr-ID scaffold08245; pos 43826 to 44864 reverse strand)
gtaaaaagtttgataaaggtagattttctaattcctctctttagttcttgagttgcccttttcagtttctcctcctctgtgtgcatctgtttctctatctatccttaatcgctctagattcattctctttggtttctaatatatgcaaatttgtttgtatcctgatctagtcatattatgatatgccagatacatcagctaggtaaatcttatgttgcatgttaccagtttagggatgcaactttaacctcgcctttaaggtttattcatgccagttttgactagtaatgctcatttttggatggatgacattgtatgagagtgaatagcaagagcttgatccattgctctaatgtagcgaatgaaaaactgaagaaaaaggaagatcaaacccttcaaagctaatgttttcttctgaaaatggtgtaaaagccatctccatgttgtgtttagtagtattgttttgaatctcaattattgtcttgcatttggtgcttttgtaagacaatcacttgtattttgttctctgctttttattttgtaaattatatgttcaagtttgttctgatagcatattaatgtacaagttctttagaggaatctttttcacaactctgtagcaattgttccttagcaggcacaaagtttgggaaattgtgagcttcatgaaaatgtgctcctaaatgttaatgcatattcaagagttaaacccatgatcccctgttccaccagctgtaggaaatgtatacatatgatgttatttgggaaggatatatagatgctaaagtgactttttgacctttgcaatagtattttatttgctaatatcacttttgacagaatagtttatgatggctatgagaaaaaggaatgcatgaaacacctttaaatactcttatgtgagagctgtatgcattgagtatgtgattaatctattacttcttttgaaatcaattatttattcagacatcacaagtttactagttatttttgtgtttatgtagtttcgcgtattgaagcacacagccagaactgtgac

SEQ ID NO: 47609 - DNA, 473 bp, Manihot esculenta
  Intron number 3 from transcript cassava4.1_025148m (locus cassava4.1_025148m.g) derived from phytozome v7.0 (chr-ID scaffold01948; pos 37252 to 37724 reverse strand)
tgctgaagctgttctccgaggtgctcaggtaggtagtttgtcgcaataattgtatgcatacagtcagtctgttatgcggacgtattcacacaaacataactattgcagtcaaatggttcgattgcgtcttaaacgttaggaaattattctgttgattactgtctaatcaatattacatttgaggtttaaataattgtgttgttattctcaaagtgcagtgtaactaatttttctaggtttatattgtgtttgctagactttatttgtctttcttttcttcacaccatatattgcttcttttccttgtggatttttcttatgaagatttgaactttagtactcaaaatgatcttgtcaagtagaaaaatataaaaagttttggtgtcatgaagcaccaaagggatgtgattgctagaccaactttctcttgttttctggtggtaatttacttgtaggtatttgttcctggtgta

SEQ ID NO: 47610 - DNA, 819 bp, Manihot esculenta
  Intron number 1 from transcript cassava4.1_024749m (locus cassava4.1_024749m.g) derived from phytozome v7.0 (chr-ID scaffold03428; pos 105052 to 105870 reverse strand)
tttgtaaacttgacctctccaataataatcttcaggtatgtctttcattttttcaatggagattagatatagtttttactgtgataagcttatttaggagaaagatattttacgaaaaattttcaattagttaacttgatgaatcgagaagttttgtttaaagaaaattaagaagacttttaatatgaagagaatttttaagcatttttttcaatctatcaaatgttgtttatttgaaagatgaatttttaatcaaccgtttaactcaccaaattagtgaattagaaaagtttttttaaatcataattttatttaaaaagaaaaattttaataaatcttttaacctatcaaatgggtaaattaaatttttactcgcttattttataaaaaaaaacaatttaaatggattattacaatattgcatatgaaaatgtttcaaattaaaagaagaaattgaattttcttattacaaacaagaaaatttaaacaaaaaacagttgaattgaatttttttgaaatttttggaggatttttttaatctatcaaaccggtggattcaataaattttgatatgaaaaattgtttagatcaagtctacatatatctaagatataaatatataaagaagactatataacaactataaaaaatatttgcatttatgttttagatctatatgaattcaattcggacaaaacttctataattttgatattttacgcatattattacatacccatccaaagaaagaaagtttgaaattttgattatgaaaactgggcagaacataccagaatctttaacagcaaggttgttgaa

SEQ ID NO: 47611 - DNA, 757 bp, Manihot esculenta
  Intron number 2 from transcript cassava4.1_006363m (locus cassava4.1_006363m.g) derived from phytozome v7.0 (chr-ID scaffold03198; pos 9778 to 10534 reverse strand)
ttgttcttccttcagcggattaatcttggaaatcggtactcaaatctagaacgactgtctttgactatgtttactcttcactcttttcattgcttgtttcctgtcctcatctccgaacttctgattacaacagttttatctattataagacaagggttttaatattattcgattatattacttgatttggtgataatataaggtagatcagaattacaaactcgttagctaaggtttgtagttaacttatgcatctcgtatactgatgttttatcattttatcataagttcggaagaacattgatgatggcatcattatgaaaagaaaaaagaacagtttctttgggaatttgtaagtgtgagctgaacgagattgaacgagtgaaaggcatgagtgttaactgttaaggatacatagagtattgcatcaaggttttggattagatatgttgtggatctcagttttcataaagctgaaaaaaaaaaaattgtttaagcgttttggattcttaccttagatctactaaaagtggtattagatccaatagtttgttagggatgagagtgagccaggacactcccgttaggctggtaaaatagaaacttcagacgcatgaatgacagtggcatcattttctttttctagactcattgagaaggattctctcaatcagtgtggactccccatatttctaacatatttgttcaatatttttgagtaggtccattggagtttgacgtagacaactacaaggca

SEQ ID NO: 47612 - DNA, 631 bp, Manihot esculenta
  Intron number 3 from transcript cassava4.1_009326m (locus cassava4.1_009331m.g) derived from phytozome v7.0 (chr-ID scaffold07380; pos 23562 to 24192 reverse strand)
ccaggcatctcattgttttctctgtcatttttgaggtgttttttttgtaatatttttttttataaaaataatatttttttcctcgttcctttacaatgaactcttggacttctggtgcgatacattcaaatgttcatctacaatgatgagagcaccacagtgtatagtttagtttggtgatattcttgtgttggactagagcctgatgtttactgatagtaacatattacgcatattggtccttgtcaatctttgtagcctctttccaatttacctcagtcactccagtttctgtttagcagcttccagccacctactccaaatttacaatttcatgaatatgtgttcacaacttagctctttgatatctattgaactcctatatcattctagtggaaatccttgtatggcgtaccagatgataataaattaacctttgacgttttagcctgttcaatacaacattagtaagagtttcatcatttcggatatagacatttgttacttcccagtttgaatttgactgaaggacagtattgtaaagttggttttctatccattcttctgtgtcagtctccctttttagttcttactattattgttctttaaatccaggtaattgcagtaggct

SEQ ID NO: 47613 - DNA, 517 bp, Manihot esculenta
  Intron number 2 from transcript cassava4.1_012695m (locus cassava4.1_012695m.g) derived from phytozome v7.0 (chr-ID scaffold07359; pos 9740 to 10256)
tcatcaaaactcaatttggaaagcttgatatcctggtaccactaaaacctaattcccatttcttcaagttagaatatattgtgaaattttcagtaggtctacaaactggttttgaaggataaatagataaatatatcaaaggatattgtctgtttgagagggctgatgactattgcttagatgcctcaaccaaaatgatttaagctgtttggcttggcttcccctttatattttttttttgtttctttgttcttttccaatatatgggactctacataagaagcgggcataaggaggtgagatgtggaaacatcaaattgaattcttggggctcgaaatataaaatataacgagattttaaacttttaatccatttcctattgaattactgaaatgaacctcgttcttttttttatagtaagaactcctgtatgtctcatttgtttatctgggtttttaatagtgagcttctataagttgaattattaaaaatctttcacctctgtgcaggttaata

SEQ ID NO: 47614 - DNA, 594 bp, Manihot esculenta
  Intron number 1 from transcript cassava4.1_008835m (locus cassava4.1_008835m.g) derived from phytozome v7.0 (chr-ID scaffold03104; pos 168432 to 169025)
gattctcttgtttgtcacgcccaattcctcaatatgtaagttttcataattctcaagtctctgattcttttgtttaattcttgtacttggagttggttggttctgcagtatctgatgatattggttttgggtttggtggactttgattctgtgttattgttatgttgtttttgggtttgttttcggtttgaccgagtttgcgagattggttttggtacgaaaaagtgaaggacttctggtttaatcttttgtttgataagtacttatttgcagatgatgctcaattgtagtattttggaatctgtactacaaagtgttctgctaaactcggcaatcaacttattgtatgttgtgattttgactttttgaggtattatgttagattttgcaatttgcgagttagtcgtcatccaatattcattgctaaattttgcaattttttccatatcagggtgtctagtattctgaaattataacccaagaagaaggagccctttactgttgctctcttttgacacgataattttgacctcgagcataatccttgtaatttgcgcaggttctttcccgagaaggctgaagctttagcatttg

SEQ ID NO: 47615 - DNA, 235 bp, Manihot esculenta
  Intron number 2 from transcript cassava4.1_022464m (locus cassava4.1_022464m.g) derived from phytozome v7.0 (chr-ID scaffold02871; pos 427131 to 427365)
agtttgctgacttgggtgctgactcccttgacacggtactctctcttcagctctaatactctttgactctttattttacttactttgttgtatccttgttgacatgacatctcatggaatacaaaatagaatatgcagaaaccatccaagaacatgcagttagtacacattttcacatcagttgttgaacaatttatataaattaattacaattgaaatttatcaggtggagata

SEQ ID NO: 47616 - DNA, 724 bp, Manihot esculenta
  Intron number 1 from transcript cassava4.1_010779m (locus cassava4.1_010779m.g) derived from phytozome v7.0 (chr-ID scaffold02264; pos 330402 to 331125 reverse strand)
aatattctgcaacaaaattcaatgtaatcccttgcactaaatataaacttttgtttctttgtttaaattgtttttaatttttgtgattttttatttgattttctttttcacattttgatattcaattcttctttcctttgcgcttaatagaaccatgcgcttgcccacaccagaatggatgatagagttaggaacaacctcacaatgaaaatgagaaaaaacatagaattggagaattgttattatattgattgaataatggcaagcagccttaacacagtagttttggttacaaattctctcttcgtcttgtagtactctcaagtcttagctgaaatttgaaaaacaaataaaaaataaaaacaaatgaaatgataaagatgaacaataaaccagagatgacactcctgaactagcagaatgctagcctccagccgctgctgttaagtgataaatttttctttccttcactgttgaatctctcctcaacatatagctatttgaaccattccagctggcataattcctatgtgattcgatcccgcaattctctctaatcaacctcatctcttctgttatgttctcttctagaatactccacttcactaacgaaggatcgtgttgctatttctttaactttaattgtgtttgtttctcatgatttattcttatctttttttcttttggatgtgaccaggattcgtataaaccagagcaattttgg

SEQ ID NO: 47617 - DNA, 846 bp, Manihot esculenta
  Intron number 1 from transcript cassava4.1_032115m (locus cassava4.1_032115m.g) derived from phytozome v7.0 (chr-ID scaffold02895; pos 395442 to 396287)
tttttcctgctgttacacctgagaaggtggctcgctctatttctctctctcttgccctctgtgctttctctaattaataatttgatagcttgttcattcggctccttttatgtttttttgtacacaatttcttcttctgtttttaatttagactcttgcatgcctttgtacttatgcttacttttattcttacttctttgtgtggctatctgttcttatgaaattattgattttattattactattattgctgcgtttttaggggtttaatgtgattgaatgttgggagttgatttggaatttttgaagttactggagtgaagtggatattgccactattttttataagatatgtcttttctaattttatacaaaggtcgtgtacttttctttatccattattgttttctttttccagtaactccgtgcccatcttcaatttacttgtttctgcagcattaactatttgtatctattaattgaattttatgacaaagatggacctggatgccttttatttctggggagtgcatgtgtgactgccatagatagcttttgtggaattttaggaaattttttgagatatttttacactgaactgcaaaaagaaagaaaagtatttcactttcccatgtaagtatgaatatttggaatccatattttgcagttgggtgtttgattgcaaattagttacttttgcaattatgtgacttattacccagttcgcacaatttctcattcatttggtagtctggaatatttttattttgaaggagtgaacaaattggtttggtttcaattggtaaaacaggtgcaagcagtgctcttgcttctgggtggacgaga

SEQ ID NO: 47618 - DNA, 633 bp, Manihot esculenta
  Intron number 5 from transcript cassava4.1_017010m (locus cassava4.1_017010m.g) derived from phytozome v7.0 (chr-ID scaffold08265; pos 2500936 to 2501568 reverse strand)
ctacttgtggtaaaaccgcttatccacttgagaaggtatgatttgatgaagatttaaaattttcatattctttggtgtaatgtttatttggttgcctgaaagttttatctagtttgagatttttagttctttaaggatttatttggtctattaatcctttcagcctacactccttgtgtgttctgtgttgaataatgtcctttccctggtaaatgcttatagtgcatctatgaagtaaactggattacttaaacttccttgttgttttgctcatgtgacacctttatggcatttgcttccttgtgggttcaagttgcaactgtctctgttagtagcatttgtctgctaacccagtccccaacctaagcttttagaaaaagttcaccaatgagcttctgcttaaggcataatgccaagcattaaccagttcttctatttgattcctacgatctcctgaaaaatttgtcgagctgagcctgagcatctcaaaattttttgttgatatttatttctctgtctttattattgatttgtagttatatgccatgcaaaaatgattgtttgtaattataatgaaggttggttccacctaaaatttcaggtaacagtggagagccaggcttatcacaagtc

SEQ ID NO: 47619 - DNA, 483 bp, Manihot esculenta
  Intron number 1 from transcript cassava4.1_017010m (locus cassava4.1_017010m.g) derived from phytozome v7.0 (chr-ID scaffold08265; pos 2502471 to 2502953 reverse strand)
cagctcaatttctcattcttcttcttccattttaggtatgcacttttaatgggtaattttgtttttatcccattttcatgttttttcttgtttcggatcttaacccattttctcttttgtgtttttgcctttagttagatcaattatttgggtcttagctgaggtttctcaattaagttcttgcattttcttacatttgtttttcatgagtttccagatcggtggaaaaaaattgtgccttgaggtttatattttatttgtaattgcacccagaaagcaaatatgcatcaatgtcaattcaaaatccttttggttttgttaaatttgatttgtttgcgcagtgaagattgtttgagagagaaaacatgttagcaaaactgatctgatttttattattaatttttttttcattagtaggtaagcttggagagataaaagaacagtcagatctaagatatatatacatttgctttagcagataca

SEQ ID NO: 47620 - DNA, 694 bp, Manihot esculenta
  Intron number 1 from transcript cassava4.1_006283m (locus cassava4.1_006283m.g) derived from phytozome v7.0 (chr-ID scaffold03235; pos 214044 to 214737)
catccggattcccataaagttctacttcagatagagtatgtttccttaccggttctcatttttttgttgtttttcttgcattttctgtttttggtgttaatggttgctgggttggttagaaaaaatgtgggaagagaagagaaaaggggggaaaaattacgggtctgagttcttttgctcgttttgttattagaacctagaagttggcaagatatgtagtctttattttgttggtctgcgtataggtggagcattttgatttccttctttttgttattttcgttattttatcttatcatggtgaattacatacaattttatgtatttaatgtcttccataagtaactggtaaagaagaggttggactttttcgacttgatcaaatggtatagacaaatgagtttttgaaaaatttaaattcttatgttagactgaattagtgagtttgaaggagcttagttggacatttattcagttggtttggtttatacgtattcagtttattttgcttgaacctccaaaattaagtccatgaattttggtgcctatgggctatgatgcattttttaaaaaaaggggtatgattaattctctttgttgtttactttgttactctatttttcacccaactttgtggtattttaagatgctctagtgactttggtgtttaggacgcggatattggagtataggg

SEQ ID NO: 47621 - DNA, 812 bp, Manihot esculenta
  Intron number 1 from transcript cassava4.1_014165m (locus cassava4.1_014165m.g) derived from phytozome v7.0 (chr-ID scaffold09000; pos 587884 to 588695 reverse strand)
taagcttgaccctgccgctaagctctactttccctgtaagtattttttcagtaaggattttatttcattcttttgtgtgatctattttgctataactgcgatctatttccggtgttctctttggagtcaattatgttagattattagctttgttttaccaaaaatttcgccagattggtctgcaagtgttggagaacttcattttcttgtagattgttggtaaacttgatcatatcatttctgcttgttttggggcaattcaatttttttttccaaattgatgcattcaagatttaatggttcaagaaaaaaatttggtcaaaactcctgatgtgggaaatggggaatcaaataatttttcagaagagagctgcaagttcaataagctgctcagagatgttgcttgaaaggggtttgtacacactcataggcttttgctgagtaaacattactcagggatgtagacgttaattcgagtctatggcctatcgaataacaacaaatttttcatggtgcaccttcctttggtataacttggacgaagtgtaccaatggcctcctaagatgttccataaggggaggatcaataccatgtagattagaagaacttgataaaataaataagaccaagtgacattcatcatgttcccttttgtttggcaactgttgcttttcatttcttcgctattcttatatcattattattttattaattgcttattgaaataactgattgtgcctgatgatttgtttgtattttgcgtgcttcttttctagacgaacctggcaagcaggttagaagtgccatcaaa

SEQ ID NO: 47622 - DNA, 954 bp, Manihot esculenta
  Intron number 1 from transcript cassava4.1_010486m (locus cassava4.1_010439m.g) derived from phytozome v7.0 (chr-ID scaffold00940; pos 116144 to 117097 reverse strand)
tcgggtaatatatgtctacttgaattttaggttctttcttttgaatttcagtaacaattggctaaatatagcaaaattcatgagccatggctttttgatgattttacccttagtgtgtagttttattacgaaaagagatgggtttggtgctaagggttgtgttttttttttgggcatatcgtacctggatctggtgtaatcagtgttattatggattaagagaaggttttgagcaaacgggtatgcttttgtatgttagttggttttgaacttagctgtgaatcgacaggatctttaaaacattagggaggttcagtttttaactgagcttatgcgttgaagtggtaaaagtgcaattttctggccaatatttatttaatagagaaccgcgtttgtttctgggtaggttttactcaagtattcacagcattctggtatttgttatttgagggttagattgaagtttcggtcctagtgcaatacaggacactgattaatgtgtaatgaaagtatcagtctgtttaatatctgttaggcatgaacttttgaatttttttctcttttctggaaaggaggaggagctgaaaggctaaagccaaatcctcctctttgataattgggaaggtgctcaaaacctccccttttaaaggatagatgaggcactgattaggttttgccaatgcagatgcataaatggtatgttagcgttttcaaaggagttagtttggaaacactactctcttgtttggaggcattggaggcctttttttattcttttctttcttctaagttttaactgatacattgcatccttttatatttctgtaatgatacattttcaattgttcctctcatttcctaatgaactttttttctcctgctgcattatatattgtggctttatgttttctgctgcattaggcactgacatataccgtttctttcagtgggaat

SEQ ID NO: 47623 - DNA, 1014 bp, Manihot esculenta
  Intron number 1 from transcript cassava4.1_029365m (locus cassava4.1_029365m.g) derived from phytozome v7.0 (chr-ID scaffold02943; pos 385520 to 386533 reverse strand)
gtacgaagcttgtcctttctgcaacaaggttaaaggtacctttcaatgtcaattactacgcgtttgaatttcgatgaccggaattttacatttacatgtattaacgggtgtttgtgattgaattattaagaactcgttcttgggtattgttttggcgaaatgaatttagtgtgagctatcataaataacttctaacaaatttagaaaaagggagggtgaagttcggtttcgagccataggaaatggagaactagtgaactttgtgattgctagaaattggctgctttccatcagctgttagtaaaatgagttttgattttttttttttctttttaatttatttattttctctcttacactctgtttagggtggagactgggtaaaataagttctctaaatagtaatagttctacaagggaaggtttgttatgatttttaaattttaataattatttatggtttgggaaattttttaaggtatttggagtttttaacgacaaaacattctcagccccaaagaaggattctgaaggtttttgaaaacctctaacaagcttatttttttaaaaaaaatcgttctctcccaaacacagaattagaggttttgaatcttaaaaatgtttcatcttattacttaaaaaagaaaactcctctaacaattacttgaaaaagaaaactcctcaaacaagtagagaagcaaattcatgaaacaaatgcctgtagatgtttgcttgtgaagctacttggaaggcgtagtattattttctatatttttaattattatttaccaaggtgaataaaggcgtccaaggttttgtttgcaaaattagctggaattatttttctaattgaaaccattgacggacttggttggctgtttcaacttgatggttgattctttgtctctcttgtacttaacggtttagcttttcaaattcataatgaatcttcatctgttttttcttcattttctctcagcattcttggattattacagtattccatacaaaata

SEQ ID NO: 47624 - DNA, 505 bp, Manihot esculenta
  Intron number 3 from transcript cassava4.1_033284m (locus cassava4.1_033284m.g) derived from phytozome v7.0 (chr-ID scaffold02969; pos 31429 to 31933 reverse strand)
gggtatgtatcaatgaactgttaattttttgatttcgttctctctccttcctccgtgccaacccaccccaaccccccaccctgccaaaaaagaaataaagaatgctttcggaaaattcttattttgtttctggctttttatcatttgataaggcttgttattattcttaagtttagcaaatctgccatcttgttgttagttgtgcacactctgcagtctgcacctattctgtcactatttgctacttgaataacatggtgctgctattttcataattttgcattttatatgatattttcaccaactaatttatatattaagtgaagagcagcattctcaggctccgtagtatgttggaaaacctctttaatcaaatgatacgaataatgatgatcttttactgttatattaggattgccattaaagatgtttattgctctgagtgttaaatctgggcaggctatgtttatgtgatatgcttttcccccgcgttgtgcaggaccat

SEQ ID NO: 47625 - DNA, 669 bp, Manihot esculenta
  Intron number 2 from transcript cassava4.1_018423m (locus cassava4.1_018427m.g) derived from phytozome v7.0 (chr-ID scaffold06089; pos 330131 to 330799 reverse strand)
cagtgctggtattactattgttatttatttttcgattttcttttgtttgacttgatccctcctgttatacctgattggttttgcaagttctatgcttgggtctttatggatttttttcctcaaaaaaaagaaattcttagttgttttggtcgtataaattagcagcatggccttcctctggagtcaacaagtatagaaaaaagcagtatgttattgtagaatggaaaagtatttattgtccatggtgttgcttcttttatggggaattaacttggttgtgttgattgtttaagcctatttccatcgaatattagtcatagctcatcatggtggggatattagtttttttctgatataaattgaaatttttattttgggttggggtggttccgtggttatgacatattgaaagcaaactggtcaattatattttaagagttcatttgaaattacatgttctctatgcatattccaaattcatgttcaattcaaacaaaattttcttgtttatttttgaatgtaattcaaaaaaaaaaaatcgctttgtcaggacccattatcttttggtacaaagactgctattaagatcttcatttgctgttcttcttacccttttttttgggttgggggctcgttcctggaaatgttttaggtcctgttgctgaagac

SEQ ID NO: 47626 - DNA, 603 bp, Manihot esculenta
  Intron number 1 from transcript cassava4.1_023643m (locus cassava4.1_023643m.g) derived from phytozome v7.0 (chr-ID scaffold10223; pos 46922 to 47524 reverse strand)
gtaatgcattgggtccacgaacaacatgggtgcaataagcatagatcaatgtatatggtggatgcggtctctacgtatggcttaagcaatggacccacaaaactggcctcatgatgatcaaaatagttcttatgttggggcttctcattgtgccaagtcagcatcctaggtggaacgagcaaaaagttgaaatgaagtgggggagggaggtgaggggtggctgatgcttttttgctctagcattaccaccgcctgtgcattcctcttcttttgaattcctttacatcatcctttttctactttcatatacagcaatccaacactctacaatcctcagaacatgctaccattcccttaagacatctctctctctctctctctctctctctctctccaacaacacatccaggttttttcagatcattcttaatctgaatttttatgatcatataggtttcaatatggtaaggtcctcaatcatcagtttctgttttttcattttcttattcttttgccatcttatatttcctagcacaacatttaaatgcttttctttatatttgatgattcagggaactccagtcaatatcatagttggatcac

SEQ ID NO: 47627 - DNA, 749 bp, Manihot esculenta
  Intron number 1 from transcript cassava4.1_006678m (locus cassava4.1_006678m.g) derived from phytozome v7.0 (chr-ID scaffold08265; pos 2178811 to 2179559)
gctatttctggtaatatttttaaataaattctcctttcctagatttcgattgtttcggtttatttgcgttttcatgctttcgaatctatggatttgggaaattttgttcttttattcatagaaatggaactctttctttcccctccaactaagtacattagtttgttgtttggtcgctcagaaagggtgggaaagggatggaaaataccattctgagtgatatgtttggtgctggtttgattttaacaaattgaagcggagctaaaatagggatatcaaacacagctggaaagtttttgcattgtcgggttcaaatcagttttatttatacgtggctctttgttaaatgtaaatgaacatgattttgtttgattttgggggaaatttaatggcagccttcaatataaataaatatgctttccattaaaattgaatgctggcgataatattagtatgcactaaaactttcagtcaacttcagttctctttcaattgtcctctaattttgttgtcactggtcataaacctgtttgttttccatcaattgaaatatttacttgtttcctgtgtaagattgtgcgtatgaataaagttctctttttcttgcttcccttctaagttaattaatccatgttattttcagtgaaattgattcttttccccaccttgattcggaaatagtagtatttttacttattcttctttttcaatcagagtctggaaagcttattacttggggttcaacggac

SEQ ID NO: 47628 - DNA, 632 bp, Manihot esculenta
  Intron number 2 from transcript cassava4.1_026117m (locus cassava4.1_026117m.g) derived from phytozome v7.0 (chr-ID scaffold06659; pos 114210 to 114841)
cccgccggtttgagtctggtgatttggcggtgagattctggcctctgtgcaagtgtctattactggcctatatatatgtatatgtatgtatgtattgcttggatgcttatgattttaattgcaagtgtctaggatggtttggtggttttctcatggttgattgcgtaattgttttgacttcggagtgtagagtgatttggtaaatggtcgcagcttatatagttattttgcttgtcgattggagtatatttgtgctgctgatttggaggtaaatgttgaggtggatattccgttaaaatgtttgatttgcttttctcaatagtggtgcttggtttatgtgtctgagatgggcggtaattttatatacttgtttgtaatttttttattaattttttttggatttacatttttcgtatgtgttttttcccccttttttgggccggggggagttgtttgaggtggtggcattgaagtgttctattgtttttatttcattcttttgtatttatgcttaaatcaaatggataagaaagagcaccttagattattgtttgatagagtctacccttgaagcaagctttagtagtttttattttattttttaattttaattaatttttaggttggctcaa

SEQ ID NO: 47629 - DNA, 732 bp, Manihot esculenta
  Intron number 3 from transcript cassava4.1_012980m (locus cassava4.1_009605m.g) derived from phytozome v7.0 (chr-ID scaffold10960; pos 110995 to 111726 reverse strand)
cagctgcccacccagttctatactgccctggtgagtgtgcactttcttggttagccaggtttgcatatatattttattatatacttttattgcctcatttacaaaatggaccctcaatattcacataattgcaattttgttagtgctagccttttttgggctggaattgtagcccataccaacccaatttgtacgccaatttaggttcaatacagtacaaactttattttataacataaaatcctgcaacatttaaataacataaaatctcatttcattgttggaactgatgaaccgtttttataaattatctctgatttcaatgattttcttggctaatcccttctttgaaaagacaattacaaagcggaaacatagttaagtgctcagttactaatattattcacaagtccaacttcaaattgtgtctctaaattctgagataggaaagaaactaaagaaagcatttgattattaccacacaagttgatctgtggtcccaagtaaccaaggttgttttccatgtagtaaatactcttggccaggctcccattaacttgtgtgtcagctacagtgccagatgcctcaggacagagaataatgacaaccccttaacttagttgtgtgtgttctatttcaatacacaaaacacagaaacttcccatcatgtgtaactctctgtgtttttaatttacagctttacactgtaagcacagtagtgttagtgttgca

SEQ ID NO: 47630 - DNA, 701 bp, Manihot esculenta
  Intron number 3 from transcript cassava4.1_000048m (locus cassava4.1_000048m.g) derived from phytozome v7.0 (chr-ID scaffold08265; pos 386183 to 386883 reverse strand)
agtgtgaggtgagttcagatatactcaatgtagaacgcctactactttgttcattaggtgctccttatactgctgcattgggcacacaattcattggtctttgcccttgaagcaggatttattggtgctaacaggtgcctttgtaagaggaagggactcaatattttatcttttatcttttatctttttcttcccttttctttttctttttaggttcaaggatttgagcaatacccctgcaagaaatttctaagagaaagaatattccttgagttttaccatctacctgcaagaaaattttctttttaaattcaaggattttaaccatctacctttcggtttttgagttcatttcaccattgttgaatatgtatattattttctacacctgtttcctgtgtttctggattgattttgatcccgacatcccgtacttgatttgaatccaaaagtttgctttgaatggctaataggtcttgtttccatatgcttgcatcttaaataatgggatgtcctttgtttgctttctgagtccttatcatatcttgtctagagttggctaatagtagttattttttctcaccatgagaccaactaggaggatgttcctagtaagttattatagaaatgagaattctggcatcattatctatttatttttataacgcttttaaatcatatacagagaccgtagcagtagc

SEQ ID NO: 47631 - DNA, 687 bp, Manihot esculenta
  Intron number 1 from transcript cassava4.1_000048m (locus cassava4.1_000048m.g) derived from phytozome v7.0 (chr-ID scaffold08265; pos 387716 to 388402 reverse strand)
gagatttgtcgtttctgcgaaacttgaggtgctgattcattgctttttatgtgtttggattcttgcaaatctcttgttagattcattccttttgtatttttctattgttttgtttggtaagctcattttcaattaatagtgaaaattaatgtgttttgatgtttcgatctacttttgtttcactgaattcttttttgaattcacttctatctgtttccaaaaatgtcggttgtctccgatttcattcggtttcatctgtttgtaggtggcaaagctgtggaattttattactttttttctttaatctttttcttttatagaatggaaagtcaaactgagatttgtattggattaatataattttctgtgcaaaatacggcgctttttggaaatgtaagctaaggcagagtgattgatctgtgtcctagtagttaaggacaattgaaattgagcaattcaatatcgtggcactcattttagatgtcaaatgctttgattcagatttagctgttgcgctagcattacacgcgaattatactctttttcttattcttcatcttctaaagttgtttcagttcaggtagcgtgattgcctacctgatctggcattttcattaatttcacaaaaattgttttgttattttgtttctcacttgggcttttgtttcgttgttgcagggggatttg

SEQ ID NO: 47632 - DNA, 727 bp, Manihot esculenta
  Intron number 1 from transcript cassava4.1_015732m (locus cassava4.1_015732m.g) derived from phytozome v7.0 (chr-ID scaffold02264; pos 103670 to 104396 reverse strand)
aagtttagtctcctttctgttcatttcttgttttggcaccgttgtgttcattctgctggcttatgctttttgatttattgtatgtggagaactacctagaatggtgagtgctgatcgccaaagctttgtggtctttcactaaattatgtttaaataccgaaaagaacacatttctttagcctgaaagttgaaactctgaagcttttacttatagtacgactagtctccttgtatttgaagtcagcgtttgtctgtagaaacaattgctgtcgtcgtatcttctttcttagttaaaatacgaactagaattttagtctcccactatggcaacaaccattgacccaggaagctgccactacttttcattagcagagtatccgaattagataagactaggtattgaaatgtgacgaatgtgtgatctaaggacgtgatgggaattgagttggagacttatttctaggcattgttgtgtcatgttaagcgattattctttttttttttcccctcaaacgattagatatatgttctttcagaaagtagttgattcatgaataagaatacagcagcacatattagtcattgagttttggcttgattggtatatttagtctttccgtaacattcttcatctgctcgactgctcctcttccttctcttttgctgttaatgacagagtttgatttttatttttatttttaacgcaactgaatgcaggaagaggaag

SEQ ID NO: 47633 - DNA, 461 bp, Manihot esculenta
  Intron number 1 from transcript cassava4.1_027108m (locus cassava4.1_027108m.g) derived from phytozome v7.0 (chr-ID scaffold10563; pos 1050031 to 1050491)
gagggcttgctcttttgttgttggtaagtgccaacttctctctctctctatctctctttcacttttgtcctaaagttggttgccttttagttgatattttaaaacctggaagttcaaggcatgatttgtcaagttatgcagttctttaatttgctttctctgagcactttctgaatctatcgagtcaaaagaaacctgggttttgattggatttacatttgaacccagatccttggatctacatgtttaataagaaaagaatagttaacgaggagaaaggttgttgtccataaaacaaaattcttggtttagatgactagacccacccacccaccagcctgtgaactttgaagtttctaagtacgtgtcctgctagctgacaatgaaattaatgcacattttgtctgtacgttgatataactgtttcattaaataattttttactttttgagttacagtgt

SEQ ID NO: 47634 - DNA, 793 bp, Manihot esculenta
  Intron number 1 from transcript cassava4.1_005084m (locus cassava4.1_005084m.g) derived from phytozome v7.0 (chr-ID scaffold01061; pos 15032 to 15824 reverse strand)
ctctccattctatttaacatcctcatcctgtgcaggtttgaatggtttttgaaattgttgtttcgaatttgtgttgtgtaatatttgtgcgattaactcgactttcctgaaagatcaaaccataattagatgctttcccaaatgtatttatgcacaacttcaagcaagtcttcttgcaaaaatggtccaatttaaagaaatttaaagaagaaaggcaaggcttccatctgatatgttgctaggaattttttgtgcagcttgggttgctgttggggttgataggaactgtgtgagagaatatacacgaaaccaatcgagcaattgctgtatattggtttttatttctagtcgcatgagtagttggaagtaaaaattattgtattaatgggctattagagtaggtgtgttatctaattaattgtatgaataaatgaagtttgatgatatatctcgtatttgctattgattgccaattgtggaaaggatatcttttctttcttttttttttggtccagcaaacttagaatcctttttgtcctttgcattcatgtctagtaatatatggaaggatccttatactgtataaaagaatttttcaaaaaatatgcatatattcatgttatctttcctttttaacttttcatcaataaagctaatttaaaagtaataaatggatttaatttaaaagtaataaccaaacattcatgtctagtaatttataccctaaacttgtaaaatgttttttaaaaaaacattattttaataattaacctgtaataatcaggtagagatt

SEQ ID NO: 47635 - DNA, 651 bp, Manihot esculenta
  Intron number 1 from transcript cassava4.1_026884m (locus cassava4.1_026884m.g) derived from phytozome v7.0 (chr-ID scaffold00867; pos 74479 to 75129)
ttatatatgtaaaaaaataattttaaattgtagggaattagaaaaaggggaaaaagaaaaaaattttttttaacatatttaatattgattggagactataatgagcccattgataaaattattaatctaagataattatttgagagtagtaagcgaatagaggttggccaactatacacattcttaggcgtgcaccgtggcgtgaggctgaggttatcctaacgtggattggccttaatttaacaatggcaaaagcaaaggacaaaaggcacatcttattattaaccaccttttgtctagtattattgttgaagcgtagctgctataaggttgatgttgattattcgcaaggaaaattccacattccccctcccttgtatatataaatgatgaccattatgaattttttcaagccgaaaagttcttctatagtgatagtacacaaacaactcatagtcgctgcaattcttcatttcttcttatcagctctcttttccctttttacatgatattgaacctcgtttttgtctctctctctctcttccttctccagtagccaaatagattcatatagggtgctagattattgactcactacatgcatatttatatgtacaagaatgggttatagagagcttataataagaagct

SEQ ID NO: 47636 - DNA, 639 bp, Manihot esculenta
  Intron number 1 from transcript cassava4.1_008254m (locus cassava4.1_008254m.g) derived from phytozome v7.0 (chr-ID scaffold08542; pos 559842 to 560480)
ccacaaagcaatttcaatctttaccttccgattaggtcatttctgctctccattcctttgaatttcctcgaatttcattttctcatttctctgctcttatatctcacgctaacattgttcgtgattttttttctttttgcaaattattgtattctgtttgattgcttagaatcgtgggaaaggaaaaaaggaagtgaatttttgaaatttggagtcttcgttgggatttcgttgattttggaaactatactgcattacgtatataatcactttttcttttttctttttttcgcaatggatagaatagtgtatttgtttccctttgtgaatatgattttagctgtaaggaatgctaattctcactcgtgtagttttctgtattaggaatttcctccctttagcttgtgacactctgctttagcttattaagttgatggttagtgaatcctttgaaatttggaggttttcaatttcatgtcaaaataggacaattttccattgtcatggatccatcttagaagcaaaattaagaacagttttgttgtaatcctttaggattgatatttatgactgtaacagaagtattttttgatgattttttttttcaattgtaggggttgagatttggatagagtagaa

SEQ ID NO: 47637 - DNA, 830 bp, Manihot esculenta
  Intron number 1 from transcript cassava4.1_032951m (locus cassava4.1_032951m.g) derived from phytozome v7.0 (chr-ID scaffold04133; pos 67722 to 68551 reverse strand)
tgagtcagaggttctttccaaatatccgaactctggtacctcttagcatcgcctttcttcctctgttcatgtgaggatttttaagatgcatgcctgtcacataaaatcgtataaatttgtaaaattgtctttgcccttgtccatttcatctcagacagaaataaatggatatcaacataatatcatgtggatatattagctttgtacaatcatatgcattcaatattcccacaggaggatcatggcattatgtctaaaataagaaccatcaactcactagatggtactccctctattctatttcaaaattcaaatgatgttttagaaaaccttttttttgtcctactttaaatgatgttttaaaaactaagaaagcattattatgtttttttttccaactctacttgtctatattattcccaatgcattttatctcttttttatatcaccttttccaatgaaaataaatgtagtacagggtactttagttaagtggtatacaaaagtgaggttattcaattgttttcttaatggtttagagagaggattaagcaaaggagaccaataatggtgcccttaaaatggccaacttctgctaaactattaagccgaagcttatgaaggagaatcattaatattattactgggataagtgttatatgggtatgagaggacttgtattataacccaactcctccaggaaaatatgtatgcatacacacacacacacacacacacaggactcctctcttgtaagtgccatatctcatagtcacaatgctgttgaatttgattgctctcaggtgtggtgttaagaccaggtttcatat

SEQ ID NO: 47638 - DNA, 534 bp, Manihot esculenta
  Intron number 1 from transcript cassava4.1_003222m (locus cassava4.1_003222m.g) derived from phytozome v7.0 (chr-ID scaffold03805; pos 62674 to 63207 reverse strand)
gcggactgttcttcgcttgtccagatctgcttcaggtaaccttctcaatctctcaatttattcttttgtaatttagttcgatagcacagattgggtaaattctttcatttcgatgaatggctatacttatttgtatgtttgtacgtatatttagctttcttgtttgatctatggttgtctactaaaggtcgtttcacggtggaggtagtatcgtttatggcctttatcatgcgcttttgtgtttttcttagaaaattttatgttgagttttctgatccgtgctttttgcaggcttaatagacaatcttcttgtgtatatttatttttgtgattagttgcattgatgttgatggatctgttgcttgagagttgaatttgaataattattttcttttggaactttgaatgtttaataatttttcatgttactatttaggtacaagttgatttcactaggattttgatttgcttgtaggttaacttagattcgagtactgattcaaagacctacttaatttagtggctttctcgttg

SEQ ID NO: 47639 - DNA, 866 bp, Manihot esculenta
  Intron number 2 from transcript cassava4.1_012749m (locus cassava4.1_012749m.g) derived from phytozome v7.0 (chr-ID scaffold11495; pos 629053 to 629918 reverse strand)
tctttgttatccagtcatcgtccaaaggtacacatttatttatttattgcttcaattttatttattttgtggtgtatgtagcctgattttcacgatttggtgaatagatgatgagtaatttagccttgcacatctctttacctgaattctgctcctctgttttgactgctttgaacgacaactgcatgtaaatcaatatgttcttgcatattaactatggatttaattagaaaacttgcaccctttacaactgttgccggttttacctcttgcaaacttatttactaattgtggctttcgattctattataaaaattatagttttgggcacagagctatggaaatttgaattttcactggctgcatgtttaggaatctttttttcttggtacgtcagaaatggcatttatgatcttgatcaagttggagaaatgtatcttctactaagaaactgtaaagtggaatattgcatttcatttcaatcgaatggttctttttgcctagtgggagatatgtttacatcggttgtaggatgtaggaacttgatgttaagtaataaatatacagttgaatcgttaacattgcaatccgatgaactacaaggtgagccttctgaaccaaaatctgttgaaaatctctgttagctggtcattagcttctctgaaattgggtaagttgtccagtgtaatctctaatatctcgtctgttccgcttgcaaaaatacgtgccttgtacagttgttgagttttaattcatatttgacacaatatggattccttgttgtttttgtttggaagtgttttctcaacttattctcttctggtgtaacagttgccagagattttgcaaaacaaggaatcgcatta

SEQ ID NO: 47640 - DNA, 816 bp, Manihot esculenta
  Intron number 1 from transcript cassava4.1_020018m (locus cassava4.1_020018m.g) derived from phytozome v7.0 (chr-ID scaffold11495; pos 138770 to 139585)
tctccacttacagagccttcatcaactatcttcaggtacatgacttcttactttaagaaatttatatatagctccttctttgttgctttttgcaagaagatcttcgcttttgctaattcaaggaattgagaagctaaagaaagagaaactcctttattgtgcgtttgcatttgcatgaaacttttacaatctgagcgataagttagcttttggcattaattacttttttaaagggacatttgatcctattgaatgtgtagggtatcgcaaaatactggtactatttcaatttgttaagattttcttggtaaaatctgtactgtttgtttagaattttattattggagcttcataagtattattttattttttccattgaaaatatattgagctgattttttaaaataattttctccgacatgttatcattttatgtagatatgaatgatgccattgacttttttttttttaattagaaaagggaaggggtaaggatccaaccagtgaccacattatattcgttatcacctaatgctacattttcctcagaaaattcaagttctgaaagaactgctcttttgatgcttatttgcaactttgttttgcaagtaaagatgatgacaaccagaagctgtgtagctttataggagctctgttgtggttgatttgtatttgtcaaagttttagccagacagagatgattaattgtagttatactctgttttgggatctcatgcccctcacctccccctcccgctcctcttttttttcttttatgcagacagatcgattgtagcaaaggagtttctcacagct

SEQ ID NO: 47641 - DNA, 828 bp, Manihot esculenta
  Intron number 2 from transcript cassava4.1_020018m (locus cassava4.1_020018m.g) derived from phytozome v7.0 (chr-ID scaffold11495; pos 139605 to 140432)
gtctactggccctggacttgagtctcttgtagatcgtatgcaaattcttgaggactctttttatttgtcttctcattcctgtatattctaaaggcaaaaaatgtagcaagactcgttcctttggaacttagaagcttgtgataaaatgccagatgtggtttacatatttagatattgaggtgtaagcattttgagaattgaaattttgatagcaatatgaaagcctggtgatacatgttatacaaactgttctgaaaagcatgctaaacgcttatagaaatttaaaaaatacttaaaatgatagataatttgtaaaatcagatgaatatgaaatatgctgcagaactgctatctttaacttgataaacattatcaaaactgtttggaaaagcatgctaaaacacttaggaaatttaaaatactttagatgataagtgtatttgtaaaataagatgagtacgagtatgaatatgctgcagaaatactatcattaacaaacacgttatttaaggagctttgattgaagttgatttactaggaaaaaaaagaaaggtatatgatttagtcaagcatgggcttcatgagctcgggtagaagtagattacaagtttactatgctggtccataaacagtatgctttacaggactaccttttgccttgtactactttttttcgcttaggtttctgttttcttttattttatttttattggtttcacggctgaggaaggaatccctccatgcttcggtggcattgactcatttagcttctggggcttatcatttaattattccccttttgtgcagaaacaatttcagttataacca

SEQ ID NO: 47642 - DNA, 683 bp, Manihot esculenta
  Intron number 1 from transcript cassava4.1_005529m (locus cassava4.1_005529m.g) derived from phytozome v7.0 (chr-ID scaffold11689; pos 263649 to 264331)
ttttgcctctctaaactctgttcttcttggctgtaaaagaatattttcttttgactgctcatgagtaaatgattgtggttgctattgctgttgctactgtcttacaattttttaattgtgttggttctatatttgatctacctttattttttgggtcccgccattggctgttgtgcttagcagttggattgttttctcatttactggaaatttcccagatttctgtaattcttatgtggcctagaattagtttagaatgctttccaagcaacctaaatgcttgcgatttgaacaatattgatgttgttttgggggcgcccgaaaggggggggggtctttccgcatgattgatctatgataaatgaaatggtttttaattgttggatgaagtggtaattagaatttgtattagaggatgattagtgcaaccaaatcttccatcattacaatgcaaattgatttagggatcacatagccctgattgtgtcaaattttgatcaacatgtttgtttctggttatggtagttagaagaggcattttgactcttttcagcttcaaaatcttgaatttttccaggcatatattttgagactcatcttggaacaaactcctacagaaatgacattattactatctttgaaacctctacttgtagttataagctaacacttataatctacag

SEQ ID NO: 47643 - DNA, 938 bp, Manihot esculenta
  Intron number 2 from transcript cassava4.1_011173m (locus cassava4.1_011173m.g) derived from phytozome v7.0 (chr-ID scaffold06212; pos 25740 to 26677 reverse strand)
ctagcgggtaagtggtgactttgatcttgggttttgaattctatttctttgtctgctgcggcaattaattttaggatcttaaatgtttcttttaaatccccaaaatgtgtttcgaacggaacttgcaaaaattgctttgtgaattctgttgatgaatgaaggtctattcatccccagatttattttgaaaagaataattgaatcattatcattttaatagtgagaattgattaaaaaaaaaaaaaataaatcaattgaattgtttcttgcaaaattcctgattctaagccagagaatcatctctggttataggcttggtggtcagggcttaaagttgatgttaaccattgggtgctagctatggtgaaggaattggtggtggctttggcatgtttcccctgacatgtcccattgtcgccatcatatgatgcctattgctctctgcattgttagggcgataaaaatgctacccttccagttgtaaattcatctgcaacaatggaacggaggcgttattcttcagtttatttcagcaacagggcattgaagagatcagcattggtttctgatttggctggtagtttatacatttgatggcaattttaatttcttatttggtctgcttctttagcctctttactcagaagacagcctctcttgatggcattggccttcaactcttcttgttatacatatttgcataggataaattctcttgctgttaaattatcatcttcttatgctcattgattgtaagcttctgccttcaatatattatggatgttgccgttcacttcatcgtcctagttaaccattgaaatcataattggaacatgtgtctgatagatttagctatcttgattcggcctaacttctggttttttctcgtcggcaatgacacaggaaaaccttgccagtagaggaaatattaaccattg

SEQ ID NO: 47644 - DNA, 1011 bp, Manihot esculenta
  Intron number 1 from transcript cassava4.1_019189m (locus cassava4.1_019189m.g) derived from phytozome v7.0 (chr-ID scaffold04043; pos 280672 to 281682)
gtaaaatttaataatcaaaatgtaatctaccttattactttaatttgctccagctgatcttcaatcctagagatcaccgagcttagctaatgttacttaagttggtcttaagtgctataggttgaatttggattcccatattttgcccatgaaggtaccaaactatgaatttcagctaaagcaaagtcggagaccctttttaatgatttatttattcaaaaaaaatacttatatttacagatttataatataaatatttgatgtaacgaattataaatttgagtttatgcatagtattacacgcacgcttttcaattttattgcttaaaactttgaaattttagtattttaattaaagttttagaaaattaacttttaatctttacgttttaaattaaattttataattttgttgttttgcatgtagagtagagtacattaaaaaactcctcatttattaaattgttacatacctaatggattaggcgtaaaaaactcctcatatatttaagaacaatgcaaaaattctatctcaaattaatatgaatgaataaataataaaggtaaaacacgaatttaccattaattaggtgaccaaattaatcaacttttatataattgaacattgtcctccttcaatgtatcattcaaaatcataattgcatttgtctttgtctttgttttttatttttgtctttgtctctgtctttgtcttttctcttttggttgaagtgcatattacacttccttggcttatcgacacggccctgcccctttcctcaacactgattttacgccgaccctttaattgctaattcattattagtatcctttacctttgccctctcagtacactgccatggaagcagctaaatttccttgttactactttgctacggctcttcctctccgacctaacacttcactcagacgatcattttttcattgtaagagactgcttggcatgagaatagaggctgcaagaagagaatcgaacgagagagattattg

SEQ ID NO: 47645 - DNA, 869 bp, Manihot esculenta
  Intron number 1 from transcript cassava4.1_029360m (locus cassava4.1_029360m.g) derived from phytozome v7.0 (chr-ID scaffold07238; pos 169128 to 169996)
agcaagtaggtggctattacacaagaactcgcccactgtacccagaattaggattgtcttttagctatgctgtttgttttctacgagtctcttatacaagcttttaatctttcactaaaacttttagagattgttgaatttgacatctaacttttgcttcacacaatatcaatggtcttggttattaaacaagcttcatatttgaaatacttccttttgaatgaattgtagataactcaagaaatttctttgttggctactcgagtttgaagacggagttgatgtgttttgatagatacatggagtaggcatcagataatatgactcacaaacactatgtgtttcagaaccaataaaactgagctcttcatggtgataagccttatatttcttcgggataaagttagaaaaccactgtagttctctcacacattgataattccttcactgcataggtaccaactctttttatccaggtaaatgagacaactaaattaagaaaagagcagttatatactttaagctagtgaagactctccttgaaagatgtatttctaaaatgagagattcaaattttcctttgaaatggttgccttggccataagaaattcttgccagactttggacatcacattatcaatggtggtcattgattgggtatatatgattagctgagaacatgctatgcttcttcctgtgtttcttatcgtcaaatggagtggtttttgtttttctttcctttcttcactaaggacaattatggttcatcttgttaattgcaaaccttggctttgttggtttgttgatttcatccattttccattattgaatcaggacgcctcaaaggcatctccaaatactgataatca

SEQ ID NO: 47646 - DNA, 956 bp, Manihot esculenta
  Intron number 4 from transcript cassava4.1_022494m (locus cassava4.1_022494m.g) derived from phytozome v7.0 (chr-ID scaffold04209; pos 18681 to 19636)
agcccacaagcgcaagtcagtttcggtttatttgtgtttgccttctgatatggaaaagttagaccgattatttttgcatatatagattttatttctattgtaaatagtctccttggctattaggattttagactactgttaagattagtattatttttgtatattaggattttatttctattataaatagcctccctcaataaggattttcgtcttttagcgtattttttctcttatttcgtcttcttatttcgtcttaaccattatttcgtcttaaccaaactatattagttacaacttttgacggagtctaaatagtccagaatcaccttcttttcttaaagcttactgtctttgaaaatatatggaattatgttaataatttctttgttatttcatttgccattccatggtttcatggaactcgaactcttctgtagcagtcttgattgagtgtaatgctgattgccgactgacctttgagctgtgaaatagaactttggtttccatttcatctgtgatcactgttgtcatgctttctgatattcagcgttgcttattctgggatacgaagtgcatttactactgatttctgtgattgctccgtaggctcatatatcaaatcctcattacaatacaaagaaatttgttttattgaaatagtaaatgtctgaattgattgaaattttgctcagtttcaagattgcagtcaaattctattagcatatgcagatatgtcgttgtgaaaagtaaagcacctgatctaccctccatatatcctcctcctcatatttacacttcgagcagtctaaacatgcacttttagtttaatagttatcataaaagcaagcaagattttttattaacttcatcattcgttctccctgacaatcatcaatttgcttctcccttacattacatttgaaactgctgcatccaggaaatcattaaaaaat

SEQ ID NO: 47647 - DNA, 308 bp, Manihot esculenta
  Intron number 3 from transcript cassava4.1_012416m (locus cassava4.1_012416m.g) derived from phytozome v7.0 (chr-ID scaffold02943; pos 577602 to 577909 reverse strand)
gccagcactttattcaggtatttcttttcttttttcttgttgattcagttgggcgtttgctatgtgaaatgaatttttgttccaattattcataaacaattcatcaattcaaaatagccaattctgcgaggttgcccttttggtatataatttgaaggagttgtagttttatcttatcttcaaatggtatacaagttgctcaggagttatagtttctttattcaggtattagaagttgttttgatcattatatatatgggtttgtattattaggtcctgccaacgtttgctgctctattttcacttgg

SEQ ID NO: 47648 - DNA, 634 bp, Manihot esculenta
  Intron number 1 from transcript cassava4.1_008671m (locus cassava4.1_008671m.g) derived from phytozome v7.0 (chr-ID scaffold03160; pos 109270 to 109903)
gaacttgctcttattgatcccaaacgtgcaaaaaggtgtaacctctttgttctatttacatttagtctttctttaaggtctgtttgttatgtggagattgttttggtgctaataattttagttaaagccttttaacaagtaaattgtttttatggaccaaggcactaaaggagtcgccatccatgtactttagggagtggtagaagtatcgtgtatggagggaaaggtttgaatggaaattaaaatgtctctatgttcaaaagcattgttttttttggttttggccttttgggactcttctagtttgttcgtgctgagaacaacagttttacaaagtgttgaactgaattgtgttaatttatcataacgtgctaatttatcataatgtgcttgttataggttacagcatgtctgacttatgaaggacctattgtaggattcaccctttttatgttcaattagagttttcttctcagttagttttttgagtccctatttccgactaccattcccttgcaaccatcacaagggatgaaagcatattgctaacttttatgggttttagattgttgtctcatgttcttttcttcatatcataggatctgggcaaatagacaatcagctgcaaggtcaa

SEQ ID NO: 47649 - DNA, 834 bp, Manihot esculenta
  Intron number 2 from transcript cassava4.1_003864m (locus cassava4.1_003864m.g) derived from phytozome v7.0 (chr-ID scaffold08265; pos 869016 to 869849 reverse strand)
aggactggaaaagaattataattttcagctttcaagtaagtttcaactaccaaacggaatgattgggtattagttgaatgctttcggtaattgcaagtttgtgctcctaccgccccctacttttccttttcgaagtattttcttcttgggcgtcttgtgtttttctgcttctgatgtgttgctattgatttatattttcgctttaatcgtttggttttaattgctgaaagacggatgcttagggatggcttagaattgttctgggatcaggctttgtattttcccggaaagtagaggaagatttgatggcaataatagtttgcttgtgttttctctgtaactttttgaatttcgtcagatggagtcttctttgttagtcaactattttttacttcatttactatacttgaagtcactaggatccaaatcctattttttatattgactcaactaacatgatttttaaataaatggagaattttcttcttttatattgggaattagcctgtttgctggtgagaatgattacttaggaatacagacaatatggaatgacatacagtatttgtatgcaatgcactctgctagtaacttgttatgtacttggaaaaatccctgaaaatgaaaagatagcggtggacctttttcccctgttttttaaacgtcaaaccatgtatccctttaatttgatgtagcagctagtagagaatgctacctgcatatttgcacatgcttgcgaacatgcagaaacatgtttctgcctatctatgtatattgttgctatttgtctatattatatacatttataatttaaagtggggtgttttttaacag

SEQ ID NO: 47650 - DNA, 901 bp, Manihot esculenta
  Intron number 2 from transcript cassava4.1_017912m (locus cassava4.1_017912m.g) derived from phytozome v7.0 (chr-ID scaffold02974; pos 544 to 1444 reverse strand)
ttggtccagctttcaaagcagctttcattgttgtgtgtttctcgtttttcaattttttttttaacgtttgctgtatttatttgctatttatttaaatattgaaatactgcaaatataatgtcctcaagcaacccattggataatctatgcgccgttcagtcacaacataagatggaaagagacaaaaataattgaatgattatcgaacttatatgagttttttttcacagtattgaacttttgctcgagtaaagtagtttcttgaacaaggagtagggaacaagctggtaaaggtttcaatgttcttagggttttataaaaaattacttcttccatcccataaagataatcctttagttattttcacatggattaagaaaatgtagttgatatagttaaaataataaactctatattatatttcctaatatatcctctattcataatttcatattgcttcattactaaaatatttttggaactaataaattttactttttcaatgcatattaaataggggtattaggaagctaatgaataaattattaccttaaaagagaaagtgctctataatttaagacagatgaaaaaggaaaacaaacctatctttgcgggtggaaggagtatcttttagtggctttttagatacaactgcagtgtgcagctagtttggaactggttgaaatgagcttttttgatgttcaactcctttgtcgttttcttttcctcaacaagatattcatatgcagcatgccaatgttttcctttgagggtaatgtagttgttgcttgctattcttttctaaagtagtttggtgatccatctcctttttactaattccttcttgtttctctccctttctgcagaaccaacttggggggaaattgttgatttttcagaa

SEQ ID NO: 47651 - DNA, 1002 bp, Manihot esculenta
  Intron number 1 from transcript cassava4.1_020619m (locus cassava4.1_020619m.g) derived from phytozome v7.0 (chr-ID scaffold04083; pos 229943 to 230944 reverse strand)
aaggtaaaatcgtgtttgcagttcttcttatatatatatatatagttgttagaaggatgtcttgaatagcatggtttgccagtttatcgggattcagttttagtttgagaaaaatatttataccggtattaatacagaggatgatgggcaaaacctactgaattttgagttctaaaaatgttaatccgattaggactgaggtaacttagtgaactgattatcctttcttgatggaatgatgtattgagacagaaacataatattcatagaagatattttactctttacataacagttctctttcttcaactagctaagtacttggacttgatgaataaggtgttaatcaattcatgtggctaactttgaaggtgtgcaaacaattttaatcctgtaaccaattcagtatgggtcagaactctagcaatgggtatttacagatgatgattttcttaaataaggctgttctcttgctaatttttgcataaatagtacaagaagttggttgggagcttctgctgcacctcttgaatcttgaaagctagataaatcctttagcctgcatgtgaatgtgtttaatttataattttgtgaataccgctagtgaaatttatacagatcgactgtttatatatgaatagttaaaaaccaaatattctaggtggagaaaaagataactctataacagagcatatgaattatgtagcagagtcatggacttaaaataattctgtgtattttgacaagctattgttcttttcttatattttttgtttgattttataactttatcttggttctgtttctgatcatcacgaggatttgaagttttctggccctttctggttcacagagtggggagtctcatgcctggggacatccttttttgtagtttttcatattgtgttgcactttttgtgggtgctttatggactactataatttctaatgataataacaatgacagagtgggaggacaaggaggaaggcaaggaggtcaca

SEQ ID NO: 47652 - DNA, 884 bp, Manihot esculenta
  Intron number 1 from transcript cassava4.1_014837m (locus cassava4.1_014837m.g) derived from phytozome v7.0 (chr-ID scaffold01441; pos 40526 to 41409 reverse strand)
cttttggctgcaggtctgtaagctggttgaaggaggtaagactaaaactatcgattccagtactctttaatctatatttttcgtttgatctttataatgggttctcatttaatatttttttcatcagttttctcaatgattatgtgaaattctgcaccgagttgttagctattattaggttattttcttaattcatctgtttgatatggctatatgttattaatgcctttaatggggttactggtttggtgattagaatcattaaggcagcaagtgcttgcaatacgatggggtttttgagctttaggtttctgatgttaactaagtgtgattactaagcctggcaatggatattcagattttatttcaaatttactactttgaaatgctcactatgttccattgttatatgtttgaactttgaagatgattgctgtgatttacaaccacttagatcttgcatgatcttgtggtttgtaaaatgtcctttgtgtttttttatttatttttggggtgggggcaatttgtttacttgactgcctctttgtagcttgtctgtggttatcttatcaaatgtgaaatggttattttcctctgttttttgttggggaatttgatttaatgtttttgacttgaccttgtaccatatggataattttgcataggtgaaccttgaagcttcctttatttgccattgttccatcactgattgaggaaggttgcttggtctatggtctttcttttatccagtttatattgattgcactctgtttttggaaccagtagaaaattgtcatctctgtctttaggttattgagttctaagttatgttattcttggtgttaactttgtcatcttcatgtttgttatttgtttcagtagaa

SEQ ID NO: 47653 - DNA, 359 bp, Manihot esculenta
  Intron number 2 from transcript cassava4.1_006928m (locus cassava4.1_006928m.g) derived from phytozome v7.0 (chr-ID scaffold03823; pos 169391 to 169749)
cccatctatcttccaattttccttctctgccaacggtaatgccttcagcttcagcgatatgtttgattctaaaactttcccgttgaagttcttatgatttttttttcttttgcatgtttatacaatacagctccaaaacatgaagataaaattatatacccatttggaattgatttaaaagtttaaggttttagttgtcatttctcgttttccattaagtgtaatgcagattgttgggatttggaagaagggtagttgtgggttttggttgagtttttgatttggtagtgttagatctgcagtagacttgcatttgattatttacgggtctttcgttttggtgaaaatcagttaaacaa

SEQ ID NO: 47654 - DNA, 810 bp, Manihot esculenta
  Intron number 1 from transcript cassava4.1_025873m (locus cassava4.1_025873m.g) derived from phytozome v7.0 (chr-ID scaffold05214; pos 716662 to 717471)
tcttttccgttgcttactctcgtagaaaacctagagtaataaaccctaactctatcattccatttcttatcggttttttgtgatatatttatgttaattaacgattaggattgattagcttattttgaatttttatctttaaggcttttttttaatttaatgaacaaagcggattagctcagccccatctgaacatatgaagattagaaaggaagggaatttgaattttacgtaaaattagcaatttattatttttctattgttcgcttggaacaaaaatcaaaaaatggacacgatccaacttcataattcataatagggaataagaagaaggaaatattaaattgatattatcacaaaggagcagaaaattaatggtacaacaagtagtaattgaattattgagcttagaagcgataactgcttattatatatgcactgctttgtgcttactcgattattggacttaaatttgattattgggactgatcatctcttttagttatagtttgaaatatgaaggcgcaagaaggaaaggttaaattgataatatcagaatggaacagataatgaacggttgaactggtagtgattgaattagtgagcttggacgcagtaactgattattataatgtgttgctttgtccttactcaactagtattagcttaagttttattatttggactgattttctcttttgattatagtttgaaaaatacaaaagcatggtgagaactagaggagtgaatatggttaatgtgccttaatttacaggagcaagtggcaagattacctgatacagagacatc

SEQ ID NO: 47655 - DNA, 596 bp, Manihot esculenta
  Intron number 1 from transcript cassava4.1_027855m (locus cassava4.1_027855m.g) derived from phytozome v7.0 (chr-ID scaffold06814; pos 469130 to 469725 reverse strand)
cggtagacgtttcatcttcttgcgctactcctttcgtattatcttccgattctacgcccggactctctcttacgctggatcagattaagtatagctctgatgctctccaattcttcaagaacaagctctgcactccagaatgaatcactcaagagttcgctcatttgcaggttctattttttttccttttttgttgctgaaaagcaaatcacaatgctaaacaagcacataaagcaagtaaaagttaatttttggggttctttttatatataattaagcgaaagccttgttggtttctttggaaactggaattgatgtttcagcatagtagtgaagaactttaattggatagaaatataaagccatatcaactaattccctattaggagtccatataggaggtgcagttgcagttgcacttgctcattggaaaaattgggttaaggtcctaatgcggcttttgattaaacatctgtaaatgcgatttttttttctgaagcatgaagaccataatcttgttgcataagttgtttgataatgttgaaatgaattcaattcttgtatgatttcaggttactaggataacaccatctcaa

SEQ ID NO: 47656 - DNA, 779 bp, Manihot esculenta
  Intron number 2 from transcript cassava4.1_019547m (locus cassava4.1_018824m.g) derived from phytozome v7.0 (chr-ID scaffold03802; pos 864453 to 865231)
agcccaagtacagactcatcagggtaggttttccacatttgtcttcagaatagaagcttgcattatttgtcttacattttgtttggttgactcttattttttttcccttctttatgttattgtattttacaatagcacaaggtgagaaaaagctatatggctgaatcattaactaatgtattcgatattggcgttaactccaagtgacgctaaaatttctgtcctagctgcatttggagtcttggctttcgttcacctcactgctaaactagctcctttttttctgtcttaaagctttgtagattacggtggtatttacattcatatgatgccattagctgattggcgctgctgtttgccttatcttttgttttttaaataaaaaatttaatttttgagtgatatgcaaggttgtgtaaatgtgtgtaacattcataatagaaataatcattcaatttgggctatggtcatttgtgcaattgatggttgtaagacattatgttgatatgtggtgtcttgataaaattttgtattaagttctataatcttccaatatatctaatgcatatctgttgttgtgtcgtaataaaattgtgtattaagttctataatcttccaatatatctaatgcatatctgatggttagtgacttaataatccttcttgtcaatctatgcctagtgaatacatgctttcttatttatattgggttgtgattggtctctaggatgtcatgttctttgcctcaatttttttcctcttttttgtttttttgcaga

SEQ ID NO: 47657 - DNA, 642 bp, Manihot esculenta
  Intron number 1 from transcript cassava4.1_000695m (locus cassava4.1_000695m.g) derived from phytozome v7.0 (chr-ID scaffold02631; pos 4501 to 5142)
gagattcaacaggggttagttcatacaaaaactttctagtttcttatttagatttgatgttacgttttgtcgttattgttttttaatctgaattttgaatcacgtcagtcttatttgctgtcgattttcatatggttcctcccaattggattgaaaagatttgatcctttttctcctttttgaattcctgaaacgacgaggaatatgagacgatggagtttcgattacttttctttcagaatgtccatgtttgcccacaggtttctagatctaaatttgattagatgttgttttagcttttgatgctgtttggcttgcttataagctattacatttgcggatttgaagggctgagcttataattagttttagaaacctgtttgcttcatttcatttaattgaattatgtttttccatgatgtaatttggattgaaagtgtagttttctatgaagaaacttttttttggacccctttaagcattagattgccttgatctttatatctggagctgaggatattggttttatgttgaaatcctgcatttacttcgctgttaggagagtgcaaagaatttgaatagagttgcattttgaaatcccttttgactttggagttgttttgcttgttgttcagaccaaaa

SEQ ID NO: 47658 - DNA, 1008 bp, Manihot esculenta
  Intron number 1 from transcript cassava4.1_014997m (locus cassava4.1_014565m.g) derived from phytozome v7.0 (chr-ID scaffold04043; pos 1285639 to 1286646 reverse strand)
tcaagaagtcccactttcaatattctttcgggcaagtaaacctcagtttcaaattttaattcttgtatgttttttgttttcatttgatgcttctaccctatatatttgctgcaattctcaccaatttttgttctttctaattgttggctgctatttttaacattttctaggtttccttgactgatagaattcattttcttggcacgttgttgttgattctgcattgtattggctgtatttgtgtttgctcttgtaattgctggacaaccaaagcaaacccctcgttgttttgttgtttgtttttaatctgtttatgatacaacaaatgagtagttgcctctacatccagtagctgtgaatctgttgacttgacttctttatttggattttcatctgtttctctcaattgatcctaaaagtgtctgactaataaaacaggtgatatttgcagggggtagttttgagctccttcgatggctgaaatcgtagttatgaattatcatttaagtatgtgaaattagtattgtcttcagtcaccaaaagttcaatcatgttaacttatctgtcttggattttagtacaagagtaatgtggccctctaatatccaacatggccttctttttttctccttaccatttgtatgagttgataacttaataattattctcattaatattttttaaaggaaaaacaacaattaatcttcttttcatgaatggcaatggaaatggtagacacttagaagtgataaaaggaagtaaaaacagaatctaaggaataagtagctgctagtttgtcattcagtatggatagcaatagtcgtaagtgtgcacattgctgtgctccgctgacaatgaagtgactctttgctatacttttctgtgactgggcttgatcttctaaaaaattttcaatggattttgaaacttactatctatgacttttagatcttatgtgagagcctgatttagtgcctgtgttaggaaggtttcagatactcaaagatc

SEQ ID NO: 47659 - DNA, 565 bp, Manihot esculenta
  Intron number 4 from transcript cassava4.1_011899m (locus cassava4.1_011899m.g) derived from phytozome v7.0 (chr-ID scaffold02264; pos 333537 to 334101)
cccagagacatcaatgtatgtgaagactcagaaatctataatttactattttttatgggaaaagattcaatttttatgcatttctcttgtgtgtagttgggtgtatgaacctttaagatatgaccaggtggacataaggatatactcttgtatagtatatgaactcaccggacataaggatatactcttgtacagtatatgaactcaccgtgtaatatcttaagtttttgaattggatgctttctcaggtgtcattttaatcataaactggtggagtatttagtctgttgcattactttactgatgagaccattggaattgtgggtcttttagactcctactagttgatatttaaccaaaaaagtctattgattaacactataggccattcttctgtccttgttcttagaagaacttttgaaagcaaaataatcaatatgcatatctttaattaaattttccatcttagcttctgtgttttaatagcacttgcacattctcctctggttaaccttccttttgttttgcagaccttctatccttgtaagtgacattttgtttcagc

SEQ ID NO: 47660 - DNA, 1036 bp, Manihot esculenta
  Intron number 2 from transcript cassava4.1_017265m (locus cassava4.1_017265m.g) derived from phytozome v7.0 (chr-ID scaffold12824; pos 60913 to 61948 reverse strand)
tgtattggtgttgttacttggtggatcaggtatttaatttcttgatttaatttatattcccataagctattagttaatttttgggttaaagcagggatatgcttgcttaatactttgatattttggttgcttttcatgggtattcaggctggattccttttaagtgcaaatccaagaaattcttcttttttttttcttcgtgtgtgtgaaaaattttaatctgaatcaagtttaataaatggaacattaatattgcagaatttttttactaaagttttaaaaaaataaaaataagtaaaataaaatttaaatttttttataaaattattaattagttgaagaatagaggagattggcatgcacttgctcatatatggaaagagttggagaaattaaaaataaaagaaggattgttttctatcttttattatcttttattttctctaatttagagagagaaaaaaaaagaattgtgaaaataaatgactttttataaaaaaagttataaaatataaaggccaaataatcaaattttattctgtttttttttttaattttaacaattttcacctaatatgataatattgttaacaatatctaacctatttaataagaaaataaaataaacacctataatatcttatataactatatttattttacttatttaaacgttgaaaatcataaaataaatgttttcctattatttatttttagttattagaaataaattaaaaaaattaaaagaaaagaaaagaaaagaaaagaaaaaatatttatgtttttagaaaggaaaaaattacaaaaacatatatatatatatattttaccatcataagtgataataaatagaattaaaatgggtaaataaacgacagagacgaattcagattaaaaattaatataaaattttccatttgataattagaaaaaaaatcgaacacaattttaattcattttgggcgcagctaagcattgaatggttgattttatgtgaaaagattgcagtgtacataacgtttgcggcaagctcagc

SEQ ID NO: 47661 - DNA, 652 bp, Manihot esculenta
  Intron number 2 from transcript cassava4.1_009921m (locus cassava4.1_009921m.g) derived from phytozome v7.0 (chr-ID scaffold06659; pos 110610 to 111261)
aagagctggatataaggcctattccaagtaaaagggtgtgtttggtttcttttcttttctttttttgtcacattatttttcctttgctattgaagtcaagcatgtgaattggtatcaatcaaatgtgaaaagtggctgtggggttgagatttagttagtaccaaatgggttccctcctgttctgctattagttctagtttggttgaattgttagaaagtttaattgtcattgttcattcaaagctaggcaagtagaaatatcaccatttccctttaataataggttgcaataagaatttagaactgatttattgataagtgcatatgatctacatgaaatagtgcattttcattcacatgaaagtgagctccacagatgaaaatagcctgttgcccccacatatttgagagtggaagatgaactattttcaggtgcactgaatagtttctcagaattttagggattcctttgatgtctcacttgcatcaacacattcaggttcccggatgcacaaggggcaagcataagcaaatttaatgtccttgtatttatgtagtctcctcattttgcagtatgccttgagtttcttgttagaactgcttcacattcatattctgacatgttttgctttcagtgtatatcactactttt

SEQ ID NO: 47662 - DNA, 906 bp, Manihot esculenta
  Intron number 1 from transcript cassava4.1_012173m (locus cassava4.1_012173m.g) derived from phytozome v7.0 (chr-ID scaffold00339; pos 2277 to 3182)
ctgctccgtcttgttttctgaacgattttatcgaggtcagattaattcattttaccacctgaattgccagttgttttaaaatttgatttcttgtgtgattggacaaataaccttttttatgatagtttttattaggcagaatacaatatcttgcattcaattgcaattaataccttgatgttaattaccaaaaaatgaatttgatttgaatacatctccgaactccagagagcatgaacttgcttactaagttggaagtggtatttttttttattttttatttatgaggaatcgtgtatcaagactattatgttctgttttggtgttatgcacatctttgaaattgaaattgtgagagtaaatattgatttgaacaatgaaatggactgtaatgcttctctaagtagttatggtagtggacaagagtgaggaatttgggataattaaagacataagcttccaaaaattaatggggtttattcattttgaatctgcagtgacttaggatgccataagaaaatgagtgaattcatggaagaagtagttcataattagtgactatgaaagtttgtgtttagattgaaatttgaaatagcaacgatgtaaaaaatgatagcatgttacttgaattacaataaaaaagaagtgcttaagttgtaaatttttcttttatttcttctcattgtttccatcattcagtttggttttaaaaaatttcgtacattgatcatgttgtgtgcttctttccttccattttgatgtgatgttagcctacaaaggcagaaatcaattaggatatgatccaatgatgagattactttagagggcataaattttttgtggaaagttgaattctttgtaattatgagcaactggaatttattctattggttctatgggcaggtg

SEQ ID NO: 47663 - DNA, 760 bp, Manihot esculenta
  Intron number 1 from transcript cassava4.1_004999m (locus cassava4.1_004999m.g) derived from phytozome v7.0 (chr-ID scaffold02895; pos 40334 to 41093)
tcttcctcaccagcttcttgttcctcttctgatcggtgagttctctctttatctctctctgtttaccaccctttttccttgatttttctttcagattctcttgggctcttcgatttttgtttctcagatccgatctgtcatgtttcagcatctacttcggttcaatctatttgttcctctcttccacttctgcattttgctacttgatttcgatagttgggaatgtgaatgagtaggggttttgttgatttgtaatgttatctgataaaaaaaatgttgcgttcggttatgtaagtgttggattttttggatatgggttattgttgcaactaacttaatcagtggctttaatcagttggatatccaatttcctcctgtcctaattaccgtgtattagactgttttggggatatggtcatatatttcttcgcaatcctactccattgcataccatgattttgattcaaataatagggctgcttaatttgactgatatagacatgattaattatgtaaaactccttctaaggacagtggaaatttgtgcaattttgaaaaaatgtccttatttgctggtgcctttctgtaaatgatctgtttcattctttttgtttaaaaaaaaaataattttgcagctgtacttgtgttggttgaactgttgtagttgttgtctttcaaatactggcttcttggttggatgctgatattagtatcttttcattcaggggccatcttaaatcgccttggtcacgcaggaaaa

SEQ ID NO: 47664 - DNA, 548 bp, Manihot esculenta
  Intron number 3 from transcript cassava4.1_016448m (locus cassava4.1_016448m.g) derived from phytozome v7.0 (chr-ID scaffold09150; pos 501076 to 501623)
gggatatatacaaaagtgctccacgaatatctcaagtgagttcttgatctccatggtgaataatgattttttcttgattgctttttgtcctagcatcaatgcacattttatttgtatcaagtagtatacataaatttaacacacggatgcacacataaaacatgttacaaatgaaaatctgcatatcagctaggccaagaaggataattatttatgtgtgttaacaaaatgcaattttatggtctgctggcgtctttctttgattgattgctccacttttatattttggtactgctgactagttcgctgttctacttctagcagaggttattcatttaagttctgcaaaaagtagtgtaaagaattaaggtttatgggatattattctcctgtctggtcttttgctttttcatttgctcattgtagcacagtttctggatagcaaagtactaattgtttggtagatttccttgccgaaagttagtgatgattgaaatgttcctgattttgtattcttttcatcattcagcctgctgtgagccctgttg

SEQ ID NO: 47665 - DNA, 786 bp, Manihot esculenta
  Intron number 1 from transcript cassava4.1_020975m (locus cassava4.1_020975m.g) derived from phytozome v7.0 (chr-ID scaffold10599; pos 125297 to 126082 reverse strand)
ctcaaatctaccaagcaaaacccgtacgttttcaatcggcttgatctaattgttgtattactttccaaaatcatgccaataatcttcgccgttagagtgtgttccataaaattttaggcagattttccttcagcgaggtggaagaagatgatgaacagtatcgaataaagtcaaacataatgttggtcccaccctcaccaaatctagcgtaagaaaggcatcaggtccattaagaatcgtacacgtagaggttgcttcttatactgccacgtggcttcaatatgtcaagtgggatgtctatgaaaattatttttttaatgaataattgaagtttgtgggtggagtgatggtgttggactgttttggtgtttctttgtggaataactggaaaaatcaaaggcagcggaatttgactaatggtgcttattgggattttcctcttacgaaacaatattttatagtagttgcgatcgtatttcatcttgatcccagctgtgagatgactgtcaaattcaggcaagtatatagaaattatgcacccatttgctggaatattcaagctccaaagtcatgatgtgaagttatattagaattcttctcatgcttatatgggatttgaagacttgtagctctccaccaaccaaatatagaatcgtaaatttcatataaaaattaaatagaaattaaataataaataaaaaataaacttctctaaacttatgtaatgcatattgaattgacgggtattgtgattttgcctagcaggtctcccacgaagtgcaaaat

SEQ ID NO: 47666 - DNA, 738 bp, Manihot esculenta
  Intron number 2 from transcript cassava4.1_007889m (locus cassava4.1_007889m.g) derived from phytozome v7.0 (chr-ID scaffold03883; pos 283903 to 284640)
atctctgggcagtatgtcttcataacctctgttctataatactaatatatctgaatgtgtttaattttattgactttagggagaattattatctagtccctagattctgaaaaaattcactaattcatctcaatttcaaaatcaattaaaacttgtgttttgcaaaatcatactctttgatcttctattaaaaactgcaattcaagttagatattcttattatttagtctctcttaaaaaccagctataattttaaatattcatgctatttagtcctcgaatcaaggatatggaaggatcaaatagtttgattttataaaatagagcaactttaattttcaaatagagatgaaccagtgaatttccataaaactgagggacttgacagtagttttcccttgattttattggttgctttgctttaatggatttctttttctttttcttctgatgtatgacttgaatctttttggtatagaaagaaaaagaaaaatctcttacgaaagcatttggtgtatttccttaaaaagttcctctgatttgtgtttctcagatgtgtacttgacaatttgttagaactacatctgaactgtcctaaaagatcatgtcctattccattttttttttctccttcagtctttatttattttttaattattattgttattttttggagggtggggttgacttctaagtaaccttttttcccattgtttcacaggaagaggagacaagatc

SEQ ID NO: 47667 - DNA, 500 bp, Manihot esculenta
  Intron number 3 from transcript cassava4.1_014270m (locus cassava4.1_014270m.g) derived from phytozome v7.0 (chr-ID scaffold07933; pos 11495 to 11994 reverse strand)
aagatctcagggcagaaccaactagaaaaggtaaactttgctcatttaaaaatgtaataattttgcagaaatgtttttttttttctgttggtccagatacatatataagagacacatacacttagttttatcagcgtaatgctgtttttcagttataactgaaagcaactgcaattgtcccttactatcctagattttgtttgctttcatgcactgcatcttcttattctccataattgtcgtgaaaatttcactcccaattgccaggaagttttaagtgaggctcatttccatctccttatcacttgaagtacaataggaacacattttattgctaatttccattaccaaattgaattcttcaaaacgtgcaatattacatgtgcctatgtttgtctttttttgtgaattaggaggttgtaattgattgaatgatcatttttgaggtttaagtgtttagctctttgcagaacctgaaaaccatattgcaacctgggagg

SEQ ID NO: 47668 - DNA, 546 bp, Manihot esculenta
  Intron number 2 from transcript cassava4.1_014270m (locus cassava4.1_014270m.g) derived from phytozome v7.0 (chr-ID scaffold07933; pos 12159 to 12704 reverse strand)
tgaggttgcccactgctaaatctcttggtgacaaggtttttgtttctcattcattatccatcttctggtacatattttattatgcctttattggaaatatgttttattttcacatgttttcttatttgtcatcattgcgtcttgcaagacttatctgcttctgtggactgattgaattcattggatattctaagcgtagaatgctttgtgatcttggcattaaataaatagagttcttatgattatatggaacctggaatcaggacatttggttcccttgacttagagtttgagctttgaactaatgatattaagttagagtttaagctttgaactaatgatattaagtttttatatagttgttgacaatggcaattccagcaatagtttttttccccttcatcagtttgttattttgatggtgttttggaatcggctatttttcccaaatgaatcttttgtcgttgagcaattcttgatttaatcatctatgtattctttttcttttcaggattttatcaaatctgctttccaggacatagtttc

SEQ ID NO: 47669 - DNA, 529 bp, Manihot esculenta
  Intron number 1 from transcript cassava4.1_010796m (locus cassava4.1_010796m.g) derived from phytozome v7.0 (chr-ID scaffold06814; pos 1043271 to 1043799 reverse strand)
ttcttcgtatacagttccacgactgcttcgttcaggtaactatcctttcattcttcttctcaatagcctaaatcttcttgatccatccttcagtaagtagatcgaactagttcttgatttttagcagttgattcttccctttgccagtttctagtacgtacatgcatggctgtccaataattgctttgtttaatatgagctgtgaagcatgatgcttcctcttttgttaattttgctgattctttacccagttttgctttccttttctggcctggcatgtttttttaacagaggctctctctgcttaagcttgccttttgtttaatgcttttgttaatcttttagattttttaaaaaaaaaagacatcttcgatcgtgatgtgctaagcatgacatgactgtctcataataaaaatcaaaataataatatgattatattttaataatttaatattttagatctaaatacataatttctctgtgttgctttaaaaaaaaaaaaactctgatcgttgttaacgtctcaggg

SEQ ID NO: 47670 - DNA, 584 bp, Manihot esculenta
  Intron number 1 from transcript cassava4.1_005904m (locus cassava4.1_005904m.g) derived from phytozome v7.0 (chr-ID scaffold01072; pos 149176 to 149759)
gccgggtgatcgtcggagaagaaattggaggacagacggacgccacacacactcccatgcaccatcgcgtgaaactgaagtcgaaacttagatcagcatgtgagcaccacttgtgaaagctctggtcactacggccggaaacgatattgcgcctattcctatattggcggtgaaaccaaattgacatccaaatttggtgacctaataactaatttctcaattcgagaaatccaaagaaaataaacactcaaaattaactcaaaaactgtgatatcatgtaacaagataaggaacgatcgataatttgtatgtgttttccaccattatatatcaattacaaaatcttgttaagaaattctctattaatcaattattctatagttacataattttctcactttattttaaaaagttttaaaaaaattaattataaaattgcaagttggtaattattgaacaaccatctacgaatactcgtaataattctcttagcccgaggaatggatggttgctctgtcttctccttcctctatctataatactgccaagctgcgttcttcacacacggctcaatcaagaaaaca

SEQ ID NO: 47671 - DNA, 559 bp, Manihot esculenta
  Intron number 1 from transcript cassava4.1_024327m (locus cassava4.1_024327m.g) derived from phytozome v7.0 (chr-ID scaffold08265; pos 45236 to 45794)
ttcttacaagaactccccaggtggtcgcatttacaatttttaagctctttatgattatgtttatatttaattgttttgaaaggtttttgagtgatgttttctttgtaaattgctttctgatgttgttagagagaactaagctggttcttgtagaactagtaactgttcttaaattcaagttgatccaatgttggttttggattgcattgctaattatctatgagggttttggaatgatgacatgatcaatgtagccatgcatgtgtaattttgtgtggaggattattagtttctgcaatttttgtgttggtggcgggaaaaaagttttctagattggtttcatagctcctgattaggcttacaatatatcaggttgtccataattgtttacttaatctttatggtttaattggatgtatgagaatagatatctcgtgtttgaagaaaaagaatggatgagtgagttccttgatgttatacttgatctgtatcactctcttcctctctgctttttggattttaactatttgttttgatttttgcttttgtagcttcagtt

SEQ ID NO: 47672 - DNA, 420 bp, Manihot esculenta
  Intron number 1 from transcript cassava4.1_008249m (locus cassava4.1_008249m.g) derived from phytozome v7.0 (chr-ID scaffold02871; pos 558536 to 558955)
tctgcctcacagaatcccaagggtaaagaaaaaccacttgttcttctttatcttctgtttcttcataattttttaaaccaagcttacaaatttaattggggttatgcatgggatactgattcatcaacatggttaattgggtttaatactatttacttttaaaagttcaaaatgcatttcccattaaagttgataaattccttgcctttatttgttcttgcttattaaaatacaaggagacctcagctttagttgtctcacaactttgatttgcatatatcatgttttggattataaatcctgtttctcttctttgatttgtcctaatctaccaaaaaagtaaataaattatgatggggtggttcttttttcatttaatttgcaggtaagcacaacagcactggtgatctgagttctgat

SEQ ID NO: 47673 - DNA, 946 bp, Manihot esculenta
  Intron number 1 from transcript cassava4.1_002113m (locus cassava4.1_002113m.g) derived from phytozome v7.0 (chr-ID scaffold05214; pos 228331 to 229276)
aggtaagatggcatgaagtaactttctggtgtctttgtttttgtcctttgaatttgaagtttccagttgccactggttgatctgttctggacttaaaccaaagataaaataggaacaaatgatcctgtctcaggttaagagcttctgctctgcctccccttgtatttatctgtatctacatgcatgctggtaattttatgatttggacttgatatattaaagaatgtagagaatggaattggtacctctttaagagtttctgttgtttatgcaattgaagtaaattctagaatgttatctcaaactttgctacggtttctcatgagataatcctgctaatttacttgtgaaacaatattaagaaaatgctaaatgtatcattgggattggttttttgtctatgttttatagtttaatcactcatctttgtgctctacaggcattggttgaagttgggattgggaacctctcaggatacggacaatgtcatacataatttgtgttttgcttaactatatgtttttactctaattgacagttactggaactaatttgcacttcatttcatgacagcagttgggttgctgcataattctgtcataaactttgactgttgttagtcactttaaaatcagtgacttggaaatatcccattcatgatatcactaacatgggaaatctaaatcagtaatctgttactgatgtgctacgtttcttgatatttgttttctgttattagataatgcattcaatttgatacaaatgcaggaatattatgttttaaggaaacttttagtattataaatattaggaggtcctttcttgtctaacttcgtttaattgtacaattttattttatttatttatttattatattttgcattaatatcataggataatatatatgcttcgctttattttttttcctttccataataggctcatt

SEQ ID NO: 47674 - DNA, 877 bp, Manihot esculenta
  Intron number 1 from transcript cassava4.1_010714m (locus cassava4.1_010714m.g) derived from phytozome v7.0 (chr-ID scaffold06814; pos 976407 to 977283)
ggtatgatcttctctctcgctttcttgtttatgtttgttgagtaggaaaagattggcttattttcgatcttattcatatgtaatatcggagtaattaattttttttaatatatttaatttttaaatttttaaaacttaaattttataattataactatttaatttttgcattcacgtatatatatgtgttgtcacaaatatatataaataaatatgagaactcactgatttttaatctttatttaaaaaaatataaaaatatatcattcttttcttctatttttacgacctgaatatcggaccgctaccggcgctaggatccagatcggtttaaggccgccgggacccgtagcaagcctgacatctaacctgtaaacctgtataatcccatacatgatcaacaacatacataaaaattaaaacttttcttttcattcatacaccaactcaatctgtgcatgcactatacataacataatcataacattgatccctctacgggatctcatcaatgtagtttaattcatatgaaaataatattttataatataattttttattaatattttttaataccgttcgaaaattattattatttattaaggttgatatcccgggatattattttaacatatagatttatagatctaaaaaaaaaactcataaattattaatactattttgtattttttagtattcttttatcagtcaaatctttaagatcaattactcatttcaaaaggttcttaccaactaggaagttgataaaaatttgtgatggtattaaaacatagatctcttcaatgttatgttcctgaatcatagtaaatcaaatgtaacagtggagatccactattcttggagcccttctgggtga

SEQ ID NO: 47675 - DNA, 523 bp, Manihot esculenta
  Intron number 3 from transcript cassava4.1_011162m (locus cassava4.1_011162m.g) derived from phytozome v7.0 (chr-ID scaffold02264; pos 143236 to 143758 reverse strand)
acaagatcacaggtatatttccgccagtttttggtatttctccttctgttgaagtactgattagcttttcagtttgttttcactctcaagttgcttaacattcgttttccaatttttttacttggtaatcttgctagagaagcaagtataagaactgtgagttggattatgttgaactgcagaaggagtaattttgttccaaagattcaaagtcaagttcttcccctttcttcttttctttattctatttttataaacttcgcgggtattactttttttactcctgtgctctaaatctttcgaatctttctgcacacaagcttcaaagactgaatctctctctctctttttttccctttcagctttactgatacaccatttataatggctaccgtgctttattttttttgttgttttgtatctcagttggtaagaggtcccctttacaatagacctttcattttgaacctacgtttgtctttttgtcatccatagctagggacaatctggtgtttttgcaaaa

SEQ ID NO: 47676 - DNA, 839 bp, Manihot esculenta
  Intron number 1 from transcript cassava4.1_002793m (locus cassava4.1_002790m.g) derived from phytozome v7.0 (chr-ID scaffold02892; pos 479062 to 479900 reverse strand)
cacagcgatcccgtggtttctatcactttctcctggtatctacttctttctacttctacttgggtttggatatttcattctatgtgcagccatttttatgctgttttatgtattactttttagtgcatgtgtggtgcttgattaaatgcctgactatttacctcctactttcgcctctttttctccgatgttgtttctttccgttgtttagtgcaagtcttatggagttttcatttgtttctaagagttgctgtacgtttgaagttaggtattgtattgccacttctattaatcttgagcttagatggattggatttgtgtttgacattgattattgaggcagtcgatggccatctgtatgtcttaaatccgggggaagatatttagctagggttttggcctctttggcacaagtcttttgtggactatttttctagcttacgttttgcaattttcttatgatggaaacatatgatcttgtggtgtctttggtgtttttagatgctgatattaaagaaaaactttcatatcgttttttttccgtaatgaagagcagatatcaagtaaggaatcatatatccattttagttgttttgcgagggtgtgaaacttgtttcttgattgataattgaagcatgagaactatttgatatgtataatccatttggaggaatttgtagtttggtactatcaaactctagcatgttatgatttgttacacgattagctagatctatacatgtcaagagtaatattatttctgttctcattaaagtgattctcctctctttgaaagttattaatagatatctgttttgagaacttagttttggctgcag

SEQ ID NO: 47677 - DNA, 756 bp, Manihot esculenta
  Intron number 3 from transcript cassava4.1_013575m (locus cassava4.1_013556m.g) derived from phytozome v7.0 (chr-ID scaffold08265; pos 1652966 to 1653721 reverse strand)
atagccgcctcatcccactcctcagggtactcaatggagcttaacttttatgaggttctgttggaagtatttattttaatttattacgttgtgaaataagaatgagttgagatacggtaggaagaacccatttggattatctacctggagttcaggatattcatggaatatgaatattctcttgcttagtcaatataagggctagaaaatggtggaaattttattattgtgggtctaggtgtgtatgactaaatcatatcattctgaacgtagaaatttgatggattgatcaattttgaaagggtgaaaatttgcatatccagtgattgaaatcaatatgatgtatttgaggtactagcattagttgtctatctttatttggattaagggctttgataatgtaatctgttgagattctagtaactggtttagtcagagggcttcaattatgtcttcttgttgattgaggtgttaggatctaatttatgattatttatagcattgtataaaactagattcaatttgttttttattgggtttgcttgtccaatttaatctcttagtaaagggttttatttcatatgaaatttttatgctccagcttaagctggtagtcattttcctttttatatttgaatgcagtcacatattgaaagtagattatggtcccttttgtcttgataacttcatttttattttcctcatgtgtttttgagctcagactgcaaaagagaactttgaactggctttggaggc

SEQ ID NO: 47678 - DNA, 814 bp, Manihot esculenta
  Intron number 1 from transcript cassava4.1_014896m (locus cassava4.1_014896m.g) derived from phytozome v7.0 (chr-ID scaffold12753; pos 2556 to 3369)
cagctattgtcaccaccatcggttgttccctggatgtatgtttcctctatccctttgatccgtcgtgatgagcatcttcttaaattggaattgaatatttgtttgggcagaaagagttttgcttgattgtttgatagttgataattttatttctagacaaatgggtattattgtttttagctgatttctaatagggtttgttttaattttgcgaattgaagccatttcctttacatgttctatgtgaattgttgtgtgcttttcggtttattgctcaaactttaattctataatcaaaattttggattttgaaagttgtatttatttttttatttgttttatcttattaatgactaggctacttaattttggttattgtggccattggtatgacagtcattttcccgcacagtattaacctcgtagttcaagttcaaggcaaaccatccatgttggagttagaggaagtgtcaggaaggaaaataaccatccttatgggttagcttcagaagtagaattatttttaacaacatttagagtactattcaatccaatcagtctacccctttgggtttgggttagtgaacttgattagtttgttctgattttgtattttttttccttcgatcatgtttctattagcattgaaatttcaagtggacttgttcatctcttccttttgtaattttgatcgtctgcatgtatacttgcacggttgaaaagctttagcaactagttgtcttttcctctcattttctttcatttccttttctttgtagataatatctcctcataatttgtacttgcatcctac

SEQ ID NO: 47679 - DNA, 971 bp, Manihot esculenta
  Intron number 3 from transcript cassava4.1_024198m (locus cassava4.1_024198m.g) derived from phytozome v7.0 (chr-ID scaffold10563; pos 176927 to 177897 reverse strand)
ccgggagagaccgataataaagacagtgccaccaggttaatctgtgcttttcaattttactatttttttttaattaattgttttttattttctaacgtcaatgagattatttatttaacctatatcactagtggagtgatttcagtcaattgatgtagatggacctttcaaatgtggcaatttagtgcttttctttaactgcaaattagttctctcagaatgcttatccaattctgggttaggtttgactggtgagggataatattgctttgtgggttttattgcaggctgtatatacagttactttgtttctctagttgagtggactgggtcttagtactagtgacagaattctgaggtggatagagtaggagtctcctctaaatttagggattagctgatttggtattctttggttaaattgtcttgcacgtgtcttatttgactccatcttctaattgtacgtgagctttcttttttcttttctttccttttttttttcttcatgaaaataagttttagagatgatgctatatttctttgctttgtgtccttgaacttgaggtgtccggcataaatgatttgaacttgttagtccttatgtcctctatttcttctgaataaaaagggaagagcttcacatgacactggaaataaagaaaaggaagaaggtgggtgtttgaaagaatggtgttcagaattaggaacacctattgtttggctgatatggttatgaataatgtaactttgaaacaagtgggtttaaacatgccactatttgtttctgattataaatgtggtcctgttagatagcacttgtttctagtttgtttgttggtagatggtttgcgttgtcaattaatgcattaacacaactagcattcatgattgaaactgtgcaccatgccatccaaaatatggttatctcattctcaattgttttaattcagtatttgaaaatgtggctacag

SEQ ID NO: 47680 - DNA, 881 bp, Manihot esculenta
  Intron number 2 from transcript cassava4.1_004344m (locus cassava4.1_004344m.g) derived from phytozome v7.0 (chr-ID scaffold06814; pos 272229 to 273109 reverse strand)
cttctggtccaagaagaaggtgataaaatttcctttttcttcctgctctctttgttcatgagttttggcatttacatttcattcggtaaactgctgaaatatgatatgtacataatatctgagaataacccactagtgtggcaatttgacagttaattatttgcttgtttagtcggaaaattcgcattggcatccctgtctacttataactgttggaacttacaatccgattctattgagatagaaccctttagtttggttgactggctggactctttcttattgcatgttgcatgactaagaggattttgagttattaagctgtcaacatgcatctaagaacttgcctttgttgccaatctaaatatatgggatcccgtcatgcaaggaacaattttctagaccatttttcttgccctttgtaagatgagttgctagttttttcaaatggtgggtatatagttttactgcatgttttcccttgtctgattttgatagcctaaaatgagtatgtgaactctactcttcatgagttttttggaaccttcatagactagaattcacaagatatgatgccatgtttcgtaggaaatcaatattgagattcaatgtcaaattgacaatttttattgccactgaaaaatcaatatttgagtacttaagctggagttgtgatccataagcctttgtcaaggcctgctcggggcatatattgtgctttggtggtatccctattatgagacctggattatgaatatggtaattaatatataatatgataattgattaaattgctaaaccatatgctgactctttaattatgatatgtcttttgtataaaaaaattgactcttctatctctgcttacattgggttgaagg

SEQ ID NO: 47681 - DNA, 510 bp, Manihot esculenta
  Intron number 1 from transcript cassava4.1_016264m (locus cassava4.1_016264m.g) derived from phytozome v7.0 (chr-ID scaffold07238; pos 146333 to 146842)
cttccactagtcaagaaggtatgtgtcttcttcttcttcttcttctttttgttgtagctgcagtagacgttcttgaaattctatcatcacaagtgaaatcaaaatgagacatcaacttgtgctgaattattataattaatttctttatgaaattattttcttacaagggttatcagtagttaacctgaaattttcatggaagggtatatattaatattaataaactatggccatgcagagagaattaaaattctgaagaggaacccttttctcggttgtcaccattttttcttttttctttttgaaatagcatgaaaaagtatggtaaatagtggaggaatatggtggaaaaagaagatgcttccaaaaacagatggttcattaacagatgaattgaacattcacgttaattaacttaattttctttcatttattattttttaattgtaaaatggaaactctttttgtaaatttttgcagagtccttcatatcaataaagtttgaagaca

SEQ ID NO: 47682 - DNA, 642 bp, Manihot esculenta
  Intron number 1 from transcript cassava4.1_007733m (locus cassava4.1_007733m.g) derived from phytozome v7.0 (chr-ID scaffold02939; pos 214268 to 214909)
tcctttctctctctctcgctcattctctctctcaggcaggttctctatctctcttcggtttctgtttggtcattgagaaaatctaagagaataaagtttgttagcttggaatatcatagctgttagcaactctttagcttcaatatttttctttttgacctttttcccctgttacctcgcagctttctgaacaggcctagggttttgagttttgcatactctaatgacctttgtctctgttttttttctccttttggttactgtgatttagtgtttttactcatttgtttgttcgttttctggatttggataattaggttcttaaatacgctttctgaaatgcttttattttatgcatggattgtaggaaatgagagcgattacctaatatgtataatttgttttagctgtttaaaagagcaatttgtgagcttggttttttttgttatgctactttcaagtctttaatgtttaatatgaacgttgtccttaatttgagtactggatgggcgttatgtagtgtactgtttatgaatggagggagcaagtttatttagttgcttccattttcatgcttttgatactggaaatgttatgatgggatagttgtattttgtttttgttttttcaggggggtttaaa

SEQ ID NO: 47683 - DNA, 417 bp, Manihot esculenta
  Intron number 2 from transcript cassava4.1_009058m (locus cassava4.1_009058m.g) derived from phytozome v7.0 (chr-ID scaffold03104; pos 40533 to 40949 reverse strand)
gaaacctcatatcattttacaaggtgcatattggcaatttgtttatttctcttcatctctagtcatgtaattttggtacgtttcttttcaattcatatgttttctttatattgctctattatgtttcgatggtttgaatgaacgtgccattcaactgaagcttgatattcttaaaatgaccaacaatttatgttttatgcacagaatcaaaattttgtcaccatgtcgggaaggttgggtttacaggatgctgtagaagttgggggttatttgtacccttaatcatttaagagggcgagcatagatgcacatcgaacacatttgctcactttctctatctgcataattatatctaggactccagaaaatttgatgatttcgtgtgttctctgtagataattgtaaaagatttgtact

SEQ ID NO: 47684 - DNA, 561 bp, Manihot esculenta
  Intron number 2 from transcript cassava4.1_015028m (locus cassava4.1_015028m.g) derived from phytozome v7.0 (chr-ID scaffold01648; pos 8866 to 9426)
tactctgtgatccaggtaatgttagatggtatacttttagatcagaattcttccttatttaatttgttgtttggcttcgttaatttgttcttttgagtcaatttgagcatctgtttgattcatgagaaactgtgaggaaaagggtaagaaaatactttgaacttcccccctaggttacttgctattgtgttgtgttaagttaaattagatgtcactagacttgttttaggataggaatgatggccgaaattcagtttccaatttttttgttgatttatgtacaatttaaattagaattaaattctaatttaactattttaatctttaaattaaaagaaattctacagtgaagacgaagtatttagaataggtagagaatgttatttggctacttggtaccttgtgaagtgaaaaattaaagctttctagtttttctggttttctcttctagttattgagacataaaaaggaacctgtttcatgttttagcttcttttgcatacttctattaagtttagtttgatttttgcactggattagaaaaggagaatttgtgtctgt

SEQ ID NO: 47685 - DNA, 880 bp, Manihot esculenta
  Intron number 2 from transcript cassava4.1_033262m (locus cassava4.1_033262m.g) derived from phytozome v7.0 (chr-ID scaffold00506; pos 8210 to 9089)
tgccaatacacatccaaggtttatcggttgcaaaggtaatttgaattaaaatatttgagatactttataatgcagtatttttatgttgttaattgttgagagacctaataaacaggcctagaagaaaatgggtttaggaagatggtgctgaatagtgtctggtgtctgcagggaaccctttttttcctcccttgacctgtttgtttacttggtaactgacattgatcagatgggacctgagacagagcgagtgctcctttttttaaggtgtcaaggcattcataagaatgtaaggggttcctctggtgccaatgttaatgtttattgaatttaaagacactaaagatggaaagtggttatcaattggtgcaatctgttcatttcaagattataaggtttcaagatgtagatagcaggtttagttatccagcaggtgattagtggaacatgtgtggctgtactgaagctacaaattacttttggttagtcagttacactcatgacttacccatattaatgtacttaatatggttgaggtgcggtgtatggcctatagaagttcttttgttcaacttgaataatctcaaattttgggaagagtcggttttggttggctttgattgaatgttttaggtaatggttgttgcttagtttccagttccattttgtggggatttaaagacttgatttatgaatttcacctcttctttctctctctctctctctctgtcccttttacttattttcagcaaactttcacaattattatctttgacgtaaaatttttcatgaccttctggttttgtgttctcttaaaactatatttttgtttctgtttttaatagaattttgtacatcagagttcaaagctcggaggtgc

SEQ ID NO: 47686 - DNA, 878 bp, Manihot esculenta
  Intron number 1 from transcript cassava4.1_004630m (locus cassava4.1_004630m.g) derived from phytozome v7.0 (chr-ID scaffold03264; pos 206390 to 207267 reverse strand)
ggcagcgcgtcctcaatactgggtctcctatcagggtaaacacctctcttttatttacttaccagatttttttattcatctgggcttctatatgtattgatctgatgatatttgatgataaatttcggatttttttgtcgattggtgtttgaattctgggatcttctttgtgcttgtagctctgaatatacagttgttgatgaatgtgtggaaatggaaagtgttatcagaaatttggtaaagattatggcgtttaaaagtattaacatgttgagtttctagttgtgtaatataaatgtcttattcccagaagctcaacaaagtaattttctaacgtataccctttttttggcaatcaaacataaagttaactgaatttatgctacataaagaagttttgctacattgtcaaagtgggtctgtttgcacgacaatttaagtgaatttgataaaaactttggaattattccattttgatagctttgctgtcaatcagtttttgatttggggcatgggttgaagtggcaggtacgcctatggattctgaaaatgcattttgcagattgctttatttctaaactatgtcatttgttttttggatgctttgctgagtattttttttcctctatggtgattgactttttctggggttttatggctgccctttgatcggcgttatatgttatggatcttttcatttgaaatcttgtaaaatatctcttcggttttcagattatagaaacatctctgtttgactgtttattttgaatatgtttaataggtgccttttatcgtctaagctgtatctctaaatttgatttctttattttgaatgtgtaataggtgccagtgggtagggctacccttggacgtatcat

SEQ ID NO: 47687 - DNA, 764 bp, Manihot esculenta
  Intron number 1 from transcript cassava4.1_007553m (locus cassava4.1_007553m.g) derived from phytozome v7.0 (chr-ID scaffold03241; pos 524601 to 525364)
tggaggtgaaacaatgattttctggataaaaaaaaaggtcatttggacagttgcaatatgattaagaatatgcatgtgggttttatcttaggattggatattgtatatgactaatgtccccatttgatttggtttctatgatttaatagaattaggcttactggtttagtcctataaaaacttaagcataatcatataattctgaaaaagaactaggaactttgataaattagttctttttggttaagtccgttatcaaagaaaatccaaacacactaacatcgctattggctgttgacgtgttcaagtggaaaaatattgtaatgttagcagccattaaggtgcttgaaccctttttgctaacagaattaaaccatagagtactggttaagatttctgaaaatttaaattactgaatcctactaaaaaatagcttaaacttcaaagtacttttatgtacttttgctgtaagatttataattacattattaacgatgaagcttcatgtgagctttatctacttgtgaagtgactgctgatgctaaacacatctacatatttcccagattgctttttaagtgtatttgtaagattactgtttatgcagtggttcagtgcactatcaggttcaatgtgtagacgtggtggttaagtttcagcttgcatggcctatttaggacttacatacattggttgttattgcaataactgaagcttcttcatgatctacatacgcaggctggtaaaacattaagtgaaaggaa

SEQ ID NO: 47688 - DNA, 494 bp, Manihot esculenta
  Intron number 1 from transcript cassava4.1_003814m (locus cassava4.1_003814m.g) derived from phytozome v7.0 (chr-ID scaffold02943; pos 1026717 to 1027210 reverse strand)
tctttaccagccagagctcccccccttgccttcaggtcttccctcgctattcccatttttcaacattttccgtttctttcttctattctattctattctattctattctattcatcatttccctatgtatttccaaggcatatacctttcccctctagttaaatctttcggacgaatatattatttcaacgaggttccatggtagttatgtttttgccgcgtagatccactgatatgcaggatcggggcttttgatatgaatagatcatgtgtttatttgctaattattttttgggtaaccacggtattagttgttcgcttgggatttttttttcgtgattatattattttagttctgcttctgaatgaactttccgcccttttaaagcatcgacggatactaaattttgttcgtgtggttttgaaagttgcgctgagattacgtttgaacaatgccaccatgcagggaactgctgtgagggtagaatttggcg

SEQ ID NO: 47689 - DNA, 439 bp, Manihot esculenta
  Intron number 1 from transcript cassava4.1_017031m (locus cassava4.1_017056m.g) derived from phytozome v7.0 (chr-ID scaffold00940; pos 145477 to 145915)
aatttctcgttccagaggtactttttttttgttacctttgtttcttcggaaaatgtagccatagaattctaatttggaacataaagagaagcaattgagtattatggatttcaaatgtggtagagcaaatgagatttttgattattttctaccacacgtatatctctgtagaatcaattttatgttaatgccacaaaaaaaaaaaagaaagaagaagatgacttcgttgttaccattttgtttgttgtagcttgcatcaagctgagtttaagggtgaatccaattattcatcctggtttagggtccatggagttagttttatattagttattattattattttgtttatgctaacgattctaattcgttttgtggacttatctttgtggtatatgcaaatgcaggatcaatatatattgcataccgctgaatcacagaa

SEQ ID NO: 47690 - DNA, 836 bp, Manihot esculenta
  Intron number 1 from transcript cassava4.1_021807m (locus cassava4.1_021807m.g) derived from phytozome v7.0 (chr-ID scaffold04043; pos 943050 to 943885 reverse strand)
ccttccccatttgcctcctcccagaattcaggtaaagaattgacttttcttattgctaataccttactgatatcatttattgattctgtagaatttccaaagtagttatacttgttggtagaggctctgttagtttataattactatatgcagactctgaacttcaatcttgtcataaactttgggcggtctgtcaattgaaaaagtctatccatttttcttttcttaagtttatatgtatgcactggatgtatgatcttatatataaagaaatacgaggcttaatggatgagttatgagggatttcttttattttgatcttggacgctaaggtctagcgatttggcaactcaggtaacagctatatggcctattcaaattaattgagttttaaatttacttgaaaatctatctgagccttttggcttatggtcgtgattcctattcttccaactacattctgcttgggccatatccattttcaattcttgaatagtagctaccataatctttgtatagccttcacttgaaacagactgattcagttctgttcatcttctgaatatttagtttgtggataagaacataaacttagtctgaaagttcttatattttgttttcaaagttccagaagttgctagtgttctctttaggttgtttccaaactgatttgaattattgaacttacttttgttgaatgacagcctaaaactttgagttagctggcatttattttgaattgtagtgcaactgctgcaaaaaagaaaaaaagaaaaaaaattgatgaagaagttttgtttaccatgcagaatcagtatttgtaagaccccattctc

SEQ ID NO: 47691 - DNA, 926 bp, Manihot esculenta
  Intron number 3 from transcript cassava4.1_011589m (locus cassava4.1_011441m.g) derived from phytozome v7.0 (chr-ID scaffold03648; pos 109266 to 110191)
gcaaagaagaatctatttgtgaaaagaggtcagattcatgctttgttttgtttttatcaaatcagacatggaagcttcatcagtatttattgttggttgatatgatccttttatttgttattgttgtttattaatcaatgaaggaaaaaaaacgagggtaagtgaaattattatgggtgaaaggatatatgggttttgaataagaagtaaaagggtaatgactgcgttctgctttctgtatcttaatgcaatggatgagtagattgatacttgtgagtgagggcatggattctggtttctaagaatatttcttctaggtaaggcatttgcatccatctttagccattttgtttagaggtgctgagaagagtgcgtagtttgttcactaactccttgtttttaaaagcttcttgttaaggaatgttgtctctagagctttcaaagaagaactgtcaaagctacccttaaaaatacaattagaccactatttattggatgagtggtgccaccatgaagctcacttttagtcctttgcaacataaggaactgagaggaggagattttttttttgggggggagggggagtgtgaaagcaaaaaataaaaatattaaaaatgttttttttttcttctagttgattgtaaactattattacttttttacttcaaatttgataatgtggacaaaattgcaactttgtgaaactaggctaaaattaacaaaccaaagggattggcacaaattgttattctgtgcgaaagtttggaattgtgttgttcgttagaccatatctcaattgttcatcaatagttagaagtcaagtttaacagtagtttctgttaatttttcaaaaaaattggtctattattgttattacatttctgatatatgtcaacttacaggaatagtaacagattctagtgcgt

SEQ ID NO: 47692 - DNA, 936 bp, Manihot esculenta
  Intron number 1 from transcript cassava4.1_007194m (locus cassava4.1_006324m.g) derived from phytozome v7.0 (chr-ID scaffold02892; pos 1143827 to 1144762)
acagttgaaccttcaatcttctgttactctcctaggtatgctttgcttttctgattctaacccttgcattgtatttatctcccttattgaatttctgggttcaatggatcttgaattcttttcataagttttatatgcatcggaaattagttggtgggttaatgctggattctgttggatctttccttttttgaagttttgggtttctagattgtactgttgtttggttgccaagaaactgtgaggagaaaccaaggattgcgaacgctttaactcattggaatttgggttttaatacccttttgcttgctttgtttctgtactaatttgccttatttatttttttaatttctctgttcatcatttgattctggttggttgcttagaaagtgtgggaaaatttttgtttgaaactgaattattgtttttttgctttgaagtttaatttatacttgggatattttactagttcttgattctttggtaatctagagtgtcgatcattgtttgctgtagcttcacctctcaaatcgccctctctgcactcttttttttatgttcttaggcattgattattgatttcaataattttgactgaaaatttgaaggtttgatgttttgttcgaatgctcaattaattcggatccgtatgtttttagtctgatttaatttttgatgctattgccttttcagttatagaatacatatgatcttctcattttggttgctggtagtgaagccttgggttggagatctccaatcttgcttggcttactatcatttgcttgctatagaatgtttactgtggtttagttttcgatgatcatttcgtctccaacttatttaatgtatagcagttgagtcatcaactctctatgcttcattttgaccataacaatattgaaaatttgcagtttgttgttgtgagattctgta

SEQ ID NO: 47693 - DNA, 894 bp, Manihot esculenta
  Intron number 1 from transcript cassava4.1_008643m (locus cassava4.1_008643m.g) derived from phytozome v7.0 (chr-ID scaffold03802; pos 859989 to 860882 reverse strand)
ctgctacagagaagaatagtgttcttaagcttcaggtactgcctgttgattttcttttttgtaaggttccagagattcttaatttagtttatgcagtgattaagttgtgcatgcatagttgtgccatatacttaaagtattataaattaaatttgcgatcgttgcatcttgctttttcagtagaacattgaaatttcaaattcgtttatggcaaattatgcaaggttatttgtgactggatgaagcatcttgttcttttatgattttgatggctgaggtgcgggactaacgggttttatctcttttatctgtgtacaatattctgatcatggtgactgcatttgtagtattaccactttgattgaagaatttgtaggggtgcaatctaggtggatcattattagatatgagccctaagaaaaaaatacattgataactgaggtgaaaagcaatatacgttttgctctagatgcatacctgtttgcagtggattgttatcaattttgctacaaattgtagtttgtgattgcaagaaagcttattttttttatcatttgttgattttatgcttaggccttggggtcccaatgattcttagtcatttacgcttgggagataggttttagaggtaaagaggtgtttagagtaatgtttatgttttgacgggagttttttttttttttaatcaagataaggtttttggaggtttcaatttcagaacatgcaaaaacttcactttttcaatctatcaaattggtaggttaggatgttttgatattttaccccattaccttactttataaaatctcccttcactcccttgaaacacagtgttaagaaaggttaatgataaattccattactgtttccttttcttaggttgggttgttgggc

SEQ ID NO: 47694 - DNA, 730 bp, Manihot esculenta
  Intron number 1 from transcript cassava4.1_019445m (locus cassava4.1_019445m.g) derived from phytozome v7.0 (chr-ID scaffold06871; pos 256243 to 256972)
ccccccccccccccacctccactctctttctccaggtcaagggtgtcctcctctcccctaatatccttacgttttcattttgattatttcagttgaagtatagaggtctttctccaaaagtaacatggataattactccttagtttgtgttgattattctcagtttatcaacctctgttgtttagtatgatttttgttttaaagtgatgataacatatagcatataaaattttcaaagtttcattcagttacacctatagcatgtaacccatagcaacaaagtttgatcctatctagtgaaacattttgcaactcatgtaaggcctgccaattttcgaattgctgcatggcagaggctaaacctagatataccagtggtttctcttaaaggaagatgagttctctgttctgatggtctggatgctattaattgaattttaactttatccttgtgcacaaaaatctttagttaaggcaattgattaattaatttgaagaagcatttactcttctttcttctttggcattggctctgtttaagaaatttattgaagctactagtatcatttcaatagctaatgaagtcagttttgaataattttcttacgtttgtttacctgtctatctgattatcaaagttcaaacaaaattgtggtaaattttctgatgattttgattttttttttttattgcagacgttggttcggtaccagttacctgtggttgtgat

SEQ ID NO: 47695 - DNA, 992 bp, Manihot esculenta
  Intron number 1 from transcript cassava4.1_028382m (locus cassava4.1_028382m.g) derived from phytozome v7.0 (chr-ID scaffold06377; pos 24557 to 25548 reverse strand)
aaatccaacacagataatccaaatacgaaaatcaggtaagcaacaagaagacccacaacatgactgtctatatgtcaattcaatttataattaattaatcatttaaaatcgtgatgaatcttgcaaaaaaaattattttatagagtaaaaattccttttaattgaatgtataaattaagttatgcatcagatttaattactctttctactactaattaataggtaaagtatcaatagattttaacttatttttattgaaattggaattcaaatcaaaatcaattaaaataaaataaataataattaatgaatgcaacgataaaccttattgcattttataaaagaaaactcatattggattcaataatggattatttacagggtcatgaaagtatatctattgataagaataaataaattaaataaacaaaagaactcacaatcttcttttataaataaagaaatattaatatgatataaaagattcaaagggaaagttaaaactcaaaggtgaagcaagcaaacacacagaacaaacttctttttacaatttgtacaaagaattttcctactagcaaagaaaggcatctccaagttttcacttcttcttcaaacattgctcaaactccaatactctaccaattctcatcaaccttcatctccccaaatcaatcttaatcatggagaaaagcttagcttctctctgtgcttcattggtgaccaccgttcttctgcttcttgaagcaactccaattcaaggtatggctatacaaattctcctttagcctccacttaaaaaaagaaagtttattatttaaaatttcaaaatattttaatatatttttctaaatcaagagattaatcgatcaatttttctgtaccatctagattaattagtaatttttcctaaaaaagttggtctatttctatcattacttatcaaatgctgcggtatattgtcttaggagttgaaggtactatcggagtcaatt

SEQ ID NO: 47696 - DNA, 827 bp, Manihot esculenta
  Intron number 1 from transcript cassava4.1_012133m (locus cassava4.1_012133m.g) derived from phytozome v7.0 (chr-ID scaffold08265; pos 2310126 to 2310952 reverse strand)
tttgctggagctggaagcccccattaagatttgcggtacgttctgtataggaagacgcttactttattcttttatgtggagttctgctctgggttttgagggttttgtggaattatgttgagggtttcttttctgcagacgtttcatcataatacactagggatttctttgtgtgcttgctttatttgttgcaaagttattcaattggcattatccattttttgagaatgtactatatgttaggattgctttttctttttatgaatggatttaggttgaattttgaaattctggtgatttaagcctcttgttatatatttttttttattgtaaatacattgattgcagggtatgatatactgttgcagtgctgacaaactaggtgaggaaaagtgaggaacttggagtttagatgaggaaaagtgaacaacttggagtttatatatattctaaaaatccttaggttcaagtagcaaaggggattaagtcccttgtgaattttgatgttaacattgtttttgtttgacatgaaagagtccaacctgtaaaagcatcaacttcttgtttcttgtttgatttttgaaaacataatatgattcctgcatttaatgaagtctcaaaaaggcactttagacacttctttcaatgaattctattctttagattaagttgttggttttagttccgtggttttggtggaagatctttgctgtgattatatattggattgcagtttgatattgcaatcacttgttctatgtgatcttctaaagattcttctttatttttcaggggatattcacggccaatatagtgatttactaagg

SEQ ID NO: 47697 - DNA, 1001 bp, Manihot esculenta
  Intron number 3 from transcript cassava4.1_009898m (locus cassava4.1_009898m.g) derived from phytozome v7.0 (chr-ID scaffold02892; pos 293919 to 294919 reverse strand)
atagcttcactcgaatcatcactaaagattttagagtacattctctctctctccccgtgacatttgcatctgcattttatatttccactagtttttgtgctaaaatatattaggcatgataatcataatatttagaaaaatttataatttagttcatgttgtcattcttaataaattaatttttatacttttaaaaatttattaaaacgtcattattttttattaacgaaatactccttttaattatttttaccattaaaaatatagaaaaaaatcaaattactctctttttctcctctatcaatattttttcctctttttctttaaaagagaaggaagtgattcttttcctttttccttatcatcatatttttctccttatttgtctttctcttctgcttcttcttcttgttttttttcttctgtcatcttcttcatcttttttcttcatcttcattttctttttttcctttttcttcttctatcttttgaagaggatgagagaactaattcattaacgtagggggggagtgataagaatattttaataaattttaaaaaaaataaaaatattttaacgtacgtcaaaaaaagataaaaatattttaatatattttttaaaatataagaattaccttgttaataattacaatatctagagattaaataaaaatttttatttgaagttaaaattgaattttaaaatttttttctttcatctcttatttatttttaataaaaaaaataattatttttttgatgaaaaaaaaattattaataaaaagaaaaaataataaatttttaaaaatatagaaattgattggttaataataataataatatttaagagtaaataataatttcttttaatatttaagagggaaattatccggtgcatttagtgtacctactttcttacttagccttttaaattaagtaatttgattgtgaaaatggaaaaaacagagtgaaagtgagaattgctaccaagtgataaaagc

SEQ ID NO: 47698 - DNA, 535 bp, Manihot esculenta
  Intron number 3 from transcript cassava4.1_007977m (locus cassava4.1_007977m.g) derived from phytozome v7.0 (chr-ID scaffold11495; pos 641484 to 642018 reverse strand)
cgaaggtagaagagctgttttattgagttttgttaactcttgctgtttcctccaattttccagtagactcgttagatttatttttttctgaagaaaaattaggtgtttcaattgaatggattatgcaaggaacacaactggaattttgatgcataatatggctcgagttccctctaaatgattaaataagtgtcctgctgaaaatttctcttcatagttttttgtccaagttctttccatgttctctgaagtaaaacgaacttgcaatgtcatgtgaagtattttgctgcttggtatttgttgtttgcatacaagatttgcaaattggagttgatggctatgtattgcagctcttgaatgactacccaaaagatctggtgtctctgaaaagggctcaagtgctgtgtttctacatgggtagacctgatctgtctctggacctcgttcatcaggttccttttcttcagagaatttgaggtttattttctataattgggtttgaaaggaattttgtttcaacaggttctacccaaaa

SEQ ID NO: 47699 - DNA, 937 bp, Manihot esculenta
  Intron number 2 from transcript cassava4.1_003563m (locus cassava4.1_003563m.g) derived from phytozome v7.0 (chr-ID scaffold00886; pos 35353 to 36289 reverse strand)
aagctgaggacttgcttagagacttaggcatactggtgctgtgagcccatccttctttccacttttgttgcctttcttttctatttttgcacattcaagttgcataatgcagctgtattagttgcactttgtttttaggcgatgatcgtctggatgagatgtgtccactgttcgagttttattagttctttcaagttacttcctggttcctgcaatacaggagatggctaaactactatatgggtttcaaatagcgaacccttatgcaaatcgtagcactggttatgcagtgtgctccagacttagaagattatctgtgaaatcgtcatcatttcttatttttattttctatatattttttctttttcacagtaaccttattcttatttattcccttttttgtaacattggttgcgcacacattttaaatatgattcactggaagctgtttatcagccatttgtaagctactgacgtgtacttatacaagctttgcgtattgaaatggataagacaatttgcacttttaagacttcaaagtttcctactttctattgtggttctgatgtcagttgcatgggtgaagctaaagaaagcacgtacttatatgagtataaagcactttatgagtattagcttttagccattgattatgcattgggatgtgtttatttaataaaaatgaatacttctgcccatctcatacataatcaatagccagaaagttagtgctcatatgagcgtgtttttcttaacctctccacagctgcatgaggtgatgtactagtgaggagccaccactttttatttgcctaaaatgcttaaatgtttcctacttatttggttcaaaacatagcaatgctattctctctgttatgacaacatctatgattaatttgcagagtcctttttcagcaaggaattcacctcgtggtat

SEQ ID NO: 47700 - DNA, 682 bp, Manihot esculenta
  Intron number 1 from transcript cassava4.1_005494m (locus cassava4.1_005494m.g) derived from phytozome v7.0 (chr-ID scaffold06377; pos 79150 to 79831)
tctgctcgcaaggctgtgatcctgggtttgataaggtaagtgcagaattttatatcataagctgtttggattccgagaaaattactctttcatttgtttttgtattctaataatccatcatattgcttatgtgtgagaaagaaattggttagaaggaaaatggtttcaattttcatcttcatttcctctcaagaacaatagtgtaaggctatgcttgtttctctttgttattgggaatggaatgcaatacttggaatatgattttctttgttcctcaggaatccattatctttgcatggtattttcatatttaaaaaactatttacattggaagggatatagttttaggtgatatatccattaaatattttatgtgtcatttgaaactttgaataagattactatgatctaaacattcattccttttccatttccaaccagaataaacatggcctgagacgcgccttaggactcaaatttagtattgaatttcatgggttggcttagatgaagttgtgacgctgcatttgtcaaagcaggacttcaatgccttgtgctcagagaattaaacgatttagtgtttattatattatttttttgcagcgatcatgtgctgtgtttctaattgctaaacatttggtgtgtaggtggaaccctatttggatataaccagcataaacca

SEQ ID NO: 47701 - DNA, 630 bp, Manihot esculenta
  Intron number 1 from transcript cassava4.1_017458m (locus cassava4.1_017458m.g) derived from phytozome v7.0 (chr-ID scaffold03852; pos 98291 to 98920 reverse strand)
agggcgagctaaggataccatagttctttcaacaggtatgcttgaagtatatttgttttctttgtacaacattgcagtttttgaatcttctctctccagagatgccacctcgttttaagcgatatgcactcagaatcagttggaaagcattttatgaacccttggttaatgcatagtcatcagccgctttctccatttatgtactactgcttgatgcatataattgttggacttttcgtagaatgaaatttgtggttagcattaataatcaatttctcaacgtgtattttgtcaatcttcattttgtaactttgcttcggtggtacattttttgtaatataaagagtatctataatagctgcatgattatgccatatataattataaattatgctcttggtattctctttcgattcgaaattgttcaaagtttttggctactttatttattttcagaacttatgttttcatcgaatgcgaaaggagactctaatgttggaataggattctttggttcaactctatttgtggtcgaacttattctcattgtgttttttctctgatgtgactatgcatatcaaagcaagttgcatttaactagccaactttcttttgggaaaataggtgaaa

SEQ ID NO: 47702 - DNA, 987 bp, Manihot esculenta
  Intron number 3 from transcript cassava4.1_001008m (locus cassava4.1_000611m.g) derived from phytozome v7.0 (chr-ID scaffold04043; pos 223318 to 224304)
atagcggtgaaaaggtatctttgaatggaatatggatttttattcaattgaaggattatgtaaatttgcattttaatggtccacttatgaaagttcaacaatttaattagtttttataatttgaaaattaccagttttgttattatgttttaattattgacattgtggcttttgtttctaaaatttttggttcaaggataaaaatttgttttccaaaactttatgcttggttatttttcttaatctttctcaattctcaattaaagttcaataatttatttttgcacaccgtgacaacattactgctgaaccagaaaatgttttgatcctttttaacaccttggtacttgtttaccatggccttttgtgcgttaaacttgaatgcatgtattatctgtcccgaatacagttataaattatctgatattggccttatgcataagcatcttaacattctcattttgctatgcccattgccttctggaattcattgagaacttttcctttatggcctttaagcataggggcatcttgaaaattttttgattttggctactatatttctttctttatcttattcatctttctgaaattcctctttatttgttaaggttttagaatctccatgcacatattcccttatgctgctgcacctggcaagagttggcaaaaaaaaaaagatgtccttagtgcacctactaatctatgacagctgtgcaagtgctaatgttatggatttgaatctgtaaccgctaatcttgggcaaatttacttctttcatgtggttctgttggctagtctctcttacatgtgtccaattatgtttctctctttctctaggtgttggcactttgttgttgctggaatccagcttgttgtttatggcttttcttcccaatttctatccccgtcaatattcctttgttgctttcaatatttaattgcaggtttctattttggccggtacccttgctcgtttggatagag

SEQ ID NO: 47703 - DNA, 610 bp, Manihot esculenta
  Intron number 1 from transcript cassava4.1_025597m (locus cassava4.1_025597m.g) derived from phytozome v7.0 (chr-ID scaffold08265; pos 295421 to 296030)
ccgaatttgccttgaaactgacggtaatttttgtccttctctccccaaatcccaaagcctctcgttttttcctagatttcacgatttctaacgccttattgtcatttgtggggaatcggacgaagtatcactcgtttgaattgtactcatttggatgtatattgaacgtgtttttgcctggactgctgaaaatgtggattttttttgtcagcaatttgttaaagttgttcttttgggctgaatttgttcttttctgaaattttgctctttttttttccaaaaaaaaagttactagtattgtcattattgtctatacgcgattggcggtaactgcaacagttggaaattgagagcaatgatgcgacttgactctgaagcttttgctgttttgtttgtcatttttcttcgcgtctcagtactcaagtcttattggtctgcataagagctttaatggattggttttatctaaagaagacgatcagatttgttagctttttgccctttctttaacatgctctattatgtgcatgtttgagttcagctgaacattttttactgatcccatttatttcataccttttgtccacttaggtagggatttcattgctcc

SEQ ID NO: 47704 - DNA, 802 bp, Manihot esculenta
  Intron number 2 from transcript cassava4.1_025597m (locus cassava4.1_025597m.g) derived from phytozome v7.0 (chr-ID scaffold08265; pos 296073 to 296874)
tttggaccattggcgagctgcgaaggtatcattgccaccttcattttctttattctcgattcctgattgctaaattagtaactatcatttcttatatgggcttagtgatataggtttaccatgttacagatgacccaatgttgctcatgcaactgcaatttgtgatgtgggtctacttgtggtctgactgaagcactcttgagaggccaattatcagtcaaacggtgttgatcaaagtttttccttaattattaggacgatcttcttggataatatttgaaataaaatgtctgtgtaagacgcaattgaactgaaatttgtttgtgtactttaatattgcattcattatgtttgctgtgcaatatatcttatgttcatgttaaatgcatttttttttctgattaactgattagtatgatcttggcagccttaacttcttttagagcagacctcctatcgatacttgatatggacacactgtcatcatccacttcatatggctgaactgcatgtattattgtttatacaattttttaatttggccatctggaggcagtatgtggattgtcttggatatgtttgtagaactatattgttttagttgaagccatttggtttgtgcattttttgtagtgtatactgacaagcaactgatggttgatgaagaaaaaaacttgtgcttttgccataattttgcataatttgacatgcatgcccatttacttgtagctttatttttggcaattatttctcttttgcttttgtaggaagggtttgcatttgttcattgcacaacctgcaa

SEQ ID NO: 47705 - DNA, 768 bp, Manihot esculenta
  Intron number 1 from transcript cassava4.1_002834m (locus cassava4.1_002834m.g) derived from phytozome v7.0 (chr-ID scaffold07027; pos 486771 to 487538 reverse strand)
ccagtctagtagcatttctcttttgcccatttaaggtagttgtttttttttgctaattttgactactttgctcatcttttatcttttgttggtttggttcagattgcgaatgattttgtttctctctttctgttgcctatttgattgatatgtatcagtttcattcatttcttatagattttagttttgggctgtatgtgtgtgaggtgctgcaatgaagtgaaattttactggaaatttagtttggctgcttcttcgaggttaaggacctcattgaaagtgattctaatgttttattgggggaaaaagtatctctttacttgctctttagtttctttgattctcaattgcctcgttttcctttcttctgggtattacaaataaagttaaatctttcaaaattttctgcttttttttttccagtcaccgactttggtgttgctggactatgatctagcatcattccttgagaaatgatcttcagtaatgataccattttcttctttctcttgtttcagccagttttagagtaaactattggcagttttggttcaaaccggagtttttaactttgtctgctatttaggaattttatagattaaagaacatttcccagctctcgcttttttttttatctcattttagtgaaaatcttatatgggtttctccatttctattttttggactttgcttcactgaagaagctactgggtttatcaggtgatattataaattttactttgattgtcggagttttcaggttagaaa

SEQ ID NO: 47706 - DNA, 751 bp, Manihot esculenta
  Intron number 1 from transcript cassava4.1_005303m (locus cassava4.1_005303m.g) derived from phytozome v7.0 (chr-ID scaffold07301; pos 160867 to 161617 reverse strand)
cctccttctccaattcctctactaccgataagaaggtatccttttcctttctctttcgaatttgtctctatatttcgctgctctttttggatcttagtttatcttctttttttgtattccgattggataaaaaattattaaaacttgaaagcaacatgtttgtttttgtttgtcgaattgattggaaggtttagagctgctaatgttatagtgaatcatattcaatgtttgtgctacagtagctatgttgtctgctgttttggaattatcctttcatggaggagttgaattcaaattattttgggttataatggagtgctttcttagatttgcttcattgatttgtttttcatcacaaccaatctcaatattaatacattctttcttttttttttttttcttttgagattggttgtgatgttggaatcaaagacttgcacacgctaaggcctccataccaccatttctctgaacttcattcagaaagatgaaaaggttgcttcaattttgatattagatctgggaggttttttgaggaaacaagtgaattagcttgaaggaatattatttactctctctcatggtatacatcactaatgctgttgctttatgaataaagaaatccattatatatgctatgattcagtggcttatttgattgatatgcttgactttttgtgttcttgcacttccctggttctgtgagcttatgttcttattacttttgtcgcagttagaaagtcttccagca

SEQ ID NO: 47707 - DNA, 521 bp, Manihot esculenta
  Intron number 2 from transcript cassava4.1_026011m (locus cassava4.1_026011m.g) derived from phytozome v7.0 (chr-ID scaffold03241; pos 465442 to 465962 reverse strand)
tgctgcagaaaccaatagagtcagaggtaggggatgttgattctgcttttgttttgactatagagaattggcatgtctttataattggtagtattgttgaatctctctctccctctctctcgctttctctctcgtgtttgtgtaaaattattcttggtttttccctgctatgatgtgtgattttttttaaaagaaaatagttattgttctatgattttgctcattctgggatgtgaacaggaaggcagaaagtgccgggaagtctgtaattgctaatgaatttgatcttttgtgacaatttactgaactaatggaaattctttttggctttctcatcttctttagtttgatatttgatatagtaaaagctcttttttttttctgtcatgatttgcactagtggagctggaaaacctcacttgttccattcaagttttgcataattttctcattcatttccatgctaattgttttttttttcctttttttttctcttcaataggtgttaacagtattgttca

SEQ ID NO: 47708 - DNA, 470 bp, Manihot esculenta
  Intron number 1 from transcript cassava4.1_002759m (locus cassava4.1_002759m.g) derived from phytozome v7.0 (chr-ID scaffold06871; pos 907665 to 908134 reverse strand)
gacaagagaattgtaagttaaatcatcattctttaattttttttgtttatgcatatctgcatttgaaggattagtttgagttatggattactccaaagaaaatcataaaacagattgcatgttcatggtcaaaacttgactgggaactcaaattaatagaaactgagaagttccttttcttgctaaaagttaatgggaagttggaaaatgctgccccctcctctctctctccacttcccccttttatgtgaaaatatttatatcatgctagtatttggtgtggtgatgggaactttcagaacattttcctattaataggcttaattctcttgcttctatttgacaatcaaagaagattttgttttctatgattgcttgcctgaatgttggcagaaggatatattacagaaagtcattaacttgtttccacttctcacattctaatgcattcatgttgatagggagtggta

SEQ ID NO: 47709 - DNA, 781 bp, Manihot esculenta
  Intron number 5 from transcript cassava4.1_005337m (locus cassava4.1_005337m.g) derived from phytozome v7.0 (chr-ID scaffold08265; pos 4342600 to 4343380)
cataatttgcagcccctcaaagtgcctgcattcaggttagcattgtgcatgtatttgagggtatatctagcttactgataggaaattggctggtaactgggatatagagacaagattcttattctgcaagttactgcttccagctgggatttagttgtttgaatcacatatccttggatttatcaaaagaaaacatttgtgctaaaaacttcttttcttacactttaagagattaaatgaaaaaagtggaaattcatgtcattttaaatccataattatgaaggtaaaatgcctctgtgatattcacttaatacattcaattttcaaggatgtgatctagctttcttgttgtttttcctcttttttttctttgaatagattttctgaacagatgtgatttgctcttgcctttatcccattggtatattttggtggtctttaatgtagggggcatttgttgaggtagtatgcctccatggtattctttttggcttgtgggtttgaagttgttgtcattaatgttttggaaacacattcttctcaaggccaaggccccaaatggccaaaccactggtagtcctattttggtctaaaaatatgatccaaagagagaagcactactggttgccattaaaagctgtagcggttcctgagccatgtaacaaccaaaatctggaaagcgctaggttgttcgagttgcatttttctctgtgctcatgtttaacttggttaaaattgtttctcagctttgcgtggcttgagctggtgagtcacaggagct

SEQ ID NO: 47710 - DNA, 717 bp, Manihot esculenta
  Intron number 1 from transcript cassava4.1_017952m (locus cassava4.1_017952m.g) derived from phytozome v7.0 (chr-ID scaffold07238; pos 156496 to 157212 reverse strand)
tcttcctctgcttctcttagacacgttacttacaggttttcgtcctctctatatctctgagtgaaagaaaatgattcaatttatgataatctgttgtttttctttttggaatttgtgggaactaatttgattggttcgaaagaaattgatttcaaattagttcaatcgaatttgctatctcttgcatataggaacaaatcacttggtgatcttattggggcttgtttgaaatgcttgaattcattgttcttactttctgataaagagttttctttttaattaatccttttgggtttttttaatattactgcctgattaatggagtgggtgacaaaaaaaaaattaatgatgagctgcaagcaaatttcaccccattgaaattcgagggtgcttttaagtgtcccattgaatgtgaaccattatgatgcatggacaacttatctgtgattcatcactgttcagacatggtagcaacataattctcagattaaattctgattctgatctccattcagaccttgttttgaatgccatttagtgatgaagaaatgccaagagagactaatatacttatgttaaataacattaccaaattgatataactacacatttcttatgtttttcgaacgctttgttggattcttgtggttttggttgttgtcattttgtggaacctgaaaaatgaaggtctttgatgtagctgtggcaactgtggat

SEQ ID NO: 47711 - DNA, 380 bp, Manihot esculenta
  Intron number 3 from transcript cassava4.1_025592m (locus cassava4.1_025592m.g) derived from phytozome v7.0 (chr-ID scaffold03792; pos 330 to 709 reverse strand)
gacggctgatgtgagttaccttctatttgttgcaagcgagaacggcctgtttctttcttctttttttttttttgtatatttttctgacgattaagttttccattatatatatacacatatatataccttgcgctttttcagttgattaatcctcagttgtagttctaagttcctatcttcggatcatataattttttgagttagtcctacatgatgcctgttaataattactgtaggaaaattatactgattgtatcactttttatgtatttattggtttagttgttctgtcatgttagttgatttttccaccgtatattacaaatttcttgtggcattaagcagatttgaaatttgattttattagaatctacctgcac

SEQ ID NO: 47712 - DNA, 676 bp, Manihot esculenta
  Intron number 2 from transcript cassava4.1_000551m (locus cassava4.1_000551m.g) derived from phytozome v7.0 (chr-ID scaffold12677; pos 20567 to 21242 reverse strand)
actcggagcaagcggaggcagccatattaaagcaggtagtcactgagtcacacctgttgatactggtgtctcttatgcactttcacttaagattacattcccattaattgatgtaacttaatgagataatgttgttagaagtcactaaagcaatgcaatttttactgacaacaaagtaaaattatggtggtgcatttgggttcttgaattgcttttaatatatgattttctgttatcattgatccgtagcgcgggaattttattttattttttcccccttaatccttgcctatgctttgtttatattagaatcaccattatgttcaccgtttgatcatttgattctttgtcaaagaagaaaggatagagaaaggattctcttggtgtaggcagagagaactggaagtcaaatttgataacttacttatattagtcaattttgcctcgtgctgttcgcgaggctttctgagaagaatctagaaacaaatggctttataagcttgctggctttcaatacgcactttttggagcttttgtgaagtaatttcagtagctttcacacggatatgatggctcttgtgaatcgtgtgattgaataacttaagtccaatttggtaaaaagtgtataacttggcatttttctttgctaattcaggtcaggattgtccatcaagca

SEQ ID NO: 47713 - DNA, 831 bp, Manihot esculenta
  Intron number 1 from transcript cassava4.1_014084m (locus cassava4.1_014084m.g) derived from phytozome v7.0 (chr-ID scaffold01525; pos 63795 to 64625 reverse strand)
ctcttacctttcacttcttcaagagaacacttgaggtaatcttctcacacgaaagctatgatttgtttgaatttggagtctgctcttgccgatcttgcacttccacttaaattatttgaattattgaatttcttttactaccttttttaattgaaatttgaaattatctataatagatcctatttagaaaaaaaagaaaaagttgacatgattttgcttggttatttatgggattggaaaactagctctcacatgaaaaagtgccggaatacgtgggaatttatttttctcatatcccacagcatgttaagactcaacttcatgatttatacgatttaatatttttctccaagaataattagataatccttagatccgcttgtttgtaaaagaataactcatttattggtggaaaatatattttttagaaactaaattacttttttttttatttaaaaaataaatttatagcaatgtactcgcacgcataactccctgagtgcatgggagtaaatatgaggttttagattctactccaaagattttcaattttcatttaaaaaaaataatttatttatagcagtattaataaaattaaattcagaaaatggctcttttttaaaaatgtagttattttttttaaaatatcatattttaccttttgatcaacaaaatatatttttattacctaattttctcaatgatttaaatatcagaaaataaaaaaaatattttcttgaaaaaaatgaaagcttaatatcataacaataatgtccatgtaatcttattatatatatgcaggtgctattcattcacagctatagtggttcg

SEQ ID NO: 47714 - DNA, 515 bp, Manihot esculenta
  Intron number 2 from transcript cassava4.1_014826m (locus cassava4.1_014826m.g) derived from phytozome v7.0 (chr-ID scaffold11495; pos 508849 to 509363)
aagatactaaagaggagggaaaggaagaaggtatcagatactttatctctgctctctccttaagaacctgctattgacctggtgcctgaaacacggaaataggtgtgtaggacctatctacttagtttacctagacaatttggactttgaaagtaattaggcactaggcttgtaatgatagcaactttccgaacaagataatttaaaacttaaattgcaagtagtttcacttgaagagggaaaagaatgggtagaaaaaagggattcatcttagacggtgagtatataagatgtgaagagaattttaaaggagcacaatgaagaaatgcctttgaactttgattgctacaggcttaggttatgaagttttatcattatttttttgttacttgcatttaattgaaaatatcacttaatcatggtatttatgctctgtttgtatttggtttacttgtttatgtggcttattgacttgaacagggattgcagcagcagactgacaaaccaacctctcc

SEQ ID NO: 47715 - DNA, 916 bp, Manihot esculenta
  Intron number 2 from transcript cassava4.1_016544m (locus cassava4.1_016544m.g) derived from phytozome v7.0 (chr-ID scaffold10563; pos 40054 to 40969 reverse strand)
ttacacgaggggagctcgctgctgctttgagaaaggtaatttggcttcattttcttcgaagtgcagattttagggttcagggtcggcagcatgcttgctttgctgggggtgatttaagggtttttgttgcttttagtgagaggatgttaggttttctgcatctcttatgctttgatgcgaattgaatagattgaatatggtggcagcattactttgagtggtgattaaaaggaattgctgatatgtgttgttgcattattttggtttgatatctttcaattctggtgtgttctctgaagtggaagtggctcagcttgtttattaaaggcctatattgcaatatttggaaggtcataaaggttggtatgtgctatataatctacatggtttatagtccttagtgtgttttcatcatccaattgaattgtgtctctcatcttatatgttatgattatctacattttgttcttttgtgcttttcgccatattctttctttcatttgctttcaccagaggcaactactacaaaggttcatttcctatccagtgtgagatttggaatgaaaaatttagagtgaccttgtatttgctggagtgattttgaggaattagagatgtagacatcagaaactggtggagagcgcctgttaaaaagcagtagtctttagtgtgctgtgagaacgcatagaagtcaatatatatttgatttttcaactttagaaaatgctattttgatgtgtctgcttttgtatgaacagtttcacaaacaagctcttggattttgaattttgaattttgatgggactacatttacagtacttagcttctcttcaagtaattagtaatatatgacttgctaattttgaattttgttttttcagaacccatattctgtgaactttcttttggctggcta

SEQ ID NO: 47716 - DNA, 772 bp, Manihot esculenta
  Intron number 1 from transcript cassava4.1_014087m (locus cassava4.1_014087m.g) derived from phytozome v7.0 (chr-ID scaffold04651; pos 45264 to 46035 reverse strand)
gtagcatttggatcattctcgcttaccttttcgtctacttgattctttccttcttgctatttctcaatttcaatgtctatttgttctataatacagagcgttgaactttaagttaaccatcctttttctttcctccaactcctcatgaaatttagattggtttttccaggggatcattactcaaatgattaagaattggggttcttttctcatcagtgaggacagattgcataagttctgtttgaatttataacatttctctattgctactttttttttttttttgtgattattattatttctattaaactactgatgtagtgttgaaaaggagacctatctgtttacctgctgcctttcaaattagtttggggattgtgggtattgtccatgtgtcgctgattaggctgtgaattgagctcggaattccttgtatggaggagacttcctgttctgcctccgcctagcccacatgaaaaacagagtgatacagagagtgttttatttgttcctagatgagttgaccgtggatgattttctgttctgtgatctgtaatgactgaaaagaaaattagacatcagatcctaattatctgttacccggttacttgcacttgtttctaccaagaaatcccttaaaaacccatactttttgttgtttttttcctcgaaatttacttaaattccataactaaacgttggtgggttgttgacataattttgaaattcccctgtaggtctctgttgctggttatacagctggtcaacgagc

SEQ ID NO: 47717 - DNA, 650 bp, Manihot esculenta
  Intron number 2 from transcript cassava4.1_027321m (locus cassava4.1_027321m.g) derived from phytozome v7.0 (chr-ID scaffold11689; pos 317772 to 318421)
acgatcccagatttctcaaaatttggctcctctacgtaatttgctctttgctctgaatttcttactcttgagttttttattcattcttcaccgtagtttgattggattctgccctaaaatttggtagctttgatgggtttttatttcttcattcaattgcttgttgtttgcgggctttgattgtttgatgagttagttaagtttttgttgcttagtatttattttattgtttaagagaaatgaagagaagtaaaacatttacttttccaccgttactgttctattgagtccttccgcttcattggctcacttcctgtttgaaaattggatctccaataggattgtcattttctttttatttttggtatggaggtgcattgaatgattattagatgagatgatgtggttcggatcattttagcttcttatagtcagagggcagtgtgaatttgatagcatttttacataattagaatgagcaacatttgctgggcctcgcttcttcagtttgctaatatttaagagcttgcatgttgtgtgagattttgaatatgtgatgagttagtttaggtagtcgtttactctgatgtctgtttgattgttagatggattaaattgtttttgttgggtgctgtagttggaaggcagtg

SEQ ID NO: 47718 - DNA, 823 bp, Manihot esculenta
  Intron number 1 from transcript cassava4.1_025225m (locus cassava4.1_025225m.g) derived from phytozome v7.0 (chr-ID scaffold04209; pos 566831 to 567653 reverse strand)
tatacggaggtagtaaggaggcagctgtgtcagttgtaagtttatgctgaagaaagcaccactgcatttctttatcatgttgactcgggcagtattcattgtgaaatccattcattgtcattctcctaatctaacaggaatgctaaaattgagacggatataaagatgaggattggtcatttataacaaaaaggaaaagaagaatgtggtactttaagctatctatattatattaaatggagatgagtttcactcttatttacctcaattacttgttggagctcactggtacatcagtaatgagatggaaagaaatagatggtttttttgttaaacagtgcagctgaaactttgaagtctaatagacttggtgtaatgaatagaaattgaagaggcaagatgaacacttgcctcatgcatggttaatgtgcttggtttttgcctcgttatgctggaaattctgcatgttcttttgacagtttgcgcatgaatgttgagatttttatcaagacttgaatattgcacgcatattattatgtaagccaaacctctgttctgtattactgggaaaaaaatcaaataaaaaaaatttaagaagaaaggaacattcttgctgcatgttgagtgccatttgtttggttatgagaatagatgtcccgtgtgtatatgttttgaagcttgtgaggacttcactatgatgtcagagcaaggatgcagaagtaatgttgaagcttgggagcactctagacaagcgtgaacagtattgattaatgagagatgcaatggagaaaaggtttatccgagttactcggggttcaatagt

SEQ ID NO: 47719 - DNA, 981 bp, Manihot esculenta
  Intron number 1 from transcript cassava4.1_010036m (locus cassava4.1_009879m.g) derived from phytozome v7.0 (chr-ID scaffold08265; pos 788289 to 789269 reverse strand)
ttggcaacacttgctattgtaacagcgtcttgcaggttcctcttcttatttcgatttcaatccctcgattttatttttattctgattattactaagtgttttattcttttttattatcgtatctgttagttttatctgatcgttttgagcttgttagtttgtgacttgttgaccttttaaattgattgtatatggatgttattacttaggcaagtggtggcgttttgggtttacttgtcttgcattcagaatttctatgccctgaacataagaagacataaatagagatgaaaatttgggatgtaacattagttaaaagaattgtggttcaacttgatacagcaaggaagattttcatttacagatggttttgtagttttagattattggtagtttattgctgtaggtttgaacttggtaagtgtattccgttcaagcttaagttatgtgtaatcaataaaagcaatgagtaatttgtgtaattggtatttaaccgttgaattggtttacttagtttttaaaattttgtaaacagacgtcattttccggtgtgatattagcaattgaattggttggattttaattagaagtcttatgtttttactctggtcagtcataaagatgttatcttgttcattaaactctctgtactttttggtgcatgtttgttcaaattctttatattgttcttagattgaaagatctatcgttcttacacatctcaaagttctatttaaacttttggcttgatattggcagtttctctaatgtactcaatattattgttgttcttaagatacactcaactgctggaagtcgtctttcaatgtgattttcacataatttttttcattatgaatgtataaaaggattctcttcaactatgtttgaaattgtatccatggtattttctcctatgtaaaacttggtttttcctattatgcaggcactttacttctgtgtaccatttcgagaacaatt

SEQ ID NO: 47720 - DNA, 977 bp, Manihot esculenta
  Intron number 1 from transcript cassava4.1_012434m (locus cassava4.1_012431m.g) derived from phytozome v7.0 (chr-ID scaffold03150; pos 304722 to 305698 reverse strand)
cgccgtgggtattgaagcatttggttgagaggaaggtatatttgagtaatttactgtagtgtttgaagtttgtagatttgtggaatgtacttgtatatgtgtgaatgattataactgcagatgctgttttgttttcgtatttatgttttcaattagttttgtgtttatttcaattcttgttatagcagaggagtatgaattggtttaactacagtctacagtgtgttaggatcacttggtgtttggttggatttttttttttgtttgttgctcttccgcatgggcttgcattaggtatatctttctgccccatttgttgaaacttcctaattttcatagttataaacgtcatctacacttgcgtctctcttgctaatcaattcatgcaaaataacaataattgtttaatctaatgagtgtcagatgttgtatgtcagcaatctatcctttttggttggtatggtttgttttctgtgggaagaagtctagacctgtgcttatgttttgtataccttctgtggttctttcaatagctgtcttgtactgtcagtttattagtggtgttcattatgaaacaataagtggtgaagacatgcttgtaccttttaacaaaatatgataggctttctgatacaggtttatatagtgattcttcctagtgttattgttatgttcatccttccccgttatgggcagagggtggctgtaatgaatcacagctggtgaaacacttcatggtcattcatatattggttcatctctatcttattggacacaatgctacttgtcatagactctgaggtaaaatttttattttatgattgtattgaacgttatgcatcttttgtgtagatgcatgctgttttagattatttattacaattatatcagctctacaagctgaagcatgatcactattcttgtgtgaaaatgtgaagcaaggagttgcggccagtggggcaaagacagggctctca

SEQ ID NO: 47721 - DNA, 929 bp, Manihot esculenta
  Intron number 1 from transcript cassava4.1_011602m (locus cassava4.1_011301m.g) derived from phytozome v7.0 (chr-ID scaffold08265; pos 2652948 to 2653876)
ttattgctgatcagttgtctgttccagggtgcgtacttgataaaatcattcagtaagataattaagttgttgccttttttggtgtatcttttctttaacttttattagattttgtttgattcagatttggtatagtccattggcctttatttatttaatgaaaaggaatcttcctttgcttttgtcttactcaaaattagtaatgaagttatcaatgaatgattaccttgatttagttttagttgaaaatttcccgctttggaaattgaagctggaaagtggaatttgaagaattttgagctcaagttatagcaacatacacatcacttagaaggagaggaaaaaaatatggactactttaatttgttgaataatgctttttaccggttcaatatgtaacttttgagcagcatttggatttcgaaacctggaattcaaactggtgtacaacttgatagctatggaaataggaattgtccatgaaaaaactgaattcgtggcaaaagagttcactttaaacgtctaatgtagacaatcagaggagttttgtattggtgattgttctattagtatattaattcattgatctgatttctactggccaaacaatggacgcaatatttctgcatttatgtgtttgtgtttgtgcatatcttgagattatttatgtatgtctcatggattattaaagcattaagtgaatatgcaagtcatcctgtgcttcttatgcacagttgcctagcattttatggattaagcaatggtgaatagaattccttttgcccttaattagtttgagattgtaagcttgaaggatgctggtgaatatatgtttgaatatcaacaatcttaatgccttgtgtacatgttagagcatgttgatccttatgttattgttttggatttgtaattcttttgcaggaaaggat

SEQ ID NO: 47722 - DNA, 973 bp, Manihot esculenta
  Intron number 1 from transcript cassava4.1_026462m (locus cassava4.1_026462m.g) derived from phytozome v7.0 (chr-ID scaffold02895; pos 537055 to 538027 reverse strand)
acagagggtatgcttatgctctctctctctctctctgtgcatatgcttggaatttttgttttttcttatccttggaaattagccaagaattttaatcatttattatgttatatatttttcttgacatgggaagctgtccttttaaagtttttttttaaaattagatattattctttttatttaattaaaattaattaagttaataaattttaaatatcgaaaggtattaagagagaatgttggaacttgaaaataggatgagaaaagttgtcgctaagcttatgggttgttgttattattgtggggaaaaaagaagaaagctttattccttattagttatgtgaaaggtaggtgatgagaatgtgaatatgacctcaaaagtctattttctaattgatagcatgatgaggcagctaggatgaaattcaatgtcattcttttaaaaataataataataataaataaatttccctattaaattttgtaaattatgatgctatttttcaatgatttataaaaagttcttgatattttgtgatgaatctcggtattttgaaaatctcgtatacactttaaccattttattctttttatattatataattcagtatattctaattccattacttaaattgcacataaataaatatttaattagtctttatattttaattttatcaaattaaaaaaatacattgctttcacaaatggatttttagttcgatagaataaaaatataaaaattaaaattttaaattttaaaatttaaagagatatatatatattaattttgatatattttaaaataataaaaataattttttcaaatatcttaacgaaattaaaacttcagaaatattaataattgttgaaaatacaaaattcaatttagtaataatagcattctccatgactaattttgtaattcacccatttgatttagaatttgtttatgcagatactgggatctcgt

SEQ ID NO: 47723 - DNA, 776 bp, Manihot esculenta
  Intron number 1 from transcript cassava4.1_019741m (locus cassava4.1_019741m.g) derived from phytozome v7.0 (chr-ID scaffold06598; pos 470266 to 471041)
agctctgtggaatcacccagccggacccaaaaccagtgagttaactctgatggttttgtttagatcctttttttcctttgaatcgctaaaaaggttttctctatgagcagaaagtatcgtaagaatatcttatttttaaagatgtaatgcgctttcgattgattcatatggtatgcaactccttcgatttttgtttcaaatcaaatccgtttgtccttttctattcactccttagtttttcattttctttttctcttttcttcccagaaaaatccaattttacggtgtttctgtggttcaatttccccctgcctggacttatatctattccaattcattctattattcattgcataaaggcttataattgagaaaaaaaattgccttttatgagaatctagatgcggaatcttgggtaggataagctacatgtgcaagctcaactagattataaattaagcgatcatagtttcctttgcgtagtaggtccactatatgaacccgaactccaatgcttgaaaccacagtttcagcagttcattttagaattttgtttgctcattatgttaattatggtatgacaaaactagcaatggcaacatatgagcgtgggacgccttagatttttattttctcatcatctatttggagccacaaaactctgttaccaggaaatgcatgatctaatgtataaactttgatgtttggttgtgaaatatttggcttatgtaaatcaatttacattctgcagttcacttttgggcaccaacatttaa

SEQ ID NO: 47724 - DNA, 608 bp, Manihot esculenta
  Intron number 2 from transcript cassava4.1_012700m (locus cassava4.1_012700m.g) derived from phytozome v7.0 (chr-ID scaffold03802; pos 760078 to 760685)
tcttgacgttgcaaaggtattgctttcttttcttttggattttggtccttctatactctataaccttggccctcctcttctccatttagatgtcctcgcaaaatttcatactcaagttacatcattaggtgatatatcgcacagatgagataataaagtttcataatgggttttgtgaatcttatggttgcgtaaatcatttgcttacttacacatgattgtttcacctcgtcactcgattggtcctcatggcttgagatgtcattgattgagagtagaccctgcaaggggctggttcagaaccagactggatcgataaaaaacagctttggaccacgctggagctggccagtttgtttctgggccaaagcagattcttttttcctttgaaaaaattttaatatcgaaacaagaattttcccttggccattctaattacaattaacaaactcataatctttgaacttggagcaattgatccaatgattttgtttattgtattattcaattaaaagaaaattgtttggcatcaaaataaaggtgatatgacattcagtatctttgagttgatgcacttatatactggaaccttttgtaggattgcatta

SEQ ID NO: 47725 - DNA, 630 bp, Manihot esculenta
  Intron number 1 from transcript cassava4.1_002075m (locus cassava4.1_002075m.g) derived from phytozome v7.0 (chr-ID scaffold10563; pos 402691 to 403320 reverse strand)
tcgcttagagctcccaatcctattcctttactcacgtaagcaatccatatctttcctcttcattgcattcagttcaatttgttcttagaaacttgtttctgtttaggtaaattatctattttcttcctttttatttcaatccctattttccgttgacttttttttttttcaaattgattttcttcatggtgattaatattggaaaaaagaactgccaatgctattttgatggtgagtgaattttcatatcttattcaagggaaaattagatgggtttagtttcatgtacaagaaagattcttaaaaagttggttaaaatccagtaactgtactgaatgtgcttgttcttgtaccagctggtagtctgtgtatatttctttcaacttctactcactggaacgtgctttttgttatattttgtgtgaagaagaacttgttggatgatcgtctcaagtctttttcgtatgcttctgttactctttctttactacgaattgatggttttgtttctgattttgagacacgtcttcatttttaacgtgcccaacccagttcaatattcgttatttttgttattttgagtttactttcttttttatttgcagtaaaagatctttagctatttcagcc

SEQ ID NO: 47726 - DNA, 944 bp, Manihot esculenta
  Intron number 1 from transcript cassava4.1_021167m (locus cassava4.1_021167m.g) derived from phytozome v7.0 (chr-ID scaffold01604; pos 157537 to 158480 reverse strand)
accggttagcaggggtttcccgccgcatttgccggttttctaacaacctcaacgaaaccgaacacgtaaaagtaaattaattaataatttttttttttgaaaaaaaatacaaaaatcctgagttctctattcttttgctttgtaaaccaaaaatttcaccacttatccaaaggaattctctttcttgccgacacttcttcaaatttctctcaacatctttttgatttctttcttttcttctttttccccttcctttccaattatttttcaaataaacccatttttgcttatgtaatcttaattgtcagcaaggcactcctgtctttattttattagtaataccatattcttttttattttttttttcttttatggggattgaaattagttgcattaggtagggggtggtaataatatttggcggcatcacattttaaattctttgctgggcttcaatggcagatggctacaaattttaggtatatttttatagttgtcctctatatcgcctgaatcattcactgtttttttttatatattttctttttcgagatcttgtgggtatttatattagttgtttttcggatggtgggtatgcagattctattgggatttgtttgaaattcttgaatttggaccattcagggagaatctgttaatgggtagccttcataatctctactggtagctgaaaaattatacctaatatattggtggcttctgatatttgatttctttagctattatactgaaataatcacgtcatgaagtggatagttcttttggagaataagtttatagaacttatgccaatcaaggaagaataacagaatctgcagacgctttgatattttggaagtaatcaatcaaggggtaataaggtgaaagaaaagataaataaaatgccagctgaggaggaagctcaatctattgagagaaggaat

SEQ ID NO: 47727 - DNA, 756 bp, Manihot esculenta
  Intron number 1 from transcript cassava4.1_005539m (locus cassava4.1_005539m.g) derived from phytozome v7.0 (chr-ID scaffold08265; pos 4590461 to 4591216)
ccaatcggattctccttctcgcagctctttctgaggtacaaatgattatgagtttgtaggcaattgcaatttgtgcccgtttgaattgtagtctgagctaattcatccattttccttttcaattctgaagaaatcaggaaaggggaagctttttctaaaaaaataagactcttacacaattaaattgatcgtcctggttgcattttgcgatgcgagcttaatagaatttgaagaatggagtttcggtagttgaaaataatatatagttggtgcattttatttgagactgaattcctgtttttctgtttacatttatagcttggagggattgtaatggtggattgttcctgtcacgattatgattcgagtttgttatgtattcgtacctggacatcatattattagctgctcgataaactaagggggcaaaaattatttttatggtgcttataaatttttgtatgtagtgtctaaagagaatgtatgagctggagtaatttgacgcaaaaatttaaaaaagaagcaaatttgactttagaacctctaactggattttactttctaatgtttatccacttgtttccaggaagattttctcagagttgcttatgttattgaagaataagtggcttcaatttttggcttttctaacttcagttcaaacaaatgagagtcccttgagtgatcattgattgtctttgtgactttgtctatcattcagggtataactgttgttgacaacttgctgaacagtga

SEQ ID NO: 47728 - DNA, 573 bp, Manihot esculenta
  Intron number 5 from transcript cassava4.1_018521m (locus cassava4.1_018521m.g) derived from phytozome v7.0 (chr-ID scaffold08265; pos 3209440 to 3210012)
aggtaactacggcacacagagttttctcttgttgttgcaaatacatcgctgaattattctgttccccgattttccctgatgattaactcattttgttcatctgtgacatttgaaaattgtaccaagttttctattccttatggaaagaactaactttgtttttatagtgctggaaatttggaacaaggtgtcttttgtttgaaagttagttcttcgctaattccattctccactctggcactctctaaaccaaaaataaaagaaggaaaaagggaaatttatatatatatacatatgtaagtgttttctgctaaaggctgtgcctaggaatcaacacgaaatgtagtccacagatttgaaaagatcaattgacgtggaatctgtgatattacttcccttgggcatcataatgtttatttttgataaaattatgacatactttatttccattttttttatgctaattggtcagtgtatttctttttcatgtttaagttgcctgttttactcatccaatgtcttaacttttatttttcaggtgatcgataaagttcaggaagaaacaaagagccg

SEQ ID NO: 47729 - DNA, 684 bp, Manihot esculenta
  Intron number 2 from transcript cassava4.1_021454m (locus cassava4.1_021454m.g) derived from phytozome v7.0 (chr-ID scaffold05180; pos 25912 to 26595)
caagaaaaacaccaggtacaaaatcttgtattcagtttatgaatcccgctatttcaacagtgaatgaaaacatgaatattggcccaaaaatataatttatcaataatgatcattcttttgttgcttaacttgcatttgactgtaatccaagcattggtgacataggttgagctttacaaggtttcatgctcgttttgtttgatgtaccttttcttttatagtaaacatggttgcgatgagggaaagagaaaggaagttgttatagagaggggaggagagatgattatcaatagttcatttgtaaagccaaaagttagttagggagggaaaggagggaaaatgcttttatgttatttggatagaggggaagggaaggaagagaagcaaattttcttcagaaacatatctactcatgctcaaagttctataggtttttgcattataaatcatgtaaactgatacacgagtatgcatgtatataataattggttggtcgcatttggggattgcttattgggttgactagtaatactggtatgaatgtaatgtggactctgaagcaattatcaattattttgcctggctttaattttttattttttttgtcttccttttcctatttatttagttttaatcttattcctttgggtacgcttggcaggtatcggagtttcagcaaaggaa

SEQ ID NO: 47730 - DNA, 674 bp, Manihot esculenta
  Intron number 1 from transcript cassava4.1_001924m (locus cassava4.1_001924m.g) derived from phytozome v7.0 (chr-ID scaffold03317; pos 80629 to 81302)
cccctctttcttgctcttctcacttggccgattcggtacacttaaaatccctgccatttctatcttgtcatcttggttgcttcttttaagcgtccttgttctctgaaatggaccgagttactgatatttatatgaattcttgttgctgattaatatcaaatgggttatgtagtttgttacccggcgattttatgatgattaggtgttctactaattttggattattttgtgttgatgatcaaggttgatggttatgtgttgaactaatttgtggtttgctttcgttgaataaatgaaggtttattgtattttcaacatcttagcgctacattagattataagtcgtggtttatagctagcttctatagcaagggttttggatagaaaacctttgttttaattcttatccatttatgcaattcaacttggaaatttgtttcttctttcggatgaatttatgtttctttgtgttctttattttctgcccagtgttgtctaattccccttctatttttagtattttgttgcataaatttcttgtatactgtatgttgataagtaacattctgaatgtgaataccggtgaatttgcaatcaattaatatctctttattggcttgaaattctagattgttcatcttctattttcactttggactttgagcaggctgtgg

SEQ ID NO: 47731 - DNA, 799 bp, Manihot esculenta
  Intron number 1 from transcript cassava4.1_005901m (locus cassava4.1_005901m.g) derived from phytozome v7.0 (chr-ID scaffold10563; pos 917932 to 918730)
cgcagtggctttcccttcctgatagttccagattggtacttaaacaatatcagttaaccttgattcttgcaaatacaatctcattgttttagaatcgaactattcgagaattttgcgttggtttcattgcttgttcatgttatatgcacaagaatgttagttacaagatagagctattgcataatgtatgctttggcagtttgatgaattttctcatgggttcttttcgtttattagggctgtgtaagagaggtttgcatatccgttacgagctgttttgggtttttagcttgaattctgggatttggttccttaatttgtacaaagatttgatagtggcccaacgttgtaaaattactatgcaagaaagaagtaatgaatggagaataaaaaataacctgaattagtcacttgaaagggctacttcgtgagacttgaagagtaatcacttaggctcagttatggtggagaagagaccagtcttccatacagccctttaccaagcttgcttattttatgccagtcttctataaagaagagaaaagaaatagaaaaagggaaaaagaaaaagaagggacaaaaaagaggaagtgttaaattctaaagatatggcaaagtgaatgcttgctggctagtgctttactttggcatatgttttgaacaatgacaaattcttaaattctagatttgagtgtttgaactaaagattgaaagaaaatactctggattcctcacgttgtgtttctgatccattgtttgtacctatctgtttgaaagtaggtgaaaactttgctcgcgg

SEQ ID NO: 47732 - DNA, 427 bp, Manihot esculenta
  Intron number 1 from transcript cassava4.1_016228m (locus cassava4.1_016228m.g) derived from phytozome v7.0 (chr-ID scaffold09169; pos 98487 to 98913)
tctaacgtacagtccaagatcaattcagttatcttgtaatctctatcatggtttttctgttttctctttttaatgcacttcttttttctgttattgatgtgtttgatgatggatttttgtgtatttgagacttttttatctttatttcggctgatcttttattggaagaaaaattgttatggtttctttctttttagtcattggtttctctgttttgggtaatacaagttgtttagttgaattaaaagttttgctatttgattcttcacctggtctggattcataaatccataaaatctaaattccccgtttgggaaaactctcttgtttgtttgtgaattgataagctataattcatttgttttagatatttagactaattaaaatttatgctttcttgtttccttttttggttgaacgtagagca

SEQ ID NO: 47733 - DNA, 758 bp, Manihot esculenta
  Intron number 1 from transcript cassava4.1_000237m (locus cassava4.1_000237m.g) derived from phytozome v7.0 (chr-ID scaffold01441; pos 106420 to 107177)
gatcatcataccccacttcccaatttctctataaggtaaaaattcctttgctttctggttaatctctcccttggggatgaacagtgctagattttttatttctttcttttctttgttttagtcatggctctctagctaagctacctgctttctttctctttcttctggtgatctcaaagttacgatcttttgttaggtcagatccagagttgcatcttccttgtggctcagttggagatggggcctaattgatgacaccccatcttgtctctgttttggtcccttatgaagcttttgcttgctttgcctggggatttcattcatggctcttaaaaaacaaacactaaccttaaccatattcttcttgggttatttgtgtttaaacgattttagtcaatattcactggctttttcttccttgatgcttgtgatttcatgtcacttttgtactactatcctttctaatttgtacatattcctaatagactgcagacctttttctcacttcaccagattttcaaaatctacctgtcgtggttgtttcttggctctttatctacttgttcacttgatctctttggagtcccatgaacaatgagttccttcttgccagtcatcatatgatacaaggggcctcctggttatcatggtttcagctcctgtacttgctgaattgcatcttgttattgcttatctgtcttgttgtatatattgataccagtaaataacaagtactttgattttgttgtgcagagatt

SEQ ID NO: 47734 - DNA, 271 bp, Manihot esculenta
  Intron number 2 from transcript cassava4.1_014437m (locus cassava4.1_014437m.g) derived from phytozome v7.0 (chr-ID scaffold06494; pos 16471 to 16741 reverse strand)
aaaaaagaaagaatctcattcagaagacagttcaggtgagaaactaatattttgctgccttttcccgattccatggatatgttatgtttccactttcgagggctaccttgtttagcctcttttctttgtagatctattttgattgtttattatgcaatttaatcttgagaccttttttaactcaaatcagaacttgcgatggtggtcttcccttgtgataaatatggatgttgtaagtgataggaaattaattgtttttggttccagaaat

SEQ ID NO: 47735 - DNA, 751 bp, Manihot esculenta
  Intron number 3 from transcript cassava4.1_011969m (locus cassava4.1_011969m.g) derived from phytozome v7.0 (chr-ID scaffold06871; pos 1003022 to 1003772)
agaggcaagcttaactgtagtccctttgttttgtaatttacatgcagaagtaatgtgccaactgaggaaaattttcaactatttgttaattttaagattggtgactttttagcactaacacacatagttgcctagtatagtaagaaaataagtactagagtaaagacggagattttgtagtcaagtatgtaattaagttttcaagattctatcggtgaagcaaatttaacttgttaatatttgaggaagtttggagttgttatcaaaattcttggctgtttatgttcaatgtcgtgctgtggatacgatgcccaagtgtctggtttcaggcagtgagaatagataagaagtacatgagacattactggggaataaggagctttaatgaaagcgaaaaattagtattaatcatggttgttcgcagaaaaattggcactagatggaattggacggagaaagaagatccatatgggctgctcaactggtttagaacttgagctcttattgcttttgtctttactacaatatcatttgttattgacccgtcataatttggaaaaatgacattttggttctggcagttggagaaacttgcatgtgattggttatcattgtgtcatgattagatgcttttatgtgctctgttagattctttttgacaatcagtactgtgggtatgaattttcgctcatatatgaacaactgtatttgtaaggcaggttccaggttttgagagatcttatacctcaaa

SEQ ID NO: 47736 - DNA, 644 bp, Manihot esculenta
  Intron number 1 from transcript cassava4.1_022451m (locus cassava4.1_022451m.g) derived from phytozome v7.0 (chr-ID scaffold03787; pos 21898 to 22541)
aatttgctagcaccaggttagacatgtttttttctacaacaacatctatagtttctcttctcttgcttcaaaactataatcatcagtttcttctttctgctctgattgtatcttgggaaaaattggcaagtttgtgatcctaatatgtttctgtgcctcaaagatattcacttcccagcgatttggctatgtccttcagacaggcaagccaataagttttgaagtattctacttaaatgagctttaacgtagattattgcggagagaagattatattaaatattaatttgaaaatcttcaatatcatatagcagactgatcacataaaaattgcagcccataggtataactatgctgtaactgataagacaagacccatcatttgctcatagaaatgtctgtcaaattccaaccttgcccaggcaaaatacataggatcctcttgttgtgcgtctaactttcttcattcttgtttctgtctagaaatgattcctaagatatataacttgtgaattttagatagatgaaggtaacaagctcagatcaaatacactacagagaagacagatctttttattatcttgtagttgatgtgaggtggccatttgctttccacaagcttaacccaccaagtcgtcaaccgg

SEQ ID NO: 47737 - DNA, 848 bp, Manihot esculenta
  Intron number 1 from transcript cassava4.1_029112m (locus cassava4.1_029112m.g) derived from phytozome v7.0 (chr-ID scaffold03241; pos 375791 to 376638 reverse strand)
agaggcagaccggggccggtgggtggtaaattacaatgattgagggcattttgggaactgaaaaatagaacaacgtccggtccatcagttaagggcccgtattagtccagatggttaaattttaagttgttataattgtattttttatggattctcattgaaacatttattatttattttaaatatcctgtgcttttcagtaaaataataattaaaatcagttcttaataaaaatacaaataatcctacaattgaagaggtatacttgcatctgatacaaacaaaattcatccatctattttcctttctttcaaaattgaaagtggaagtaacaactcttcttttaagggaaatttgagaatgagagactcaaacttcattctacattaaaatagctaccttaattacttggctacactaaactcaagaagaaaaaaaacttttaaaatggtattgtttaataagtattaaaatttaaagtaatttaataattgcatgaaattacttgagacttttacaaaaagttgacagcacaattttggaagccactcttctctatcagagccaggtttcgatcctgggacctgtgggttatgggcccaccacgcttccgctgcgccactctgattgttgatatttgtgattgcttctttattatagtacactagccattccgcatgcaacctcctgcaaaagaacgtaaacgtaattgccattgctaaccaagctagaattcagaacttctgggacaaaagggggagatctttagagggaagagtgaggaggagacctgaattggtgggttgaaaacagctgctgctgctcggtttgtttctgtcttgtctatt

SEQ ID NO: 47738 - DNA, 544 bp, Manihot esculenta
  Intron number 2 from transcript cassava4.1_005252m (locus cassava4.1_005252m.g) derived from phytozome v7.0 (chr-ID scaffold04043; pos 782592 to 783135)
gtaacactctcttaaaagaagttagttttcttctcttgatctttctgcattggattttctgtagaaaaattaagtgtagtggcgtatggcttcagtaatcacaagcaggcctaggtctttattctctcactcttctattttagatttacttatttgactatggatgcaatgtcacttttacaatttgtggtatgcttgtgttttcccatcaatttcatgaataaaagtgaaaatttagtgtctgcatctaaggagttatgattgctgtcatgaacgaaatgtaatgtcgcttgttggttttatgtataaattgaaagcaattcccataattaatgctggatgagatttaaaatgaatgaccatgtgaaaaaagaaagggatcttagtattggaaatgtttttgttttacaaccaagtggaaaattgatgaatattttggtgaaagctgtttcctcctcatggttgttcagatatttacttccactgaacatctttctttgtatttccttaatggttgcagcaaattcaaaacccaacagcaatt

SEQ ID NO: 47739 - DNA, 646 bp, Manihot esculenta
  Intron number 2 from transcript cassava4.1_016652m (locus cassava4.1_016652m.g) derived from phytozome v7.0 (chr-ID scaffold06700; pos 212937 to 213582 reverse strand)
gactaaagggtattgatctattcactttctaacaatatacttctataattgttatagagtgagactcttttttccccttatttgatgtcagcttttgaattcatatgaatgcttacaagtaaatttcttcatgcaacaaaaaatgaaaaagttgaaatggaaaaggaagttgtcttctcaatactgttgatggtacgtgtgaaagttgacctttgaactaaaattgttgactaaaaattaaattcaagtagtagtagcattcataatatttacaaagttatgcatatcatatttatattcttttgtaaaatgatctcattctctacatattatattttttcttaaaatgcatccctcttccttttctgttatcgttcaactcctttttggctttgttttgtttatgtcttgtatgcttgcatcacttactaaaaactgatgctttctcccaaaatatcaatataatagttaatttcaactcttccaaatgagaacttcatgaatcctttatatttttgtttatttattaaatctactctttattcgtatctgttattattaaattttcggtatctcaattcaaaatcttgatcactttttatttatttcaggggttttctcagggaatctatcattggaggtttct

SEQ ID NO: 47740 - DNA, 759 bp, Manihot esculenta
  Intron number 1 from transcript cassava4.1_009267m (locus cassava4.1_009267m.g) derived from phytozome v7.0 (chr-ID scaffold02831; pos 326265 to 327023)
gaagaagaactgggacttgcatttgtacttctcaggtaattatctctttttaatgagatcaaaatcatactacaatggtaatacaattacattttctgatttctttgcaattccattatcaattttatggattaaaattggaatttttttttataggaattcgcttaaagttcaagcacttctaaatgtcagtattccaaataaaagaagtaattcactatttaattcattttagtgaatgttatgctccgtttgtttcacagaaagttctaacttttggggcaacagaaaaaatctgtctactaccaggcaaaattaagtatttcaaggagaatgaccaaaagagagtcattttctctacattgatattcttattagcacctctctatataaatttgttaacatattttatttttttaattaaaattaaacaatggaaaattaggtattttgtttgaaaaataaacaaaataacttatttttcattgtttaatttgcacatggtaaatattttccgaatactagttattttccatgacaaatagagctttaattagacataggaaatcatggttttgatatgagatgtcttagattttctgttgaaaaatttttggttatttcactggagaaaagtgttttattgataagaaaaccagagtttctatgcttcttgtttcccgttacgttgcttctttatgtagattctgtaaatgtcttacaggaagggagcactttggaatcgaaaaggagacaaca

SEQ ID NO: 47741 - DNA, 615 bp, Manihot esculenta
  Intron number 3 from transcript cassava4.1_011771m (locus cassava4.1_011771m.g) derived from phytozome v7.0 (chr-ID scaffold03802; pos 631913 to 632527 reverse strand)
gttgcaagataagaaaggtagtccattgttggtaccttgtcctcctgttaacgttccccagatgttggtttgcaacatacactctctttatcaatgttaattctattgtgattgatctactttcattctttcagtgtttgtttgatctgataatgaattatcgttccatttttgctccttctctcttcacctctatttgttgtgacaaattcagaagtgtgtcaactggggaatgttctgaatttgatattgtttcagaattttgttaatagtgtaagattttcacgacatttttggatatgctggaggtagcaatatatgtaatgaatttggttttcagtatgattaaagcataatctgattcagctacttggatctttggccagataagttgttcagtttggtcaatagcaaatattttggaaaaatgagcaccacaagtaatctggtgattcaaacattgtcaatgtcctataagaaaataggatcacattattctgaattttatcccaagggcacaagcactgtgtagaaaatactttatttacacaatatattgtttgttgtatcgtgtaatttctgatactctaaataatgaattgcagcttttgactg

SEQ ID NO: 47742 - DNA, 289 bp, Manihot esculenta
  Intron number 1 from transcript cassava4.1_008030m (locus cassava4.1_008030m.g) derived from phytozome v7.0 (chr-ID scaffold03150; pos 153964 to 154252 reverse strand)
ccttgttgttctcctcactttctggttcttcggtatgcatttcttctgtttccgctctcttcttctccttctttttgttttttgctatgatttgattgaattttaaatatctttttatgagcttaacatattatttggtttgaaaaaaaaattgtagtgatactttatttaaatagtttatgagatttactatgataataaaaatataaataaataaatcatcgttattattattattaccgttgattttcaattaaggatctcatttatttgctcacttgcagcatcc

SEQ ID NO: 47743 - DNA, 488 bp, Manihot esculenta
  Intron number 2 from transcript cassava4.1_008200m (locus cassava4.1_008185m.g) derived from phytozome v7.0 (chr-ID scaffold05979; pos 98576 to 99063 reverse strand)
gggttcgctcgcgaggctttgttcgacctgtaatttcttcttgcttttctcaactggttactctttgaagcttcattatattccttttttagcctcaaagaaaataatttaaatgaattcttataaaattatgcacaactccactgtctttaaaaatgaaaattttgtaagtaaaaagaaatgaattcttacactccaaacaagagccttttgtttggcatgaatgattttgcaagaaaataattcaaatgaaaatcatgcataaattcatctttatatatgatgaaaattttttaccttaaaaatgattgaattcttttatttcaaacaagatagtcgaattcttgtgaaattcttgattccaaatggaggggaaatgtgatataaaagaaatgaaatgaattgaatttttgcaaaatctataaagtttttgaagtttgttttcagtttttgaatgaggttttttggttcgtttcaggctgatagga

SEQ ID NO: 47744 - DNA, 796 bp, Manihot esculenta
  Intron number 1 from transcript cassava4.1_002420m (locus cassava4.1_002420m.g) derived from phytozome v7.0 (chr-ID scaffold06779; pos 21473 to 22268 reverse strand)
ggaaacaggacaaggtacaggcatgctttttaagccatgagaaaaagtttacgtttttgtggtcccgtctagcattagcttgttatgatattttttcattgatgttagtgaattaccaacatctatcatcggctgttcttttcggtgggtgggtatacatgctactaagtgacatattagagaaaattgcttggcacatgaaggatgtagaacttcaccagatggatatgtaccggcttctttttagtgttccattactagtggtcattgtattttcaccctgtttgaaataattattatgcatgaattctattcagtttattaaaagaaatcaattcaaatgattttgatataaaatccatgtgttaggaataaattttaaaatgatggaattcgtttcatttctagtatttggcaaaattgaaattgtaccgagtttcttgttttaccctttatttacagagaaacaatgtaattgaggtgagggtgttttggagttttaattggagacttcatcaattgaattgtattcttggaaaataatagttatatgcaatgaatttatttatttcaaatgactttttttttacctagaagaattgaatgctattaatttaaactttccaaacatgagaatcagtcaaatagaaaacaattaagttgaatggtttcatgtttaaactttccaaaagatgccctttgtgattgttgccatttatttcatcaatatattgaatttcttcttttattgaaaaatattgatgatagccttttcccattttgttccattatagat

SEQ ID NO: 47745 - DNA, 749 bp, Manihot esculenta
  Intron number 3 from transcript cassava4.1_012831m (locus cassava4.1_012831m.g) derived from phytozome v7.0 (chr-ID scaffold02939; pos 267486 to 268234 reverse strand)
ctggcttccatttgtacctcataggcacaaaccaggtcagtttacttctcttgtttggaagttattatgggttgatctagttgttatgagtttgattcagccaaaatcttatttttaaaaaatgtggtagggttcttgtttatttcttactgtcctttcgaggtatttaacttgtaattttagataatgaagttgcaatacataattgaaaaagctttggaattttaatttgtcgccattcacagtgctttgtgaatgaacctgctcaatctatctgagcattaaatgaaccagacatttataatatgagcaatagcagcctttattcagataacatgctttttttagattgacttttttttttccagatgacaaagtactgaaatatttgaagcgttgtgttatatctctctctctatatatatatatataaattttcttctcctctttttcctcaaatcttctcttttgggttcttaacccgacatattgcaagtctgtgtgattaccattgggggtatatttacaagtttttatatgtattctgcaaaggaatacaaggtgaaactacttcttccaggaaatatgttggattggttagttcttccatttctcaacatgtatgtaaattggcaagggaatgttttatgagttcactatccttgtaatcctctttttttcagtgatgccatcttaggccttctctacatgtattaaactgtttgtacttattcctatccagactacat

SEQ ID NO: 47746 - DNA, 430 bp, Manihot esculenta
  Intron number 1 from transcript cassava4.1_008717m (locus cassava4.1_006289m.g) derived from phytozome v7.0 (chr-ID scaffold10493; pos 1113802 to 1114231)
aatcataatctcgtttggccttctctctcttgccggtatttttttgttttcctttgctcgtcttcctcattttctagggtttttgagtttttagtaattttttttttcaatatccatagtctgtttattgctttgaagatgagcttgtactgtgtttgcgactttctactgaagctatattcagcttcttttcagtattatggcatgatatggtgataactcgtttttttgtccaatttatggagcattgaggttcattttgcttaatttctttgattttgagctctgtaatgatcggggtttctttcgtttgctttagttcaccactcaccactccgcatccttttattttttatgtcgacatttgattatatggttcatcttcttgtgaacaggtggggtccgcagcttgagcaagctacttacaaga

SEQ ID NO: 47747 - DNA, 1010 bp, Manihot esculenta
  Intron number 3 from transcript cassava4.1_014281m (locus cassava4.1_014281m.g) derived from phytozome v7.0 (chr-ID scaffold05979; pos 212346 to 213355)
gccgtctcttctgctttcctaggtgagcattttctgattcctttaaatgattatagaagaagattcatagtttatgggaagaaaatagataaccacatgatgtctttgcatccttgggatatgagattttgttttctcacttattcttttgtgcaatgcaatttcagaattcttttcataaattttaaaggatagaaagatgaatatgtatgtatggtcagatcctcaaggagacactatgcttatgtaaacagtgaaaaacaaagatctgaaacatgcctcaggtgagagaggactctgtaggctggcatatataattaaattatcaaattcttaaaacaatatgatggtttgcaatatcatatttcctatcaaaataagaaatattcattttttgataaagagaaattttattaaaacttggagggaacaattagcacgataattgtagaaaaaaccccaaaactgcacctttgcagccattctagacattatcatgctaaagaacgaaacctggagaacccaaagacagatgccacacatactgaaaaacagaaaaagccaaccaacagaacacgttaaccaaaacataaaagactcaaaaaaacttctaatgtacttggaaagaccaacttggatgcagcagcaacaactaagaatgattaatggaaattcctagggaactctattcgattagtgtatgaaaataccactttttgcatgaaatttctgatgataggtttctcccttgattttgaaaatgtccttgcttcataaaatatatttccatatcaaaagttgagtgtgcgttattgcttatgattcaacctatataagcatagaaacaatattgtcggagaacattgcatatggacttcatagaagtgaattatctaataagatccctttttccgtagttgcatgtgtggtaattatcttttttttttttctgtcttgacatattttcctgtgcaaaacagtacagtaccatacaattggctatttagaaa

SEQ ID NO: 47748 - DNA, 612 bp, Manihot esculenta
  Intron number 2 from transcript cassava4.1_026045m (locus cassava4.1_026045m.g) derived from phytozome v7.0 (chr-ID scaffold07238; pos 569299 to 569910)
aggttcattttccttgtgtttctgtctctctctcgtctgatagtagtttgattcaacccttttgtccatcgtttttcttgtaaggcatctggaatcccagtggaaaatgacatgggtttctttttgctaaaaatatgataggagacacagtctatgaattctatgaacagatctacaaatgggatcctctccctctgtgattgtctctctgtgtatgtgcatagatatgttactgtctttaattgttgactaagaaaactaaaaatggtatgaactgcagcatgtgtgtatgagtagatctggtaaaagtgtcttctacgcttccatttccttgaaaattttgaaagaaccttttagatgagaagcaaatgaaaaatatatcagtctctctttctctctgtctgtctgtctacaaacttcaagatgaggcctcagctagggtttcttaaacttcttgtttctggagattaaccatttacgtagtacaagctattataagaacagatctgctcattgtttatcattcattttcccggattttcttttgaattattcacaagatatataaatttgacatttttagggttttgttaatgtaacagaacctcagca

SEQ ID NO: 47749 - DNA, 496 bp, Manihot esculenta
  Intron number 4 from transcript cassava4.1_006550m (locus cassava4.1_006550m.g) derived from phytozome v7.0 (chr-ID scaffold02811; pos 261754 to 262249)
agccaccagtgttcgaaaggtgaacatatttctcatctttatataggtatatttttctgatttgaaatgtccatatgccagtggtagcagacccagctttaagcgacagctgatgctgccacatgttgctgaaagtgtagctgaaatttcagcaacatgtggcagcatcggctgtcacttgtagctgggtctgctatcatacagccggcagtgcagttctaatctcccccccactccccccccccaaaaaaaaaaaaagaaaagaaaaaagaaactctcttctttgagaaaagccatttggcagctaccagtcatgcccttttgattagccagttgctatgttattccctttctatgtccccttttaaagccacatagtggttatattatttaaatgattcatagtagtagctgaatgatcctcaggattctgaaggttcatttttcatccatttgcgcagtgctgctgggccacatacaacaatcaattgcaaag

SEQ ID NO: 47750 - DNA, 941 bp, Manihot esculenta
  Intron number 1 from transcript cassava4.1_026955m (locus cassava4.1_026955m.g) derived from phytozome v7.0 (chr-ID scaffold03569; pos 159129 to 160069)
aagaacgtgattctgacgaggtatctccattttatgatatgattaacttatttgtaacacaatgtcttacccttgtttagtgaaggagaggaacccattaattagtggtaatataaccaagaaattttattaatagttacatattaattattattaatgataaaatgtatatatttattatcatcaatttaatatttaatccttccccgtacaagactttaattttgacatatcaaatgcaaggaaaccttgaagggctcaagagaaatgttaataaactaactggaagtcttacccagtcatgaaagagaccttctactgatgcatgccttaaatgatcattaagaattcaaacaattttgaccataaacgtctaaatattatcaaaataatatcagaaaataacattaactgtaaatgacatgttatacattaatgcttctgttgtagtgattgcaactgatttaatataaatatcattttgtcaattcacaggtaattttgtttcctactgtgaaaacttgtgagttgagattttcttaggtctggttttcccacttgcttaatttttaattaagcaaatgtggactttctataggtttttggattagaataatgttatctgtcattcaatgtgatattagttgttttaataaatcaaggggacaaaggtgtttaaggaaatttctttgcaactctcaagttgttgaatcaaaccagttagccttattcactaacatgcagttcaaaattagagagagtgaaaaagctaaagacatgagtttctgtttccacctaagtaatttctatctgttacttgtgttcttcaaatgcatatttccctttgcagattcaaccactttagacattgaaactgataaagaggctttgatcttattcaagtcttaaataagtcttcaaactctgaacccattatcttc

SEQ ID NO: 47751 - DNA, 653 bp, Manihot esculenta
  Intron number 1 from transcript cassava4.1_032975m (locus cassava4.1_032975m.g) derived from phytozome v7.0 (chr-ID scaffold06754; pos 359381 to 360033)
gacatacgccaaaggaaactggtgagttctttaatagattcaatgaaaacttgcttagacaaagactttatggactggtagtgtaaaattatagtagggttttatatggttctcactgtaattttacactacgcatccatataaaaccggtctaattaaatggttttacactatggattcatctacaagattgtagccaaaggattcatctacaagattgtagctaaggttttggtccaagaatagatatgtggtcttcatgttccaatattatagttgaatctcatgcccctagcgactgttttttacggctaactccatatctaacagtcttcaagttcttccaccgacccaattcatacatatcctaagagaatcaaattagattgcagatgctcttgcaaagcagggtattcccaggactaaggattttattgcttggttgacttttctgttttgtcgatatatctcttgtaccaggtttttcacttagcatgttttatcttaggttgcgagttttgggggtttggtgaccggatgtacccaaatttctcaatgctaagtttttcttgatttattaataatattttacttataaaaaaaatattttctaatcctcctctaactaattgaggtatgttataattgatcag

SEQ ID NO: 47752 - DNA, 525 bp, Manihot esculenta
  Intron number 1 from transcript cassava4.1_000761m (locus cassava4.1_000761m.g) derived from phytozome v7.0 (chr-ID scaffold02892; pos 746183 to 746707)
ggcgagcggagcgcttgagacagaaagccgctgaggtatttgattatggaatttgcgtttctaggaggtttacttatttgtctttttagggttttagttggttcaccagctgcttggtcactaagttaaaagaactctgaggaaatgtatggatgaagatgaacctaatattaattgagctatgtagttgaacaacgaaacattcaaatgttcataacttggttgctaatgaaaatgaattgtaacgatctgtaaaatgcttgtttggaaaaatcccgttagttctaattgtaaagatggcatttaacacctgtgtaagaagacagatcatggttttcagtgcccttcaggagttgaagcaagctaaatgcagacttattcctctttatattttttctcttgacataaaaatttacagattatgcctcttaatttttgagatactgcacattcaggtttattgtttcctttatttagtttctttatattatgtatgtatgtttgtgtgtttttcgcgccttttag

SEQ ID NO: 47753 - DNA, 564 bp, Manihot esculenta
  Intron number 1 from transcript cassava4.1_019326m (locus cassava4.1_019341m.g) derived from phytozome v7.0 (chr-ID scaffold07070; pos 46483 to 47046)
gggcatacctctgacaactataggtaagactcatggaggaaattgaagtccaatcagtatctatgatttgattgcttaggattatttatttatttagttgttttttaatgaatatttagtgttcttcaagcttttggtaggagacattctttattatttttttccctatctgttacataaggacattatttactttaggtttgaaataagagatcaattgaaatagcaatatttataatatcaaaccatgtatgatcatattaccttgaatatttcttttgaagttcataaaatgacttaaattaacatttaaaagcaagaactaagtgtgcaatgtgttaatacttttaatggctacaagaagcatcaaatgaatagcaaggaatatctttcatgatgtattagatttatttttggaattaattattaaaatgtatttgaagttaagacattaataatcatgtatcagaagtttaaatttactcaagttgttgtaattcttgctttatttgatagatccaaaagccatttatgtttatgctttcagagtgcatccttctatta

SEQ ID NO: 47754 - DNA, 716 bp, Manihot esculenta
  Intron number 1 from transcript cassava4.1_027392m (locus cassava4.1_027392m.g) derived from phytozome v7.0 (chr-ID scaffold03802; pos 487266 to 487981)
ccaacagtgattcacaatgttttgattttgatttatttaattcaattgatccattttttatttagatttaattcttagaataatttatatatgtattctcatgaaatcatgtctaagtatagtttaattcttaaagttaatattaatgcacttaattataaataaaaaaatatcagaagattttaatgtatttataataaaaataaaaataaaagataatattatattatttatttttatacatatatatataatcttaattgtatataaatatatataaaattatacttatagtgtatactacatttaaaaaatcataaaaataaatacatttttaatttcatcttatttagtatggcttcgatgtagttcttaatgaaaattaaattaattaaaattaaactgaaacaataaactaaatttaattagtataattactgtcgatttgatacgattttggagttcaattcagcacaaacaaactaggcactcctagttccaaccaatcactgcttattgatgatgatttgtcttgctttcttgctttttcacttccccactttcactttcaatagatcaactaacaaacaatgcttacaagtaaatgaaattcgaaacaagggtcatgttctgtctgccatgattccacctctgattttagaattttgcatttgatttaagggttcacatttactgaagtgaattctgctaaagcc

SEQ ID NO: 47755 - DNA, 392 bp, Manihot esculenta
  Intron number 3 from transcript cassava4.1_007227m (locus cassava4.1_007227m.g) derived from phytozome v7.0 (chr-ID scaffold06871; pos 937989 to 938380)
tatattttcgccgcttgcttgctttaagcgaattggttagtattgtttcttaatcaaaaagtggttgatgtgttaccttctttctcttttttctttcttgagaatagtgttacctcctttcttggtttctcgtgtgtgtattatcaatctaattaaaccaatgattctttatcccgcttcttgttcttgtatgtagaattgaggcctgatgatctattttattagtaacctttcagttttagtcatttgctttggcatgtgataggaattcttatcattttcagtaatttaatgcttatacaacttgtagttactaatgtattatggagattgatcattgccattttgtgtttgcagattctttaagatacacatctgccttatcagttgct

SEQ ID NO: 47756 - DNA, 676 bp, Manihot esculenta
  Intron number 1 from transcript cassava4.1_013351m (locus cassava4.1_013351m.g) derived from phytozome v7.0 (chr-ID scaffold06257; pos 131559 to 132234 reverse strand)
tccctccttccacttcctcttctcacaaattccctgtatatcttctctgccttttttttttctctcttttttataatacccatttcccatttttttatcatattttgtttcccaagttttaattttcaatatttgctgcctctatttttttatattatgcgattttgtagtccaaatttttgaatgattaattgtaccagtgagatgggattctctttaaatccatcttttgctgaggggttattagcggaatgcacccaagagaaatatgatcgtctttgtgtgtgagtgaggtagttgggttagtgtgtggttggtgagaaatggtgaaatcaaattactatttttttttaaagaaaaatatcaatcagctaactcatgattgtctgtccaaaatttaatccaagttaatggtgatcttattgctcatttgctacatactctttgagtcccttgattactgaatttaatcatttcacttgtaaacatgcagtttcttagtgttaagactagacaaaaatataatcccatcattaatccttatgaatagtttaccattaatttgctttatttgtgattatgattgttgctgcaacataatatgtatacatccaaatgatattgctttcatggttgagcagatcctttattggctctcaggccttacctgcactga

SEQ ID NO: 47757 - DNA, 519 bp, Manihot esculenta
  Intron number 2 from transcript cassava4.1_021921m (locus cassava4.1_021921m.g) derived from phytozome v7.0 (chr-ID scaffold11495; pos 703207 to 703725)
cctggaagaagttgcaagtaggagatattgttagggtaagcatgcgtacatttgttattatttttcttgtaaataaaaatagatgaaattgtatccacatcagtgctcatctccattgggagttcgaatccatgatctctccttctgcttgaaatttcttttatccttttcaatggaatgcatttaatgtgtttgactataatactgaatcccaatgcttgtgaacaacattatagaggcctagaacttgaacttttaagtgtttttatgggcgcattggctgtcttctgtcttgctagtcacataatgatactttttgacttgttgttggcaatgtttttgttgcctgcctacagtagcaccacttgatattttcatttttccatctattaccatttgtgaagcttaacagaatatgaatgatagtattaggaaactgaatcttgcctgctgataccacttgatatttttcctttgttttctgaaactgaattttgggttgcttgcaggttaagcagg

SEQ ID NO: 47758 - DNA, 678 bp, Manihot esculenta
  Intron number 1 from transcript cassava4.1_001994m (locus cassava4.1_001994m.g) derived from phytozome v7.0 (chr-ID scaffold03572; pos 102735 to 103412)
ttgcgattcaaagcctactttatcctctttctcaggttttggttacttttttccctcatatttttctttttaatttcaagaaaacattcaatttctgtcacggcttatctgttttctaattttgtcctcaatttctataaatgcgaaaatttacagttgaaatttaggtcaaattgtgatgatttaggttttactttttcttttttcaaaatctcagttcaaacttcaagatacaagttcgtgttttgtttaagctgttcgtttgttttcttttttctttttcttttgtccgaaacatagagtttatatataatgatttcatgtgtgatttctttcagatagaagccaagaggctggtactagccaagaaggtatctgacttttatcattcattctttttttttttaaaaaaaatttcttttccattttgtattccaaaaagaatgttcaaataagattggggctttatttcaattgcttcattcttaccctagtagaaatttatgaagatttaacgcaactctgggttcttttctttttgataatccttgcttaatcaatatattagactctgtctagtgccttactagagctctatatctgtaatttggaagttaaaatgagcttctggttgatgatttagaaatagaagaagaaactgcaaattctataagtgag

SEQ ID NO: 47759 - DNA, 541 bp, Manihot esculenta
  Intron number 1 from transcript cassava4.1_001933m (locus cassava4.1_001933m.g) derived from phytozome v7.0 (chr-ID scaffold03241; pos 645737 to 646277 reverse strand)
ttaactccacactcattattacaagcccttcacatgtaagctccccccccttcgttcacttctctaaaatctgggtcttcgtgtttatagatctctgatgtttctcgcttcttgagtgcaagattttctccattttcttgttttataaagggagagacgtggttatttgtgtgcattttggagtaatgctataatgggtttcttttgtttctccgttttatgttgaagattctctcttctacatttcaaggaagcagatttaggtttctttttatattttcttttttctaatttgagttagtatttaatgttattttctccctttcttttggatatggatttcagtggttttcttttcccacaaagttttaattttcttctccgttcttgaataatttttgtgagcctttgaagagaagcttgaggagttgcctgtagtgtcgtggatatgctaatacttcaatgctttgtactgaagatcatacctttgataataattttttattgttttttttttgggttccatagaagtatatcggcg

SEQ ID NO: 47760 - DNA, 638 bp, Manihot esculenta
  Intron number 1 from transcript cassava4.1_006943m (locus cassava4.1_006943m.g) derived from phytozome v7.0 (chr-ID scaffold08265; pos 1695133 to 1695770 reverse strand)
ctgttttgggtggatttggagcctctccttttgaggtaattttcgaatctctttgatttattcatttttcgtttcttactttattgggttttagggttccattttttggtctgatttgattgtttccagtctgtgccttttcactatttatcagagaattttttttatcagatcctagggattttcgaattcattgtttcttttcggtttataccctgttggcaactgaagtgtaggaaaataaatcacttcggaaaatttcatttatggggtttaatcttatgcagatcctgtaatttgggcagctttcattttatattatcatttgggaatcctccgaaatctgaatatttcacttgcttttagctttaacacaattgcttggcattttttcccagctcaattttttaaaaatatttttcgaaatcggaaatccaattttctagacagaagcgattgaaatgttgctttgtaacaaaaaacatggataggtttgttttgtaatgtatacttattaatacgtgaagtataatacaagtccattgttttgattcatgttaagttgatctctctctctctctctctctctctctcttctgtattgttgttttgttctttggcaggtcgataacgtacca

SEQ ID NO: 47761 - DNA, 730 bp, Manihot esculenta
  Intron number 2 from transcript cassava4.1_000273m (locus cassava4.1_000273m.g) derived from phytozome v7.0 (chr-ID scaffold10563; pos 18401 to 19130 reverse strand)
ttctgaagaagtgtcatttgggatctgtggatcaggtggtctaattggaaatatctttttccttgtacatgagccattttttaaatgtctatgcaatacacactttagcaatgttcttatgtaaataattaccacctggttgatggatcatggctttatcatttgaatggagttttacatttagacttttcacaggttagacttgagatccctcccctgatgatttcatgccctgtgctattttactggcctgaaaaacaaatagcttattgtctaactttttcctttagctgggttattttttgataggaattaggaaaactgaaagaggctcgactgtaagacacaaagaggttgcatccatgcataaaaaggattgtttcaaacaaaaaaggtctcacatacaaacaagagactgctaagagatgaattgtttataagacagatattttaagtctattgtaacctggcagaagagtagaccgaagcataaaatcaaaagattatcctataccttaaggggatcatctacataagcattgctttaattttattgagaaaattcatttcattttcctcttctgttctgcatggaatttgatgttagcctaattgactctagtaaatgcttcttcatatatttgaagccttttttcaattgtgcatgtaacttacattaccggaacatatttatttagcctcaaattgccaaatgtgatcacgtgcacag

SEQ ID NO: 47762 - DNA, 442 bp, Manihot esculenta
  Intron number 1 from transcript cassava4.1_011799m (locus cassava4.1_011799m.g) derived from phytozome v7.0 (chr-ID scaffold06659; pos 294129 to 294570 reverse strand)
gggttacacagttaacgccaccgttcgcgacccaagtcagcttctcccatctttctttgtttttcttctcttttttaacattaatttgattatgtagttattatcaggcattgtttaagatcttcttcatattcttttaattaatttttgttaaattgtgtgtgtcgtgtgaattccaaccagatcggtaacttctttttttttctttttttctttttttttaagttaggaaatttttcaaacagttagtgttcgttgtatacacaagtatgatgaaattcaattaaagttgtttgatcaacctaattcttgctaattctttaccaaattagattaagttttatgaagaatctctccgttctgaaaaatcccattaatgtcaaccgttctattcaaatatgtagcaggtgattcaaagaaaacagatcacttgcttgctctt

SEQ ID NO: 47763 - DNA, 541 bp, Manihot esculenta
  Intron number 2 from transcript cassava4.1_022273m (locus cassava4.1_022273m.g) derived from phytozome v7.0 (chr-ID scaffold01525; pos 18697 to 19237)
gaaggtacatttgttcctgttccaagtaatactgattgactggaagaaattggaaatcacgaagttttcggtttcaaggttttttcccctttagaatatgaagccttagttcaaatgggtagtgctccatatgttctaattctatgtagaagtaataaaatttgacgcgttttatcttaatttgaattttgcagttagtttgcctgctaggttcagttgagtatagtctgggttttctctaggaatgaatgttccattggggtcaatcttttttaggagtttagaattatagtagatactggcttaatttgtggtactgaaattagggctttttggttaattgcaattttttgatttcctatgctattcaaaatggaattgaaatattctgatttccttttctatacaaaattgaattgaactgatttcttcttgtcatgctttttttgttttgaacattaacatttgcattttgacatatttggtttctggttatttggtttatgatttttagtagcaacagcagaaactgcaagtgctg

SEQ ID NO: 47764 - DNA, 602 bp, Manihot esculenta
  Intron number 5 from transcript cassava4.1_003351m (locus cassava4.1_003351m.g) derived from phytozome v7.0 (chr-ID scaffold02892; pos 1123184 to 1123785)
tgtatttcttgggagtcaaccctctacaagaagtaaaggttgatccatcttttgagtattacttcattttgtaatgtgtcgtgttcagtgagagaacttttatgagttcatgtgataacatagatgttgccagtttaaactttttctttatgtggtgaaaattttgttgtagcatccacaagttgactgaaaataaactgtttcttttctatattcttttgttaactgttatctttcttgtttatttctttaaagaaacaacgttgtatattacaatagtaaaaatattaatgactagaagaataagaacgttcatgggaatcccacccttaaaattgggaggatttgtatctgtcagtgcccatatgtttgtttgcgtttctttgatttttgttcattttttttatgcctttaaaatttcttggggattggaatgctgtgtgtcacacacactattgtctagacttgcatgtttaaaataaggattgatattttgcaagaacttttactgtgggattgaagctcactataatttggtgatatcttcttgttttatttttttcccaggtggccacagattagtttcccaccttttaaaatta

SEQ ID NO: 47765 - DNA, 792 bp, Manihot esculenta
  Intron number 1 from transcript cassava4.1_018536m (locus cassava4.1_018536m.g) derived from phytozome v7.0 (chr-ID scaffold10563; pos 822503 to 823294 reverse strand)
gcgactacggctttcagaggggtaagcctctctctctctctctctctctctctctctctctctctcaattctactttgtttagatccgaattttctgctttttctgtcatataaaaatttattcaattttctgtctcttgaatctgatttattaacatgtgttttgattagtatttaccattctacatcggtttttaagaaattactttagtttcggtttaattcttataaaaatctgtatctgctcgattgcggctttatccctcagttcctcaccttttgagtcacttatcttttgaagtttatatgctggatttgtatttgtttgatatttgagtcctgattgaagagaatccgattttccttttctttatatgtgatttaattgtaaataggaacttacaatttgagtgattgatctgtctagtttactggatgattgcaagctggcttacccatacaaattagtcatctatatatacgccgtttgattgtaaatggaataaggaatccaatatccactgcttgcttggttcttgaaataatgcattaagaaatgcaacaaaagaattgcaagtagaggttcacacttcgttgcatttcttagagaagtgggcatatttatgcctcctatgaagagaaatcctctaccctgggaaaccccctctgaaaagcagaggaagtagacgtgaagtccctggcgctggtcattggatggtgtcagggtgtgagtacaattctgaaagttcattagtgcatctactaacagcttttatttttcttgctaggcaa

SEQ ID NO: 47766 - DNA, 795 bp, Manihot esculenta
  Intron number 3 from transcript cassava4.1_002098m (locus cassava4.1_002096m.g) derived from phytozome v7.0 (chr-ID scaffold06598; pos 320936 to 321730 reverse strand)
ctttcaatttcaaatatcccgcttgggtcggaaaggtatcaacatatcttcattccgatataattaatcatgtggcttgaacgctgggtatatcttcttatgagcagaatccgccccaaaaagttccacactgcaactcaaattggataaaaaatgggagcagagagcgagggcaggagggttatatataattgtgtttttccctttttcctgtatcatgtgaagttttggaaaatgcacctgaactagaattttgagggctatgagagattgtatcatacttctgccttgtctatggatgttgaccttgctgcgaatgagagttctaagggttaaatttcttgtgtctctttctatattatttgtgattgcgagcgagtgcatgcatatgtttctagtattgtgcatttatctcaacatatatgaagaaaggagaggtatagtttgaatgttatttgcaggtgacgtattagatattaacgtagatatttaatttttttggttcttggttttcatcttcgagttaatcattttatagttttattagcctaacatttgagagagcagagcagctttgttctttattatttttttaaaaaaaatcattttagcgttttgcaaactgattctcaattgtctgtgtacttgtttaagttcttgtcatgtaatctagtttttgcatggtttattggtaaatttcctagtgctagctgcatgcttctttagctttatgaaactaaattactgtagtaatcatgttaactcatggattgcagattttggacgcatatagtg

SEQ ID NO: 47767 - DNA, 409 bp, Manihot esculenta
  Intron number 1 from transcript cassava4.1_024959m (locus cassava4.1_024959m.g) derived from phytozome v7.0 (chr-ID scaffold12753; pos 387465 to 387873 reverse strand)
ttttcctccaccagccaataacaccaccaccaaaggtaagcttttgtttcatcatttctttccattatatttcaattttttgagtgaagcatatatatctatatatatatatatatatatatatatatccatatgaaattttttatatctggcctggacagataacggagctacagcagctcgaactgttgtaatcatcactgttcctacaagtttcttcgcagcacttgttggcctcgcttgcagctttttctattataggagctgtaagaaaaagaccgaaagtaagttatcatcgttgttctatgtaattaaccttggtctctgtttgatttgaagggagaaaaactaagaaatttgttgattttgtgaagatttggaagaaattagtagcacagagtgcctgaaa

SEQ ID NO: 47768 - DNA, 679 bp, Manihot esculenta
  Intron number 1 from transcript cassava4.1_015116m (locus cassava4.1_015116m.g) derived from phytozome v7.0 (chr-ID scaffold03104; pos 151744 to 152422)
ttctgttgctgccccttctaatcgcatcctttctggtattcatttttatatatttatatctgatactggcttcaatttgtcaacttgaagttgtttgttaattcgattacgacgcggttggtggcgactgtgctttgttttctcccccttaatcgactaatgctttgttcaattcctttatcgaaatttagggtttttcttcaattgtttagataaaattatctgttaggatgcttttcaaagagctccgtggaatattaaattcctgataaagagttttatggagttatatatctgtcttgttgattcttaatactcccaacatttcagctcaagtattctctggtcatttctcatggaattgctcacttttcgtttgttttggttattttctttcttttttttttttcctgcattgactggattgggatcgtatgttaacatttgaggaaactaaatttcatcataccattttgggtttttatttatgttctctgcaagaaagcagtattgggttttcaagggtccttgactctgtggaaggcagcgatatatatttatttaagtatgttgtgtgattgaataccacattgcaattaacttcatctgattaaaattctcatgttgtgaacttatttcttatgggtcagacctcacagatttcagatcttctttcaca

SEQ ID NO: 47769 - DNA, 798 bp, Manihot esculenta
  Intron number 1 from transcript cassava4.1_026844m (locus cassava4.1_026844m.g) derived from phytozome v7.0 (chr-ID scaffold05214; pos 23782 to 24579)
gcggagccaaaaaccaaatacgatcgccaactcaggtactggtcgttcatcgccttatcacttccgttttcatttcattttccttctccactccttcaacttagctctatcttgccctatctttgtaaaatcacagctctcaaattgggtaagttgggagaacttcgctgctttttgtgcatctctcaatggaaagttttagcttagaggaaaaattacaatagttcgtaaacattgtaaaacgtagctctctatcttgctgtgctgaatagatgacttatctgaaaccaaatttaaattaaaaaattgctgaaattaatttttggagtaagtttgtgggctaatctttgcttctgaatagtctgagtagaatcttatatatatatttctcagaaaaaagtgaagagatatgataattaaaagtcaaatttaggagaggagctatagcaagaaatttactattggtaagaatggttgggaaggttgggtcgtgttttgaaataagctgtttaattcagaatctcatggatttgtgttggctgacctcataattgttcgccaatgggtagtaaacggtgaaaatgcaataggacctttgcttattttgttgaagtgtttgtgtttttttgtcttcaagtcgcatactgtaaggaggatcaagatagaacagagttataatgtaccaatcagatagtttgtaaatgcagatgaattagatgaaaaattgaagttgagagtatagttttttatttcaaaatttccgcttaacaaattagtgtttgtctgaaactttaggat

SEQ ID NO: 47770 - DNA, 1001 bp, Manihot esculenta
  Intron number 1 from transcript cassava4.1_015813m (locus cassava4.1_015813m.g) derived from phytozome v7.0 (chr-ID scaffold06089; pos 333847 to 334847)
aagactttgcaaaagctaggttagattgaattgggtaatttgatgattatatttcttgtttttttctcttttgtttgataatcgactgtggattttttttcttcctttaattagttgctttgaggtggtatttattttggaggacttgttagtattgagttgcttgttcaagttcacaagattaggctaaaaatgatggcacttgatgagatcatcgaaattatccttgccatcaaagtacatatgaattgaaacgatttaggaaattggggtcacaggaatcggataatttcattgcttttattttagaatgaccaactcaaagttgaaacatttaggactgttgtgtgaatgaactatgaaattatgggtctaatgcttattgtatttctcgtgctacactttaacgtgaagtatctggtgcataagctttggtccttctcatttagttgtcctagggttgtgtctttctagttaatcggtcattattataagatgaattcattgctagaataatggattatgaatcctaaaagtgttaaatattgttacattctatatatatataatcgttctaatgtctcagttgagaaggaacaattttctattacattaaacatgatgagagttcccctttggtttagatgaggtctctggagaaatttaattttgatcctaattattctatttgtgtgagagaggatgatggagaggaaatagtggttgagtgggtcttgtgggatcactgtgcttatcctacctttctttcacaacgcaaattgaaacaaaagtcatgccagattgaaaggaaaataaacataaaaaatatttggatttttcctctgtgacaatctaatgcatctgtggcggtacttagtagaagattccaattccatccttagtgaggaagtagatttcgtggacaatctgaatatttttctaatgttctccatttgaattttgcaggtgacaaccaaattctctttgctgataaagtattg

SEQ ID NO: 47771 - DNA, 795 bp, Manihot esculenta
  Intron number 1 from transcript cassava4.1_021229m (locus cassava4.1_021229m.g) derived from phytozome v7.0 (chr-ID scaffold03264; pos 504865 to 505659)
aaccgttcggaagaacaagtttgtagattttgtgggttcgtttctttttcctctcaccatcattatcgtagacgtgtttggttcatttttctttgcatgatgaatcaaagttcaattttgtgtatttatttaatttgttgtttgatggatccatataccacatgcatttttatatgtttgtatatgaattttgtggattgatctactgtaatttcgtttatatttgttgtatatgtgtgcatttgggaaggtgcaattgtgtatttgttattaattcaatgttaattgtattcatattagagatgcatatgtgataattaatccccaaattgctaaatcactcccctgttttattcgtaaaaaacttgcactatcattcatggagaggaaaataaaagctgcaaagaaggtatcaaattcaaatatatataatcggctatataatatgagataatcttaattcttctactgtaaaaataaatataaaaaaaaaactgagaattcagaattcactcccgctttattcagcataaaaatcataaagatgaatatttcaacaaacacccactttattcagcttagagaatataggaaagttctgattggcgacattacccctttttatttccttattatttcaactagaaaatattgaatattagtattttttttaatattcaatattggtaatcctttaatgataatttatgcaagatttaataattccttgtacatgatttttctggttgtcaatttaatgaacaggggaattccacctagatcttattgtaaact

SEQ ID NO: 47772 - DNA, 722 bp, Manihot esculenta
  Intron number 1 from transcript cassava4.1_005264m (locus cassava4.1_005264m.g) derived from phytozome v7.0 (chr-ID scaffold02264; pos 696222 to 696943 reverse strand)
ccgccgccattgaaaagcgggtatacagtttttttttttgtcaaataaaattattcgttgagttttgttcttaattttctggatctctatttggggttctaaattgttatcgcgaaacatgcttaggttttttttttttttttttttaaatgggacgagggggagttagaattctcctgaaatacttgaatcgtaactcgattcagccttaactaatttgattcgttgtgatattccctttcaattatttttttcggtcatcatgtaagttagcgatgtaagatcaactattttgagggttttttttggttgtaattatctctatgattcgagaaatgctgtgggtaatcgaagacgaggcccatttcacttctctctaggttataggtttgaaatatttggacattttttgtcatttttttttttttggtatctttcttttggggtaacgcgttttgatggatcagattattcaaccttctcctggcaaagggactacagaagtagagttttggccattatttgaatttacttaacagtaatggtggaattagcaatacagcagcttatgaagcaagaataccgtgctttgcttttgatgttaatcttatggctaccgcaatgttaaagttttcctttcagtgtacttctgttaaaattactatatatttaatgttttgcttctccatgatttgtgttaacagttggagactattcctgta

SEQ ID NO: 47773 - DNA, 968 bp, Manihot esculenta
  Intron number 1 from transcript cassava4.1_015532m (locus cassava4.1_015532m.g) derived from phytozome v7.0 (chr-ID scaffold00506; pos 121217 to 122184 reverse strand)
tttccctttttttaaagctcaatcatcactgctctgtaagtggcttacgattgatctcttttcgtactttttcttttattttttatttaataatattttccttattttatttcttaattattaattatacgtttagttttttttttagatgaattccaaggactttcttttgactattattagtagttccaagggaaatctgagagaatccaataaatttttttcaattttagctttgtttgttttccctcatgggtattaaaacgaaggtgaattaggatttagcttaagatttgtttgtttgccgagaaagttttagcaggcaagtggcttcaagggattaaatggaagtgaaaaaaatgtgaaatcttatactatggtcggttgttggaggtttgaacctttaaaatcttcactttttttaactattctgtgagtagggaggttttgataccttatctttttattaccttacctgtaaaaacctccatacactcctctgaacagactgttagcatatggtttgaaggacaagagtgtgagggaagcctgtttcatacaaatagagggtaagctgtgtcatgtgaggtcaaaaagtgatggtagttctggtttgatgatccagaatttgagctacattttttgtcttccagaaattttatatcatcaattttcattcctgaaatttatccctcaatgatgattgtgtaatgctgaggaaatatcagttctttgtatcttactagttcatatgaaattaaatttctctagacacccacccgcacaaatttggctatgaccatagcttaacagcttctataattttattggagactataaatgtgtatatactgttttcctattttttacaatttaagttgttaacgagtttttcatcattatgttggtttttaacctaacttggttgaggtatatttgactggaaaatgtatatataaatttgcagc

SEQ ID NO: 47774 - DNA, 648 bp, Manihot esculenta
  Intron number 1 from transcript cassava4.1_011413m (locus cassava4.1_011413m.g) derived from phytozome v7.0 (chr-ID scaffold08265; pos 4058969 to 4059616)
tatcacacactctgttcccttcatagtgttgcacggtaattcttttctgccttctatttctcttttgtttccgagcttatgcaattatatttcgtcattctcttcaagattttcttgtgtctctccgctacttggggaaggaattcacttgcactttggtttcctgcaactttgattagtttgtctgccatttcctaaggtgggattttggaggtctcctccttttgggtaaatctacacttgcccgaatattgactcatgtgattaacttggtgccctggaaatatttagcattttttacctaaattcttctctttttgaactgttggccccttaatttagttaaactttattaaaacttgtcaaatatatggtcttatatggttaacgcaaaactttaatttgatttaactgttgctgtttaagcgattctgaacagaactcttaaagttggtaaggaacgttccacgttctaacttcttttaatcatagtctccatttctcaaaatctctaatcacaactgtctccaacctcatttttagtttgtctacaaccgaataggacgacggtagtatgtgcatcaaatttatcaattatagtactgcactgacattttgtattcattttgtgtcaggtattggtgataa

SEQ ID NO: 47775 - DNA, 848 bp, Manihot esculenta
  Intron number 1 from transcript cassava4.1_019615m (locus cassava4.1_019615m.g) derived from phytozome v7.0 (chr-ID scaffold02892; pos 181850 to 182697 reverse strand)
acgattgaaggtactgtttcttaatctcttctttcttcagtcatttccactttctctttttcgttttgaattgagatcagatcatctttttttgtttttttttcccttccccatttaatatgcattccccccttttgtttcgtttaattttgtagcaattgtacctatttatagaatttttttccagttagtcatttcaattcgggtttgctttagttttcgagggttttggattcaacaggtgttgaatttgagttaaattcacctaagaggatgtgtgttttcactatttggaggctaatcctctgtttgtttctcgggataaagagcgaaggaacgatgtaaatggcatttttttttctttttttacaatattgattggttcgttagattagtttggtttaaattccttactctactaatggaacttgctgaaaataatgaggcataccgatttgtatgttcgaagcttacttatcgtacaatatcttttaaggtagaattatctgtaatttatgggctaggtttgatagtggattgtgtttattcatgtttcaaactcatgtatttatttggagtccaaattactgtaatgtagtgtataatatcagttcttattgatttttaatgtttggcacctcattgttttattacactaatattaatttctgatgctaacttcttttttttttttccgggtgcatttctgctctggtgttgctgaatggacattgacctttgtctgcagtgtaagttggatgcttgaatccaaaattttagcttgtcatgtattccaaataatgcctataatgtgttaactgaaatgcaggcttgctggacttgctttt

SEQ ID NO: 47776 - DNA, 953 bp, Manihot esculenta
  Intron number 2 from transcript cassava4.1_019409m (locus cassava4.1_019409m.g) derived from phytozome v7.0 (chr-ID scaffold11495; pos 216591 to 217543)
ctaagtgccctgttactgggaagaggattcaaggggtatgttttgctataatctttcttttctctggctcagaaattgtagttatgtaacttatgttgaacgtcagcaatgcgggtttgcaccttgtttgctggagtacacaatcattagcatcttctgggcgtacgtttaaatgtcaggactgacattagtttcaaatatacgagaaatgtgaatatgggattgaaataaatattttgttattctgcattgtgtgccaagtgatgcacttaatgttccccaattgtccaacttgtttctcttctagttctagttactatgagattatcaaagcacgctcacgtctagtttgtttagaattttctgcattgattctagaattatgagatatttttggcttaatatcccaattttttaacaggttaaatgtaattaataagttaggtcaaaattactgcttgcttgtttcatttaagagagataactgagaaatctctatgggagaaggcaatctgaagtaatttaagctatttcttagagaattacgcctcaatcaaaaccttcaatagaggacaaaaagcttgcatttgaaggctaatagattcgtacccttgctatgcttgctgatgtatattggaatgtcctaaatatgctcttttaagtgaataagtgattttttagactggttgatcgacctttaacaaagttccacctaaatctgaactgtttgatttggtcgcgaaggagcccaattcaatttgaattgtggaacttggagatggttgtgctttatgttttgtatttgaatgttttgttatgagagttgtttggtgttgatgcatttgattttcctcccctcccccttataaatacagttttgcttctcaagttcccatacattgctattgacatctgcagattcctcacttgagacctgctgaatataagaggtc

SEQ ID NO: 47777 - DNA, 507 bp, Manihot esculenta
  Intron number 1 from transcript cassava4.1_030900m (locus cassava4.1_030900m.g) derived from phytozome v7.0 (chr-ID scaffold05806; pos 281557 to 282063)
tggtggcaactggattgccttgccccagaaagctggtacctctttcttcctctccctcttaaaacatgcacatacacactgacatggttcgtcgaaaatgcacataatataatcaaatcagttaaatcacagcttttgaagctctcaaagctgcctggatatcgtcatgttttttcgaaagaacagtcctccttcttctttaagattttctaatacccatttcctcaatttttaaccttttttgttctgttttttcgtaggctggatttttctttttgtttcttccaatagcttatgtttatctttctgcaaaggttcctgctctgatgctaataattaccaccactcaaattttcacagagaattctctgttttaaatgactggaaattcttgatgcccttcttgctatatccttacctttaattaatttgctttctaaacaagattgtgcatcaacacatacattttgcctaacctttagtatccgtcgtcacaggccttaagcg

SEQ ID NO: 47778 - DNA, 632 bp, Manihot esculenta
  Intron number 4 from transcript cassava4.1_010655m (locus cassava4.1_009476m.g) derived from phytozome v7.0 (chr-ID scaffold09000; pos 383871 to 384502)
cgccccaacaggtgtatgcaaattttcgtttgctcttcactagctgaccatcaatattcagatttcttctttcttcattcattgtttgatctgtagatacctatttactatatgaataaactaataaaaatcatgtttgacaacgagaaactgttctactttgcttagctttagttttatcaattttaaattgctaaatatgttaatgaaataagaaaaattgatgcaagttttcaaatgtgttgctatatccattgtttagcaaggtggagacaatttggggacataaaaacagtgtgctactgtataaagttctccaaatactttggaaacacagaaatattgactgtaagatgttagttgattgtaaagcgttcggtacagcaattgcataggaggattattgggggagacatttgactataagatgtctgcacaaccaattgcttgagaaagtttaataggccatgctttttcttattacaaaaattatcacgaatgggtaatagagcgacattattaaaggcatatattttgtttgttttttttagctggattcagtttcaatacagatgaactaaaggactgaatgaacaggttgcacttgatataaaaccacaacctggtcagaa

SEQ ID NO: 47779 - DNA, 857 bp, Manihot esculenta
  Intron number 1 from transcript cassava4.1_018589m (locus cassava4.1_016526m.g) derived from phytozome v7.0 (chr-ID scaffold09274; pos 118978 to 119834 reverse strand)
ggtggcttcttttgctgccatgtgagtctcactctctctcccttttatctttatatgctgctggttcttcttcttgtgggtttttgctgggtggagtcatgagtgtcactttgaattcatacttgggttactgaaatttagctttggtaggatgtaattgtgcctgtttattgctgtgattaatgaggtttcaccttgacgatgtttccatagaaaattagtttaacaatatttaattatggataatagtttgtgtcaattttggctatttgtaaatttgaaaaagaaaaatgaaaacagagaaatcccattaatggacagattgctggatggataacccattttcaagcaggactatggcgttgataaagatgcttatttctcaaataagatgtgattgggttcttctattatgctgggttccttgttggagttaaattgtttgactacacagcgagtttcctgcttgtaaaacttggggaaaaaaaaaacagaagtaatccgatgctgtttaatattcttttccttcttgaattgggagattcgatgaaagaaatataaggattatatctcattttaggtgcttttgaagcctagtctcttcttgactgcatttgttcttgcctagattctgtccaacacttgacaagtagaataaaaacatttggattttggttctgactaaatcaattatctagcaactgcatatttctattagttgctttctaattgatatgaactctatgtgttctgctctatatcatgttcttttagcatgtgaatattttgcaagttattgacaattttcaatgttcaatgcagatatttgctgatattggatcggacaaactggagaa

SEQ ID NO: 47780 - DNA, 801 bp, Manihot esculenta
  Intron number 1 from transcript cassava4.1_000734m (locus cassava4.1_000734m.g) derived from phytozome v7.0 (chr-ID scaffold03160; pos 136950 to 137750)
aaggatagtaacttgatcatctaatacggtgcgtttagattaacttttacctttgatcttttagtatatatctgtttaaactctcgcattttaatttcgtaattttaaaagatattttaaaagatttattgaaaataatataaaattaaataaaattataattattaatttatatgttgttacagtataaaagaggaaaataaataataattttaggataataaaaacaaaataaataaaaatatgaaacagacagaatatataataatttggtaaattttatacttaatattttgtgaagtataagcttcccaaattcaatgtaatattttgattattttaaatttttttactaaaaatataaataacgtaaatatttcaacttcatttttattaattatagtatatgttacttataaaatttgattattttaataaagacatattcaatttgattaaattattagttaatgatttctaaaatattttagtttttagttttgattttggttatgcttactttgttgactcaactaattagaataattgaatttaattttgttaattattgtattaattataactttaacaataaaattttatttataattattatttttacaattttaaaaataagttttattttataatcattatttcatgaaaaatatttttgttctattctctgtcaaaattatttagttcaaaatttgagtttctagctacttttttcttcttttgttttttttgaagaatctagtttcagtttgaagtttcaggcagttcataagcattaggcga

SEQ ID NO: 47781 - DNA, 571 bp, Manihot esculenta
  Intron number 2 from transcript cassava4.1_016696m (locus cassava4.1_016696m.g) derived from phytozome v7.0 (chr-ID scaffold10493; pos 1074042 to 1074612 reverse strand)
ctcatccagcagcggtgacggtgctactccttcaggttacaatatttttagctatttaaataatgcttggacaattttgttttaattttaatgccaggttttaattaactgtatagaaacatgaaatgtaatgaaagaaaattatttgtatcagttcacaattgactcttttgaacttgtttgttgaagtaatacattgagagctccaattttggcattagggcggataacttagcaggaaaattagtatatcttcagatcatctgctagctgaaagtgtatgaatgaagccaatatatacaagtcttgatggaattgcataggatttgaatctgatttacgacacagtttagcttttattacgtgataagcatgtgtgtaatgtgatgtagtatgttgttatgtcttgataagttactaattaaagtttcttctccattgtcaaattgtattttaaattgtcctagctgtggtgattaacatttgggtgatgtctgtgttgtggccttgtgtactgtggtgtctgtggattccaggggttacttctgcacctaaggaagaagtaaaacgt

SEQ ID NO: 47782 - DNA, 552 bp, Manihot esculenta
  Intron number 2 from transcript cassava4.1_001136m (locus cassava4.1_001136m.g) derived from phytozome v7.0 (chr-ID scaffold07238; pos 548628 to 549179 reverse strand)
cgaggatctcagagctagaggctgtaatttgctaggtactgttaccttcttttgtttttacttttttttttgtgatattttttttgtcgtgttgttaatgtaatttatggaatttcgtttctgataatagcttgtgatcatcccttagtttattctgaagtttctatactggaatatcacaaaattaattagtttataaataaagaaatggcaaaaagacgggattaatgtgataaatctcagttcattctcttatttaggatacatcctgatctttttttattttttcctcattgaagattgttttctactatatatattcttaaataaataggtggttaaaaagatgcaatcagtttcccgtatttttgagttatatatgtaggcaatgaaaaaaggtcaattaatcaggaggcatagcaagagtgatgaattgtgactgaaattaactcagtgctctagcttttgtcttgtattttgtgcacatattgctaacattgttcttatttttgggctcatgtaatattgggcaggtcctcagtgtgtgctttc

SEQ ID NO: 47783 - DNA, 569 bp, Manihot esculenta
  Intron number 1 from transcript cassava4.1_010399m (locus cassava4.1_010399m.g) derived from phytozome v7.0 (chr-ID scaffold06659; pos 97013 to 97581 reverse strand)
cgggaaccgcagttccagatcaggcgccccctgtaataagttcaaactttagctgcttggttttcgagaatataacaaggatttaatcagattttagcttgttgctgagttaataatcaagaatatgattttttatcttactgttggctttgggtttagcactagctagtgttcttcatcttctcctcttctctttacaaatgctgtttggttgctgagaaagtgagcgagaggaggaattttgaatttcactacttttttttaaaatgaaatgcttgtgtcgaaattttcaccttggtgggtgctgagaagctaggggaaagaaaatatagagggaaaaaaagcaaaatcgttggtttttttttttaagactcgtttgactgaagaaactgggaagctgaaaattatattcatccccagttacaaaatggtaccaacaaagatggcagataaatactggttcttatctttgtttatttttcccttttccttatttgacctcaagtatagtcttgagggttgatccatttttaacttctttgggctgtgagcagattattcctaccaaa

SEQ ID NO: 47784 - DNA, 890 bp, Manihot esculenta
  Intron number 1 from transcript cassava4.1_005045m (locus cassava4.1_005045m.g) derived from phytozome v7.0 (chr-ID scaffold11495; pos 674346 to 675235 reverse strand)
tcattgcttgcccttctctaaccccacttttcgtccacctctctctctccctctcttgtttccttgttgctttgcactcaaaattttctttttctttggaatggcggttgatctgacttcgcatttaactggagttagttttttttttttttggtttgatttttcttgtttggattttagattggggtaatgatttgagtttgcatgaaatgttggccactagcttttcatttaccatgattagtgtgatattggtaaatgtgacgataaaggggtgttctttatttgaggcaagataaggtgggtttcctaagtagtccatggaaatgttcagtataagctttgagagctggcctttggcaaaagcattttcttgaatcccttccaatgctgacggccagttgtattgggctaccattaatacatttttaaatcaatgtattgttgctagttatttctttatttgagtcttcattttgtaaaagatgaacaagaaggaaagctgacttgctataaggaaaggtggcctgctattctcgtcaagtgtattctgttttgatgaggatttttcttgtgatgcttcttaattggtatgtagaatctgtgattgattaatcaattttgggattcggatccaatcatctaacaaagtttatgcgctatttggatttgaatcctgaactgttctttctgctggcatttatactgttttgctaagttggaacagcttttttcctgataaattgtctaacattgacaacattaccacagttaccatcttggttatgtaatcatatttaatcacatgaaacgtttcttccttttatttgtccattgaagtatacctaacttttctaaattgcaaacgcagcaggaagtattgaagaggc

SEQ ID NO: 47785 - DNA, 607 bp, Manihot esculenta
  Intron number 1 from transcript cassava4.1_014007m (locus cassava4.1_014007m.g) derived from phytozome v7.0 (chr-ID scaffold11960; pos 4523 to 5129)
tttcccgcatcttccggcgacgttttccggctcaggtaaattttccgagccgaaactattccttctctcgtttctctcatctttcttcatctcagaatttctcgattatcttctcttaatacttcaggagatgagcagaatcacctctgtatccgtctctttcgcttatatattattccccacacctttttcttctttctgcctcgtcttttgtttttgaacacgcaataaaaatcatatgattttgatttttttttttagacatattggtgttgttttcatgtgtgtgcatgctctgtttgttctgttttttcttttttcctttgttttgaatttgattgcttatgtgttatttgtgtttgaaagggacgaattttcgttcaagttattgaacctgaatgtttatttgaaaaaaaaaatcagctgattggaagttaaaataaaaaagattaattaatttttatttgctttatacgtttccctatatcggtcttgcgtaatcagacaggaagttgcttgattttgaattggatggagccctctaaacgattcatctgttctaaatttagcaggagcaccattttttgggttggcaactcttaatata

SEQ ID NO: 47786 - DNA, 480 bp, Manihot esculenta
  Intron number 1 from transcript cassava4.1_010997m (locus cassava4.1_010997m.g) derived from phytozome v7.0 (chr-ID scaffold03818; pos 102240 to 102719)
gggctacgctgtgaatactacagtcagggacccaggtcggtttattcattatccttgtgtaccatcttttcttttcttatcttatcttttccattttttttattctctattctttaatttttaatatttattattatttttttattaggttaaaattgacacattaattttttatttttaaaatttaacaataatatatttctttatttttaaggttttattatctttttttaatcgcttttcattattgaattaaattaaaattaatatttatattttttaaaaaaagtaaaaaatttaatttgttaaaaaaacactacttcaaaataaaaataaaaaataaaatcaaaatgatttttctatcaatgctcatttctatctattatattttgtaatatattattatccacagtaaatcatgttaatgtatttttattatatttagataaccagaaaaagacctctcacctccaagcactc

SEQ ID NO: 47787 - DNA, 937 bp, Manihot esculenta
  Intron number 1 from transcript cassava4.1_012236m (locus cassava4.1_012236m.g) derived from phytozome v7.0 (chr-ID scaffold11495; pos 149154 to 150090)
tgccaaaataacctagtttgtgctaggagaatcaggttagtcccttttttaatttcacctgcatatccagttcttttcattttactgcctattcttatcagaagggcaaagttaacataaaaataaccccgtaaagtagctacctttgctaagcactgtccaagtgagctgcttggttaagccaaagtaatgggattcctattcatttcctcagaaaccagatagagggaattgaaaatttcccagcttttggtgctttttaaggattggattagactttactgttctggtgcttatcttatttgatataattagagtatcgatgaagattcagattttcttttttggtgtactcgcaagtgctgcagttgtttagaactttgagtgtctatatatgttttttcttgcttttctgagtggttgcagaagtttggcaactggcaaagtagtgtctggcatgtatatgctaaatcttgtttcgaatattggtactttgagtttctttttaatggtaacttaccaggaaagagtgtctttgtcctacctttttctcgttttttattcttcagggagttctaaaattttcagggttcaaatctgattttatttgtattttttcatactgtgtatatattccctctctatgtgggtatgagatgtgcccttgagcacaccccttttcccattatcattccttggggctttttcagtttgtaatccttaggattttagtgggttctgatttaggttatttgaagaaagcactaatgctcagccgagaatcaatactagattgtatttttcccatgcttttgtgtctgcaagtctctgcctgcagcttctttttcttttcttttttcttttttttcttgttctaattttggttattgtcattcctgcaggataagagattttaagtccaattttctccgctatt

SEQ ID NO: 47788 - DNA, 500 bp, Manihot esculenta
  Intron number 1 from transcript cassava4.1_019981m (locus cassava4.1_018848m.g) derived from phytozome v7.0 (chr-ID scaffold06089; pos 528186 to 528685 reverse strand)
tctcaaaaggttagaattttctctatggatcctgctatgttttctactagaaatataaatacatggctgattatcttcatactgaattttcatatttaatttgatttgtttatccttttgttagggattgttgataaaatcattgtgtcatgtcttccttctcgtttaatattcaaagattatttttaactaatatataatcttggaatttattgcagaaagtggtgttgaaattggagctacacgatgacaaagaaaagaagaaagccatgaagaaagtatctggcctttcaggtatggaatttcatccgcctgcttttaatatagcctctatttgtcatctcagatgacgaacaaggggaaatttttttataattttttatttttttggtctttataaaagaatgataacccagatcttaaggggtatggcaatttgaccaacatgaacggttcttcttgatttcaaacttgcaggagtagaatcaatctccctggat

SEQ ID NO: 47789 - DNA, 514 bp, Manihot esculenta
  Intron number 1 from transcript cassava4.1_004405m (locus cassava4.1_004405m.g) derived from phytozome v7.0 (chr-ID scaffold06089; pos 377469 to 377982 reverse strand)
taccgcaggtccatattatctgtaccacttgatcatttccattgtttttgttgagatctagatttcccatgtttttcgtcatctggtaaccgaggaagcataataataagctcaattgatcaaattgctttcatcgctgagtatacggaggaaaagaaagaagtgatgttgagtatatacttttttctttttcaaatagtcatttgcacatgggaacgaatccttcgacataacctgggactgagagttttctctgagttttccaggattgttctgtagcagcgtaaattttcacaatgcgtaactgctatatattctcagtttaccagtggcacgcagccatatatatagtgtgcgtctatattttttttttctcacaataaaagtgctttaagttttttttttttttttctttttcctttgtgagaatttgattggaaactgtcactcatgaattagcttaccacctgtttttttagagagaagagcaagttttgaatttacagcaattagg

SEQ ID NO: 47790 - DNA, 1006 bp, Manihot esculenta
  Intron number 2 from transcript cassava4.1_018685m (locus cassava4.1_018695m.g) derived from phytozome v7.0 (chr-ID scaffold05890; pos 83693 to 84698)
ttatcaacaaatcaggtggtttgatcttctacaaggtatcctctcttcaattttcgtggcttttttttcccagctgaaattgcttctgattgcgtgataattagttagtaattgcgtaattgtggagcactatgatttttttttttccaaatttgaaatgatttaagctgatattgagcttgcaaagattagaagctatagatttgattcaggatttggggaaaaagatgctgctttaacaatcatataaaggggaattaaccctttatgcttcggtttctgggaaattgcgcatttctttagggaccaagaaaaaaaagggctataactaaattgtttccagagctggcaatgtttcaacgaaaattttggaattctcatgtttgcagtctaataaactggtaaccattggttcaaaatagttttccctttttctcagcaatcatctcgggaagtttaggtaagctatgatataatacagaaattgatcctctgatattgtacaggaattaggcaacttaattaccagcaaaaaaagtaagtgattagaggagaaagtatgaggcagtgaagaaaatttataaaatgcctcttcatttgacatgtatgctaggttaatgaaagaagaaaagaggtggacaaaattgtataactgtggaaactgctaaataaaatgccaaacatactggtaaatgaacttggctttccaaaaagatgggaaagctagactaagctccactttggcactgggtgaattcatactgctcccttaatgctgtggttttaatcattgttgcctaatattaggaacggaagatggaactttttttaatggaaaaacaattaagggcagtgcaaatttaccccatatatttgaggcttttacataatttgaccaaatattattaaatttgataagaactattggagttcttgttatctgtattgctgcctgttgggcttgtttgatgatattttgtttattttcttgtgagttattaggatt

SEQ ID NO: 47791 - DNA, 475 bp, Manihot esculenta
  Intron number 1 from transcript cassava4.1_014897m (locus cassava4.1_012215m.g) derived from phytozome v7.0 (chr-ID scaffold11495; pos 448096 to 448570)
tgatcggtgagcttcaggtactattatagttattttagttatttaattagttttcttggttacttgctaggattgtatcagttttcatctcatatacttacggctagctcgaagcaatttggttttcatggtggagagtttaatttaggttcgattaggataagaggttggtgaatttgccgtggtaattatttggttgctgagaaaatcggaatcgtgcttttagtgatctttttttccttttttttgaagagtgcttttagtgatctaattgactggatatcttcttcttcttcttcttctttttttgtgtgtttagaatgctgttttgattaacttatttatttaattcaatttcttgtgaataaaacggagccgtttgaccagcttcatttatagtgttgaatctgtattgaattgtttctgtttttgtgtaccagtcactggtgaagggacttgaaaaatccggcgagca

SEQ ID NO: 47792 - DNA, 610 bp, Manihot esculenta
  Intron number 2 from transcript cassava4.1_033028m (locus cassava4.1_033028m.g) derived from phytozome v7.0 (chr-ID scaffold11689; pos 16745 to 17354 reverse strand)
gctttctggggcaggtaactactatgttggcctaaattttggagcacagcataggtaagggatgacatattgactcatttcttcctttatatccacataatcatttgttcttcagattcctttaagtttcaacttttctttccttcactgttttaattcagtcctcagtgtcaaatgtaattttgttataaaatcttctgttacaattgtttatgggaaaattcttcagtaattatcccaaatggagatgaaaattttgttgggaacaagggtcttctggactactaaaaactatgcgaaggtgctgatgcagttgaactgttttctatggcagttcctgaatgtcatttcttgcttcttattggaaacaaagttgtattgtaagatcatttatgatcttttatcctcgatgatgccaattttgtttctctactttaggcctgcagagaaggaattttatttgattgtttattatttgatagtcatggttccaattggcttatactttcccctggattttctgtattagcaatttcgctgtctttctgtaaatttcttttgtattttttttataggttgtgacattagtgagcaaattatacaggaactt

SEQ ID NO: 47793 - DNA, 737 bp, Manihot esculenta
  Intron number 1 from transcript cassava4.1_015812m (locus cassava4.1_015812m.g) derived from phytozome v7.0 (chr-ID scaffold08265; pos 1053308 to 1054044)
ctttgtcgttgtctctctcgtgtggatactttctggtaatttaactgtgttttctgctcacctaaatgcttgctgatctacatttgatttttgagtcattaatctttatcattggaatcagagttcattaaaaagaatcaccagccttgaattagaatctagcatcatgcatttctattacgtctttctcatctcagatccctccacaattcccacttcagtgtttgttattatgactgtgtgagcctaattgctgcaagctaaacatgtgttgcagtcgaaatcccaatcctgcaaaaagtgatggtaatattggaagataaacgaagaaatttatatttaaatgtatttgtaatttagatctatatgtatatgcaatttagatctaaatgtacatttaaatttaaaaaaattgatggtcaaaactcgatgagttaaatttttatcctctgataatcatctcctttgtcatgcacattggcaactcgtccttgccagttgatggaggaaagcaagtaagctgcatcttgtaatttgctttggaagctttactgctggtttcatctcgttgctggtgtaacttttcattgaatcctgattcttttttttttttaaatatcttcagtgtgttgctagcttgtcctagtttgtttaaagtgaatctaattacccggcttactggattagcttgttcttcctatgccaggaaggtcccacaaaatagcaaaaattgatag

SEQ ID NO: 47794 - DNA, 606 bp, Manihot esculenta
  Intron number 1 from transcript cassava4.1_026018m (locus cassava4.1_026018m.g) derived from phytozome v7.0 (chr-ID scaffold02943; pos 181816 to 182421 reverse strand)
catcttacccacgctctgcattcgctgaagttgtatgttttttctgttttattctgttcccccgcataatttttgaataaattttaaattaaaaaaaattaataaatttactttgatactgtgttttgtatattagattttttcagtttctaaatttctatcatgtcttttttggcattctcactttgaatgtttttttttaatgtacttctgatttccgatgcaaaacaaattatgtactttataatcttacaaagtgaaattctggtaatcatctggttagaaactacaaaatactgaatattgggttattatcatacctaatgaagtgcctcgtatctcctgtctataaacatgttgacaatagaattcaataaacactctgatgctgtttacctatatttagcttgaaaaggatcttccatgacatgacagtagctaatatttgtatattatatattattgttttttcttcacatgtccatctgtgtgcttctaatgcaacttaattctgcttccataattgaagttttgtttagcattttggaattttgttgcacatttattgaaaatattcttaacaatatttgcagttgaagcaaaata

SEQ ID NO: 47795 - DNA, 451 bp, Manihot esculenta
  Intron number 2 from transcript cassava4.1_007798m (locus cassava4.1_007791m.g) derived from phytozome v7.0 (chr-ID scaffold12439; pos 252552 to 253002 reverse strand)
tgagattcctgagactgctcatcagattagcagtggtttgttttgtttctcatttctcttcatttgattattcttcttgttttcatgtattattgtggtttggcaggtatttctgtttgggatttccatttctgatttagggtcttgacagatataaagaatctcatagacaaaagtgtgtatgaatgtttttaatgatatgggattcttgtaaaatgatgtttttgttaatactcatttttcattgatcatattaatgctgaaacaaccttaatttgggttggaaattgagtgttttggttggcctttgaatttctagattcagacaacggaatttgtcaaatgtttcccaacagtgtgtttgggtaattttatttcctttagcagagtttgatgtttattaagttgttgtttgcttaagctcatttttatttatgcaatttacagattc

SEQ ID NO: 47796 - DNA, 232 bp, Manihot esculenta
  Intron number 1 from transcript cassava4.1_007798m (locus cassava4.1_007791m.g) derived from phytozome v7.0 (chr-ID scaffold12439; pos 253184 to 253415 reverse strand)
acttcaaattgaaaatcccaacaagtgttccaactgtaagaggtttccaatttcaatacaaaccgaccaatctgacacccacaaaaatctatgcattaatgatttttattatttaatttcttttttcaaaaaaggcaactgcttttgattcctggctgtaattttcttctgaatctgattcttggctgtaacttcagttctttttcccctggagaagtatataagggaagca

SEQ ID NO: 47797 - DNA, 723 bp, Manihot esculenta
  Intron number 2 from transcript cassava4.1_016593m (locus cassava4.1_016593m.g) derived from phytozome v7.0 (chr-ID scaffold08265; pos 3735096 to 3735818)
gaagactgtaaatctgggtctctgggatactgctggtactctcttctctctcactgtttgtactcccaattaatttataatatggttaattttcatggttatcgaattagtttgggatgcaacgcatatcttctttcatcgatcaaagtgatctgacattgtatttacgagttttgtttgaatggggagcagaagtttctctttttgactgctttttttcctaacgcttgtctgtttagcgcaaaatatggggattagctttggcctttcgaaaatgtctatcccttgatgcaattaccattagaacccagatacacgagaagttatcacagagaattaactattgaaattaaactgtatattgaccatttgaacatacaaatactctgttttccccaatttttaaatgggaacgagtcaatttgtttccaaagcatctggcgctgagtattcactttccacatgaaaagagagatcattgctggcttgaaatcctcaatgattcacaagtaactaagagttgcttttatttatatataatatcttgaaaaaaaatatcatggtttatatgtttcgatgattaccttatattttatccaacaatcaaatacattctcttgactcaaagagtcttgttgaagtaattcactttaatgacatcacttaagttttagagcaactgatgcaggtcaggaggattacaacaggctaaggcctctaagt

SEQ ID NO: 47798 - DNA, 346 bp, Manihot esculenta
  Intron number 4 from transcript cassava4.1_006343m (locus cassava4.1_006343m.g) derived from phytozome v7.0 (chr-ID scaffold08542; pos 682072 to 682417 reverse strand)
aaatccaccaattgccctccgtctgaagtatctgagtaagtcacaacctccattaacttttctttgtttcttttctaatcggttgatgaagtcagtttaaaatatttgagttgagataatatcggggtaacttaaaacctcaatctacttcgtataatcttttctcccttttgttggttgatacgaccgtctcaaaattcaaaatggcattaaggggtagcaaggaattcatatttaggggaagcatttgtgcccccacccttcatctgaaatcaaaatgatagttaagataaatggataatttttttgtcatgtaattgcaggtcagctgatcaaaattcacaaa

SEQ ID NO: 47799 - DNA, 1044 bp, Manihot esculenta
  Intron number 1 from transcript cassava4.1_006343m (locus cassava4.1_006343m.g) derived from phytozome v7.0 (chr-ID scaffold08542; pos 683263 to 684306 reverse strand)
cagttaaaacttcaccccctctgctgctccccaaggtctgctttacttttcgcatcctaaggctgcattgttttttatctcgctctgtgtaatgctaggtttatgaatcttggggaaagtatatattggttcaggactcctgaattgttttggtaaattttttttaacttattttttatggtttggttggtgggtatgtgctggattctattggatctttccttttttgaagttttggttagagtttgttttgttgtttggttgctgtgacaatgaggaaaaacgaagggatttgaatgcttttactcattggaatgttggatttaatgcccttttgcttgctttatttctaaactaatttgccttatcttggtgtgaatatttttttggcagtttcatcatttgattctgtttggttgcggagaaagtgtgggaaaattatctaaattttgaaatttgatagaggttttttttctgaagaaacttatatttgggatatttttcaagtcctttgattctctaataattttaagtgtcgatcagtgcttgatgtatcttgacctcttaaatcagcctctctgcacgttcgttttatgttctaattgcctggccttgatttattgattttaatcttgttgactgaaaatttaaagattccaatgttttgttggaatacccattttcaattcgtatctgaatgtctttattttgattttaaattttggctcttctttttttttttctcttattttttcaacaatgtttgatgtttttaccatttcagttcagaatatatttgatttctgcccattgtagtttctgataatcaaatgttaggttggctatctccactctttcaaatgatttgcttattaaaaatgttaattgtggtttagttttcgatgatcattctccaacatagaataataagtacaatttttaaggaaagcaattgagtcattaactttctaggcttattttctggtccattttgacatattgctactgcaaattttgcagttcattgtgaaactttgtaaaaga

SEQ ID NO: 47800 - DNA, 800 bp, Manihot esculenta; identical to SEQ ID NO: 47260
  Intron number 1 from transcript cassava4.1_018055m (locus cassava4.1_018071m.g) derived from phytozome v7.0 (chr-ID scaffold00823; pos 241565 to 242364 reverse strand)

SEQ ID NO: 47801 - DNA, 585 bp, Manihot esculenta
  Intron number 1 from transcript cassava4.1_000952m (locus cassava4.1_000952m.g) derived from phytozome v7.0 (chr-ID scaffold05806; pos 25973 to 26557 reverse strand)
ttaggagagctcttgtgagggttgctgctggtcaggttagcaggatttagagtcttcatttcgtttagtaattcatgcatgtgctatatatttgtgcatttatcatgattttgggaattttttggtttggtgttgaatattggtcgatctagtgctgttgttgcgataatgtgttgattttagtgaaacatccattttttttcctgaagattgtaggttgatctgctaaataagatgcgatatgtggatcatgaattaatgattcgttagtttgcgttggagagcataattctaataaatgcaattcgttactaattactactgactaatttcgaaaatttgaattttatgggagctgaatgaatccagaatgttttgttgtcaatatgcagcaatgccgttttacgtttgtctttgctctgttgttggtttatgcatttgctttgggaattttttcatattctcgttgtctgtactctacattgttttttaaaagtctgtagtggtttcatttcatgatgtggttcacttattaacatgctcatcacaggttggaaggcgaattgagtcggttgttctaccact

SEQ ID NO: 47802 - DNA, 677 bp, Manihot esculenta
  Intron number 5 from transcript cassava4.1_012091m (locus cassava4.1_012091m.g) derived from phytozome v7.0 (chr-ID scaffold03606; pos 25235 to 25911 reverse strand)
tgtaaggtttgttttcaactctgtctctctggtggaatccctctggcttttgcttggagtttgtggatgccatgattgtttcatatcccttataatttgattccgtgtccctacaattacggatctagtgtaccctctttgttttttacataaaaaaaaattaatttttataaaatttattaattcattcctatattaaaattatttgattaaaatatatattttttataaaattaaacagtttgaatcaactcattttaatttttaataaaaaaattaaataatatttattttagggtgttttcatcaaaacatcactatcagacgcaaacctttaccagaaaaataaaattttaattcaaagaacttgtaaattgaactaatttttttttttttaatgttaaagggtattgtccagtcagaagagtagttagttttaggctcaaatttctaaagattagggaaagagatacccaatttcaactagggttaggttttaaatgatgcaagagttggctaaccttgtttattctaattatatatgctttgtcaaattaatttttttttagttacatttcttcattaagaaaattatttagcttaaataataataattgcttgatgaaatttaatctgaaaagatatttgatttgatttgatttgtaaacagattgctg

SEQ ID NO: 47803 - DNA, 739 bp, Manihot esculenta
  Intron number 2 from transcript cassava4.1_007238m (locus cassava4.1_007238m.g) derived from phytozome v7.0 (chr-ID scaffold07267; pos 5940 to 6678 reverse strand)
caaatttatcagcggtggagctgatattattgcaggtatatatgttaatttgaagatttttattccttaatttttggaaagcatgaggtaataagatctcattattaattaacataattaggggaatctaaggacaattattctgttggtacacatatataaaaatccagattaagagttgaatagtgaatttcaattgagttggaagagtttcaattacaaatgtgccctttatttgtttagagattttatctttacttttgttaagctttttgcataattgatttgagagggctaatttaattatataataataaaagtatgtagaaattagataaggaagataagaatgtctgatgagcacatgacatcatattagaggtagatgcgtttgagagatatataaacgttcaaaagcttactgattattaatttctagttttatttgaagttaattttgtgtggttatttttgaatccaggtgggtttttcttttttttttcatttttattattatcatgtttttatgtggactggtatggtggacatgtactacttagaatcttccatgtgattctgagtttgatgttttttattttgggtttttccttggagtccacatgtgacgtgtctttcattcagttccttggcgtgacatgcttttgaaatatgattaattaattcgattaaaatggcattggcaggtgctatctgtgggccggctagcctagtgaactca

SEQ ID NO: 47804 - DNA, 587 bp, Manihot esculenta
  Intron number 1 from transcript cassava4.1_010928m (locus cassava4.1_010928m.g) derived from phytozome v7.0 (chr-ID scaffold03104; pos 113883 to 114469 reverse strand)
tctgtttattcaagacggtatgttggctaattctctattttcatttcattttttagaaatcttcataaaataaaatatttattttattattcaatttaatatttaattaacttatttatttttggggggttttcagttaatttttcactctttgttgcttgtctgttcccttcctaattttcatgagtgcaggacaagtataggctacatgctagcatttatacaagcctaagtgtcatagatttgttttcctttgattacgagtcataacgtgaatgttttgccttgaactgatctcttcaagtgaaccgatgctctgaccatttctatcgccttaattttctcaaatgaattctcagcataaaacccaaatccctccctactttcttgtttcttctttgctctcactctaatttcatggagtattatagatggaatccaccgtatgattgtgatctatctttccttgttcttattttattctgtttctatcttttcaatttcttcttggcattatctattcattaacttgatgtgattcttcaattacaggattcattgatcataaaggctcctaagaaatctcc

SEQ ID NO: 47805 - DNA, 727 bp, Manihot esculenta
  Intron number 1 from transcript cassava4.1_009557m (locus cassava4.1_009557m.g) derived from phytozome v7.0 (chr-ID scaffold06871; pos 842378 to 843104)
gatcaattagccagagtgtaagttttaatttctttgcttaatttgtttgtaagcatgattaattcatgggctgaaacccacttgatcaagttctcaaatgataaataaatctctgtatgtggagtttgagctatgttaattgcttaattagtgagtctctgttgagtattaattgtagctagctacttttaatgattgttatttggttgtgcatgtcacaattgcaggttacaaggatcatattctatttcttgcgttatttttctgcactttttacgaggtcctttcccctttccttacctttcttctctaaaagggtggaatctgtgggcacaatttattttcttttccccttttcttccaggtcatcatttggcattttgattaaggtagatggtggcttatttcctaaatggtttaagttccaaatatgggtcaatcaactagatgttgttccatttggctgatcatttgaacttagatgaaaggaaagagacttgaaaacaaattcttgaaactgtctttcttgattttgcaaaggtgtttgttatgccagaaagttttcttttcttttcttttcttttcttttctttccttttctcactactgttacatttgcatacagcatgtgatgttaaggacaaaaacaattcctgaaaactgaatagattctgatctcattctaaacatttgttttgtttctgttaattaggtctccatttcatca

SEQ ID NO: 47806 - DNA, 832 bp, Manihot esculenta
  Intron number 1 from transcript cassava4.1_013268m (locus cassava4.1_010796m.g) derived from phytozome v7.0 (chr-ID scaffold06814; pos 1042968 to 1043799 reverse strand)
ttcttcgtatacagttccacgactgcttcgttcaggtaactatcctttcattcttcttctcaatagcctaaatcttcttgatccatccttcagtaagtagatcgaactagttcttgatttttagcagttgattcttccctttgccagtttctagtacgtacatgcatggctgtccaataattgctttgtttaatatgagctgtgaagcatgatgcttcctcttttgttaattttgctgattctttacccagttttgctttccttttctggcctggcatgtttttttaacagaggctctctctgcttaagcttgccttttgtttaatgcttttgttaatcttttagattttttaaaaaaaaaagacatcttcgatcgtgatgtgctaagcatgacatgactgtctcataataaaaatcaaaataataatatgattatattttaataatttaatattttagatctaaatacataatttctctgtgttgctttaaaaaaaaaaaaactctgatcgttgttaacgtctcagggatgcgatggctcggtgctgcttgatggatcagcaggcggaccaagcgagaaatctgaacttccgaacttgactttgagaaaagaggcatttaaaatcatcaacgacctccgcgatgctgtccacaagcagtgtggccgtgtcgtttcttgctctgacatcgtcgccatcgccgcccgtgactccgttgtcttggtaaattgtccagcttttgttaatctatcagtcttaaagtctaaagttgttttccatcgtctgatcgtttcgtttcttttgtgggttgcagaccggcggtcctgactacg

SEQ ID NO: 47807 - DNA, 537 bp, Manihot esculenta
  Intron number 1 from transcript cassava4.1_026746m (locus cassava4.1_026746m.g) derived from phytozome v7.0 (chr-ID scaffold04209; pos 512247 to 512783 reverse strand)
gatgttttttgaagaccggcatgagtggagcgcacttttaagtggagtggctagagatggaaacaatcaaatgttttccatcttttagtatattgtagaaggaaaaataaagataattggaaatggtatctagagagattatttaaggatttcaatatcattgatggtctgggtttgatactcatatttgattaacagaaggtaaatatcaactataatactagtgatttttttttctattttactttcatattgatatatttatgaataatttgtttcttttgtgcaaggattagctaatgcaattaaggatttaacatctcatgaagagcaccgtaattatgccagacacatatatgcaaattggagaaagatacataaggaggaagaattcaaaaagttattttggaatgctgcttattctacatatgaaactgcctttaggaagcacatcaatacactgaaggaattaaatgccgaggcttatgataatttcatgaagtaagacccagagttttttgcaaagccttcattaat

SEQ ID NO: 47808 - DNA, 623 bp, Manihot esculenta
  Intron number 1 from transcript cassava4.1_004499m (locus cassava4.1_004499m.g) derived from phytozome v7.0 (chr-ID scaffold10114; pos 36847 to 37469 reverse strand)
ttctcatccttccatcctcataatactgttcctcggtattctttgtgtttttccaatcaattttcctttctatatcttcattgaaaaaatataattgtggtttagctggtcatctgtgtgtttctaaaataaaaactaaagagcttatcctgcttcaagctagtatgaatatttcaaattataggattgaatactatatatagttaattaatagtataaaatttaattgaattttgagaaaaggattaagtagttaactttgataaaagtaacctgataataaatctctcttaatctctttttttttttttcattttggaattctgtaaaaattgatggatcgatatttattttttaccaaatggcatgatcacgaatgatttttcagtgatggctaaaagttgcacaaattaaaatattagagtaaaattgagaaggcaaaaaatgttgaggctttctttgttcatgaagccgagtatacatatagctgctggacttttcttttttaagtttcatttctgcgaggattaattgctttaatgtagtttatggttttctgatatatatatatatatatatatatatatattttattttttttttttttttgataattggtagcg

SEQ ID NO: 47809 - DNA, 673 bp, Manihot esculenta
  Intron number 1 from transcript cassava4.1_003178m (locus cassava4.1_003178m.g) derived from phytozome v7.0 (chr-ID scaffold04083; pos 156541 to 157213 reverse strand)
ttgaacaagctgagagttttgcctctgtactcaaggtatctatttttgttttgttttttatttgaattgtttcttttaattatgtgttctctttactctttttttttttttccctccttctcctgggaatattcttcatccagacagaaattgggatataatttcttcctttttgccggtttattattatttcttttagccaaagagaaatttggcttttcctactgctatgcaattgcctgaatattatcgcctatacatggaagtttcaagttttattattactgttattcttttaaagaagagggaggcttagtagtaagttttatatggtttgacctttaacgcctaaagaaaatgaaagggttttgattatctgcggttgaaaagtacatatcttcgttgagtcaatatcagtgtaatttatccactttgactgaccatatatttcagtatattttgaaacctgcaaattaattagcttttgacaatttcagtacttgtttcagtcgaacaactaaacaagaattatacctgcttaaggaatcgtgaatattagattttatcattgaggtcaatttatcttagctaagttcaagagcaagttgcataacctattgtgttgcattttcttttttactaatgaaatgctgattacagttccaacttgaag

SEQ ID NO: 47810 - DNA, 867 bp, Manihot esculenta
  Intron number 4 from transcript cassava4.1_018441m (locus cassava4.1_018441m.g) derived from phytozome v7.0 (chr-ID scaffold02871; pos 74618 to 75484)
tgatcttagtagtgttgatcctgcaattcgagcaggttctttagaacgatccctccatatttattcagtaatttttcgtttgttggttatagagcacagtgggtatgggtttttgaattgaacagggagatgggatcgaacattgaaaatttaatgagaacctactttggccattgatatgcactcataataggaaagcctccaatcacatttgtgagtattttttgttggttgataaaatagtaaatatttatttaaatttagtttttttaataaatgcaattatggatttgttaaaattaatattatacgtgcactcacggatttggcttggtgataagtgcattaagttgaactttggcctggttcaaggttgaatttgcaatcctccatcccttatttaaaaaaacaaaagattaatatattacatcctttacacctattaaagttcatttaatgcacctataagattaatatgttagtaggaaactacaattttaataacaaatgcttatttttcatattagcaagatccatttattattaaaattgtaattttcttttgaagtgcattaaataaacctcaactagagcatatttgtatctattagaaaaatcgatttaaactatcaactcttatattgcttaaataattgacttcagctccaattgcataagcaatctttaaaaatatgcatttgttaaggtttatttaattcatcttcaaaatttaaattatcaatctttatattgcttgaataattaacttcagttcaattatataaatgggcattaaactttttgctattttagtcatgcaaagttgcattgttgaatttacagataccgaaggtgagaacttgcgtg

SEQ ID NO: 47811 - DNA, 552 bp, Manihot esculenta
  Intron number 1 from transcript cassava4.1_025616m (locus cassava4.1_025616m.g) derived from phytozome v7.0 (chr-ID scaffold08871; pos 278682 to 279233 reverse strand)
aattcgagattgcacctccgagaaatcacaaggaggttttaaacctcttctcctcctcctcctactcgttattcttattatttatttgtttttttttttgaagtttggttcccgagaaaatgaaggatatagcgagaaaaatccactccttttctctcgtttaccaaaatcaagcctcattgtacttgaatcaaacgctgcataatgaggatgctccactttaacgtctgaaaattatgaaaaatgaagcctgtattttgaatttacctgtcttttttttgtttccttttgttgttggcaaccgaaacgaggttcaattttctggatcctcagaatgttgacagaaaatgcaggaaatgaattgaacatccaccttgagactttcttttggatttgagacttgttactctgttttaccaagttaggcaattaatcaacagactcgatttaaaaaaaaaaagtttctcggaaaccaaccgttggctaaagtttttgtactatgtatggaaacttgcagagagaagggtggttgggctaaggaagagagttgaa

SEQ ID NO: 47812 - DNA, 921 bp, Manihot esculenta
  Intron number 1 from transcript cassava4.1_005419m (locus cassava4.1_005419m.g) derived from phytozome v7.0 (chr-ID scaffold00136; pos 141749 to 142669)
cattcagtagcattttccagacaaggtatgtttctgttccttatgtgtgtgtgtcagaatcagaacattgtttgatgtttgcttgttctgttttattatattatgaagacatatcttggatgaatgctaaaaactttttattcaacagtgaagctgtagcagttaaaaattagaacactctaggttctacacagttagaactttggtttttgtctttctttttccttgtttttcatgttgccttgtcaaaagtctgcgtcaacctacagtatatttttggtttatttgttcacaagtctgttttgtccttcctttattttgttcatacatctatatatcctctttttgcttgtattgagtcttattcttggaaagttaacaatacatattaggatttataaactatagtgatgcaattctaattaggaatcctgaataaaatagactataagattaatagcaaaccttaaaagaaaaactttctaaatttgcattaaaattaaatcaagagtttgaatcttcctatactgcattcaatcaggcattcatttcttccaggcttatgctacatgatttgttatggccattcatttgaaggatatggcagtatgaactgaagattgtcattttatttgatccagcatatattaatcaaatagtgaagaatgtagccttgagtattgttcccaagttaagagcatttcttattacacaatagcttatgtacctctggcatcgtttgcatgattttcccacattgttagatgtctgaagtttggagagtccctcttaatgttttgccccttctataactttggaactaaaacattacccttttgagccaaagtaaataacaatttattcaacttacttttgttccatttaggaagaagaagttaacaaatcactggaggagcttta

SEQ ID NO: 47813 - DNA, 548 bp, Manihot esculenta
  Intron number 2 from transcript cassava4.1_013236m (locus cassava4.1_010000m.g) derived from phytozome v7.0 (chr-ID scaffold03264; pos 592427 to 592974 reverse strand)
tggcctgcccgcaactcccaattcaggtcgcccaggtatttgtggattctctatctgcccttgaatgttatgttttatgttggtctttcaaacggatggatggtttatttaaaagcaacgggaacatctgatggagttgccttggcattgaaccaaacttttagagggaaaatcattccctacagaacgttaaagactagaaccttgatttcttgatctggttaatggttaaaacattcacattgtttctttgttaagaggtgtctgtttgtcattttaatatacatatgattttcacagttcacaaggtggggattagtgtatgaacctattgaccaatatcttttgtttaaatgaagacttttagttcataattctagctgctagatagactgtaattctaaatatggagttatggactttaaatttgattctattccttaatatattctgttctcttgcttatcaaagattgacctttctttatgcttctcttttttcatatatgctcaggtagcatcgttgtcacaagtctcaaaaacataatt

SEQ ID NO: 47814 - DNA, 728 bp, Manihot esculenta
  Intron number 1 from transcript cassava4.1_015078m (locus cassava4.1_015078m.g) derived from phytozome v7.0 (chr-ID scaffold04083; pos 146919 to 147646 reverse strand)
atcgttacagagaatacaggtctgtcctcatttgaaaagcttacataaatgtacatgttctgtatgtcactgataattgaaccgtaaaaattgtcattttggtgtttgttcacacaacatgagattctttagttggtgagatcttccatggttgtttacgatgatgctcctatttccaagtatagtatttagttctccagtcatttagtttttttttctttaaaaaaggtaaaaataaaaataaaaataaaaacaaaaacaaaaactttagcctctaatataacaggaaattgaatagaaaaattcaggaacgtacgtggacaagttaatgtacattgttttatgaaataatacaatgatttcaaaattttctgggaaaaaaaaaattcttacttgcagtcactgtctacttgtttggatgccgtttttgatattattccattaataatgattggtagagtggtaattgtctcccaaggccataactatgaatcgcaatgcttaattgttcaaattttgggctatactatatctttttctatgtactgaaatttaattgaattggagcgtgagatccccacttccgccaccaaccaaaaaaaacattattttgctcctcgtaccctcttttatgtgttattttgttctactccactccatgcttctttcttgaagtgatttgattgtctgattgaactcttttgatgacaggtattgcttgtctgtga

SEQ ID NO: 47815 - DNA, 700 bp, Manihot esculenta
  Intron number 1 from transcript cassava4.1_016402m (locus cassava4.1_016402m.g) derived from phytozome v7.0 (chr-ID scaffold02264; pos 228847 to 229546 reverse strand)
cctcgatttaaaggtagcttttcttttcaaactgatttttaactctctttcttctcttatagcttcaataaatgcagatctcttgtttccttttgttactttctgaggaaatctatgtcttttcttcttcaatgccctttgtttttaatgcttttgctttctggtttctctttctcccgcacataataataataactattactaaccagattaaaatagggttaaaaaaaccctaaatatggaataacattttttctcctcttttacttatcctttttggtctgcatttctataggaagaaaaagggatgaagttgaaatttccagctttgaccactgaattataaattttgtttctttttgattgctcgtgttaaaataccaaaggaaaaaaagggaaagaaaccatttccagtgtttgattagttttatcatttatggtttactcccctttgatggggatcatcaaagcaattccccctttatttttctttctggggctgttgattatattataacctttgaattgatgcacaacccaaaaacaacttcgttttcttgattatggccattattttgtagcattctcctgttgtttatttcatactgaaagcaatggacaatgtggaagatatgtattgttttatcaagggtttgcttgcatttgcagacaggggagatttactacataaactggagga

SEQ ID NO: 47816 - DNA, 309 bp, Manihot esculenta
  Intron number 1 from transcript cassava4.1_030893m (locus cassava4.1_030893m.g) derived from phytozome v7.0 (chr-ID scaffold07301; pos 79554 to 79862 reverse strand)
ccggcgcaggggcggctgccggtgctcttttctttgctttaatcttttttccttattttatgttctcgctcttgttggtttgccagaagattgtacaagaacaagaaagccgaaagtttctaatatgctgttcaaacaatagtgtcaatcgataatttggaattgtgattgtttttcttccccccccctctcaattttcttagttttttgaatctggtgtttgatcgttgttttaattttattgtttatttctctttatatttcgggagcgcaggagtcatcgctgcaacatttgtgtgtcccttagat

SEQ ID NO: 47817 - DNA, 414 bp, Manihot esculenta
  Intron number 2 from transcript cassava4.1_022943m (locus cassava4.1_022943m.g) derived from phytozome v7.0 (chr-ID scaffold06659; pos 73438 to 73851 reverse strand)
ggacaggtgagtttctcgatgatgctacttatttaatatgataattttgtttgattgtgcacatctgccattttctttccattgcagttctaaacacattattgcacagggtgagtaatgaatgtccttttctcatccactctgctaaatatgtaagaagatactctttgtgtaggcatgtgtctgataggcagttaaaactttttggctagtttaatcttcaattcagaggaagcttccttgcaaatctcttgaaagtttggaacattttgtgtcattttttttctcctggggaactaatatgaactggaaattctacctatgtgtgtcttttgggtgatcttgatgttgatcctagtagaaactaatttgtctgtaaccctcttccagctaatacggctctcatttatcacc

SEQ ID NO: 47818 - DNA, 726 bp, Manihot esculenta
  Intron number 1 from transcript cassava4.1_023990m (locus cassava4.1_023990m.g) derived from phytozome v7.0 (chr-ID scaffold06089; pos 346603 to 347328)
atatcaccagacctctgctccttcgccctcttcctgtaagttgatccaaactgtttctctttgtctcccgatactttactggagtctgatgagtactcagtcgtgatcatttcaattatcaaaactagacgcagtgttttttcttttcattaacttgtatatgctcaagagggaatttcccaaactttaccctatatttggatccttaattaggcaagagaattagagagaaaatggaagagaggaaatgacgagaaaataactgaaatcaaatttgatttggaagctaaatcaaatttctctcagaaaggagggccattaagtgttttctacctatttcccaccattttggagagaaaaattttggatcatttgcagcagattgggaaatataatttccctttttttccagtcttttctctgcatttctcctccctaattcatgtccaaacaagaaaattttgagaaatttcatttcttttcgtttctcttatgtttatttccctcaaaccaaaggggagctaattagcgattgatgagaggataattatgagtcggttagcttttactttgattgccatcacaacgattactagaggttttagacttatttgttttgcaaaagacctatagcatgtttgtataattttactaaattcaaaatttgtgattacttgcacaacctctgcagctggattaggcatacgagttgctttaaagccagag

SEQ ID NO: 47819 - DNA, 734 bp, Manihot esculenta
  Intron number 2 from transcript cassava4.1_023990m (locus cassava4.1_023990m.g) derived from phytozome v7.0 (chr-ID scaffold06089; pos 347312 to 348045)
ttgctttaaagccagagtatcggatcactcctctggtatgatttgattgtttatattgttgttcttttcaatttcaaagaattttctagtaattgacgtgcatttagctttaagtcatcctgattttttactatgctttgcacggatcattagtctgtttttggtttatggattgtgttctagggataactaaacctactctatgcccacctcattactcgcagtaatactttatttgacttcaagttttcaaatatttatggtatgaatgatctcatggtggaaaattaacaaaaaaaaaaggtcacatcggttttgtgtgttctatgaattacagcgcatgcatccaattctgcagatcccactatcttaaagtcttattctgcttttcttcatcactctattttctgcctcttacatttcactaacttgagatgtgatccttttaccatcttatgtgcaaggaagatgatgttatgataataattatagcagtctttctgattcttttttattgtttttgagactcaatttcaatgacaaaattaacttcttttctattgtattgtttggccacttatttttggttcctatgatagccaagtgcatattcaaggggttgtgtttttttctggtctcttggtctcaatttggatagtccaacctgaatttcattatctataattgcccttgatgtagcctcaattgtcaccacaactgggagatatcccgcg

SEQ ID NO: 47820 - DNA, 629 bp, Manihot esculenta
  Intron number 1 from transcript cassava4.1_001403m (locus cassava4.1_001403m.g) derived from phytozome v7.0 (chr-ID scaffold00204; pos 206100 to 206728 reverse strand)
aagtagtaagtaaaatttcttcagtttttcaccgtgatcactttaagttaatgtctcaattcaacggaatgctaatatttgaaatggttggagcattttctactggcagtaaattcagtagaatacttaattataatagaatttttttattattgagtagaaaatcgtgagatcttgatggctgaagaaaataatgtgcttgtgagtgagtgaaagtttatttgttagaatgacaaaatagttaatatatagtaatgatgtcagaattttcatttcaaatatgccaatggtttttagctgttggggtagagctaattatactttgaaggccttagcaatcaaaaccatttggaacaattttctcaatataggagagccattccaagtgtaaaaccacaattgctacaatccctttagaaggtgggttaactaatgctgggattggatgcattcttcgaaggaagtgaggcccttttttttgtaggagatgttgatatgtgggtgatgtcatgcacgcagaaggctaatatagtagtttatatcttattctatgaaattttggattttgtaattaatttacttctttttggacagtgctaggcttcgtgctagacaaaaagaacggcttg

SEQ ID NO: 47821 - DNA, 247 bp, Manihot esculenta
  Intron number 1 from transcript cassava4.1_016094m (locus cassava4.1_016094m.g) derived from phytozome v7.0 (chr-ID scaffold12753; pos 251053 to 251299 reverse strand)
ggtagctttttcgtctgctaactgctgaggtttgtgttgcttttttgccttttgtttgattttgttttgtgttttcaatgaattgaaccagaagaagaggaagaacaagtctttgtaagctttgtttatttagaaaattttaaaactttgcatgttagaattgtttatttatgcattaactcttgatggttaccttttttttttgcaaccagccggtggaaaaatcgattttcccgattgcttacgg

SEQ ID NO: 47822 - DNA, 807 bp, Manihot esculenta
  Intron number 1 from transcript cassava4.1_004435m (locus cassava4.1_004435m.g) derived from phytozome v7.0 (chr-ID scaffold08265; pos 2738611 to 2739417)
agtcaagtgcatttctctcttgagctctttattaggtaaattcagtttggttgctgagaaaatgtggtaaaagaaaaaaaaagaggcttgcatgtgtttagatgttactgattttctaattgaaaatgaaaaaaaaaaggaaattttcattattattattattattattattattattattattattattattattattatttcggatagttgtttactggttttagctgcggctactgagaattttaaaatctagttatttgtatttggttccttttcttttttttggtttttaaagttttttttttcattagctccggtttggttgctgagaaaacttgagaaaagagaaggaaaattcaggagagagaaattttgtagcaagtgcttcagttgttttttttttttttaaaaaaaaagaaaatgattaacttaatggtgaaatactgttctagtaatggtaaacgagttgaaattttatgtttcaaatttattttcctcgagattcttggtcgaaaatttccttaagatggtgtgaagtataacttgtctttataaatgatcttctgttttttctgcaatgaataaagatttttcttttcctttcaaacgttgtacgtcattttagtttctctaaagataaactccagaagtaaaaacggtaagataaaatcagttggttactatttttttcccttttcgggtaaagtgatctggattttaattttgaggatttgcatgttaaatttaggaccttcatttagaaatttgactttgattctgatttggttttttctgtagtcgctg

SEQ ID NO: 47823 - DNA, 1011 bp, Manihot esculenta
  Intron number 1 from transcript cassava4.1_031015m (locus cassava4.1_031015m.g) derived from phytozome v7.0 (chr-ID scaffold03264; pos 483674 to 484684)
cttgcaacctgaagcttatcatccatcaggacattgtatgcctcttcatcctttatttattaattgtttcttcttttactatagtcatcatctagaaactcgcacaaagtttttgcagaatcattgtttggagaaaagataaaaatccattaatatagtagctaaaactttataagccagaaaatgaccaagttctcatggaagaaatagatgtttgtctgactgcaaaagtcagcttaacatgattaggctttatatattaaccgagtataataagttatttatttatgttttctcttttctataacaaagtctggttgatttgcttatttttgaggcagctaatcataactgtataaagacattcaaagttctctgcacagcagaagtaaggatcggacatggatacattcctgactacttccagtgttaccgaccacatatgctaccaacttaccataaaacaatcgcctggttgcagaaagcttaaaatattttcttagatagatgaagctttttttaaaaagaactggaaatagatggctacaagaagctgctggtgctgactctggctaacgtatatcagactaagttcaaattggtgttctctgaactaagctggttacagaaaatttacattggatagcttagaaaaactaagaaatgatagagggaatggaaaaatagtagaaatactgaactaatttctagcaacaaaacataaaaaaaatagacccatttgaatcaaacttcattagagcaatgggtagagcttgctctcatttggactctccaccatcaacaatatttagatatttgataaacttcatttttttcctacaaattactaccaatataattatgatttcaacattggaggagctatcccaatcaagtggggtgatactgattaattacatttttcattttgagaagacgattacattatttatttagtttgctgaaatcctcagacaggtctaactagagtttcttgtatacgtatcagtc

SEQ ID NO: 47824 - DNA, 643 bp, Manihot esculenta
  Intron number 1 from transcript cassava4.1_008405m (locus cassava4.1_008405m.g) derived from phytozome v7.0 (chr-ID scaffold04402; pos 18898 to 19540)
atcaagagagaccactttgattctgttgaagtatgttcctttcttttctttccaatgccattgcttactttccatttctgttttttgaacgagtttttaccatttatatgttagaccttcaaatcccttttgatttttttctagagagtaagatctgatgttccttgtttcatgtaattgtagctttttgtctgctcatatttcattttctctttctttcccagaataccattttgttgtttcatttatttacttttatatgttccttgagatctttcaaattcaatttactgttctattatctatattttctatcagattaaatcagtaacttttgttgattaggcactctgctggtgtattttttttattgctgtttttttcttttccttttagatccttataaattgggagttcgtttagttctcatttagttctgacaatttcttgtagttttcctttgttgtctaggctcaagtatgctatggctttttttccttctatgttcagaatatattttttccttatctttatctttatttttatccccaacaacacaaaataagctcacttctcttgttatttgttgattcttttgtattgtataggaaaaatttcctggaggagctgtggatactgaatt

SEQ ID NO: 47825 - DNA, 647 bp, Manihot esculenta
  Intron number 1 from transcript cassava4.1_000650m (locus cassava4.1_000650m.g) derived from phytozome v7.0 (chr-ID scaffold06700; pos 108939 to 109585)
ggtataattcctgttctctctatcatgtcttccgtttgcttttcaatatgtaatgttctctctctgtgtgcgcaaaaaaaaaaaaaaaaaaaaatctgtgctggtggtgaattgaaaagaaacgaaatttctttttcctttttaggtgattggtacagttttctatagctattttagttatgggcagcttattttgagttacttcttggaaaaaaaagatccccagtgtcttctcaatcagcagctagttgaattgaaatctggtgaatagctgtgaaaatgtgaaagacgaagaaaacaaagcagattgatgatgacaccttttggaatttaagttgaaaagaaagctagggcctaaattataggttggttatgtaaataatgggaaaataaataagtatatacagggggactaacttgtagaaacctcagagtgctacaatggaataattttccattctgcaattttcctcattctattatattttgttcttgttgcgattggttaaatgttgcttgctgttttttgatattattttgggaagtctttctatttgttatgcaatgttccgtgctgcatatgttggcactcaacgcatggattatgtgcaggaaaaggcactcaacttcaagtgtatcaccgtacc

SEQ ID NO: 47826 - DNA, 705 bp, Manihot esculenta
  Intron number 1 from transcript cassava4.1_013274m (locus cassava4.1_013274m.g) derived from phytozome v7.0 (chr-ID scaffold08265; pos 3722544 to 3723248 reverse strand)
ctctggtgctctctccaagaacaagtgctccggtaagtttttcctctatttacgttttggtcgatgaatcttatgtttgtccttgggtgtgctggatctttttttattttatgtgttttgtatttttggaaatgatgaatgttgcttttctcctgcgtatcattgacagtgttacttgtgggcgttttagaatttcattgttgaaacttgcttttgttgggtttatctgcatttttgtggagaaaaatgtttttcgtcggatctggattttcttcaactaatttccttttcccccttctgttacaaccaatgcaatataaatatcttaaagtcactggtttgcacgttatgtaattcgggtagcttgtgatgacaatgccccaagaccaactacatttggtagtttgcccatgtttactcttatatctacctttccttcttgatgaatcttcaattttttatttaagtttatgtacaatgacaaatcacttgtctgaaaatatttcctacttattatgcgtggtcatcgtcccaacttcaaactggacatgggtttcagtaagaatgacagtttatggttattttgaagctcagtatatctttgttattccaaatggacatgtgtggtaatttaggtataggtactgactttgcctttatttgaatatactgcagaggaatcagagactgacagtgaagaatctg

SEQ ID NO: 47827 - DNA, 833 bp, Manihot esculenta
  Intron number 1 from transcript cassava4.1_027417m (locus cassava4.1_027417m.g) derived from phytozome v7.0 (chr-ID scaffold09150; pos 491996 to 492828)
gcacagattttgtagaggtgaggactgagtttcctttgaattatctgataagacaaaagtgattcacaaatgatattagaatattacttgcctccatatttcacacactctgttcttgaaattgtagtttcatctcattttacaaatataaagctcatggatgagcattgtaggaatggctatatgttttattttccgcagcatataagtgaattaattgcatgcttcgccccataattgagtgattgaagggtgtggttcaatctcacatgaaattggcctaaaaacattctatatattaaaagtagttgtgttggatgtgcaaggacatgacttgccttctctagtgtccaatgcactgagcattcctgatatttagccacaagatatgttctatttacactgtacaaggatgggaaagtttttttctggttaaaaattcaaagtccatccattgtcttttttgttcaaaaattcttctgtataccacatatgcttgggtgttggaatttcactgctttcttctctcatccttgcagaatatataaacaacacacacatgcacacgtgcacacacagaggaatgggaagaagacatacgagaaagtgaaccttcctagatagtaaaaggcatttgaactataaaacactatcaaattgtgctgaatattggccaagtcacctctttcaaatgtgtatatgcagaacacctcaaagaatctaaaaatatggtatattcaataaacactgaggaaactatcagcgtatgaaaatcttagacttctagtttgtttcaccaaccaaatctgctaactcaaaaggttgacttccag

SEQ ID NO: 47828 - DNA, 978 bp, Manihot esculenta
  Intron number 2 from transcript cassava4.1_002379m (locus cassava4.1_002379m.g) derived from phytozome v7.0 (chr-ID scaffold10563; pos 993626 to 994603)
ttttcttcaatcgggtaatctctcactctaactaatatctttttttttttctctctctctctcttttcatatatgaaaaaaaagtgaatcttacgtagaccagtttatataataaatgcaaagaaactaatagatggagccacttcattttcatgtggatgtgatcatttatttatatattaacttcaccataaatcaaatttaaatttactttttccatgtgaaaaaataatgatattaaaatttaagaaaaaagcctattcttttgttagattttttttatattttctatatcactcaatcaaaatgattaactttttaaataaaaaaaacttaacaattaaatttttttcccttctttggagtttatccagagtttatttgattaaggttaaatgtgaaccgaagactttttccattttctcatacattattaataatttaaaaattttacataaaaatttcaaatatatttggtatttgtttccaaggttgataataacatctaaaaagtttgcatttaatttaagttgaatatttttacaacaatgaatttaatagttcttaaataatcaaatagaattaaaaaaaattaaataataaataatcatggtataaatatttaatataaccaccattaaactcatttttatttataataagtcaccctttaaggaaaataaaaatgaaaattttaaaaattttcagacagggaaaactctaatatgaatttggataatgcatattctctatgtatgttaattttataactattctaaaaaaatacaaataaaactcattaatcacctctcttgtccagtaactcgataatgtgcctgctgtctaacttttgtgctccatacttgttaagttgaacaggaaaaatttatgtttttattagtaaaaatatttaaaatactttattatttttaaaatatatattactttatttaataatatctttttaggtggacgaaa

SEQ ID NO: 47829 - DNA, 501 bp, Manihot esculenta
  Intron number 1 from transcript cassava4.1_009689m (locus cassava4.1_009689m.g) derived from phytozome v7.0 (chr-ID scaffold05432; pos 423589 to 424089 reverse strand)
ggagatctggctgcattatttctctaggaatacaggtatcaagattcagattcttacttataatccatcttgtcatctcaaacagttctagttctgattagaattttatacttctctcagtgaaattcaaaactctcagtacttgattagttagttggcatttgtctttaattggagctgctggagagttctttacttcatttcaacagacattgtgattaaagtttgtttctttgcggctatgtcctattgggggttgaactttttggcgcagctcatttaaatctactaattgactgctaagtgtcccttttaggggattagatggctatgttttcaattgttgcaccgttattcttgttgctacttgtttcaagtggatgatgttacttgaatgttggtggagacataaccttctttttccatgtttgatttaatgttcttgtccgtattgattatagttgacctgcttatgtatttcttttctttgatccaggttcc

SEQ ID NO: 47830 - DNA, 624 bp, Manihot esculenta
  Intron number 1 from transcript cassava4.1_008511m (locus cassava4.1_008511m.g) derived from phytozome v7.0 (chr-ID scaffold02264; pos 482754 to 483377)
cactctgattcaaggagctggtgcaagaggagcaggtacttgctagtttacatcattgctctcttacttttgtcattttctctgcttttacagattgcttcatctagctgggattagtgctcttctttttttatctctgaaaaataagcaccccgtcttttcttgctgtggatttgattgtaaattgacagattacattgtgtttacttgctaatggacttgcttctggtttatgggttcttagtttagatttgtttctttttttctctctgttattgccttttgaaaggaatttatttttctacaaaaaaaaaaaaaaaaagaaagaggatgtctcaatctgcagagacatcaaatactataaggcactgtgttttctttgttattcccttttcatccaatcattttggctggccgacgttagctcattcatatgggagaaacaatttgttctattctctattgttgttcataccctttgatttattttaaaaaatttacactttgtttagtaaatgctgatgccagttgtcacaagacatgagatatttgattattttattggattaaagtttacctttaatcttgtcctaattaagtttttcaatctcacagtctgtttgg

SEQ ID NO: 47831 - DNA, 524 bp, Manihot esculenta
  Intron number 2 from transcript cassava4.1_008669m (locus cassava4.1_008669m.g) derived from phytozome v7.0 (chr-ID scaffold04043; pos 1431645 to 1432168 reverse strand)
cttgatattttccaactcaaaggtgtcagagaaaggtatctatcttattttgttcttcaaattttgtaatttctttgtctaagaaagttgattggagggataattgttgtgcagaattagagaaagtgaaactatagttcatgctatgtcacttgaacctttataacttcttattcctgtttataagagtgaggattatgtaacagttttttgcactctggcatgttcagatgttaatgatgaattttgcatttttacgtgaatgatttgagttactgatgccagaaaaatgtgcacactttagaatcctggtgactgtctttttctttagtttatagattctggttgacattgtcttgggtgttcttgcagatggcatgtgattgtgattagtgattatatgtgtaaacataataggtttcatgtttgttattagctcattggttcttacttgtataaacatgatgcatttgttatttattatgccagatcttgagtgtatcttcactgttatttgtgatctc

SEQ ID NO: 47832 - DNA, 636 bp, Manihot esculenta
  Intron number 1 from transcript cassava4.1_016769m (locus cassava4.1_016769m.g) derived from phytozome v7.0 (chr-ID scaffold04651; pos 88002 to 88637 reverse strand)
tctgaggaagagaaacgcaattctcgagctgaaaggtatctaagatatttttggtgttttatacgatatttgaggttaggatttcattttttaggtttcttcatgatataatcaacgtaatttgcctcatacacatatatatatatataactattaatgcatcataattctagtagctctgcaatggggttttcttgttgttcattgaatgatatcttctgcgtcaggtagtaggtaatactattgacggaattacttcttgatatttgtatatgttacttaagctgtaaattttttttgctttgttcataaaattttgtaggcatttactcagagctgtttagggcagcggttatggaaatggtttgactcatacttctggttttaggttctgctaatcactaaccagattcttgaaagctaggcacatgaatctttactgcttcttgagcaatgtgtatatatgggtgcgtgtttgactgtatgtgtgtgtgtgtataattatttttcaagtatacctcatctcacatttcataaagaacctgaatttgttttccattaattggctaaatttgttgtatgcaaaacttatgtgctgcaggtttggcactggggttgcattaaagacatcagagg

SEQ ID NO: 47833 - DNA, 1002 bp, Manihot esculenta
  Intron number 1 from transcript cassava4.1_020226m (locus cassava4.1_020226m.g) derived from phytozome v7.0 (chr-ID scaffold05787; pos 8127 to 9128)
ggtttgaaggtaaggctactaccactggcccttctttatctactaggctaaatctgtaatgtacaatctatcatctctgtctatttgatcttgaattgcttattatttgtggtttagatctgattttgtgattcattaaattgtgctttagaatcggttcgaatccgttttatctcaagtttatgcctgatgggtatgtccttgtgtacgatttaaatcttctgtcatgctgaagaaaactggggtttgttttgtttaattttctcagaatctgtttttattctgaattttgattaatattctatactggatctaatcattatgtattcatgattttccatcttttcttttgtattcttgactcatccatctttattcagtaattctattggttccttaatggtacaggctggaaataccacttgagacccaggaactcagtaggagttcgacttttcaatctttttaaatacagtttcttgttgataggttatttgtctccgaaatttagtgaagattagaaactcatataagatgttcatgaacttcatactttgacaccctcccagtcctttctttctttctttttctttttctttttttggtatgtttgggtctttcctaatcctaagcagtcctctctattgcttgacctacatgtagttattacatgattttggtgtgaatagttatacatgcatttgtagtgttgaatagcaaaaaaaaaggggcatcgatctgttgaaatataaagctttttttttttggtctttttcccatcattcttctctagttctatctattttctgctattgggttttaacttgatgacctgatttctcttcatagtgagaatagttgggaatttgcccaaaccattgaaattgggaaaggttgtgtgtacttttatgtggaagttggttctaacaaaatgccttaagttaatccttgtgtattgggttaataattgaattgatgttctgcaggaggaatttgaggagt

SEQ ID NO: 47834 - DNA, 461 bp, Manihot esculenta
  Intron number 1 from transcript cassava4.1_003980m (locus cassava4.1_003980m.g) derived from phytozome v7.0 (chr-ID scaffold03693; pos 235452 to 235912 reverse strand)
ccgctgtcgtaagcttctttctctcattcttacgatggaagatttcgatatagagtcgattccgaatataaattagttttgacgtaatatttgattagcgcaaaacaaactttttcacgtaaagaatcatggtcagttgaaagaaaaataatcgagttcaatctgtttgaagctcgaatatgtattgtgaaagagaactatgtatatgagtggcatatatgcttaaattgcgcaaaatgattgctaggaagggagtttaatacattaatcaatttacacatcatctgaactttttgaattaatctcgattttcttgtattaaataaattccttttcttcctccatttgattgtgacttattttttttttttttctcatagatgactgtttctatattaattgttgcgcatgtgtgtttctgttcagcaagcaagagtctcctggatcacgtccgagaaata

SEQ ID NO: 47835 - DNA, 766 bp, Manihot esculenta
  Intron number 2 from transcript cassava4.1_018989m (locus cassava4.1_018989m.g) derived from phytozome v7.0 (chr-ID scaffold07330; pos 67510 to 68275 reverse strand)
aatctaaggattgttggcttattatctctggcaaggtttgatcttctctaaatcattagagttttcatttttgggtttatttttttcgttgttgggcataagatttgaagatcagaaatcgactattgtgattgaattgggttttgaattctttttgtttgtctgcataatggagaaggaaattatggttcgtttggatgattctttggttttggttttgactggttttgtgcttcaagtgttgagagcttagcttaggtaggaaaacacaaaaactgataatagcaggcaattctaaaaagtttgggagatcaaaaatgtatacaggactacctacattgtaaggaaaaatcagatctcagtttcaaatgaatttctttagtttggatagcaagaacttggattgtaataatcttcttgaaattcatcatgcataaattgtgaaagggtaaaaaaggtatagatcttgcacttgcaaaaggaggttgatgatgaatatgacaaattgggttttcaaatcaagaagctggataatccattgttattaaacactttgttatctatgttatagttttcatttgacatgttagagaaaatagatttatgttgcatgcacatacactcattactcttcaacaccaaagcatagcctacctttcctgagtactttttcttttcctttttcttacacaagcaatcgcaccgtatctgtcaaatgagatgttgtcttgatacgtcgaaacttttttgcttcaatttcaggtct

SEQ ID NO: 47836 - DNA, 415 bp, Manihot esculenta
  Intron number 1 from transcript cassava4.1_008239m (locus cassava4.1_008239m.g) derived from phytozome v7.0 (chr-ID scaffold08542; pos 439247 to 439661 reverse strand)
cttcttctggttagttactgtgttattttcttatttttggcgatatcccatcttgttcttgttgcctgcatgaagttttgcagtatcgacatgtcaattcaagccttttgaagctttgatttatatgattcaccattaatttatggcttccttttcattttctatttccccttttgtttttatattgtttatctttttggggtttgggatggaatggcttattatatatgtagcccataatagattaaaaagataaagtacaatcaagggttcagaaagttttgggaactgaacataccagtacaactcaactcaaggcttacatgtttcatttcttatcaattattagactttgcactttgttttctttatgggtttatcttggattctttacttttcttggtctacaggttca

SEQ ID NO: 47837 - DNA, 841 bp, Manihot esculenta
  Intron number 1 from transcript cassava4.1_013704m (locus cassava4.1_013704m.g) derived from phytozome v7.0 (chr-ID scaffold02892; pos 366408 to 367248)
gcgtcttcatttatctctgcagttgcaagaaggtatgagtcaattttaaacttcatcatctcatgtttctttttcttctcctcttgtttttgcttttatttacatcgttgatggtgattgtggcggctttacctgcatgtccgtccaccgccggaggtgatgattgttttctgatgaatcgattgtttgcgagtttattattgagtcgatgatcttttgtgttctttcaatctgttacttgattactaggtttagttattagatcattgcttttactattgctttctagttactctgtttctttaaacaagggatcggagaattctgggaaaaagaaagggaaagaaaaatgaaggataagttttttttagggcaaattacataaaacctcctgatctttaaactaagtaacattaaagtccactgtcactgtttttttgctaaagtctactgtcacctttaaggatccgttttccggttgttactgctaatatgttatataaagacaattaattttttttttctttcaaatatatataaaattttaattattttacactccaccgacgcctttgaaatttaatttaattaaatgttcgtaccgttaaattaaattaatcactcttatttgttgcattattgtaatttcaatggcaaccaagttattggatgatattgttttcttttttggttgcatttcaaatgtctataaaacgaaaattaacttttgaaattatattaaatatataataattgaattaataccactaactcatatatttgtacattttggttcgttgatgcaggcttgagggaaaagtagccctaatcacaggcggcg

SEQ ID NO: 47838 - DNA, 405 bp, Manihot esculenta
  Intron number 1 from transcript cassava4.1_004196m (locus cassava4.1_004196m.g) derived from phytozome v7.0 (chr-ID scaffold11689; pos 131329 to 131733 reverse strand)
cttactcaacagcctatcaccactctctccttaaggtaccttctttctttcttttcttctttttcgttttgaattattcccttttcttctcccccacataacaaagaatcctttcagaataacatgtaatatcaaaaggatatgatttgagttttgaaactcaaattttttacagctcgttgattctttttccttctttttcatggtttcttgggtaactcaaggttatcctatataggctaaaggcaagatccaagaggcaaaaaccatgtaactaaaggcacttgccttctattatagatgtgaaaacatttccagatttttaaaacttttttactcaagattctgatattttttcatggctttgtagctctggaaccacagaagggagacagaagtttgttc

SEQ ID NO: 47839 - DNA, 435 bp, Manihot esculenta
  Intron number 2 from transcript cassava4.1_011034m (locus cassava4.1_011034m.g) derived from phytozome v7.0 (chr-ID scaffold04043; pos 629100 to 629534 reverse strand)
tttcttcctctcataagtaaagctttgaatttaagtagcttatgtatttcaatctttcttcttattcacttagtgaaggaatggaaaagaaaatgtgggaaatttataaacctcctctattgcgtataccgttatttattttaaagcttttctctttttgttcctttgttttccttggataggaaacgtagtgcacatggctgtatatattttcaaatttacttaaggtgctaaatttaacataaatgactttcactcttgattaaatctttagctgagggtgtatgttctggagttttactattgtgtatatttgcagaatatgtgaattttattgttattgttttctgttggaataaacttatgtacggagacctgtgaacttaactgtctgttataggttgcggattttggattgttatacggatcccctcg

SEQ ID NO: 47840 - DNA, 453 bp, Manihot esculenta
  Intron number 1 from transcript cassava4.1_032925m (locus cassava4.1_032925m.g) derived from phytozome v7.0 (chr-ID scaffold01441; pos 152341 to 152793)
gcggaaaccaatctccgatccggttatcctatccagtgagtttcctttctttttgggcttattttaagctccgtttgggtgctgagtaagtgcacgaaaagagaaacagaaacagaaaaattgtgctcttcattttgactgcttgatagctgaggaaaggaaattgtccagctattgtttataattaagatactttgctactaaataaggactttttactgttgaagttggtttctgttagtaacaaacacaggttgcatgtaaatatgcccttttagtagtgtcaaacgaagtctagaagtgaatttgttaggaaacaattacattttgagattgaattattatatttttccttataattgaataatggaaccttggtttcgttattcatgagattgaatatgtgatttacttgcagggcttacgctagtcacatcacgacagagttgtcat

SEQ ID NO: 47841 - DNA, 625 bp, Manihot esculenta
  Intron number 1 from transcript cassava4.1_024505m (locus cassava4.1_024505m.g) derived from phytozome v7.0 (chr-ID scaffold06754; pos 320902 to 321526 reverse strand)
atcatttctggtactattcttatactattattatctctacattattatttttttaattgtttatatcatcccattaattcagattcacatttttttcaatagaaatgcataaccgttactaaatcaaatttatataaaagtatatattttttttaaaacgggattgagaatagaaaaaatagaatctaagatttctaagatttattcagatacacttaccattatattaggtctgtcattgcacataaaaatatattgtaaataaataagattagaaaattttaccttattctaatataattagaattataatagaattattttatttgtgacatgaggggacgggttggaaccatattagcaacttatctagaaaatagggataagattgcatgaatcaatccttatgctaaagtcttaaattgaaactttttatttctaattttttggactagaagtttttttgtttttttttaagctcttcgcaaggtagggcacaaagggaaggggacgagactcaaatccgaaactccaaaatcaagcgctaatatcaaattgagtttcctattaattatttaattctaacaagggttaatttggtggtctagtgaaacagttcacacct

SEQ ID NO: 47842 - DNA, 540 bp, Manihot esculenta
  Intron number 1 from transcript cassava4.1_029040m (locus cassava4.1_029040m.g) derived from phytozome v7.0 (chr-ID scaffold02618; pos 448463 to 449002)
aaagagtagaggtaatgccattcttcttttattgattttctttgctttgttattttcatggtttttgaggtttgtttctattatttgaatatgtgtgtgtgtttttttcttcttttctttacccttttcaaaaaattttttgttagttttgttttgatttcattttgtttcttatttcgatttactcttgtttttttcaattgaattgtggttccatgttgagtttctaaactgattggagctgcattatggtccctatttgtgtatttcattattattgtccatttatatctcttatatgttctatccagcatgcatgcagggcttgattagagcttctctgtttacttgggatatcattacatcaagttctgcaatgatctttttgttttttttttctaatttttttttcattcattatccctttaatggatcagtagtttgtttcaggctaattttttcaattgcaataaaacttttattattgttaaaatttgtaactttgtaggtaaggagtctggaagaagggtttaaaggttc

SEQ ID NO: 47843 - DNA, 697 bp, Manihot esculenta
  Intron number 2 from transcript cassava4.1_016650m (locus cassava4.1_016650m.g) derived from phytozome v7.0 (chr-ID scaffold06659; pos 287437 to 288133 reverse strand)
ggttttcagatccagcagtttgtaaggaattgaaggtttgattgaatgctaatttcttattatttcttctatgtgaccaaatgcaattatatatgggcccagccaacagccacgggccggttccaatccaatcttgggttaaaactgctggtctagaggaatttcagttcgaaaatggttacagttcaaaacaggtctgatttggttctaccggttcctactttaacagaagaacagatcctagagatctagggttattacccaacttactcctgtatctggttaaattttgactctggttcaaattttttaaaactacaatagtatttatttatgtatagtaaaaaaataaaaagaaagaaatcaactaatataacttttttctaaagaatggaataacaaaaattctaaatcaagccggttccgaaccaaaatgtggtcacgcctaaccatatcacatacgaaggaagcatatatattgttctattttaaagaaacaaaataacaatgtacagaaaataatatatatcaaatctgttaattgtacaaattcctatgattacgtaattaattaggcaattgattccaacatgaaccatactgtggtcagacctaactatatcacatatgatggagcatatctattgttcttctttttcttgtatgctgatgcaattaaattagtttctttccagtt

SEQ ID NO: 47844 - DNA, 452 bp, Manihot esculenta
  Intron number 1 from transcript cassava4.1_016650m (locus cassava4.1_016650m.g) derived from phytozome v7.0 (chr-ID scaffold06659; pos 288256 to 288707 reverse strand)
catcccctgtattatttgcagcaactgatccacaggttccctctcttctaccttccaaatcccctccatctgcttgatatgttagccgatgaaatttgattctgtgcttctttttctttcttcttttctttttttcccagaaaatttactatttagtccaacgggagaaactaaccagtttttccaaatcatagaactaaaatatttaaggatcaaaattaatgaatatagaaacacttttgataaattttgcaaaattcagagtccaattaataaatttttacgtaatataaggattagatagtaatttttcttattttttcatttcagctctcttttgttagcagtatcaacattttcttcattgaattacatgaactgcaagaaatattcccattttatttttctgggtttcaggcagaactaattgatccagcagtgaaaggaacact

SEQ ID NO: 47845 - DNA, 672 bp, Manihot esculenta
  Intron number 2 from transcript cassava4.1_005286m (locus cassava4.1_005289m.g) derived from phytozome v7.0 (chr-ID scaffold04083; pos 383571 to 384242)
gcgtgagtatattttgataatttctcattgtctgctctcttctatttgatggtgcttagattctaaatccaatcttgaattcttaaagtaagtggtgtgtgaatctatctgggtatgtgttagttaaggtttttgcatttgttaatggttttttaaggatacgcatcttgttttagttgaaagttgccttttgagctctctttatggttggtatcccttttcaaaaggttaaatgtctttccgtagaaataaaccctactgtttgaagattctggtagtatttcaaaaggaaaaagaataaaggtgacagaggagaacaaaagcaatccaactgcttttagttaattaacctacttaattgtaagaataattaaaattttattaattttgtttttgaagttcgttgtttggagcagaggatctagttttctgtcggtgataatttcaactatatgcttaatttgttttttcttatgaatagttttctttttaaatatgttgtcttttttcccacggcgcaaatagaactacacgaatttctgatcaacttaacaaactgtgaattagtggtctgtgtgagtatgcattttgttgaacttgagaactttcagaacattaaaaattgtatacgatgcagctgaggctatcctgcttggtttccaacactacctt

SEQ ID NO: 47846 - DNA, 391 bp, Manihot esculenta
  Intron number 1 from transcript cassava4.1_029876m (locus cassava4.1_029876m.g) derived from phytozome v7.0 (chr-ID scaffold11495; pos 338281 to 338671)
ttatccctgagattcgcagtagccgctccgacaaggtattaagcaagccggctagtttggtcgtctcttaattaatttattttttctctctctgtacatggattcaaaaatttgtgtggtcttcgttcatttaagtagataatgtcatacataaactcacagcctcatttatttttcatgtggctgcttctagcaacaacaacttggaggtgtgggactcggttgttccctagctatagctattaagctttaatttcccttctacacacattctttgaattgtacttaattcattgatttatcttttataatcatttaattaaaatgccacttgttactgaaatatttcttgaacactgcaggtctcggcttcaaaggtgttgcaggagac

SEQ ID NO: 47847 - DNA, 263 bp, Manihot esculenta
  Intron number 1 from transcript cassava4.1_008964m (locus cassava4.1_008964m.g) derived from phytozome v7.0 (chr-ID scaffold02892; pos 309769 to 310031 reverse strand)
ggtactaagctatccacatgctttttcgtttcaatctgaagttctttccaatagtattgacctcattgatttgtgtgatgatggtttgaacgctgataatatgttgagtaattttttggatagtaatttgattagtttgctttcagctagtttcaacagatgaatttcttgtcttcaataaatcaatcaccatcaacgagtttcttttttcttttcccttgcaagcagataaagcagagagactaattgctggtgctgctgcc

SEQ ID NO: 47848 - DNA, 682 bp, Manihot esculenta
  Intron number 2 from transcript cassava4.1_016999m (locus cassava4.1_016999m.g) derived from phytozome v7.0 (chr-ID scaffold12439; pos 221481 to 222162)
gctttaagtgctttcactgcaaaggcactttaaaggtactaacaatcttaatctttgtcttagcttaattttctgctttcttgttattgtaatggtgaacatagtccatatcaacttccacattcttcttcttcagtttaaatagttaagtagttatatatttatttatataattgtttagttatatattatttaaatataattatttttagtgctattatttcgatataacttttttattatataaatataaaataaataatagatggggtttaacaaaataaaacagtttgaattgaataaagagtaagggaaatatcctacttctcttctttttctggggtcatttacattggtgatatggttggttgttcagcaagctactagaacctagtacgctagtgaaagtgattcatgattggatctgatttcttttcctctttaatttctcataaaccattgagagatcaacttcaggaagagttgtttataattgataaatggctttatcaacattagagttcatagcatttttccaagtttttggaaccttttttttgttataaggaactgttgatattatatactcagattctaacggatgatttatataatgtgcgtccgttttttagcttattagattctgtgaatcatattttttcagttaagcaattattcctca

SEQ ID NO: 47849 - DNA, 839 bp, Manihot esculenta
  Intron number 2 from transcript cassava4.1_010120m (locus cassava4.1_010120m.g) derived from phytozome v7.0 (chr-ID scaffold07933; pos 196253 to 197091 reverse strand)
gaaaaggtacgaagtgctgaaccatggtgtggtttttcgtttgcactatttcacacataattcattcttcagaaaatggaaagtagggcttgcaattttatgttagttgttgaattggttagggaggaccgtaaatatattaaatcttcttacgaaggtttttgttaataaattggcatcacagtttttatctttgtttcaatttaatgatactttaatgctctaaacattgacattgagttgggaaattgaagtggaggaagagtttagggcatttaggtctcaacaattggatcttgaatagggtcatcgtggttgaattggaacaatataatttaattagttttaaataaaaccttagaattcaaattttgaattgagaaatataataccataagtccataatatagttgactactattcttctatttatattagtcaggacaaatgctaatattagactgaaaagtactcctaattaaaatactttactaaattggaatcctaaataaaaaggaaaaactgaaagagaaaaagaagagaaaatcctaatttaatttgtatgaccttgtatcagaagtgatagctggagtttggttaaatattgtgtttgagattcaatttaattcccaaattttttgctatcagttactttactttttaccatcagtttgttctagtttctggctgcaatctggaccattgccatttctccaattttctggctgcaatttggatcattgccatgtatctgttgctgtctctgtatatctatgttgatgcattgtgtttcatctgctgtagtggaggaattgaagactaagaaagtttttgtacaa

SEQ ID NO: 47850 - DNA, 880 bp, Manihot esculenta
  Intron number 1 from transcript cassava4.1_019690m (locus cassava4.1_019690m.g) derived from phytozome v7.0 (chr-ID scaffold08000; pos 23744 to 24623 reverse strand)
gattggagaagaagaaaaagagaaacgaagatcaggttcgacttctaatgcttcttcgttcaccatcctagagcacaaatgtgaagattttatctctgtttctagtttaacatctgctgcattgtacttctccttttacttcctcaaaaccctatatctttccgattcatctcctgtttgttttaccggaaaatactttgctagcgcggtcacgcctaccttttttttaaatttttttttaatttgagttataaacagtttactgattctaatcattacgaggaaaatgtgaaattaagcagtcacaggctttatctaggctgactcgttgtttgactcagttgggttagaaattataaaatttcctcctttgataggtatagtcaagaagccctttaattgagtcattgctgaagcttttcttgtggccgctcattttaatttcttgtattttgaagcatggattagtttcaagtgattaatgggtaccagcttatctatctgtttactgagttgatctcgttagcttgtcgggacccgacccgttatttattattgtttaatccattcccaaatcaccgccttgtgatttgatgctagagtatgcttctgctcaagcaactggaaaagttattagcacttcatcagaaaatttagttttcatggtttggtaggactttactgaagatttaattgtatacatatcttgagtaatcattttcagctgtattgttgatttattagcttggctagaatgccagttcaaggttggattttgattttttttttttttcttatttttagctgatatcaaatatattatacacagtttaacgtttgacacttgcagagaactcagtggtgaggaagctaatacaga

SEQ ID NO: 47851 - DNA, 546 bp, Manihot esculenta
  Intron number 2 from transcript cassava4.1_014306m (locus cassava4.1_014306m.g) derived from phytozome v7.0 (chr-ID scaffold06871; pos 1020183 to 1020728 reverse strand)
gtgttaaggccccagcgttggcaaagaagaaacctgtaagttatatatctctcttagataacacacattctgattatcaaatttatgtgtaaatgttgctttgtttaaacacatcccagcatgacccaatttgtaaattccttaatcccattcacataattggttagatagtgtactcttctttttaattcctccattgattttttgttttaacctttctttggtgcttaatcggtttattttctttattggagatcctttttggtttccatttttatcttggcagagcagataaattttgctttaattgtttcctctatttcagcactagcttttctatttgcacccttgaaaagaataaaacaaactcaacgaagctttcagattttttctaacttacactagttgttccattttattgtgtaaattcagtcttctagtcaatttctaggttgatactttgttattctgttggtacaactgatctaattctttcacttgataattgcaggaaaaggttgtcaacccattgtttgagaaacggcc

SEQ ID NO: 47852 - DNA, 710 bp, Manihot esculenta
  Intron number 1 from transcript cassava4.1_014306m (locus cassava4.1_014306m.g) derived from phytozome v7.0 (chr-ID scaffold06871; pos 1020707 to 1021416 reverse strand)
agctagggttttctgagattctcttcacccacgtaacttgttctattggcttattgcatatacatatcatactcaatgtagtataatttagctgacgtttggtgtaaaatgattctactttttttcccatctggtaaaccgttgaatatttatgatatttgaagttggtagctggatctttttactcttctgggtagttctgtgtgcgaaccatttttgaaaaaaataagaatgatgattttttgctgcttagttccatatggaattctgatgctatcttgtaattatttggtttaaaaaacttgcttgaggagctgaaatttcatgttagtacataccattttattaagatagaaggattagactattttgtgggaatagtgattgtctgtttatatgcctcttggagattctcagtgtgtattgtccattttgagaaggtgaatgtcgtaatagaatagttggatgtataaacactggaaatctggactcgaggctctagttattgatcactgactaaatagtcagaaaaatgtttatgatgattattttttttcttttttttttttgtctctttttgagtggtatgactgtatgggagttccatttcgattttttcattgctttatttttccttctattttgtttcatctcatagtatcatatttgttacaggctcccaaacgaggtgttaaggccccagcgttggc

SEQ ID NO: 47853 - DNA, 1010 bp, Manihot esculenta
  Intron number 1 from transcript cassava4.1_019463m (locus cassava4.1_019463m.g) derived from phytozome v7.0 (chr-ID scaffold04065; pos 358851 to 359860 reverse strand)
gctcaaagagaagataattgcagagtggccaaaaggttaatcatcttctcatctcctgtatggccttttgcatcttgaaatgttatgtttattgattacagttcatatctttacttcttgatttttgattcattgctgcaaaatctgattatttgtctgaaggttttgttcttgttctttaatctttgttgttgcatattagttgaggtgttgggcagaaaactttgattttaagtgtttctcatccttccttgcttatatatatagatatatatatatatatatatttccctctgccttgtatatcttttccttgtatcaaaatgcaacaatccttattatttccaaattactccataagttcattggtggttttcttatttgacttttttttccccgacatttaagcaattcattgaacccaattctagttctttggaaatgaaaatcctggaagaagatttagacaaaattgcatgctagaatagattgaacttggtgaggaagtgaatattgtgtttaaagcatttctgctttgtatctaaaataaatgttgatgtctaaaacaacgctactttgctgttactgttgttcattttgcgttgcccaagctctttatgctgaaagaggacgccctattctactgttccagtatataaaaccaatacagaatcagaatggtataatgctgtgttttgaactttgaattggagattgagctttctccaatattaatatatcagcatcattttgctttgttatatatgcagagcttgtatactgcattttgtacttactagtctgaaacttctgttggatggtgaaattggcttcagtgctcgtatctagtccccacacgtaacaagaaggaaaaaataacagaaggaagaaaaactgccttgcatcaagtcttgaatgctgcatagttcagtgattaaaaaactggctattggtttctgatcaatttacttctctaatgagttgccatttttctttagcagataaagaaa

SEQ ID NO: 47854 - DNA, 430 bp, Manihot esculenta
  Intron number 2 from transcript cassava4.1_015751m (locus cassava4.1_015751m.g) derived from phytozome v7.0 (chr-ID scaffold07301; pos 278036 to 278465)
tctacaggtatgaatttgcagggtatggttgtgcgtggtctataaatctacatcttggttttcctgttctatatcgtttcagatacttctcatattattcatccatttagctatgtcttctgtagtctggatgccgttatcttgttctggttggagttgggtttatttttgtgtttcattcaaactcccaaacatcgactctggctctgcctttgggtttgaattctgcgtctcctttgttgtttctgttgtcatattttcttttaagttaaagtttcatccctttcttcgtctttttcgtataatatatttctatgtttctgtagttgaggagggaaaaatagtcaatttaatttattaatgaaaatttctgacgagggtttgaaagaggggagatgataatcctggtgcttgaaatttatgcagaaat

SEQ ID NO: 47855 - DNA, 901 bp, Manihot esculenta
  Intron number 1 from transcript cassava4.1_018665m (locus cassava4.1_018665m.g) derived from phytozome v7.0 (chr-ID scaffold09150; pos 218098 to 218998)
caggtataaaccctctatttttctttcatcatctccctttgcttttcttctctactatgcctatcatgttttttaccggaaattctttccatctcaataaccgatcacgcaattttttttcgtggaattggaattttcttttccactgttcatttttcatcagtaagtgcgtaattgctgatatgatgttgttctatgttcacctcatgatctggggtgcgtaggattgtatactattttctgaatttttttcttatatgtttctcctcgtaatttaaagctcatatgaggataattggggtttggtggtaattaaggttatggtttaattgtatggacattatttgcttttcaattattctcttgtagtaatttcctttttattttgttcccctcttcgtttaagctgtcaaaagggtttgggtgcttaattttgggtgcattgtgctatatattcagcagattttgtagcatgtagtgtacaatgagaagctgagaagtttttgcttcacaatcacaggaattggagttgggagaattttctctttctttttgagttaagtagaattgcaatattatgctttagttgaaggatctgatattttggcttcatcggagctgcgtcttttattctgttgggtgacagttcatctgtttcctggttatttctacaatcctttaagctatgcatgttgttatctgatgttttctagtaatttaatggactactgttgcgttgtttggtagttttctttattaaaaattgggcttttctatttaagaactgtttatggaagaccatgtcaacctaaaagttcaagcttataggcaaatgctcaagaatgggctctaatatctctaatattattcctgtcaaattggttttatttgtcttctttag

SEQ ID NO: 47856 - DNA, 345 bp, Manihot esculenta
  Intron number 1 from transcript cassava4.1_000198m (locus cassava4.1_000198m.g) derived from phytozome v7.0 (chr-ID scaffold09274; pos 75697 to 76041 reverse strand)
aatctgtggcattgtgggtcaaggtaaacggtgtatattttttcacttttcatttcaatgaacagcttttcccttgagtaaatacatcatgtggatacacatacttccttgatttcacaatgactcatgtgcagcatatacaaattttctttttgagaattaactatgtgaatttctttgctttgtcgcactatccttttgacattattactcctttcattgtttattcatgagttgaacatttgcagccatgcattgaatatgtgctttcaatttggttttgacattagtacttttgtacttctatgatttatagtggagagggaagtggcaggcaggaattag

SEQ ID NO: 47857 - DNA, 860 bp, Manihot esculenta
  Intron number 1 from transcript cassava4.1_011816m (locus cassava4.1_011816m.g) derived from phytozome v7.0 (chr-ID scaffold09000; pos 363866 to 364725)
ggaaactcgtttctcgctggaaagtgggtgatcaggtattttccaactttcccaattcataagtaaatgatattttgatcaagctatttcggctgttatatctgttggtttgatcaatatattaattcttaattacatttataatgatgagaaaaattgctggcggttcttcaattgtttagttcttggtctgcagcaatcgattcaaaagtggaaaatattgaaaatctaccctttgttttgtttgagagtaggtttttcaagatttaagttcaacctatgcttgagagagtgttcgaattttcaaaatgaccttcgatttttaacccaccaaattggtgagttgagaggttttccagctgccttgaaaaatcttctcttcctcccaaaattgttaaggtttaagaatcactaaaagctttatattataaaactatactttataaaaaccttactttaccctactttctccccatttgtgtttggaagagaattatggttttttaagtaaggtccgatttcaacctactaagtcggtggattgagaagaaccttcaaatactttgaaaaatattatcttaaaaaatattctctttctcccaaataataaaaatgattaaggtttaaaaattatgaaaaaccttactctaactgccacaaacagagtgtgtgagagagtttttttattctctagtataaaaagattaaatattccagcttgaaagggtttaaggtttccatcttgttcatggagattaaaggcactgatatttcagttactttattaaacatgaaactattatgtagccatttgagtgcctctggaatgcaggtgtgtgctcttcttagtggaggaggct

SEQ ID NO: 47858 - DNA, 452 bp, Manihot esculenta
  Intron number 3 from transcript cassava4.1_008022m (locus cassava4.1_008022m.g) derived from phytozome v7.0 (chr-ID scaffold03241; pos 226997 to 227448)
tatatccacaatttagcttgaagaactcttctcaggttttggtttctaagattaccgttttataacagtagtttacactttataactgaaagaaaagaaaaaggaaatcgaagataaaaaggagtatttatccaactctgatttacttttggtctataacaaaatatagtttgtcttgatcgcacttttccagacaatagtattaatatcaaggagattctattttgattaggactgtgaccataacaatttagagatagcctctattagagatgatttttagtttaattgccccttagaagctactactagagatgcttgctgttgtatacagctctagcatgtgatggtatattgctacttcaatttttagtagtatttcaagtgaattctatttttcatatgggattatgaatttgtagatgaatcttgtttccctaaattttaggttt

SEQ ID NO: 47859 - DNA, 682 bp, Manihot esculenta
  Intron number 2 from transcript cassava4.1_011378m (locus cassava4.1_011378m.g) derived from phytozome v7.0 (chr-ID scaffold03264; pos 194319 to 195000)
agcttcgagggaggtgtttcttgtttttacataaggtaagaaagttgaatcaaattaattcctacttgttattcataatatgcttgttattcatatgatgctgtgtttcttaatatcagtaatatgctaaattgctaatagcacgctatcatgcgtttatatgctttagccttttaacaacaattagattttcactttatggttgcttttgaaacatttatcagtcagcctccccttttctatatattttcatacaattgacctacatctgatgtcataaaataggttttttttccctgtataactatgacaattatacttcttcccataattccttcaccctcatctcaatggaatttgccactagatccaatgcatttatttcttagctctgttggggtactgttattcctcaacagtgctttaccaattatctctaattctttggtgttaatcatatgtctgctttatgcagaagatgtcatatgcacttcttactcatccagtatttgtataatgaaacatgaaaactgaaactctgttctctttattgtttatgcttcttttattttgtggattttttaatgatggaagaactaacattgttttttctcttctgtgagatgtacttcctgtcatcatcatatgaaaatgcagatattgagcttgtttttatatataa

SEQ ID NO: 47860 - DNA, 1004 bp, Manihot esculenta
  Intron number 1 from transcript cassava4.1_011240m (locus cassava4.1_011240m.g) derived from phytozome v7.0 (chr-ID scaffold02895; pos 325333 to 326336)
gcttctcaggtacattacttggttaaatttgtgtattattttctatcttaatattagcttttagatttctcttgataagtatatgtgtgtgtgtatgagatactcttttctgtatctgcttatgtgtgtattttaggtgtttatttatcatgcatttggtgtagaacgttcttttaagaatacaaagtttgggctgtgttgatatttttacagaaaagaaaaattgatggatatttagattgataaagtggtcttctcagattactcatttgaagtgtaaaattattcattttgcagccttttctgggagaattttgttgcaattgaattgaaattttaattacatgtaaaaaatcgcatttttttaacgaataattgtgtcaagaatgttgatttgtttcatgtaccccttctctggagtcaaagatttcacaaaaattcaaatcaatcatttcttttttatcaaatttcttgtttagaatagaaaatttcatttcttttttaagttgcaaaaatttcatttataaagacaatgaaattattttgtaagaatgcatttggaatcttttcttgtgaaatgaatcatgaatcatgccaaatggagggttaataatactaatggtaataaaaattataataataaaactactatggataagtgaatattgagatgggttcatcagttcatctatattagctaaattgtagtgaatacatagatatttcaattgttatgcttatgatgaagggattgctttatatctggagagatggaaggttttgatgcatacctatttgtgaatgttgagggtacattggggaagaaaggtataagttaagcatctagattattgtgcagcttagtaatttttcattgttttgttgatgaacccaagaagtatttgcgacaattttgatatttgtttctttctttttgaggactttattaatcccttgatgccttgatgttcctgttttgcacgcatcaggtgtatccaattgct

SEQ ID NO: 47861 - DNA, 768 bp, Manihot esculenta
  Intron number 1 from transcript cassava4.1_008924m (locus cassava4.1_008924m.g) derived from phytozome v7.0 (chr-ID scaffold06598; pos 159846 to 160613)
cagggtctttcacaaggatttgaaccttcttcctagtgagtttgttcaattgtagctttccagattaagctcttgttcatttttatttgatgggtatatggtgaatcattgtataatatttgctggtcttttttcgcaattcagtcgcttgagtgatgtatttaccttgaaattgaactccaaatccatatcaattactgagcaatgcagattgattttctgtgctggtttataatgtttatggtttctattaaacattcttgtacccttaggtgggatgaatttaccattagttttaaagtgaatagtatgtttctaatggtcgtagcagggtagctattattatggttttgaatgttaaccattgcattagagagaaaatatcgttgaagattggaaatgccacatgagattctgatccttctgaattttataatgtgcatgcataggttaattcttggggtctgcatgtgtctgtgtatatttacggctttgtcttgtaaatgaatggactaaggatctctttgtatgggtagttattttatcttttcaacagttaatgacaaccaaataatttttttctcatgggatcttttcaattgattatttggaattattagttttattggaaggctgcagaagatttcatagctagtttttaccgttggatcattctaacagttaactagagaaattatgtttgaacttgaaataagtgtgaaatgatccactttgcattttgttgtgacggcagaaccattgtcagca

SEQ ID NO: 47862 - DNA, 842 bp, Manihot esculenta
  Intron number 1 from transcript cassava4.1_005608m (locus cassava4.1_005608m.g) derived from phytozome v7.0 (chr-ID scaffold05979; pos 183908 to 184749 reverse strand)
gccgttcttatatcaggtaactgtcaattccttctgaatcgtcagaaaatgtgggatttgaaggaaatgttgcggggcggatttttctgttggaattcttttgattggatctaatgttgcattctatgatgaaaatatttgtgggttttgggtttcgagaagcattgggttttgctcgaaattataactaacttgaagatagcaacatgagatctgaggttgacaatcgaattttggtgccatgaaagctgaggaatctaaagcataaggtttttgaaactactccattctaaatattttggccaaatattatactataattttttttaaaaaaatgacccttagctttctgattctagtaaagttatataatggaagataaatttatgtgagttcacaaggctgctgcttgctatatatttttttctcaaattgctataatttaattccctattagctgcaaaatcaacagtgtaaaatatgaaaataaagcctaagtaagcggcattagtagtgcatgaaaaaattattgagtttagctctcttaaaaatgtaaattttaagcagtgagtaggatgtgctggcacagaaagagagagagagagagagagattgatattactgattctcagattgttgtgtgtattcatccctggatttaatagtgtttctgatcctggtaatatataatatgtattaaagatcataccatttcgtccatttttgttcttgtactcctgcttgttgaattttacatttctgactttctgatgaaagttcactatcgtataaatgcaattgaaacaggtttagggatatcacgttttggaggaccaaggctg

SEQ ID NO: 47863 - DNA, 613 bp, Manihot esculenta
  Intron number 2 from transcript cassava4.1_022008m (locus cassava4.1_022008m.g) derived from phytozome v7.0 (chr-ID scaffold07238; pos 93203 to 93815 reverse strand)
tttttcgctcgggaccactacatcctcagcctcgagtgagtatttacgtattcatttaacagttcatttctatttgtctggagtctgcatagtgtccagactgaattgatattctttatatttgattgagcatttaatcaaccgttaattgtttttttttaaattttttatttatttatgtatagtaacatctgattcttaattgattgactgtctattgtaccattagggttgcatttcaaacgtgataatgaacttcattggtgcctcaaagatatttttgtttagttttctcacagtatcttctttatcattgttgtggcagacagactacccctaaatgttttccatgcaaagttactagttgatattcaaccagttctatttgtgtttaaacaggctttcattacttattgtttagattaacgaaattgatttatgtagttaatcttgtgaagtcggttgagatgttacggagttgtataatgacatgcatgcattgctttttgttccaagaatttagcatagcccactagccatttactacttcattattcttcttaccacattactgacatagaagggcagattttgtgtttgcagggatctccag

SEQ ID NO: 47864 - DNA, 549 bp, Manihot esculenta
  Intron number 1 from transcript cassava4.1_018936m (locus cassava4.1_018936m.g) derived from phytozome v7.0 (chr-ID scaffold03241; pos 662272 to 662820 reverse strand)
atctcgctgccgtactcgagtacctcgccgctgaggtttgttctttttagatctctcgagaatttcgtctccatattagctaacaatccttattgagagtttataatttgttttcaattccatatgtatgcgtggaatttatctattgccatctgttttttttcagagattttgccagatttattaggttgtagaagtttaatttgacttggtaggtttctttgaagatctcttatttgggtattattgaattttgagttgttttggtagtatggatccttttcaagctgtttacgcttttcccttttctgaaattagggtttgcaccgttttattataagattctaggtatgggtcttattctgttttttgtgcgcttctctttggtgaatttggattaagctttcgaagttgctgtttgcaatttctagtttgggatttttatttaattaaatgtgcttgtgcaattattattcatttatcgtttatgtacttttgtttgatggcttttgctctcattttttggttaggttcttgaattagctggaa

SEQ ID NO: 47865 - DNA, 448 bp, Manihot esculenta
  Intron number 1 from transcript cassava4.1_003643m (locus cassava4.1_003643m.g) derived from phytozome v7.0 (chr-ID scaffold03823; pos 179848 to 180295)
aaggtcagtttattttctccaacatctttgctctcttctttctccctctcttcctctgtgttctcctttacttctagtaaactcatttgctaattgtttctgctactcaaatatttctgaatatattttatatatgaattttgggagaaattattcttatcttatcttgtactgaatgctattaatgccctacagggttatccgaactaccctcataaatccagggctgtactttattacttattttcatctgcttccattaatctatccactgatatataagaactgcagctccaagatcttcttttgggcatatgatgctacatatgtttttctttcatgtatgttctttttatacagatttttcatgtttttgatcatttgcttcttattttgaattgaaatttgagcagtggttgctttggtgagtataaaaactgctttacat

SEQ ID NO: 47866 - DNA, 557 bp, Manihot esculenta
  Intron number 1 from transcript cassava4.1_002597m (locus cassava4.1_002597m.g) derived from phytozome v7.0 (chr-ID scaffold02895; pos 107583 to 108139)
cagtctcaaagcaaatctcctagaaacaaccccatgtaagcaataattttttttaatgagggttttgatattctcatttgtaaaaaggggaaaaaaaatgattttacatatttgtaattcataattctgattcacttattcagatgcaattaaatgatcttccatttctgcttaatgggttttagtttctttctagtggttgtatttatttttttaacactttattttctacgaaacttttgtgttcatttttctttgttttgaaagttgtgtaaaaaatatatatatttatatatttcttaagcttttgggttggattgtttacttttaaattctggaatttttgttaactggaggactaggttcaatgggtgtagattgggatccatgttggatctcttgctctttgttttattattatttgtattattgctgtttgatttaatgtacgtatttctgtttatattggtcttggattttgtgttgtgttttttcttttcattttttcttttattttttcagttctttgggattggttgtgttgaaggaaattatat

SEQ ID NO: 47867 - DNA, 565 bp, Manihot esculenta
  Intron number 1 from transcript cassava4.1_017276m (locus cassava4.1_017276m.g) derived from phytozome v7.0 (chr-ID scaffold02264; pos 643371 to 643935)
ttttccattttgctccggagctcttctaggtttctgtaagctctctctctctgtcttcaattccatggagttattttcctttttcattccttgtggatttgcttcttgttattgttgtagatccagatttagatctggatctgattgattgttgttttattatgagggatctgtttggtttatctcaaagtttcagcctctgatttatgctgatttcttcgtgttttatgtagatctgattcctctaggatatctttgtgtttgctttttatctatgtcatttatttttgaaaaaaaaaatgaatgagaatatgtaatgggaatgaaggggtagattgctgttgccttgtaaaggtagaagaagcgaaagtttgagttaattttatgccttttgccttttaatccttattcttcttacgaggaatggtagcaatccatttttagcattcatattctgtatattaccagatctcacttgcatcttcttcattttgattgtatatgggtatggcatgtttttccttgggatacttatggccttttaaatccagcctagatagaaaag

SEQ ID NO: 47868 - DNA, 551 bp, Manihot esculenta
  Intron number 3 from transcript cassava4.1_005416m (locus cassava4.1_005416m.g) derived from phytozome v7.0 (chr-ID scaffold04430; pos 68341 to 68891)
cacatcttcttcggtttcgcggactcatagttcaggtaaagacccaaactgggaagcttgacaaattttcatttgaattttgtcggtggcgatcttttgtcttagtaaaaaagaaacctttgttctttttttcccctctatcttaatatggatcttggattctagcagtttttgtctgttattgatctttgtttttattaagataaatagcacagtttgttattagttgtagagccaaatgaagcaagatacaaaaaaaagaaaaaaaggcaaagaaaaatctttcttccaaactacgagattcagtttgtgcaatcttgataaagaaaacaagtgattcaaaagcgataaaaagaaagagaagtgtgtttagtttagagaaagggaaccattattgactcttgctttttcatctaaagttctccataaagaaaagcctaactttcgatgactgtatgttcaagtgaccctttatgctttcttttttactccctctcttttgctttaccattgcagagttgccagataatcccactccaattacagaggaa

SEQ ID NO: 47869 - DNA, 800 bp, Manihot esculenta
  Intron number 2 from transcript cassava4.1_017918m (locus cassava4.1_017918m.g) derived from phytozome v7.0 (chr-ID scaffold02915; pos 137956 to 138755 reverse strand)
atgtatgtcttaatttctcccttcaagttcctgataaaacttttagcttcagttttgatgttttcagacagtccttttattctctgtgtgtgattagatatagaggcaggaactcaaattattgggacttattcaagatattttactctaaattggttaatcccttaaaaatttactttttaagttaacataaaacttataaaaatatcgattttaacagtatttttttaattaatttattttaattaaataaaatttaaagaaataaaaaatagagaaaaacagggaaattggtgttattttgattaaaatatttaaattcctatttttctaaaagggttcagttatttatgatatttttttcattttaatgatttatataggtaatacatagaaaattgtttattgggttgctgtaatgaaaattttgtagcatatccttgttttaatattgtatgctgtctgataagagaccacctaccccacttaatatttgtgttgcaaaataaaaatcaataattttgatggggcgggacccacctcctcatcaaaatcaattatagagttaatatgagtggttaagaattgaggccacattgaacatgatgcagctttgttgcatggtccattattgcactttcaactctagagtctgtcacatttaatcattagttcaactctttcttcactttaaaaggatagaaagtttctaaatttctgaaattattatttttattatgaagaaaaattttaactatgtatgaaatgcccataattgatttatttttctgcagattgtg

SEQ ID NO: 47870 - DNA, 887 bp, Manihot esculenta
  Intron number 2 from transcript cassava4.1_015742m (locus cassava4.1_015742m.g) derived from phytozome v7.0 (chr-ID scaffold01072; pos 108090 to 108976)
gatcctgaaagcaagaagtttgaaagaggtaagaatccatttttagaacatttttatattgttgcaccatttcctgtcctttttccacttaatttctggagtttagatctagtagatatatgattatcggttgatatgtcctagaaaacactccacaggtggattgttctcatttgcacatttacatattttaatctaaaactatgactttgatctgcagttctgtcatccccaaaattaccatattattaccctgcatcttctacggaagagctgtatttttaactagtaaggtggtggttgttgtgtttataccagatcctagtgttgttgcattttgtccggaactgctagtcgtattcatatcagaaggaattttgcttttgcatttgtattctgcactaaaaatttagaattagtaatggaatggttattgcatttctcatgctgatcttttggggagctataggagttgcctgtaggtagcttgtaaaattgtattgtctttatcatctttgggaatatgtgttgtacacatgattaaatttggttattggatatatatctggctttgtaactctcctcctcactcatttacatgcacatcctccttaatcttttatgaaaactcgtttgtatgataaaaatttattgaagattaatattttgtacaactgtcattgttattgtccaaacaatcattatcctactcttcttcagacaattgaaagagggggaagtgaaataagaaactaagacagcaaaatagatgtttaccaagccttgaaggtgaaaatgttgttttcttcatctttgtttcttatactgatgctatctatcttgaaacttcaggacctagagagttgactggtgctgttgatcttata

SEQ ID NO: 47871 - DNA, 655 bp, Manihot esculenta
  Intron number 1 from transcript cassava4.1_003668m (locus cassava4.1_003668m.g) derived from phytozome v7.0 (chr-ID scaffold03569; pos 359897 to 360551)
cccttccatctgcaaatatgtatgcacgctcactttagtgtatatttccagcttgctcatccatttgattgtattttaaggttttactgtttagactttcgttcgggtttatgagttactaagtttggctttgttagatgttatgagttatgcttctgttagaataattcttctctctctctggagaatttatatattgctgagttcagttttaagcgccacttcgttaagtttttggttacaatagttgtagctcatttgtttttgcagcaatagggtgttcaaattgaaagcgccctgtttcagtttttgattttaatctgcttgttcaaggtggatagtagtgggtgttagctaaattagatggagctttgtcggaatgttatatgtatattactattgttgttgttgtgttttttttttttctttttttttgagagggtgggggtggtgttaaatcagcatgatgtctgtttgcaagtgttaaaatccacctatcacaattatctgaatttttgttaaatctgcatgcttgatgttgtctgtttagagcgcatttctttttctttcaagtaatgtttcagttgttcacctagagcaaaattttggtttgatttgaagttatattttctaatcataacttgtttttataggt

SEQ ID NO: 47872 - DNA, 862 bp, Manihot esculenta
  Intron number 2 from transcript cassava4.1_003668m (locus cassava4.1_003668m.g) derived from phytozome v7.0 (chr-ID scaffold03569; pos 360601 to 361462)
tgctgcagattttttcataactggaagtcttgacggtatggtgtcttacaattattgcattatgtcttctgatcctgtcatattttgctctgcattttcttatccattatttatggttcttcacgtagttaggtccttgatagggtaacacgggaattttcattacatgcagctgtccagtatgtgctggctacattgcagttggtctgaacctattttagggattttggccaaaatatggttgcattccaggctacctattgatattagagatctcatctttgcttctgcatctctctaacttgtcatatgctaagaagtttcaagtattgggcaggttgcccgggtccctgaaagtggccactatgccatgttcttttacatgcattaattctctctatctctctatctctcaaatttttaaccttgttgtccgtataatttacctcatattatgtcagaaatagagtctatgtctgaaatcattctagctcatctcaactgctattttttcatgaggtagcaattagatctcgcatcctttgagatgatttttgcacctaaaccaaggatcattggtatttggtaatgttttttagttgaaatggctaacaattgacagcaagtgcaaccctgcatcagatttcatattttttgtcagaagaatgatgctttttaaggatatagacatgtagtatattgctctaaaaattggattactcttcttgcttctgcttgggcatatggtggagttcttaagattattatttttgttaatggcttgttttgattacctttaacatttaatcaccattaattttaatcaggacatttgaaattttggaagaaaaaagctgttggc

SEQ ID NO: 47873 - DNA, 423 bp, Manihot esculenta
  Intron number 3 from transcript cassava4.1_014839m (locus cassava4.1_014839m.g) derived from phytozome v7.0 (chr-ID scaffold03693; pos 177332 to 177754 reverse strand)
cagcctccatctaaggaggttcctcctcaggttgattttcatttcttgtattttactgtttcagtgaaaatgttgaaattcattttcttttagccaaactcctccattttataaggttttactacataagaaatggtttcttctttattgtcatgggtatttactaaagacttgctttggggttgttgaccttttatctgtctcaatgtttatgtaacaggctccaactttatggtttttgttttgatctgattgatttgcctattagatattcaaattgtatttgtgtgagcaatccttgttaatcagcagttaatcgggtatcatgaccatatacaggagaaattagtgtcttatctattgaaaatgaattttctttttccttcatgttgtcagatctacaaggctagagagttttggtac

SEQ ID NO: 47874 - DNA, 752 bp, Manihot esculenta
  Intron number 4 from transcript cassava4.1_015175m (locus cassava4.1_015175m.g) derived from phytozome v7.0 (chr-ID scaffold06779; pos 53034 to 53785 reverse strand)
ggtatgctccctctctctcttcccttcctttcctttgtatgaatgttgaccagtatgttgttgtagtagtatagtctcctgcctctctctttgagttatatgagcagaatttaagtgctttaactaactacttgttttcctttccctggctgcctacatgagtgttcatcctagaaactgttaagcctatgaactaattgatcattttggttatgatgtgtttgcaaatttggaggagaaggaaaagaggaagaattaactgaaatcataaagtgcgatttttttggggggagggggtgaaggtggaggttatggtgccactgaaattaagcttcattgaaatgatcctctgcattactctgattgccaatgtcaataatcttattatttatgtttaattattatgtattcagtaccttgatagcttttccttttcctaagaaaaagttataccgtgaggcaaagaaaaatttttgttcatctcagacagtttatctagttatagttactggagttgattttaatattttactttcaagaattttaagttgaaaggaacttgttggattaatatatctgagcccattaaggcgtgaaatattaaatgatagtactcattcgatagttgttatgtgattttcatgatctatactttatgcttgacttattgcttttttgcattcatctgaacttttgcaattcttgtgctcctcttaggcatttgaatacaagaggctgttgttggattataa

SEQ ID NO: 47875 - DNA, 781 bp, Manihot esculenta
  Intron number 1 from transcript cassava4.1_006448m (locus cassava4.1_003888m.g) derived from phytozome v7.0 (chr-ID scaffold03150; pos 246074 to 246854 reverse strand)
tctcaatcatgtacttattctcattacaatctctaaaatgttgtacttgtgagtgagttctgatgtttcaatgtttggttggtgactatgaggaaatagttagttatttgattggtaatgtgttgagattttcttctgtttcgctgctgatcattcgaaggtaggaaaaacaaaattggaatttcggatttctcacttgattttcaactgagatgactcttacaaccgagctagtccatttgttgctatctgtttggttctgagaagatgtagcttaaggagagaaaaagaaaatgtattcaattttgtgacccgcttgcttaattgaagaaaggaaagaaatggactccttgtgatttttgtttcattaaagtttaattttgcgatcaaattggaatctgctcctatccaattcgaatagatgttttaatggatatttgaactataaatttacccaaatcataagaagtcaaaggttttattcttctattgtttattctcctattccttgtatcaataaccaaatgtttttaaagtgatccagcttacaataacctttgtcatgttagtttaagacattgcttgacttaaatgtgttgatttaagatgtttcttaattatatacgtacacatttgtgcatatacacacgcttatattgtgtagatttttttcttgcctctacatttggttgcataactctattttgcctttcatcaattttgtaaagtgtgcggatttttttcagcccaacaatctgcaaaatttctagaagcttccaag

SEQ ID NO: 47876 - DNA, 428 bp, Manihot esculenta
  Intron number 3 from transcript cassava4.1_005710m (locus cassava4.1_005710m.g) derived from phytozome v7.0 (chr-ID scaffold03787; pos 42418 to 42845)
gaaggtacatacattatgtattcacttataacggtttcaataaggaattatgccttttcttgagtactggctgcatgtttctttctgtgttcagtgttactgaatcactgattaagagatgtatctcccgaaatattctagaaccttctttttgtgtcttggacttggtttcctgtgtgtccatggaaaaaagtaagtgtaattaactccataacttttcacaatcttatgactgattagaggccaggttttcttctttcctatgtttttttttctccatccgtttatttatctattctgttagaaattgcttgccaattatgtggggatgtgtagttcaggatactgtttgatttagagtttgatttctaactaaatagattttgtttataggggcttgaactcataccatcagagaacttcacttc

SEQ ID NO: 47877 - DNA, 910 bp, Manihot esculenta
  Intron number 1 from transcript cassava4.1_016858m (locus cassava4.1_016858m.g) derived from phytozome v7.0 (chr-ID scaffold04439; pos 28243 to 29152 reverse strand)
ttcgacctcgattacactctctggcctttctactggtactctctctcatctccaagtttgcatcttttcacgggactttttgtaattggttaagtaaagatgaattttcaggtatttgaaatctatcatctaccatgctaaaattctcaatgatttatggctttccttttgttttccccccctttttttttcggtgtttctgttctgggtacttcttatctggctccaattgaagctagttttgtttgtcacatgtactgttggttgaaaacgcagggccatttatagttgttcaatttaggagtaacccttaaaatctacttcttagttaaattataattaggttaatataatcatattgaactaacatgttaggtgtacactttggtctcaagaataaatgctgcttagtgaattactttggcccctgaatgtaaattctgcattgggcttctaagtgtatatgctgtgtccatcactgacctcatggaacagaaaggaaagaaactaacagctagggcttgagagatatgaaatttctttgtgctttcctctgctgctatttggcttagattatggtttgtttcaatgccatgttcaagttctggattttcatttgagaggagtttatggagttttggtttctaagttttggcagcttggtttattttgccacattttctttgattttgatacttgtagatgtgtgcatgtatgcatcatagttatgcatagacactaatatcaaacagcgattcttataactgtatatgagcgatgcatctttgctttccatcaaaactatgtaacaaacttgattttgttgtcatccaatggtagttcgccctcctctgtgaatatatatttagtttgagatctaatgccagtttgaatcttgtaattacagtga

SEQ ID NO: 47878 - DNA, 227 bp, Manihot esculenta
  Intron number 1 from transcript cassava4.1_029044m (locus cassava4.1_029044m.g) derived from phytozome v7.0 (chr-ID scaffold04043; pos 963772 to 963998 reverse strand)
caatcatttctctgtctcttagccactgtaagttcatggctcatcatgctacaatcatgattcaaaattttaaaaatttcaacaaaacatcttaacaaatcctataatttatttaaataattaaaaatttaaaagaaaaaaaaactaaatatcaaaataaatatttgaaattttgaattaaatcccaaccgttatctctctcttctagcaggtggtctatcctttag

SEQ ID NO: 47879 - DNA, 775 bp, Manihot esculenta
  Intron number 1 from transcript cassava4.1_011707m (locus cassava4.1_011707m.g) derived from phytozome v7.0 (chr-ID scaffold06598; pos 395746 to 396520 reverse strand)
gccctgtctctgctcaacggcaagtggattctcgcgtaagtttttttccccctttgattgatgagaaaattcaagtaacatggtgaaatctctgattgctctacgtttgaatcataattacatgcttttaacatttcctgttacatttgttggttgtttgatgatgtattttctgagaaattctcagactggctccggaatccggattagggacaatatggtgatacgatcacctaaacctctgaaatttaagaagcaatgtttgtggaatccaagtttattcacgaagcagtttgacgtgcactgtcacacgctagggcaattcatgagttttgggaattggatggcaactaatatagtctttgccaggccagcacaggattcaatgaacataattatcatctttcattgtgaagtagtgaatctggaagaaatagtgactgtgattcgtgattcgtctgtcgtgattattgtttgttgatactaattatcttttccctaaacagctatacatggggagaaagtgttgtggtctcatttttggcgcctgttttgcttggcctttaattagtatgattgctatagattgtggttttggtttggcatcaagcagctacatattatttcgtcagctaatttgcttttaacaggatgccgtattagaactttcgtcgagagattcttttctcattgagcattgttctatagaagataaccataaactatgctactgtacgcaggtacacttcctttgcaggtttatttccactgcttt

SEQ ID NO: 47880 - DNA, 834 bp, Manihot esculenta
  Intron number 1 from transcript cassava4.1_022470m (locus cassava4.1_022470m.g) derived from phytozome v7.0 (chr-ID scaffold02264; pos 749686 to 750519)
aagccaccagcttctgacaaggtaaactacattttttacctgaagttcgatgcttgccagtgtgtgacaaattggaaagcttaagtttttagtagcaattcaatcgaagttgatagtttatcagtaagttttagcttagtggcactgaattgaagactcaagtttgggtccctcgatatcagatgaaagatgaataatgaaaaaaaaagaagtggattgtttgaggggaatccatctctagcaactttgttttagttttctttttgatataggataggcatctgaaagtgttgaacctggttttttcttatttgtgttttggctgtggcttttcagggggcatagtgagttaaatttgttttcgtagacaaggaagggaggatttgaatttagccttggcaataaaaaatacataaacattctggttaatttgtactatgtttattcattatgggaatttatcatttgctgttagattgagtttaataatctattgcttctatcttagagttgagaaatgcaaaaatgttactatatctttaagaacaatactagaatgctggttcttttgatctttctccagtagaaatttgaataattgcaatcagggtcttaatggttttggaaatggtggtggaaataataaaattttaacagctataaacatttagtttaaagttttaacaggctcttcttttcatatgaaaccattgcattcatgtataggctttacataactgtgtatagcaagtgaatgatgtttgatatgattgaaaattttgaattgccaccttctcagaaaactggtgagggtagaagatcagcaggaaatac

SEQ ID NO: 47881 - DNA, 881 bp, Manihot esculenta
  Intron number 3 from transcript cassava4.1_001615m (locus cassava4.1_001615m.g) derived from phytozome v7.0 (chr-ID scaffold05432; pos 375547 to 376427)
gcaagtatttttgtgtaatgctgctttgcttaaagaatgacattcttttggagtacttacggagatttggtatgagggcaatggttggtgcaactgtaaggctgcttctttgtgatcagaaggtcatcagtttgaacaatgaaaacagtctctcagcaaaaaagtaggggaaggatatgtctaatgctaggccttcttttgaccctatagggtctggagttttgtgcaccccagacacactttactgccaattttgtagataaaaatacaaattcaaaattttcttcttgtgttcattgatggagttgaagttttttttgggtatagtttgttacttcaatcttcattcagttttatgtgggaatagtttgtttacttcattcattctatatctgcttcatctttttggttttttgatacattattaataattctttatgattcccctcgtttccttgcaagagtgaggatgtcttcttctaacacttgctagatttgatgcgagtgctttatttccaataattaaatatttagtggtaaaagaaatctttattggtttttaagttgaaacatgttaaaaaggaaaacctgaaccaggtggggccaaattggttatctgactggttctggtttaattagtttttttttcaaaaccatgggattgggttgttaacatccaccaaaactgccagcttcattcttgctttactagtgtacatgcataatattggcatttgtaaaattctgaagagttgtgggtttaaatccctttataacagtgatattggcatatgatgcaaatctgaagttttagttagactatttatctggaacatattcttgcaggggtgatttactttgttctggaaatcttcaccctg

SEQ ID NO: 47882 - DNA, 840 bp, Manihot esculenta
  Intron number 2 from transcript cassava4.1_007101m (locus cassava4.1_007101m.g) derived from phytozome v7.0 (chr-ID scaffold01072; pos 45354 to 46193 reverse strand)
tagggtattataggcgggcacgtttcctgttagaggtgaactctggttgattgcttgtacttttgaagcgtttgcttttgatttaaacgtgaacagcaaccaatggttgcgtgtccttgagtttatgttcaaatagttcaagcttcaaacttttcatttctttcttaaatgttttatggcactattcttgttttctaacaatataatggtctgaatctgaccgttccattatggaaaatcaacaagtcggatataccacttagtcccaattattgtggagtgtcatggtttaactgttgcgaattttatataagaaagtcagtttcttgagtaggttttttttttttccaaataattgtcttggttggaaattttggagcttttatcatgttatttcaagctgcattgcgaagctactcatctactatcttgctggttttatacttactgatagtagtgacttcttgatggtattataaaattgcaaaactgcttgtacattatcaatagtgggaatcatggctttggtactttatgtatctctaagcaggataacaatatgatccctgtcactttttacacaacggactcatagaaaacttcaattttgtttggtatgtcgatgtaccttttttgttttcatgttcacttcccccttaaaatttcttctttccccttctagtatgttctagactttgcaagctgggaacttaatctgcagttatgatgccacagtgttgcagcaaaggttgagtaatttctatcttgttgagtaatttctatcttattttgttgttgtttttactctctagggagctaaactgattacttccaaggggg

SEQ ID NO: 47883 - DNA, 852 bp, Manihot esculenta
  Intron number 3 from transcript cassava4.1_019336m (locus cassava4.1_019336m.g) derived from phytozome v7.0 (chr-ID scaffold03852; pos 329417 to 330268)
atctcaggcgcaaagaccctgacctgtattctcttattatttgctctttttttcgcctttgtgcatctgataaaaatatttgggacatgcgaaatatcataactgaaattttcttatgtttcctttactacactttcttggcaaataaagctagaatttatttttgtgtgctgtttcataaataagtttcactttttttccttttccctttctaggtttaatttatagaaccttttcaggtaaacagttcaatgcctcactacatttgaaagaaaaatataattttgaagtaacttatgttataaaaatccaagtaatttgattttttttttcttctgtgtttagttgggggaattgaaaaagaaagttgaaactagatttggagttttcacttttattatttccataaagatataaatataatgacctgtattctctttcttcttatttgctcgtttttttttgaactacactttcttggcaagcaaagctagaattttttaaatttgctttttgataaataagttactaggatgtaggatcaccttttcccctgccaaaatctgaattatagaagatttttaggcaaacagtttaatacttcaatcttcatagtatttgaaagaaatatataattctaaaataaatttgtgcaataaaatgaaagtaatttaaacttttattctccatttggttggggaaattgaaaagaaagttgaacgtggagttggactttcttatttttttatataaaattgaagttagctgaactggcatgtgacccgcaattgaataactcatgttatgatgtttataattcattatgattgcaaaagtgcagttacaagcgta

SEQ ID NO: 47884 - DNA, 756 bp, Manihot esculenta
  Intron number 1 from transcript cassava4.1_011451m (locus cassava4.1_011451m.g) derived from phytozome v7.0 (chr-ID scaffold10493; pos 770925 to 771680)
ccgaggttaccatttctttattcaattgttaatctattgatagaatttgttgttattggtttttgttcactgagttagggtttgctttcggaccaacttttaggtctgagctgtgttctggacaattcgaaatggaatcacaatgttttaattaactagttatgttacattcactgttctgtgtgtaatttgtgtttcatggacctcaaatctacttgattgtaattagcgaaaataagatttggatttttcgttttggttaactattactgttgctgttagtggcacgactaatccaagtgcgaatggataatgcagcgctatcaagcttctttttagctaaaatttaggaaagtagacaagatcagaattagattggaattgatccgtggtggattttctttgctgaatgtctgttataattgtattggcatgacggatcttttgcacaactcttttgatgtttgtctgatttggtttcagttgaacttttgcacacacatgagcccatgattctgatgtggaagtctttccaggaagtaaactagtatgattgaatattatctaggatgtttttccttccataaaattgatgctgaaaggtgctcttctaattggttttttcttctggaaatttcgggttttatggttcctttttctttagcaaatttgttttttttcttggattcctgtttcccatagcttaatggtaatgccattggtttgcaggtccaaccatcttgtttttccaggaga

SEQ ID NO: 47885 - DNA, 725 bp, Manihot esculenta
  Intron number 1 from transcript cassava4.1_004343m (locus cassava4.1_004343m.g) derived from phytozome v7.0 (chr-ID scaffold11689; pos 32279 to 33003 reverse strand)
tattctaagtttctcattctcttcactactgttaggttcgctctgacattttccttccattctatttcttaaacaaatgcatatgatttaaatttctccactaattttcatgttctggtaattaaggttgccataactcataggttgtgtcgaattttggcttttacagctatttggatcagctttcaggaaggctttccgcacatgagaaagaagacaagataggattagaatgattaattattaaaaaaataacgtttatttaagaattctcaaaaaagacagaactttggttaatttcgagacaattctgttaaagggattcttttttagattcaaaatcattttaattttgtttctttttgttctcattgtttgcttagctttgattttctctttttattttcgctacttatgacttgaaattcctgaatttcttttttcctttttgatgcgtgatctgtagtgatagttcaacattgcttttctctttttagagcatttctacacgcatacttttgtctagctttttctgttctgcacatttttctagccttatttaatcagattatttagggagaatcatttttgtgaaacgtgaaaaatatcttttattctttagttcatgttctgaaactttcgtatcaatgactgattatcattacgtatattatatgagccatattgcagtagtggaggtatagtggcgtattcagagtcacaat

SEQ ID NO: 47886 - DNA, 834 bp, Manihot esculenta
  Intron number 1 from transcript cassava4.1_003466m (locus cassava4.1_003466m.g) derived from phytozome v7.0 (chr-ID scaffold02264; pos 738191 to 739024 reverse strand)
tttttggggtatgtttaattttctttaacataacaactctgataatatctgcatatctcataaagctgtttgtaactcatacatcttttacttctgctgcttagatgacttgtataataaaagatttttctgttatggattcttgttgtaggttttgatacatcatgcccttgtttggttttgtcttctatgttgtaattattttatagttcttttttattcttgtctgtagtagtataatagtatatttggcaaatgaagtatttaccttttttcatcggttttagttctttcctatcttttgctgttctgtgtagtgcagaaatgttgtttgaagttttgtgtgagttacatatagtttctgtactttgctgtacaatgattttcttggaggctgatcattctgctttcttgatataccgatgttttcatttcttcatctctccctctccccccccacatttagtcctcccagcttcttttaaattttcttttcttttcttttcttcttctacttccctctaaggaatcattcatgtcttcattatgtgtggtccatggtaagttataggtacaagaaaaaagagaatttgtttgaatttggccttcagtataatagttggatttggggacatttgcttctaataagtttggctatggttgttagggccatgttaatatttggtgcttttctgatcttaggaatggtttttgtgctatcaaatgatcatttcttctctacctccattctagtaaattctattttctgtctacattgtaatgaattctctgttttgtggtttcagggttgttgtggtggtttgcatttcagtg

SEQ ID NO: 47887 - DNA, 330 bp, Manihot esculenta
  Intron number 2 from transcript cassava4.1_008529m (locus cassava4.1_004227m.g) derived from phytozome v7.0 (chr-ID scaffold12585; pos 9505 to 9834)
ttaagcagattggagtaattggctggggatcccaggtctgaaactcgtaactcttgttttaatttttcaaatgagttacatttgttgtgctaatttctgtactgttttaagtaatttctttttctttcaaaaaaagaaaagaaaaaaaggaaaacagagtaatttcgtttccttgaactttgatgaaatgacaaagattagactatttacatatgattttggtaatttttggtttttgacttattattcttttttcttagtcttctttcttttttaattcgtgctatcctcataggggccagcccaagctcaaaatttgagggattctct

SEQ ID NO: 47888 - DNA, 932 bp, Manihot esculenta
  Intron number 1 from transcript cassava4.1_014943m (locus cassava4.1_014943m.g) derived from phytozome v7.0 (chr-ID scaffold03743; pos 55179 to 56110)
gccaattctgtaccggtttgtctccttataatatgtgttagataattaaatttgatcagaagctcataattggcatttcaattcagagtttcacgatttgattagttcctttgttaggttatcagttgttatatagcaatgagcatgaacagatttgaggatattcaattaattttggaacctaattgaagacgttcagtttatttcactcgacgaattgtgttctaaagatcaattttttattcaagttaattttgttaatcagttagcaacatctacttctttttttcccttttttttttgggggggggggggaggggggggtggttgtggaataatatctgagcttgcagaaaagaacagaggacgagtgcataaccgctaataacctagaatttgtatcttgttatgtttatcacagcttagtgttaatgcggattgggctgccctttttttttcttagaaaaaaaaaaagatttggagtgcaaattcatatgttcactttcacctggaaatggcgttgaatttagacctatgttggagcaaaacatttttctatagttccgaatgaactggttttgcttccctttgatgttggcttgtgtgatggatgtttgggagtaaggaataaggataggtctgataaaaaaaaagggaataaggataggattggggtcttataaaaagaattagaaggtattggtgtaatcactctagaattaagtctcgaatttcgagcattgaagtttactagacattgttttccaacctcatccattttctgcatattgtattgtttactagatgtgtggttatggagcccaagattctttacatattttccaatctcatccatttctgcatttggttttctttactggacctgctgctatgcagcccaaaagtggagtgtatctggttggtgattttat

SEQ ID NO: 47889 - DNA, 734 bp, Manihot esculenta
  Intron number 1 from transcript cassava4.1_001793m (locus cassava4.1_001793m.g) derived from phytozome v7.0 (chr-ID scaffold07330; pos 126990 to 127723 reverse strand)
ttccctactggtcttgttttttttttttcatcaattttcattttcatacctttttttttccttcttgttaattgtaacgattttgaagattgcttgcttgggtccaatttgttaaatcactgaattattagaacatagcactacctgtagatctgaagcttgtaagatagaagtagttggaaactggtgatttttagtcaagatttggaagatagaatgaagaacagaattggtgttgggaaagcagcaatagtagaatatggcaacacctaaatatacctgtagatcagcagcagcataaccttctttgggaaggacagtgaatgaaaaaaatttcgacatcaatagattgcaaaatttttggatttgttaatgagtcaattgatttcggaattgggattgggttttctcttatatcagagcccttattggaagtgtaatagaaaaagcaaaagttgtagattctagaagggaccatgcaaacgggaaaatgagataatttttatggaaatttggagttcgtaatttaatgcaaatatcaaatgtattatttgcagacaattgtgagatttttggtgagctgaactagatttcttttataactaactaaaattttagatacctgttatcttttcatagtacttgtacgtgtccagtttgatgtatatgatcatattgactttatgaagtgtggttgttgtccagaggcatctttatctggcgttgagccgctt

SEQ ID NO: 47890 - DNA, 458 bp, Manihot esculenta
  Intron number 3 from transcript cassava4.1_015040m (locus cassava4.1_015040m.g) derived from phytozome v7.0 (chr-ID scaffold07238; pos 322715 to 323172)
accatttttcaggtacttgcagtgtggatcttgcaacttctactagacctggatagctgatagaatagcatacggcaacaaaattttaatttgcttaatacttgtaataatatctgacaacgttgagctttagatatgccaatcacctatagactaattatgcaatgatgcatcatttatttagctcttcattagtaatgactaaaaggccaattcatgatatcttaaaggttctattcagatgtcatattttaaacaatgcaaatagtgtttgattgaaaagtcgaggcctattcaaaacggtttattttggtgattcaacatggtttctttggtatccaagaatggccttttgaagttatgcatactatacagtggtagtgtattttttggtcaatatgttgtaatttgtaattatgagcagaatttctttgaactttgttgaacttgcagctttc

SEQ ID NO: 47891 - DNA, 476 bp, Manihot esculenta
  Intron number 3 from transcript cassava4.1_016500m (locus cassava4.1_016500m.g) derived from phytozome v7.0 (chr-ID scaffold03150; pos 230782 to 231257 reverse strand)
gaggaggccaagaactcactgcgtgagttcattcattctttagcttctatataaatccattttgtttatattatttttgatatgtgcaggtctttcttttagtaaacatgtcttgctagcttcatcctgattgccaatattcagaaaaatccacttgcttgtcttattatccaatttcatagaaagactactcttataatagagtagaaaaagaatgaaaggttgctaagaaattatcttataattttataagaaaatgattgacaatggcatgtagtgtgaaaccactagtgtaaatggacgtggtcctagtcaattgaaatccctctttatgcattttctgcatttttttcttttgtttgaatgagtggcattttaaaatttccggtgccagttgacacataaagctagtaatcatttaatatttcatttatctcctgtttgcagattaacagccataactcagttagcacatc

SEQ ID NO: 47892 - DNA, 492 bp, Manihot esculenta
  Intron number 1 from transcript cassava4.1_015123m (locus cassava4.1_015123m.g) derived from phytozome v7.0 (chr-ID scaffold00148; pos 230764 to 231255 reverse strand)
tctctctgcttctaagaccccccgcttctattctggtagtatttccttttcaatcatttgctaatgatttgtttttcaaaagcgctgatgtgactttgagacttctgaaataagaaattctctctttccatcaagtttccctttcgattcctatttaccatttctttggaataattagaaagaattcaaatgaccttcttaaagaattgaactctttctttgggaataaaataattatcagaaaagaaaacaattaaattaaaatcttgcagaattttttattaagaaaaaaagttggagtttgtatattttatgattgtttgtgattggatttctatttctttttctaaaatcaattttctttttggataaatgatatgattagctcttgaattcgtttttctttgggatttagtttgtgaagttaatgttgcagaactttcttcttgaatcttgatctaataatgggtgtcttctttgtagaaagccgaa

SEQ ID NO: 47893 - DNA, 805 bp, Manihot esculenta
  Intron number 1 from transcript cassava4.1_002450m (locus cassava4.1_002450m.g) derived from phytozome v7.0 (chr-ID scaffold05979; pos 367565 to 368369 reverse strand)
ctgaatttgcaacttggtatcaggtacatggataaacaccctcttccagcgtccctgctcccataccaaatttaccccactttccttccctgttttttcctttcctcttccagctgaatagttcacctttaaaagataatccctcaccaagaatttttttttttttaattttttcttactctttcgtggaatactttcttaagcccacaatatgccaaatgcatgagaacttatcaacacgttatgttagaaatagctgcactgtgcatgatgatattattggatatgtgatgtgtctttctcctgaattctgagtctagcatgtgctgctaaataagctaaacttaatgagctgaagggaacttgaactgtttgatcattttgtgcacaataattatgttattcaagcaaattagtgtgcttttgactctgtggatttattatatcatatgcctacatagtatattattccaactgatgctttctttaaagatcagtattttggttgttttcagactgcatgcttgccaggtgtttattattctttctcaggatgcaactttaacacatgaaatgtgacttggtttacctgcaatagcaatttttttctcaataaattccattatcatatgatttaaacttgcagtcctgctttctttttgcttactaatttaatacttttttgtcatgatttttggctttgttatatcactttctgatatgttcttctcaacttacttctgcattttaaaatacctcatttgaagtttacaggtatactgttggcaagatcacaccagtgcct

SEQ ID NO: 47894 - DNA, 362 bp, Manihot esculenta
  Intron number 1 from transcript cassava4.1_019144m (locus cassava4.1_019144m.g) derived from phytozome v7.0 (chr-ID scaffold06554; pos 108841 to 109202)
ggttcttaaggtatttctgaaatataatgttgagcctttttgaaatctttgctttttccttggaaattattcatgtttctctggttataattagggcagtggccaaatagctattgtgtgttgccagtgagaggatcaaacaactagctttttggttgaagagttgacgaggataagcactgagaacaagaagctaacagaaatgcttactgttctctgcgaaaattacaacgctttgcaaaatcatttggttgattgcttaaatacttagtagagagaaagattttgagttttttataaatgggaattttcttttttggtattcaggtccaaagaagtgcagaagatccttcaattttggt

SEQ ID NO: 47895 - DNA, 1046 bp, Manihot esculenta
  Intron number 4 from transcript cassava4.1_008436m (locus cassava4.1_008436m.g) derived from phytozome v7.0 (chr-ID scaffold03693; pos 127641 to 128686 reverse strand)
ttggctgatcaggtaattgccaagctaattgaataaaatagtctttggtaattgttgccagtagcctctactcgttgccactgttgtcagaattcttgattcaaatcttacggtttgatttccccaacaaattgattcaaatctttaaattctcgattccattccacatcctgggtaaattgcaaatgtactggaactctgactaaatttaaagaatcaatagtgaatcaagatgaatccttagtcttcacccgattcaattaattattaataatggtttgtcataccttatgttttttttttgtaattttaattttaattttaagatctcaattcattttttccatgaaaaagtgtacactatgtttcttccaccgcccattcttttccctctccatcttctttcttttctttttaattaatttactctactaattatagttgtcaaattatgacaatatatgttaataatattaaaacctatcatctttttgtactatttcattatttgatcaaatttaaatgagagtttcagcatgtatcactataactattgtctacaattccagagttcataatttataacataaaactatataatatagaaaatacatattattctgttataaagaatatttctaattatataaatgataattatgtatttatcaaaacatgttattataagatttcttttacttatttttagaacatacattatttttaattaatttttagaaatttttaatgaatcttactatttgatttgtttcttgatttataaaataaagatttcgaatcgagatttgattcaaatgttgatttgggaacttggctcatttcctgtttgtcaagtgttgaaataaacacactatgaatcgagggcagcagtcagcttttgaaactgctcgacatcttgttcacgaagattttttgatgtttacatatgaaaagaacaaattctggtggactttcttacctttttttttttcctctatcatttgaatgcagatttcaagaatagaatatttacattctaaagggtt

SEQ ID NO: 47896 - DNA, 609 bp, Manihot esculenta
  Intron number 1 from transcript cassava4.1_003748m (locus cassava4.1_003748m.g) derived from phytozome v7.0 (chr-ID scaffold10813; pos 21778 to 22386 reverse strand)
ggcttctcaaacttcagggaaaaaaagaaaaaggggtattattctctcctgcattcgtctctaattctggagttctgtgattcatagatctgattgggaaaattttcatgctttattttaaaattctgggctgtgtttgtattggttcttttcctagttttgatttgaatatgatttcattttcttgctgaatccatgatctgtaacttggattggatttcagagcttttagcgatttgtgatttattatcgccaaattatgctacgcgtatgttttgtttgtatcaagttatgaaattgaagatattatcttcgtttttatttcccgtaaattctgggtaaaggaaaatttgcgcgatgttgagtttaaattgtataaaatcacgattaatgagatgagcttatgaattatataattctgcaattaagtggtggtagttttaaataataggacgatttgatttggggggtgtatttttccctttattttgatcgattggctccttgtttggtttgctgataatttgggcataaacctttctttgttatttgtttgaaatttgtattctgatgtaaaattttactgcaggtatttagtgaaaatcaagg

SEQ ID NO: 47897 - DNA, 927 bp, Manihot esculenta
  Intron number 1 from transcript cassava4.1_008043m (locus cassava4.1_008043m.g) derived from phytozome v7.0 (chr-ID scaffold03104; pos 102030 to 102956 reverse strand)
attatctccatacctgttttgcttccaccggcgaggtacaaatgactctccctatttatctatctctattggcatatataagaacgaaatatgaattgattttttttggtgtatattgtttttcatttctccatgtatagatgcaacggttgcatagaatcaacgaatagatgcagttaaattctgtgaatcctggttgctgtgtgtgtttgtgtggtgtggaactgtgtgtttggttttgcatatacttgttctatatgctagtgttcggttaaggaactaccaatgaactggaattgagggaggcaaatttgaatatgattgcaacgtctcttgagaagttgaactttattcatattattttgccattacattgcaagaaaacgaaaaagaataattatgtcagacaataaatgctagtatatgttatgatggcatgaaaggacgatgggccagcatttattctttttgaatcagcagagttttcttgtaaacaaactatgtgcttaatatttagtgcttggcaaagcattataattgtatgtgatattcaagtcgaatcatctgttagggtctagatgaaatgggcacagaaatagaagttgcatagatatacttctctccaatatgattttgtagagagcacatggacctttgctaagttaaattttttaatgttatatttaggaattggctttttgttatcacctaaatagttgtaccaagcacagagataaaatttggatatattatgcaaaatatagatttttttttcttcctaatttccatttctagttagagcggaaaaaaaaacagtaactttctgtgaatgtttttctgataggctatcacacattttcctgtctaatgactagagttatgtattgcacagattgcttctattaaagttattcgcaataagcagac

SEQ ID NO: 47898 - DNA, 686 bp, Manihot esculenta
  Intron number 1 from transcript cassava4.1_012062m (locus cassava4.1_012062m.g) derived from phytozome v7.0 (chr-ID scaffold08265; pos 4146981 to 4147666 reverse strand)
cgcagaaaacgtcagctggtaattcgattaaaagggtgagtttttttttttctttttggataatttttctcctgtccagttatgagaccttgtgctttcttcctgaggattgatacttcaactttaagagcttctctgccttttgcgagaaggccgttcttgcttgtgttacgtgtatagtagttcttcacgtgacataatctaaaaagcaaaaaattagctttagctatgcatattttattttctgtctaacaaacaaatgagtttgtggatgttttgttttaaagattgtgagacttacctcaaacttgaactttcctttttgttatcatagagtcgaagctgaataattatggtgcttgttgtttgatagggcttaattaatagttgcgtttaagttagatgaactctgcaccaaatttctttccctttccttttgttttcttgagaaactcataagtcttctgttcctaaactccctaactgaggcatttctatgaaaaaaactaatccaaccagctgtcctatgtattcttttaaccgctggttgtcaaaagtagtttctccttatgcataatcatttgatttcaagtacgttaactgtggtgtattaatattcaaatttgaatgtactttgtgttgttatgacagttgccagtggcatttaagtcggtttgtgggagaca

SEQ ID NO: 47899 - DNA, 459 bp, Manihot esculenta
  Intron number 1 from transcript cassava4.1_000543m (locus cassava4.1_000543m.g) derived from phytozome v7.0 (chr-ID scaffold07238; pos 112237 to 112695)
gtcccaaaactaaaactcctaaagtttcaaggaaggtaaaattgctttggcttattccctgaagatactcaaattgttgatttttgattgatcagcgcgagaataattgcaatgcatgtggcatgttgtagtgtagtagaacttttgtttgtttttgaccgagtattctctttgtaaattgagaaagtttaaaattttgggaagctagggagaattattaccataacttatctcaattagcatgactcaattcgttttgatttaaatgcacggtgcataacacaattcgcgatgcagtgaagaaaagtctcctgtaatttttttaatttgttttttgctaaatttagaaaaatagcccactggtctcaatcttggtttttcggtcaatgttggttgcattgtttatctgcgctttatggaacaggcaaaggcggtgtcatctgcagaagcaacgccaga

SEQ ID NO: 47900 - DNA, 941 bp, Manihot esculenta
  Intron number 2 from transcript cassava4.1_012933m (locus cassava4.1_012933m.g) derived from phytozome v7.0 (chr-ID scaffold00232; pos 43172 to 44112 reverse strand)
ccaggaggttggctagccaaaatatttggtggcaggtcagctcatgatggcttattatatttcatgtttatatgttctaatattaggtccgtgtattttgttaaaattaactgctagttcttattttataaaaaatccaattaaaacaccattgtaatttgtaaaactaaattatttaattattctgtcaaagaaaacatcagctaacttatttttgtcttgaatatttataatatttagtctctataattttgactattcatactatttagtccctttgatttgatcaagtgtagaacaagttgacaaacgtttctaggacagaaatcgaacaaaagggctaacatgtttaattttataaaatgtatggacattataattggattcttagaaaatagagactgaacggttcattttaacaaaatactaggacttgatagtaattcaccctaaatttattccagcttaaactcagttaatctcatgagtgtgcactttaattacataaatttcttaaaaatgcccatttgtaacttgtgttttttcccccaaaagaagagttccatgttcatgcagtattgatgttcatttgtaactcagttcgataggtatcttcctgcagtattgatggttgacaaaccttcttcttagctttacctagctttgttcatggaaataaagtctaaagaagaagttaccctttaaaatgaataagaattcaccaaagcatatttaaaagttcgattctaacataaggtgtttaaaaaaaggggtctacgtttctgttactgaatgccactattcctagagaacatgtatcactagtttcttacttttcttctaggtttggttgtgtgtgcaatatgtgtcccaccatcctttgatcatttatttttccttgtgcaggaaagttcttgaaattggtgtgttgacttggtcat

SEQ ID NO: 47901 - DNA, 821 bp, Manihot esculenta
  Intron number 1 from transcript cassava4.1_022647m (locus cassava4.1_022647m.g) derived from phytozome v7.0 (chr-ID scaffold04065; pos 256350 to 257170)
acatgtaagctcttttgaatttacaatttcagaaagtgaagcattatgaaaaatatttatatttttctctctttgggatctaagttaaaaaataaaccctctcaaaactgcataataaagtcaaattagattctgaggaagtctagaatctcgcaaacaataatttcataggctaattttctttgaaataggataggtattaaatctccagaattttgcagtcatgaagaatgcataatttcatacttatactaccttgtttggaaggaaggttcagactgacgtcctctgaaataacataaactttgacataattaagtgttttcttgagtagcagtaattttgggagtttctcctggacttaccaatcctctcccattgagacagtatactgaatgttgcttgtttgtttggccaattgcatctctccaaacttgaataagatcaatcatccaccaaggaccttctatgctcaccagataaactgtacaaacagttctgcatcatcttcttttgtggatgcttagtttgcttatcaataactgatcactatccttgtcttaaataattggattcctaatatttataggatgaaattttttattgaaatttgatatggtaagcactgaagggatgtgatgctcatggtgacactcatattatatgaaattcataaaatcatctgcacctgtcttcaattggattctagaattcatcatcatccttggttaaacatgccatggcatttgtccaatcgtactttttggttctgaacgtctttgacaatgttttcaggatatctgtaacatttgtggataagg

SEQ ID NO: 47902 - DNA, 912 bp, Manihot esculenta
  Intron number 2 from transcript cassava4.1_030702m (locus cassava4.1_030702m.g) derived from phytozome v7.0 (chr-ID scaffold10677; pos 639 to 1550)
ttcacttggaggtattctgcatctttttatgtttctgtgctgttgatactaacttatcttggacgtggatgaacttggtgcagttcataggaaggaggagatgttggtattctagatatactggtagctgatctgatagcaatagttaatcaagtcataaacagattcctagaagtctgttgaagtcataagttaaaatttgttaaactgaagcttccttagtcctagttaatttgtaccctatatagtttcagtatgtactagttcctttttgaaacataagcgaagtagagcataattccaaactttaattatacacacagaaggaatatcatgtggaattgtaatcaaatgctgctgtttgcttgagtagttttgggtcaactctgtgaatctctttaagcttacttcataatattccttcagtgaacttaaagggggatttggttgctaatatgttgggtgagtattgagtaacatttttcatacatctagttttcatgttatgtagcttattacatttagtttgcaggtttgtgatctttcatctgttagtgaggtcaagtcttttgcatccaaatttgcttcaaaggaagttccagttcatgttttggtaaacttccttctttcctaaagtagtcagaataagtatttttctttttcctttttacaatttatatgtctggaaagtcagtctggctgaaagcagaaaactatggaacctaatttttccaattactccagaaatatatttgttttccatttcttgcaaatattttttattcttggaaatctattgacatacttaatcagtaactctcccattaagtttagtttgcaaattatatggactgctatttctgccaagattaaggtctaatgtggatgttcttttctgtctctaggttaaca

SEQ ID NO: 47903 - DNA, 691 bp, Manihot esculenta
  Intron number 1 from transcript cassava4.1_002188m (locus cassava4.1_002188m.g) derived from phytozome v7.0 (chr-ID scaffold05214; pos 477502 to 478192 reverse strand)
gactctgctgtctacttgaggatttacttgatagggtatgctctggttgatcatttcattttacactttgttttttattcatggcccatttagttagagaatgtgttcagttgttctgatgaattttattgtaacctgttgaaatcaaaatgggaagtcttgaaaaccaattatttgcctgcctaagaatttaaagttttgctgctaagattttttgctttttggttatgtgactcatgtcctggtgctgatgaattgaatgctatcctctttgagtgcaggcttaaaatttttgttcctattgcattcctggcatttaccatcctagtgccagttaattggaccaatagcaccctaaagcattctaatttgacttacagtgatttggataagctctctatatcaaatatccccatgggatcaaccaggtatccatgacttagtgataaactcttctgttgttatcctattccttcataaacacagtaagttatgaaatgtgtttataaatttctcaatcacttctgtgcatgtttgtgactgctttccattcccagtgttggataattttgcagctttgactcttttgaagattgaattcacattgttgcatctcttagaaatatttccttcaagttcaacttttcagttaccataaatttttggttgcagattttggacccatttggta

SEQ ID NO: 47904 - DNA, 453 bp, Manihot esculenta
  Intron number 1 from transcript cassava4.1_030413m (locus cassava4.1_030413m.g) derived from phytozome v7.0 (chr-ID scaffold08265; pos 3069702 to 3070154 reverse strand)
catcaagaaaaaaagaaatctaccaggaactccaggttcgttctagaggatatttgcttaatttctttagcgtattagcagtaaaattttagagaagagacaagaaaagagaaagtggatgtttaagttggcttcatcttcgtctgcaagtaaaagccgattcttttgttttttttttccttggaagaaaaaaataattgttaattatgtgaattgaaaagctcaattattggattgagattacaataattgctaagaactgtttgcttgactccactttttatcggtcttctcttgtttcccactgtcttctgccatgcaatacagccatgatgttactttacaacaaaaacaagtcatttattttaaaaattcaaagcaccatttcaaggaatttttctaatatttgtttgaaaatgatgcatatatttatgggtatgtgatcagatccta

SEQ ID NO: 47905 - DNA, 567 bp, Manihot esculenta
  Intron number 1 from transcript cassava4.1_021323m (locus cassava4.1_021323m.g) derived from phytozome v7.0 (chr-ID scaffold04065; pos 163935 to 164501)
atcagaaatataccaaatcagtttgagtaggttcctttctcaagtgtttgtgcggtcatgcatgcttgtttgtttattttcctgataccgactgtttttaactttaagttgggcctttttcgttaattttttccattacgattattgccaacactgataatttcctcggtaactctagtctctattctgtttttcgtgctggacaaaatcccccccccccccttctctctatttgtgtttatggtaccagcaaacttttatacctgaaaaaagattgtagaagattgaaaagggcaaggattaatggcgatcattctggcccctctccccccctcgttttgtttttgctttttcctcccttcttattcttttgtacatcacaacggaatcataaagtattgattgttacggtctcataagcaataaaggccaaaatgctcttttgttaattccatctgtgcatgcatgtaattcccttttgtttgatttattaaaggcctttcttttgtttgtttatggccatgtggagcagaaggcacgatctgctgcgcatactggacaaccact

SEQ ID NO: 47906 - DNA, 926 bp, Manihot esculenta
  Intron number 2 from transcript cassava4.1_026761m (locus cassava4.1_026761m.g) derived from phytozome v7.0 (chr-ID scaffold10563; pos 413436 to 414361)
tggccacgtaagtgaaggattgacttataaattgactcatgactctgcatctttaaatctgctggttgataagaggatacctgagtcaaatttctgatgtaattatagttaaggcttaaatgaaaaatgaaatagactaacaagtgttgggtgtaatgttaaggctcattgcactcccaattgcactcccaaggatataacccaagttcgatccttggagatgacattgttgggagggcagctatgaacctcgagggattagtcttctttggtccataaaacagacaggaaggatacccagtcaaagaacaaaaaaaaaacaagagaatgaaatatgcattttctcaccttgagtagaaatgtgacatcatagactctaattgtgattccaaaatcaaggatctccatctccttttatgccatattaattttctgatgtaatgtcattaatccttttgttgataatttgaggaaaactaggctgccttgtaatcaatggcaatttcttgtattataattatttatggcctaaatttatggcctaaatttatatgtcaaaagcttttgggtttgattgtatggtttagctttgtagattagtgcattcttgatctttagtgttaaatcaaccttacatataaacctaaagtactagttcaagccttgcaggcaaaacttgtgtagcatgcttctattttcattctagttagtctaaagccaataagccactaaaggtattgaagattttcgatctcttcatatgaacttgtggttgtcttttcagaacataatagatgctgtagctgtattaatttcttttctttcatatacttaatgactgtctccaaaaatctccttgttaaatattaatgggttataattgttctgtagattctttatagtgctccttgtggcttgcttctcgt

SEQ ID NO: 47907 - DNA, 487 bp, Manihot esculenta
  Intron number 1 from transcript cassava4.1_024463m (locus cassava4.1_024463m.g) derived from phytozome v7.0 (chr-ID scaffold12439; pos 243692 to 244178)
ttcccgtcgttactggagtaattattgccagtggggtatgtgttcacgttcattattttttcccatttttaagttattggtgtttttagattttctgtgatgtgaattgtggaaatgggtttacttttattggtgttaaattagtagatttttaacaaaggattggtttgaattatagttgttttgaattgcatttcctatgtatttctattagttggcgaagatatcagagaactagttccaatttgatttgttaatgggatttggtaatgcccgtgagattacaaataaaaacatgtaaggaagaaaaaagtgacttgttttgtctagcagctggagttgaagtgaaatgtaggattcaaggctccttaatgagatctgtttagtgtttttttccgttcagatgattcactggaactaaacacttactcagctattttctctggccatagggtgaaccaagttttcatctatttgggtttataat

SEQ ID NO: 47908 - DNA, 975 bp, Manihot esculenta
  Intron number 2 from transcript cassava4.1_018281m (locus cassava4.1_018281m.g) derived from phytozome v7.0 (chr-ID scaffold06549; pos 10534 to 11508 reverse strand)
aagcttggaacaccaaacctggaactccaggtttgaatagtagatctagcttataactttgttttgtttccttgtatctttattgctatttctaagttataaatatattgctgattcattcactaatcactattacttcagtatattcgtgaagggaacttttttcttatattctcacttgcaattatattaatgtctaagttcacagctgtggtatgccacattcgtttttttttttataattaaattattcagcacaaggtagtgctatcgctaatccaccctttcaagtccaaagagttcctgcatgaagggaagcattaggatatgctttgtatgatgaccgactctaggcttttggcatgaagggcatggtacaaagcatgttatatcactgccttcattgttagaagtttaagtttatagattaaattctaataataatgggattatatgttatttcctgttttaatcagtatttcattaatagattttgatttatttactccgatgaagtggagaacacttcagcttaaaactgtgatccttacctaattttaatccccaatatatgaaccactttattgatgcacagagtatttccaattggttctttttttttcttccctcttggttttgcattaggtagcctagttggtgatttatctatcatatcaccttattattaaggggaatttttctttccaagaatcaaacttaacataattatcagagcctaccagacaaagccttttgctgctaaatttatacttgggctacttggcattctttcttttggaaaataactaacaattattaccatctttctttgtattgcaaatttctaatattgccacaattacaaatatatgaaagaaaaaggtattgacaataaacatttttttttcatcttttttaaaagatcttcagtttagtgtctgaaattctcttctactcattctgctgtattttcag

SEQ ID NO: 47909 - DNA, 548 bp, Manihot esculenta
  Intron number 1 from transcript cassava4.1_018281m (locus cassava4.1_018281m.g) derived from phytozome v7.0 (chr-ID scaffold06549; pos 11535 to 12082 reverse strand)
ggatttttggctctatatttgcacctccctctaaggtattaatttaatccttttttttctttgaatcttctaggacttggaagttttttctttaaagaaaaagaaatttcttgcattcttttgattttggtggcatgttcttcgtttattaattttcaattgtaatagagatgaattctataaatcattttttgcttgaattttttttttttttgggttattcttttgattgctattaattactgaggtttatctggtccttggttaaggaatgatcagagcagctgaagataagtctgataatgagatgtcacatgatttttacgttctataaatgaatagactatttctttggttttcttccaatttttttgttctgctcagctgcccagccactctgctgtgttatctacctttgggctagttgtttattgtatgatagagaggaaaacagagagagagagagagagagagggctaaggtctgaaatttctcacgttgatgttggttcaggtgttggggagaggtttgctgcgatctgaagtgtt

SEQ ID NO: 47910 - DNA, 884 bp, Manihot esculenta
  Intron number 4 from transcript cassava4.1_027971m (locus cassava4.1_027971m.g) derived from phytozome v7.0 (chr-ID scaffold07290; pos 141462 to 142345)
ttgtcattggaatcgtagcaattattattgtgaaggtaaatcatccttgtgctttcttcagtcaagaaatgatagcattaaagtttgagatttgcttgccacctattgtcagtttgttactaaaatttgttgatttcatgatgttccattttaatctagagatagtttcatagataaatgtgtgttaaatttgggtcagacctaactcaccccaaaagctagctcaagggggaggagtgcctatggctcatataacgggcacattacccctttccacaaccgatgtgagattcaacacaccccttcacgcccagaattttttactggtgcgtggcacatttatggggcgcccaacatcggatggagaggctctgataccatgaaactttgatgaaaggaagaaaaagagagcagaagatttgagagaaaatacttgattatttcccttaagccaattgggttatatatactacttacaagagtacacactaagtaagaaaataaattaatttcctaattatagtctaatcatatcttaatcatatcacacaatcatatccctaattaccactacaaatctaggcaatttacagaaataatctcaacaatgtgaaataaacttttatgataagaactttgacagccacgtttttcttgacgcttacaaagtaaaaaaggtaaaataatagggaaaatattattttgttgcaattttgttgtggatgttttgcatttttttaaaactagggttgacctatgtaggcatgagcagctgaggcttgctcgaatgtactaagtgtaagctgcaacccttctttttattacgaatgccagacctgttgcttcaagtcagtgaagaatattctcgacatcagaattctttt

SEQ ID NO: 47911 - DNA, 816 bp, Manihot esculenta
  Intron number 1 from transcript cassava4.1_026181m (locus cassava4.1_026181m.g) derived from phytozome v7.0 (chr-ID scaffold10493; pos 522223 to 523038)
cttgagagagaaatcggttttctagaggtacgttatgaatttgctgcagtactttttcttttttctttagcgcactgtgtatatgactgcagtgaaataaaggggaaaggaaattttttaaacagctcctactgctctattaactcattgcttctgtggcgatgtttcataagcaagacttggtaacctttttttaaaaaaaaagtagaatatgaaggtacaatctttcttgttgggaacattgaattgaatcataaagaaaaacaaaccatcaaacacttgtagctgtagatggaaatcggtaatttctaggtgggtagcctgttgctgatgcaggaaaattgctgaactttcattgttagactgataattacagtaatagtagcttagaagtaaacaatttaacattattttcatatttatccagtcaattagtagatcatagttgctaagagagattttctttgactgaaatttcatgtcagtgagtaatactcctctcatgatctcctgatttctgaaaatttctgaaaaaaaaatgtggctgtggtctgaatgtggtcctaattgaaacatcatgtgatgagcttcactaaagacagaaaatcaataatttcatttttatgataaaagctgagcaatgcaattatatgtctgtttctactaattcaatatcatgaagtttgtgcaccgccagaactcaagcaaataaacaagccattagtctttttctcttgttctttttgtgagtttttatcatcttccgtttcactttgagcaggaggaactaaaatctgttgacagcctccagcctgc

SEQ ID NO: 47912 - DNA, 740 bp, Manihot esculenta
  Intron number 1 from transcript cassava4.1_011736m (locus cassava4.1_011736m.g) derived from phytozome v7.0 (chr-ID scaffold08265; pos 3238661 to 3239400 reverse strand)
gtcggctgcccaccactgtcctcatcattgtccaggtactcggtgcatttttgtcatttgattgacctctgtgatctcggtttctatgttgggatttattttattttttcttgcttatcgtcttgttcctttatcttggattttatgcgttagcgtgcttgaaacttctgatctttatcccagagctttgttcctgttacaattagattattttccttgattgaaggatttcttgctggaaatttggagattgggtctaaggtgaatccagacaatatatataattaatcccttggttgaatgatttgtgtaacgaagtttaaagaactcatgaaccccaacactatagaattgctttctcaacgatgatatttctttttgttttagatttaagtagaagcaggagcagaagcagaagcttaatcctggaagactatggaaccatggtcagaaagtaaataagaaaatgctagttattgtttttcacctttgattgataactaattgccatcaatgaaggaaaaatttagtattcgttttcagttttttttttaatctttacgcttctttggaagtagattttggatgttacagtgctttagcaaaaaattaggcgatcaaacaccatcccaaatgagatatttctaatatcatcaaacgtatctcatatataaacacaatgtgttaatgtttttattgtttttgctcctcttctgattgacatttacatgtagtgtgcg

SEQ ID NO: 47913 - DNA, 558 bp, Manihot esculenta
  Intron number 1 from transcript cassava4.1_002935m (locus cassava4.1_002935m.g) derived from phytozome v7.0 (chr-ID scaffold07027; pos 431118 to 431675)
tggtgctacccagctcttcttcaaccacttatgttagtttatacatcttcttcttttgggttttttgtctgttattccagcttcctgcatgttagaatcggattctatttaattattatttgttgcatgggatttttttatgaaatgaatacactttcgcttgatccaggattgcttctttatgagatatattgtctaagggaataacaatttttaagggcttgtgtgtaattctttccacttggattgatcagtttctatttgtgatctttaaacagcagcttgaggcggtctggggttgaggttgggagctcagagaaagtgaataacagtttttagaaaagcattatttttaaatgttgtccaacagcaataataaataaagcagaattagttcagaaaatgggaatttgtttgattttgttttattgaaactgagttgttctgcaggggattcttgaaattcctattttatattttaggaagaaactacacaatcttgaacttcaatattgaatggcagtttactgtttttcagaccccttgtcactggttagg

SEQ ID NO: 47914 - DNA, 559 bp, Manihot esculenta
  Intron number 1 from transcript cassava4.1_017345m (locus cassava4.1_017345m.g) derived from phytozome v7.0 (chr-ID scaffold04083; pos 213417 to 213975)
ctctcatcccttctcatcactttaaacattctaaggtaatcatttgatttaataatctgtttctgaagctactgctacaaacagacatttgatttaatcatttgacttatcaaaaacttatttcatggagaggatcaaaacaaacattaatttgacatcacagatatgtctgaaatttagcagcaaagtttcagcaacgtggggatcacttctgagataaaatttttttttttcgattaaagatcaccatacatccattttcaatttaatttcttctctctcttttttttttaaataaaaaaacttgtagaaagaaacagattgcttccaactgtacctgtccattgaaatttattgctgaacaggaataatttagtgttcatctctacctgtccaatccaatgcctagcttaatatccatctcaattagtataatatttactgatagcaaagaatcttgaaaattatggaaaaaaaacatattcttaatttgatcttaacttgacattcaaaaagagaaaaaaaaaagaattattgttaatgattttttatgcaggac

SEQ ID NO: 47915 - DNA, 783 bp, Manihot esculenta
  Intron number 1 from transcript cassava4.1_001247m (locus cassava4.1_001247m.g) derived from phytozome v7.0 (chr-ID scaffold03241; pos 387714 to 388496 reverse strand)
ctgctttgttgggggttgtgacaagtttggcgcaggtttgaatattatttatttgttaagcaatgtgcataaactctatttttgaaaatactgcagttgatgcctatttttgtgtctggtttatgctaagttgaggatctaatgttgtactatttggtgagtttgccttttgcttttattcattatttggttgcttaaaatttctagagaaagagatgggaatttagattgttagcatatattttgatgatgcataattgaacttcaagctttatgtggtaaatgataaattttaggatacgagtcatatgagtttttggcaggattagtaatgtggttgttttgtgaaagaaaagaaagagagagcatctggttcaattttgaaacccagatgcaacagtagatgatgtcgagcgtctcttctaaatctctctccctcctcctcccccctccccccccccccccttcctttggagacagcagaaagtgttagggaggaaaatacctcatttcttttatgcttggttgccaaattgccattaaattgaacagaaaagtttggattcttgtcaaaggctttttacaaactagcttccttttatttgtgaattgtaattaattggatactcactctcttagacagttcccaatcactcagttgcctgttaatctatttgtataatctttgccataaaggaaaaaaaaaaatactggaattctaaagaagttttatgataaattgttctaggtgggagcaattgcaccacaagggtttgagccatt

SEQ ID NO: 47916 - DNA, 751 bp, Manihot esculenta
  Intron number 1 from transcript cassava4.1_031588m (locus cassava4.1_031588m.g) derived from phytozome v7.0 (chr-ID scaffold02774; pos 97705 to 98455 reverse strand)
attttggacaaacttcctcactactgcccaatcaggtgactttctatttttcactatgagttatttacttaaaattattgctgaaactttctgttctaatttttttaattattattttgtatcctatcttacaacgggaccattctatgaatcagatgacattcctggaaatactccctattatgatcttagaccttaatgctttgacttaaggcatttcaagcatattagtgatacacatccgaaactacaacctaattaataagttaataacattatccaccaacagttgcatggattagttgattgtttaagttctaatgaggagagttgcatttgtttgatcaaggaaatctctcttcctatttttctgtctcactaatttattgcataaacgctagtctgaattctgaactgttagttttacctgcttatacatgtgttctgacaacccatttaatgtttgctccataatttgcatccagttgaaacttctccaatatggatgattccttgctgacgaggatttctaggactgggatttattatgttataatatgttatattactgttatcaacatttctttgaccttgtttcctgcaagtatctgtctgtctctctctgattgtgtttattgctattgctgcatattttgtctgtatttcagtcatttatttcgggccaattccttattgttatgtgctaaaatcatatagctaccttacagtgctcacttggagtggaaccttg

SEQ ID NO: 47917 - DNA, 449 bp, Manihot esculenta
  Intron number 1 from transcript cassava4.1_029146m (locus cassava4.1_029146m.g) derived from phytozome v7.0 (chr-ID scaffold04209; pos 211462 to 211910 reverse strand)
aagaaaccggtaaatgatttgcttttgcatgtctttctgttgcaatttgattgcattgaactgtgtttagtaggagtttacatgcagagcttattcgaggatgattccaatctgttacctgtggtgtagttttcgtcgttactgtagctgtcaattattcaactatgttgaaatgatttctttatttgtcaaggacctttgtggaattttctgaaaattgatgttgtcagtcttgtgatgcttcttgtctgttttatagtttttaagatacctgcattatcctttgttagtcacatgcttaaagaattttcaaccccagttgatggtttcagtttatcttgctccatctgctcgtctcctccctctttcatttgcaactcaatttaatgttataatattgatgggacattaaccatggttgccatttttcttatggttttgtgaagttg

SEQ ID NO: 47918 - DNA, 430 bp, Manihot esculenta
  Intron number 1 from transcript cassava4.1_011921m (locus cassava4.1_011344m.g) derived from phytozome v7.0 (chr-ID scaffold11495; pos 876041 to 876470)
gtcgcgtcactattactcttgggcgtactggtcaggtattttattatgctttgaaatttacagtcctcaattgttctattaatttaaattgggtttaactgcttgtttgagatttttgagtttttggttttccgcagtttctttatatacatttcttcgtttttggttgatttttttttctttctagtgctgtttgactgctgggaaaatgtaggagagaaaaatgaacttgtgtttcatctggttaaactgaagtaatgtaaattttggccttgagttcgcgtccttttgttttattaatgacaattgcttttttctagaatatgggctttgtagtcttcatattgcagataaaacaagcatattcattgttatattctataattgcatcacaggtggtaaagagagctgcagctttatcagaagttga

SEQ ID NO: 47919 - DNA, 898 bp, Manihot esculenta
  Intron number 1 from transcript cassava4.1_002114m (locus cassava4.1_002114m.g) derived from phytozome v7.0 (chr-ID scaffold01441; pos 60991 to 61888 reverse strand)
cctctggtctctgtgtcgctgcttttaatacaggggttagtccttcttcttcttgatttctatattttattttctgaaactttgaggttttagcctgtttgtttgctcattattttgactgatctggatctgagattaatccgatcagtgaattcttggtgccatcttcagaaaatgtttgtttttttatatttttaatccactcaaactgtaaatacttgcgcgttagttggggttatgactagtagcagtttgttgctagctaactgatttttatttagctttagcttcatcacttgctgaaaatttcgtatgaaggattaatgcatcaaacaaacaattcaattttgtgtgaatacttgttttatttttgcgtttgtttactgaaaatatccattttcaaggcaagcttctactttgaactcgtgtggtaattgtgctccccttttctttgtaccatcagtcttcatatgacatatattttacctgctaacccttttttttgcaagaatgattttgctagaaaaacatttaaatggattcttacaaaattattcatgatgaaaaatttttaagtgaaaaataattcttttattctaagataattgcaagaaatcatgcgaggaaattagttaaaaagaattgaattcttttattctaaacaagttttaaatattcatgtaaaggggaaaaaagaagagaagctgctttcaaaatgtctctgattctggtggcgtagagtatgcttcattgcgtcctgttatatttttcttgtttaatttattccaactgttttttttctctatcctgcacgggtagctgtggattcatatactgccccatttacttatttctcaaatttttttatttgatattttttatgcttctgattaggttc

SEQ ID NO: 47920 - DNA, 514 bp, Manihot esculenta
  Intron number 1 from transcript cassava4.1_010717m (locus cassava4.1_010717m.g) derived from phytozome v7.0 (chr-ID scaffold11960; pos 98047 to 98560)
agtcgccggttgctccaaccacaacagtgttggtggtcagtacgtttcttctgtgacttttctatattcagtttcaaatttcaattgctctggcattttgttcaagggttttatttactttctctgctggctgccgctgttgcttttctagactaataagatggagtaaaagcttaatttattatcattaatggtaaattggctacattacatgctatataatgtttccttttgcattgcttgcatgcaggactgctctctgtaatttgtttaaataatttatgtatctataagtggcagcaatgagttgttttgtacgaacacaatggaatttcgggccagagatgtatgtaatgtgtgtaggtgttgtttatacgtaggttgttaagtagtgaaatggatgggtgctatctgagctgaagagcattatcattactctaacaattttgattcttagtccttttgtattttacatgctacagaaactgctgctagagagacattggagcaagtt

SEQ ID NO: 47921 - DNA, 883 bp, Manihot esculenta
  Intron number 2 from transcript cassava4.1_013349m (locus cassava4.1_009927m.g) derived from phytozome v7.0 (chr-ID scaffold06089; pos 473331 to 474213 reverse strand)
gccaaagcttacttccggaaagggttagtaaaaaatttgacatagattggatttgcactttaatccttaactagtatatgcgcatgtaaaatgcagtttcagtttaaaagttgttgtatgattaaattacattgtagttgatgatctctgaaattaattgaggagattggagcgatggctctaccaatttctgtttgattatatttattttccagcttaattttctgtttcttctggttcaatgatgaagaatgaatgggtgacaaatgttattctttgctgcaagagtggggatttggagaactgatctagttcttcctagatactcatctataggaattttcatttttacatttataacctcaaccaccttcactcggatgctgattcacttctctgtgtcattggccttgtatcaacctagtcaccattttcgacatggtaattgctgtaacataatatggtcccagtgacatcaaaactgaagtgcactgggcccatcaatgatcaattgcactttttgatatgtccagcgcaacagtttctgttttcagttttcttaattgccttaatgatgagatatccaataacttttagattggattataattagaatgaaatgctaaatcttgctgattagataacagagtttgataaaagaaagttgtggagtttatattagcatatattcatcactccataggtcaaactttgaaatttgtttgccatgccttacctgattaggattttagttactggaacatgcattacttgatgcatgtataacattcctctctgccccctttagttacttctgaattctttctggtgcaatatttacctattgagtttccttttgaatggtttatggttgcagcactgc

SEQ ID NO: 47922 - DNA, 303 bp, Manihot esculenta
  Intron number 1 from transcript cassava4.1_013349m (locus cassava4.1_009927m.g) derived from phytozome v7.0 (chr-ID scaffold06089; pos 474249 to 474551 reverse strand)
cgcccaggccaatatcaagctcggcaatctaactggtatttctcttaaatttctttctcccccgtgtttgtgtatatgctcaactgttttcgtgatgatttcaaaattttggcattgaacccgatcgatgttgctcgccaaattgatgttattgcataagtagttatcaccgttgggcaattttcaatttttgttttttcaatttgaaaattcatttcggatgtagtcagttctttgtaattatgcataaaatcccagactcgctgtctaatttcttcgtatgatatttagaggccgttgctg

SEQ ID NO: 47923 - DNA, 1062 bp, Manihot esculenta
  Intron number 1 from transcript cassava4.1_010463m (locus cassava4.1_010463m.g) derived from phytozome v7.0 (chr-ID scaffold07301; pos 224753 to 225814 reverse strand)
gacaggggcgctctcgttgaattctacgctccttggtaaaaaaatttcatccattccgattacatttcttcgtttctaatttctcttgttcaatttgagtcgatgttaatgccttaatggtttgcgtatcgatagtgattagttgatccatagatctttcaatcaatgcgttatagttagttcgtattgatttatccatagccatgaaaaatctaggcatttcaaatcataatttgcccctttgataaaggagaaacagagggagaaatagcaacggaattatatagatcgtcatttaggcagcgtgatcttattggtttcttgagctctctaattcaacgtgtttgtgaaatggactatgcttaaatcacaaggagtggtgatcgataagcgggattatgggtaagaagatgtcgttatcatgtgttccactttagctttctaaggcctataggatgttgctaaccgtgctaagtcggcttgtagtgcgatatttgcaatgcgctgtggatacttccacgatgtccagtttgtcttggagttttcccataatttatctacaatttcagtcaataattctaataacatgaaattgaacagtactcctcaaatccctaattttaaccactatatgtttattatatcacattaaaacaataaatagttgattgaatgtgggattatctctgagttgataattgataccagaaatacgtactagaaaaatttataagcctcttagttttattagatggattgcataagtgggagagcttttgttttttttctaataaaacatgctatctacatgcatatattttcttagcattttttttaagaaaaaagtggtaaaaaagacaggctgtagcaaaatattagttagtagttggaagtttaattatcaattcatactattaccaagtgaaagttaagcacaaattataatgcagtagttaattcataatttataatggactacaaatttgataacttatcatggactgcacttgcacttttttggatggaacaggtgtgggcattgtaaaaagcttgctcctgaat

SEQ ID NO: 47924 - DNA, 878 bp, Manihot esculenta
  Intron number 1 from transcript cassava4.1_003656m (locus cassava4.1_003656m.g) derived from phytozome v7.0 (chr-ID scaffold06814; pos 626022 to 626899 reverse strand)
gaaggttcgttgtctttctttttggtttgctagttagttattgctttttcagtactatattttgttgagtttcttttccttttgctaaatttgaagagtttgatctcggtttttgcttcctttttttgatttatggaaatgggtttctgttttttcttattaattatgtgcatagtgagtaatggctgtttatggtacagtataggtactcctgtgatagtcgttattggtgatcttatagaattcttcataagtatatagcttttattgcttttcttaccaaattttttaatgagaatatgtgatgagttgggtgatgctatactggtttaccgtagaaattattggtagtttgtactattcatgacttttaaccgggcaattagtcaaaatgcccttttcggattaattagaaaatctctcaaggcacttcttatttcttttctttttctctctcctttatggaatgatcttaacattgaccatggtttttagtggacacgtaattctttactgtgagattagttacagtatcccaagttgtaaatattctttactcaaccttcatgatggagaaaatcgtaaaatccatgctcattttgaagaatatctatatatatatattggcctttcatttctgcatatagcttttccttgaacctttggcttagtttactgagagacatgatttacacaccttcaacctaaaatctgtgtcactgagcattgatgtcttcaggagctaccaggtgtctaaaatagtgcttttgggaagctctgcattctattgtatttgttccttattggttcattcttatcacatcttctagtatcaagttggttattgtcattccctaagtgtttcattcaaacaggtg

SEQ ID NO: 47925 - DNA, 613 bp, Manihot esculenta
  Intron number 1 from transcript cassava4.1_002882m (locus cassava4.1_002882m.g) derived from phytozome v7.0 (chr-ID scaffold11714; pos 100236 to 100848)
ttgtgtggttgcgtcctctggaattgcttttagcagtatgttgtttctttctcttctctttcttcttgtttgtttgttttttcttctctctttttgaaatttgttgggtttggcttcctgtttttacatgcctgctctctttccttcattaaaagaaattatcatatacatatatagtagaaaatgaattaataatagtccaatattttaaataaatctttttgaaagagacatgaaatcaaagtggaggcttttaagataattgcttacgatgatcaattctgaattgaagaaaaaaacatgacctggtaacttggatatcatgaagaatatgtgatctgataattatgttgtttagttagctaaaagaaagcgtgatttcgggtcacgtattcagattgtcatgttatgtgtttcgtaattttgatgagattcaaacagcaaccatgaccaggatttgactctatgtttttctatatgtgaaaatgtgcttatactggtgaattagcagttgatgaaatttctaaatgcgaaaattacatcattggtgaacattctctttaatttgttgtccctaattctgggaaatcttttaggtggcactgcaagttac

SEQ ID NO: 47926 - DNA, 544 bp, Manihot esculenta
  Intron number 1 from transcript cassava4.1_023000m (locus cassava4.1_023000m.g) derived from phytozome v7.0 (chr-ID scaffold07070; pos 90672 to 91215)
cccatatttatccagaatttgttgttagtttcaaagtctcattccaatactgaggtgatctgctgttactcttgaggtttcagtttcttgatgaaaattatgccttatatatatataaaatatggatgcacatgtatacccacttgcacaaatgttcccatttataattctccttttaatgaacaagaacctgaagattgaggaccttgcactggatggatgcactcttgatttgtcatctgctggatggaaccgataaattctcttggtttcagaatcaagcttgaatctaaattgtccaatctaattggatgctgatatttgaatccatgacacacagtaacattccagagatcagtaactgctacaattattcgtccagttgcttagttggtggtgtcttctctgcagatgttgtatgcattcatggatttcttttctgaaagtttcttttaacttgactgctagatttgttttctctccctacaggaattttggctggaagtgagataaaacaggctatttccagtatcactacatcttc

SEQ ID NO: 47927 - DNA, 302 bp, Manihot esculenta
  Intron number 2 from transcript cassava4.1_009183m (locus cassava4.1_009183m.g) derived from phytozome v7.0 (chr-ID scaffold04133; pos 227607 to 227908 reverse strand)
ctttggatgtatgttttctttgtttctttgaatagctagatcatggatgattcttagatgttaatgcatttcttccttagaattccagatacgtatagcattgattgttctgtaaatttgattcaaatgctacaaacacataatatgttttttcccgcttccctagttcccttatccttaacaagcaccgcaaatagttttctttgagtttgataattaaagaactttctctatatcttgtatgcttcttctttgcttcaactataggttcttgaaggaagggcttattcacttcaacatcc

SEQ ID NO: 47928 - DNA, 994 bp, Manihot esculenta
  Intron number 1 from transcript cassava4.1_005287m (locus cassava4.1_005287m.g) derived from phytozome v7.0 (chr-ID scaffold03241; pos 626085 to 627078)
aaaccaagtgctcttctcttggtaagttttcatttcttttcgtttgtctccttatcatttagcagtagtttaataatgcagattaatttgatttttagagttaagctaaatttcatgtataatattggtgttaagtgaacaaaaacgaagccaaaaccatgatttagtggagattaagcttgattatcaatagaatttaaacacattaatcaatcctatgaatgtaattaggtttaattatcatggaaaatccacgtatgttctgcctcgaaaaggccgctcgccaacctaataaaatatagttaataattatccattggttgcttctaattaaattaaattaattaattaaaatctgcagattacaataattaataattagataaatacgaaaagattttttttttagaaccacatggagagcctaacatgttcaaatattattcaaatcagcattataataggattgatagttcagctgttttttttttgtcaaaacttaaccagtaaaagtgggacatgtggccttaacaagacacacttagtctaatttaatgagtttaatcattattaaattaaatatttgctgaactcaatttttatagctttatttttttttaagtgttaaaaaagtgtgagattaggatgtgattagttttaggttgctcaattagtgtccataagcacaagtgggatggtacagacgttgtagttccaaccataattaggcaattacaggctacaacttactacttaaaaccatttttattcactgtattagtgatggatgaatgacctaatcctggaagtctcccaactaactttgatttatccaccttaacaacgtattaaaattaaacaacgtattcaattcttttctcaaatttgcaatcaaagatattatttatctcacaagtctatttataaaataaaatgatcttttaatttgttaatggtaggttgctttgggaaaagactaggaccaaggatactg

SEQ ID NO: 47929 - DNA, 651 bp, Manihot esculenta
  Intron number 1 from transcript cassava4.1_024572m (locus cassava4.1_024572m.g) derived from phytozome v7.0 (chr-ID scaffold11495; pos 717763 to 718413)
gtcctgatcccattcataacaggtaagtaatcaaaagcttgctgttttatatctttttgtattcatgcatgtgttttgaaattttggttaggggtaattattaggggaagaaaaaaaggaaaataaagaaagccacctcttatacgttctatgaggacgattgcttcaagggtgagctttaaatcgtaaaggcaatgttcttgcaacacaaggaaaaacaaaaactcagaataactgatatgccttttttacaagtaaaaaaaaaaaaaaaatctaaagaaagggtaataaatatattaacagatttgaagaaaaataatttattaacagatttgaaatttattaataaatatattaaattaccgatgaattgcaattcgttaataaatcaattgaaaatctaaataatttacccataagcctatgtgccttatttggtacctgaaactgtttatccttatttttttaaaaggaagtactggctttatatgtaattaacaacttcagtttttcttttctttttcacgataatacaatttttaaaatttcaatccttaaaatagcactctatatgctcaattagttcaataatgttgctttttctttgtttctttaggagagcagggaactcgaaacgacctcctggccgag

SEQ ID NO: 47930 - DNA, 714 bp, Manihot esculenta
  Intron number 1 from transcript cassava4.1_010275m (locus cassava4.1_010275m.g) derived from phytozome v7.0 (chr-ID scaffold06700; pos 147947 to 148660 reverse strand)
ctctgtttaggccagattcaaatactttcatccaggtaccctgttcttctaaaccaagttcttgtatgtgtgtgatttctgggttcttttgtttttttcttatttttatgttaataagttttgatcatgatcaagttatctcctttttctttcattcttgagaaactgaatgagcgtagacctgtggatgtgtattcctgttttgctggttttgaagtgagtttgtaagtacgacaagattgtgttcctgattgttctaaggaaatcaataagctttttgacaagaaatataattctagacttgaatcgatgatttatatcatcgacgaaaagaaattttaaaagacaacagtatggaaatcacttgggagtagttccttcgagcaaatggttctttttgttgagaattcaaaatcttagctgtcgtattttgttctattagatttctgaattacataagagctgtttgttgcataacaaatttagctgcttaagagagtcgaccttttttctatccagttccagtctgcataataatctaacctggtagtttccacatttatttttgaagaatccaagagtaatcaccgaattatactatgtattaagaattcatgcgacgaaggtgggaaggtgttcaaatttttgtattagcaatggaacttgttatgggtttgggttaaattgatttagcattttgatgattcaggacaa

SEQ ID NO: 47931 - DNA, 897 bp, Manihot esculenta
  Intron number 1 from transcript cassava4.1_010860m (locus cassava4.1_010860m.g) derived from phytozome v7.0 (chr-ID scaffold06871; pos 802188 to 803084)
ctgtaattcccagattccaatttctcaaaacccatgttcgttttctacagagctgtgtatttttagtcattgttattgaatggggttttatttttggatttcttctctacatttgtcttaatggataagtaatccgttattttggtttaccattatatctgcggaaagaagttctgaaatttgtttttcttccagttgctctcactttgttctgtttttctttgtttctggaaatatttgctatggagattaacatagttttgtctgatttgttatttcagaaattgtagcctaaaacgaagaaccattagttgttgtttagtggaaatatttattaggttgtcttgtagcagtatacatggaaaatttttattgtgttgaaattcctttcctctaccctctgttttcgctgtttcatttatttgatttaatttatttccttatcctcactcgagagttagattgaagaatgcagatcattttatactcggggtagctgtcatctgttcccttgcatatgtcattagtttttttttttttttttggcgtttatttttatgtttgaatagctatagcattgctgtatcttcttgttcagtgaatataaatggaaatcaagatcggttgtttgtgggtactgggtcttgcattagtctggatattcttataagaaagagtacttgtcataagctgttggtctcactctgctttcgttttcattaattaatggttcaccaaattttgattatttaattcgattttgcaacagtctagtaactagtaaggtacttgaaattggtatttcaatttccgcatcaatgtgttaaatgaggaattatgaacaagttgtttcccccacgctttccagcttttttcagatttggctgtgcaagtatt

SEQ ID NO: 47932 - DNA, 821 bp, Manihot esculenta
  Intron number 1 from transcript cassava4.1_002786m (locus cassava4.1_002786m.g) derived from phytozome v7.0 (chr-ID scaffold03241; pos 257126 to 257946 reverse strand)
gtgaaaggaagaggagggatcgactagggtttcaggtgatttcttctaattaatttgtgtttttctatttgctgctctttgtttggaaagatccgttgttttggggttatatatcagaactgaagtaaatgcttgcggtttctatcaatatagacgactacttgatttaagcgcgtattgaatgtgatcggatagatgttaaaattgtgtgattagtatgtttacttctgcaagttgactaaaattattttgttgcaccaatcaccataaggtgaaacattgtagacttgtagtttaagtttacttccattttcaagtagagaaagttattatagaaagagatgccctgccggtttcattgctcgttacagatatgtggctactttaatttttgaacttttccatacttgactgtggtttccaatttaaagctgttggtggtgagaagttgtttactttaatcaactgtacacatacaggaatccatttatttatatctgctatatttgatacttgtaaaggatattaattcatatgtttaaacaatcagagaatccgatcgtgcactgcacttgggcattcagtagttaggttagatttcagccttggaagatattaggaatctatttatctatatctgctatcttgcaactcctgttcgaatgacttccagaaaacttgagtgttttctgtgaactactagaatctatcttttcctagacactgattggttggtatccctgaagctactttagcatttgatttcaatgttggagatctgagtttgtcttgttgtctatctctgcagcctggtggtggtc

SEQ ID NO: 47933 - DNA, 580 bp, Manihot esculenta
  Intron number 1 from transcript cassava4.1_008686m (locus cassava4.1_008686m.g) derived from phytozome v7.0 (chr-ID scaffold02850; pos 8181 to 8760)
gcttagaatccacatcacaatctggctaaagagaggtaagttaaatctctctcgccttcttttgtttttttgattgtttttttcttggttttgttcgcgatgtatttctgcacctatatgaatttattccggtctgggtcttcttttaattttatatttttgatttctttcctagtttgtttcaaattttaatagatgcttctgcttggtctgatcaatttccattgttaaattgttgaataaattcgtagttttgtttgttggtagaagagattatgaaattttgatacgtaaatgtttgaattttaatgtaacgatgggaatacggtgctgttcttaatcttgcaattcaaatggtcgatatgatcaattttcgatttgttttttattggagttagctgcatcagtggcttcctgtgtttctatgtgtggctaaattttcagtaacggtagctatatcatgcgtatacgtggtatcctttgaatttgatttttttttcttctgaatgagtaatgctttacgagaggctaacgtgtttcttttttctttgctctcttggttgtcaggccagcatctttt

SEQ ID NO: 47934 - DNA, 967 bp, Manihot esculenta
  Intron number 1 from transcript cassava4.1_021865m (locus cassava4.1_021865m.g) derived from phytozome v7.0 (chr-ID scaffold03241; pos 182912 to 183878 reverse strand)
gcaagaacgcagcagattttattggtcggtaaatatacattagctactaagctaattccttgatctgctgtttctttcttgcctctaaacgtacgcctcataatgctccaaattattccaccgttttagaccattgatctcaccatctttcattaattctctaatctcttcttctttttcttttactgatccaactaatcatttccacattttccatttttttaaaaaaaaaaaaaattaatggctaaagttgattccgtttggtatgcatgagttgcatgtctaattaggacattcaatgattttgagaaatatcggttttcaattaattggccaagttacgtaggtctcttacatagattttaatagtcaaatcaattgaattttatgtgtaaataaataaaaacttgctaactggaaagttggacctttgaagacatgtacactgattgagtaaaagtttggtttaagagattctgagttccagctgcatgctaccataaacatgcaatctttctagttgatgttgaagttacgtgtttcactttaattacccttttcttcaatcttcataaccctacaagttctagtaatgtccatcccttgtcttcttatattgctaacaaaaacaacacatcaatgaaaaagccaacccactatctcaatttatccctttttttttttaaataatattaaaggtggcaaatggttgttattattaatatgagaaagttccagcgtttgcttctggtcttttagatcattgcacttttttccctgaattaagcatgagggagagatttgtgaattataatattatactgttcttttttcaccatttgagttgttagccgtcaagtgatgtgcagcagaactgtcggtgcattttcttctttgagaatttatagtttaacggtggattatctgtgcagctgagaaagtgggcttgcctacttcacccccatat

SEQ ID NO: 47935 - DNA, 550 bp, Manihot esculenta
  Intron number 4 from transcript cassava4.1_000259m (locus cassava4.1_000259m.g) derived from phytozome v7.0 (chr-ID scaffold02915; pos 215551 to 216100 reverse strand)
tggctttggccggaaaacttgatcctaaactaaaggtaatggttataggaaaaattactatttaatccctatattatgtaaaaactcattagttagtccttcagttttaaaaatacattaaaatattcctaatattttaaaaagtatacttactagtcattctattaattttagtaattaagtattttactatttagtttttgtggtttgaaaaaactcattagttatccttctcgtattaagagcattttagacttttttgcaatacataatggctaaaattaatggagggagtaatgggtagattttttaaaatgtgaatgacattttaatggatttttagaaaatgagagaccaactaataagttttctcataataaagggactaaatagtaagtttctcatcattgtatcagtgttaattattttcctttacatcaacttttctattgctttttgttaaatagaaggccaaaatttaactctttagctgcttttcttatttgagaaatttgatttcttctgcagctttctggtagtgttacttaca

SEQ ID NO: 47936 - DNA, 860 bp, Manihot esculenta
  Intron number 2 from transcript cassava4.1_000740m (locus cassava4.1_000740m.g) derived from phytozome v7.0 (chr-ID scaffold08265; pos 3043754 to 3044613)
tcaataaaaattggtaagttgtggcgtttgcattgtacagatgattttgcatagtgattattaattctttaatctgtagtgtttttgttttattgccatcaattttgaaggaatcttaaacataaactctttcttttctatgaaaataagtaatttaacccctggcaacaataaaatacacatatattgtatgtatatggaccttaagacttgttaggaatagtatagcaattcatgataacggaataattactctctacttgattgtgggatttatgtcacactaatttaaaatattttttattcagtgatgatcacacatttcaaagtgtaatttaaaaaattaaaaatataaagttattccatgaaatagtttcccatattaaaatttgaactgaagttaagtgttggctatcctatcccatgaaccaaaataagccttattttctgctcttttgaattgaagttaattagcattaagtaggtggctcagccacatgttggtatcattagtcatgaatattccaaatcttcatatgcaattggagtgctaaaatacaaaatcaaattggcttaggttcattagtggcttaaattgacttgagatcctatcaaaatgtatgctttttgatggttacttattttagttgctaattgaggatcgccttttcttctggacaaactaactaactaagtgagctttaatgacctccttttcccatgccagtgcgtttactttgtcaatttgtttccgtatacttgagcattatcttgtaaattctgctgcttttgggtcattgtctaatttgattatttatttggcaggaaaaaggcctagagatttgctaaatcctaaggct

SEQ ID NO: 47937 - DNA, 717 bp, Manihot esculenta
  Intron number 2 from transcript cassava4.1_029209m (locus cassava4.1_029209m.g) derived from phytozome v7.0 (chr-ID scaffold04133; pos 5452 to 6168)
gagctgtaaggtaatatacatgccgaagcccttcgcatccatgcttctatttcttgtagtaattgtttccattttgttttcaattggttgagctctgacttgggttgaactcagatgcttcgtgccatggtggctactctatgaccactaagccaaagctaatactcctttttattgttgttgttattatttttattattattatattttttatttgaagtaatgatacaataggataattaagtcaaactgaaccaaagataatccaaattaaggctctctttgtttcatggtgaactttttgttatttgggtgctcaggaagattggttaatctaaaagattttccagacaagtttctttgcaacataaactgtgccataagggagaacatattattaattatgaaaaaaaaaaaagatcagttagtctttgttgtgcacttcatttttcttggcccttttgtttattggcaatgctttttgaattttaccttcttttatgtgcagaagcaaatatgaaaaggtgttggttaagttcattgaatctttgaattgcgtaagcaacaatttttacttggtagttgattcgagactactttactagtagatagacaatagtttttggtcctcatttcattatgtaatgtattcaatggtggaataccttgttctgctgatactgttgtttacattcttgcgctttcctaaatctagtg

SEQ ID NO: 47938 - DNA, 696 bp, Manihot esculenta
  Intron number 2 from transcript cassava4.1_015165m (locus cassava4.1_015165m.g) derived from phytozome v7.0 (chr-ID scaffold03060; pos 108144 to 108839 reverse strand)
ggagaattcaggtacttattttgttccctttttttttgtttccataatacccactttcactaattttgaaaattttgaattgcttgagtttgaaaatgagcctggccgattggatgattgatagaatgattgattctataattaagtgagttaagtatttattgaagcctgcataatcatttaaaattgtaaagtataaaaatagtgagacttgacatttatggaagaaatatacatttcaacgacattgattgagttcacaactaacctttattcggtaatcaagaagcaatgcaaccctgtagaaagttgaatgcttgtttgtggcatgaagctcttcacgaagacatagaatatgcaggtggttcaaatccttcttattacgttccaacttttaaacttgtttttcagagtgtagatatgtggcttgtcatattgcatctcaggggaaaaatgtgatcccatgttgcttttttttggggggattaatttatttagtctcatgtattttcagtacatctgagttttttagtgtagttacatgagaatttgattgactttctccttgctacacgcttacagtttgccattgatgcatattgtatcttctacatgcctctactttctgctatgcttgctggttaacttttcccccttgtatttatctttcattcatgttttcttaggggcatcttg

SEQ ID NO: 47939 - DNA, 353 bp, Manihot esculenta
  Intron number 1 from transcript cassava4.1_033095m (locus cassava4.1_033095m.g) derived from phytozome v7.0 (chr-ID scaffold02264; pos 893384 to 893736)
aagcttgtatgttcaagataatcttcatcttcatcccctgtcacctttcgctttgtttcttttctttcttgttcctcattttgatttgtttttcttttattgattccattttgatggcgtttaaatttgtggtatttgaatattagtgtcttataatttcgagaggattccaggtttagccttgaaactttagtttctgaattgcattttccatggatgatcattttagaatggtggttatcattattggggttccttagaacattggaattgttaaatttggttgctgtaagaagaagaaattcatgttggtgccttgtttttgcagccgttagaaggttcgaagcagctga

SEQ ID NO: 47940 - DNA, 573 bp, Manihot esculenta
  Intron number 2 from transcript cassava4.1_015050m (locus cassava4.1_015050m.g) derived from phytozome v7.0 (chr-ID scaffold08265; pos 2905671 to 2906243)
cgatccaggtcagtgtctagcatttagctttttttgtcctttacgagaaattgttaaagctccaaatttccattggttgctgagcataacttactaagccaagatttgttgtgtgtgtgtttgataaaataagcttttctccgtgctttcttgtgttttgttctgcatgaacttaagtggcggagatttgttttgtaaaaggttgttaaatattctaattagtattacaatctttggtagccaaatgtaggtctggttgttatgggtgccatgatttttgcgaattttatttctgacatttaggctgcacttatagatgcggagcagcagaggtttctttcacttacaaaaggagcatttgtaattgacagctgttaaataattttcataactcacattcgagataaaaaccaaatggtgctttattgtttcttatctgtttaactgattgcggatcttttgactttcaatccttgttatttattacaatgcttatcaatttttattgcttatttataagaaaagcaaacttccacctccttatcctttcagaaaaggagaatttgtgtttgt

SEQ ID NO: 47941 - DNA, 716 bp, Manihot esculenta
  Intron number 2 from transcript cassava4.1_022422m (locus cassava4.1_022422m.g) derived from phytozome v7.0 (chr-ID scaffold02943; pos 427979 to 428694 reverse strand)
agctaatcaaacagccggaattgcttaattcttcggtaagaatggccctttatggacaacaaatatccttttggtgcaaaaaattataccatatatggatgattaaattattactcagtaatgatagcgagctgaagcattagattttcctagttattctactcaggccagcgtgtttttcggctactcatgctatggcaaactttttcttcttgtattttttgtattcatttaagtgtttaatagttattagctgttcatgaaactactcctacaaatattctatttttcttcaagagttgaaattttgcaattgcaagcatatcaggtagtagtttcctttctttctccttctggaggttgttaatagttcatagaattagatgaagattaaatctggattctgatacgcgggattaaagcatcctgattcagaggtaatgacagcgactgtgaccactgtctggtgccaataagaggagcctccagaactccatacatttttttctatagatacataatttcaagagcatctcaattatgcagaacaggcttgtcatcacaaccatgatatcaaatacgtttatttggttgatgattagatcagccattgccatttgctatatgaattagttgtttggtgattcaaattcagagtcagatgtgttttctctgctaaattgcaggcagatagagaaggatacattgctattata

SEQ ID NO: 47942 - DNA, 738 bp, Manihot esculenta
  Intron number 1 from transcript cassava4.1_000505m (locus cassava4.1_000505m.g) derived from phytozome v7.0 (chr-ID scaffold02264; pos 170998 to 171735 reverse strand)
ttaaatcaattcaggaagctctggagagagtgactgtgattgaagcacaaaagtaagtgatttgtaggctgatgttttaattattgggtgataatttgagagtggaataaagatgcacatgttgaacttcattaactttggtttatttgttgttagatcatttagcacaacttgttcaaaattgcgcaacacattggagagcttgcggaatgtggttccagaatttaatattcccacaaaagattatcttatgcaattggcattgactgctgttagagctgttaactcggtgaggcacttatctcttattcaagttttttgcattcttctataagaattcactgattttaataatttgagcaagggcattaatgtagtttctttgaactaattgaaatgcttgctgttgccatttccaggtgttttgttccatgaaccataaattaagggaacaaaataaggaccacttttcaaggtgtcaaccttagttacgctcattactttcatttgtgaaattttttacatcaaaagataacttggcaattcctttgctctgtacagttggctttcccttgtaaatagctatgtcccacctcttttctcccctgagcaggtcaaagaggtatgtgtaacaataaccctaggatttgcttccttctgtggtatactgtcatttggtaggattcttttgtcgttgaataagcttgaaaattgcattggttttcacagattgaggtc

SEQ ID NO: 47943 - DNA, 779 bp, Manihot esculenta
  Intron number 2 from transcript cassava4.1_028734m (locus cassava4.1_028734m.g) derived from phytozome v7.0 (chr-ID scaffold02943; pos 621950 to 622728)
tggtgagttcttacccatcatatctttcttcctctccctttccgatccctaaatgttcatcagtctgtattatctatcatttgggtgctacatgttggatcccgatctgcttgctttaactcgttgagtttagtatggagctattttgttgaatcaattgtctttatcgctacactttgaatcaggttcacaaagatgaaatataccttttgaacatctaagcaatgcaataattaatgtctacatctctaaatagaaatctacgttagtgccaaggttaatcttctatttattgctgttggagaatgtgggctttttccctcgttatggaaggaaatgtagagtttgaaaggtcttgttctggagcgaaagttattgctacagcttcatgtttcactgggtaaactagggcctttttgggtaaattgggggtttctttgaagtttcttatgatcagttggaatgggaaattcaactaaaccagagattatagctctattagatccgaggacagaaaaaaatgaaatccaagcaacatagccagcaggtgcgtggtgctaaatgaaattgttaaaattgacattgagtaccagagggcctggcggcatatcatctccatccttataattagacatttgtattcttcatttaacttacaacatatttttaatgttctcagcaagttaatatgtataatttcttacattgctaatagacttaaggaactttgtcttaaatattttgtttcaggttttggatcttatatagggctaagcaag

SEQ ID NO: 47944 - DNA, 382 bp, Manihot esculenta
  Intron number 2 from transcript cassava4.1_029549m (locus cassava4.1_029549m.g) derived from phytozome v7.0 (chr-ID scaffold08265; pos 4086918 to 4087299 reverse strand)
ccaggctgtaaatttcattcgtaagcatattatcaatcttcctttctgcttttgattgcaactacatctttgttgttgttgttttttttttttaatacaaactttcatttacgattttaatgttcatttgtttgttattaatattcttctctctatttgtgtttgtgtttttcttttggtttcaactctttgaagaatatacctcccatggaaagacaatatatgttcactgaaaggctggtagggggcgcagtacaacaattgttctctcttaccttgtatgtttgattcaaagtccaacttattggttgaccgactttggtagcgttcttttaacttttctataacaggttgaacacaggcacgactcccggtgctgcat

SEQ ID NO: 47945 - DNA, 600 bp, Manihot esculenta
  Intron number 3 from transcript cassava4.1_011045m (locus cassava4.1_009839m.g) derived from phytozome v7.0 (chr-ID scaffold03191; pos 13990 to 14589 reverse strand)
atctcaaggtgatgattatttcatggcttgagaaaattctatatagaaataaacacagttttgccagctgatttacttttcacgtggtgtctagggagagaaaagttgctagacttgttttatttggtgtgttttcccattatttattttgttgaatcagttgtttactgctgcttaggctgaaacaacaacatggtttcatgaatttgaagagaaattttgacatttatgatttatgagtcgttttcagtaaccactatatcattatttttttctcattccagcctaattgaatcaaatactgagactgttgagctcatctgtacatgcattttgtcgtgtttcaatttcctactaatatgatatgctgtggttagatgtaattattatttgtacatgattgtgagtggttatgggccttagttttacattcttctctacattcacttgtcaagtgttttattgactatttctccaagaataatctggtgatagctgtgcaaggtgtaaatatagtcttatgttatgactcatgtataggattagtttcagcctttatgctttgcgttttctgttaggttcgtgttgctgaatataaca

SEQ ID NO: 47946 - DNA, 516 bp, Manihot esculenta
  Intron number 2 from transcript cassava4.1_010081m (locus cassava4.1_010081m.g) derived from phytozome v7.0 (chr-ID scaffold05432; pos 45165 to 45680 reverse strand)
aattcccaattgatttcatcgaattcgacgttcaggttagcatcttcttcctctctctcgcaaatctcgccctttttctagaaatcatacgagtccaaactggtttcaatattaattttgaatttgataatatattgcatgacagtttgtcggcggcatcgaccgccgcgtccgcctgttttttcgttatttttgtccgtacatattacgcgtaggaggctggttttgataattcttgaatattgaaaaattcatataaacaaaaagtttgcattaaacgtcgtcgtttcagcgatttagtaggctaaaaaaaaaggtcaaaattctgtctgaaatattctggtttattggaggacattgaactgatggtgtttattttggttggggatttttttttttttttttggggattcttttgtactctaaaagaaattgaatgaaaataaagtatggagctgaatgagacaaagacaagaaagagtgaaaaacgagtgtcgtttttgtaggtgaccaagg

SEQ ID NO: 47947 - DNA, 982 bp, Manihot esculenta
  Intron number 1 from transcript cassava4.1_015775m (locus cassava4.1_015775m.g) derived from phytozome v7.0 (chr-ID scaffold11759; pos 25295 to 26276 reverse strand)
gggaggagtaagttacttttttctaatatctcacagtatctgaatctctttatcatgttgccgtgatattctagcgttcaattttgaaatttttgaatgggttgacgatgttcttgtttaatttttatatataatagatagaatagtgtatgtcattatacctgtctcttaccttatcctgctgctcagtttttttcccgagtattagaattattgtttgtgtttttcatttagaatcttttcggaaaaattgattattttttacagtttatggtttgcgggatatatttggccccttcaattaatactaagatggccaactatttgtggagagagattggatattatagacgaattaggtgttctagtgaaattattatatccaagagatccatgccatcagtgaagaagggaaaataattaatttattatataagggtttattaagaaatgtgttttgtaactgaactgtgtgagtgcattgtttgcctttagaaaaaaagagggatgagcttgtgtgcttgaatttggcccgccttacataaaatttctagtaaggctaggcctacagaatcgcccataggctgtgaaagagtctggatttatatggtttagcaagcattaataaaattaccatgatttatcaaaagtgtaccctgtcactgaaatcatatgtgtgctttctttgcttctactatactgtcacaagtcaattagttctatggattttgacgttttgagtaaatatttatgggtgtcttgtgtttctaaatgcgttctagtagtgctacataaataatatataattgttcttttcacaatttatgcatttgattgcaatatgcttgatatttacattcttttgcaacttatttgtggaaattatattataaacgatatgtggggattgaattttgaattagagtgtcatctgcattgggttaatattctattgtgtatggtttattgcaggacctgcaag

SEQ ID NO: 47948 - DNA, 1034 bp, Manihot esculenta
  Intron number 1 from transcript cassava4.1_014412m (locus cassava4.1_014412m.g) derived from phytozome v7.0 (chr-ID scaffold01782; pos 151816 to 152849 reverse strand)
cttgatagagaaatcggttttcttgaggtgggttttaacttttctttaaatttctttattgctcctagtacttgtcacatgacagcggtgaaacgtagaggaaaacaaagtttaaacagcctcaagaatgattctgctgatctactaatttgtgattggagacttattatttcttttaagactaaaatcttttaaagatacaacgtttcttgttgtgaacgttgggttgaagtagctcaagacggaagttggtcatatctggatgatgcatgaaggcctgacgtttagctaatcatgacattgtattgaatctgtctgttgattattatctaaaaatgctgaagttgctcatatattttcacctgaaaatcaaatttcaagccttttccctgcctgaagaaactcttcttgaataggctctttacatgctaacatatcaaaaattcacctgtttatcttgtggctttacaccattttccttccctcagaaaactattgtccttaactagatgcagttttaatcggtgaactttcatgtttactaaaatttacaattatagtagaaattgaaaataaaaaaattacacaagatcaatcttaagttattagagattgcagaaattggtttatccggtaaattagaagatgataggtgttttctttgactgaaattgcatgtcaggtgagtaactcttctcatggtctccagatttctgatattttctttgttttgactgctggcaaaacaaagtatgtgtcaatggtctgaaagtggtcctaaatgagaaccatgtgataagtttcactaatgaccaagaatcagtaatttcctttcttatgataaaagctgagcaatgcaattattaatgtctgtatctgttaattcatatcatgaagtttgtgcaccagcaaagctcaagcaatgcaaacaactcactaatcatgtttctcttgttcatcttgtgagtttctcattttctttcgtttcacttcttgcaggaggaactaaaatctgttgacagcctccagcctgc

SEQ ID NO: 47949 - DNA, 687 bp, Manihot esculenta
  Intron number 1 from transcript cassava4.1_007941m (locus cassava4.1_007941m.g) derived from phytozome v7.0 (chr-ID scaffold08245; pos 32445 to 33131)
ggggagttggcttaaatcttgtggctgcagatacggtgggttctatctaaaagtttacaagacttggcctttggtgtatgaactctttaatgtgttagtcaatctgaagtaaaaatggttttatctatcagaaatttctcataatattgttctaactgtatagcttattagttttttttcttctaggtgatgtataagctgagattttgaattttattctcataaggaattattttttaatcaactaaaagatctcttcctgagtagaagttttagccaatagagagtgtggctgtgatgaattttgattgctatgatgctaattttagtttgatatggtttatggatatatcatcactcatcagtccatgtagcgacatgcaggcttgtccagaccatttaaagttagaattcctcgttaattcaatttgcatgggattcttctctccctcctgcttcttttaaattttgtgaccgggtaataattgcttccacttaaagtgacttcctgaaagagtatgaatatgttttaggaacttgtgtttgatatgccttgtgatgtcagagaactttgtggcagtataattttgtctgaatagatgcttagttccttgggaggtagcattgatttttaagtgccacattttgcttttacattttacaaatataatgcacaggttatattct

SEQ ID NO: 47950 - DNA, 444 bp, Manihot esculenta
  Intron number 1 from transcript cassava4.1_007522m (locus cassava4.1_007522m.g) derived from phytozome v7.0 (chr-ID scaffold08463; pos 3575 to 4018)
gcatccaggtacctctctttgttctattgaattgttggatctgcgttcctatagcatcatttcgttttattttgatttagatctgcattcgtttggggattttctctagttcatttgcgcattgttgtagtagatttgtgtttagtagatctcaatttttataatgtatgtccaatatttattttttgctgcatcagatataaatttgattcggattcttccctcgtgtttggcttttcagcaatcatttgttcagttctgttagatctgtgtgtatttaatttttttgcctttcggttgtgactcagatctgtgagtttgattcttattcttgattatgaatgttgttcttgctttagatctgcttttttcgattagtgtgtgtagatctgtgattagtgagttattgatttgttattgacttatgtttttttgtacagcctg

SEQ ID NO: 47951 - DNA, 875 bp, Manihot esculenta
  Intron number 1 from transcript cassava4.1_019906m (locus cassava4.1_019906m.g) derived from phytozome v7.0 (chr-ID scaffold08265; pos 30184 to 31058)
gaggatcgtaaggaggtactctctttctcttctttgttcctttgtgtgctctgtttcgctgtttgtttctcgggaaactcagggaatggaatttggaaaggagcggaaagtgaaagttttttggttgtgtttttttcttattggatgtttaaccgagtacatgatttgaattcggttgcttattgtgcagggttggtctatatcttcatgtctgtctctgcttgcttgaggatttacttgcgttttctcaataaacactagatttcatcactctgtttcctaaaagatggaatatgattatcgattgagatctagtaggatgattttaatttgtttggttattttgttcgctcaaaaagttactttttgaaacattcaaacagagtaatgatttgctttttttttttttcaaacctcagaagtagtcaaagctttttcccttaaaaaaaaaaaagataaagaagaattatgtaaaatctttgaagttggaaatacgatggttgtcgcaattattttgtttccttttccatgtttctttcttgtacccactttcaatcttttttttcttttgttttctggcttggctttacttaagactgattccgaggattaaaatttagattcaagtttaacttacacgattgttgtggttttcctaattaatttgttagttcacatgtttgttaatgtcatatgctgacatgaaggacttagtttcttgtaagctcaaagcagcactaatcccttctgctttagtcaattatcaatcttttctgtgtttgtccatttggggagtttgaacattagttaatgtgtttcttcttcttcttctctttctctttttttttttccttttctgtgaagaaaactgcacc

SEQ ID NO: 47952 - DNA, 788 bp, Manihot esculenta; identical to SEQ ID NO: 47569
  Intron number 1 from transcript cassava4.1_012180m (locus cassava4.1_007695m.g) derived from phytozome v7.0 (chr-ID scaffold07238; pos 22182 to 22969)

SEQ ID NO: 47953 - DNA, 119 bp, Manihot esculenta
  Intron number 1 from transcript cassava4.1_030008m (locus cassava4.1_030008m.g) derived from phytozome v7.0 (chr-ID scaffold04043; pos 1183112 to 1183230)
ctcatcagcaaggtatgtttctttcttatcaaggtgattaataaataagaaattaagcaaaaaaaggggcaaagaaaagaagattaatggatttgatctttgattatgcagactgggaa

SEQ ID NO: 47954 - DNA, 283 bp, Manihot esculenta
  Intron number 1 from transcript cassava4.1_012419m (locus cassava4.1_012419m.g) derived from phytozome v7.0 (chr-ID scaffold08265; pos 1138107 to 1138389 reverse strand)
tctatctgcccaaccacaggttcttacagagaacccattaatttctcacttttttaatgcttcatgtcaaaatttcagacacaacccatgtggcttgtcttcttctttctgaatataatcacctaaaattctaactatttttttccttttcaagacttgccttgctttttaacttgtcttttgctttattctcttgggtataaagctttgattcatccactaacttgtttgttctttcttaattatttgtctttagacgagcacagtccgagaaacggcaacc

SEQ ID NO: 47955 - DNA, 748 bp, Manihot esculenta
  Intron number 1 from transcript cassava4.1_005145m (locus cassava4.1_005145m.g) derived from phytozome v7.0 (chr-ID scaffold00506; pos 21955 to 22702)
gcgatattaacccgcctctcgatcctaaacttggggtaattttacctgtcgatgccttttccccccttgttttgttagcagctaaatgggcttttggttttgtttggatcattatagatgttatgcagttaggattttgtttggtttcttccttacatcgttggattctttcttaatgtggaaaaggaaatcaagattgcggctttttagtttctagggaaaggaaaattcaatacgcagtaatcaaactggtaatttgcccactagaacagatgaatttcgtatttcaaagctttttgtaaaatcacaattagtagagtaaaatcttacgttatgcttttgcattgcttataagtttgcatctattcaatttttttccctacatgatagattcatctatcatattataacctgattatgtgctattgttttgaattttgaggtggatctagtctatttttagtgcagttgttaactagaatgaacaggaaggttgaaatgaagttattaattatcgcttttattttcctttttatcatgatttttccccctcatgggtatctttagttgatctaagctcaagtagtttattatttattaatattttcctttggtcaatagttgaatggaaaagactgagtgaactatagctgtctgtttagttcctgttttatttaattttcagaacttgaatcttctgctcttttttaatttcttttggtgatattccttggttttcaggtacacc

SEQ ID NO: 47956 - DNA, 513 bp, Manihot esculenta
  Intron number 1 from transcript cassava4.1_012263m (locus cassava4.1_012236m.g) derived from phytozome v7.0 (chr-ID scaffold11495; pos 149578 to 150090)
agaagtttggcaactggcaaagtagtgtctggcatgtatatgctaaatcttgtttcgaatattggtactttgagtttctttttaatggtaacttaccaggaaagagtgtctttgtcctacctttttctcgttttttattcttcagggagttctaaaattttcagggttcaaatctgattttatttgtattttttcatactgtgtatatattccctctctatgtgggtatgagatgtgcccttgagcacaccccttttcccattatcattccttggggctttttcagtttgtaatccttaggattttagtgggttctgatttaggttatttgaagaaagcactaatgctcagccgagaatcaatactagattgtatttttcccatgcttttgtgtctgcaagtctctgcctgcagcttctttttcttttcttttttcttttttttcttgttctaattttggttattgtcattcctgcaggataagagattttaagtccaattttctccgctatt

SEQ ID NO: 47957 - DNA, 702 bp, Manihot esculenta
  Intron number 1 from transcript cassava4.1_008641m (locus cassava4.1_008641m.g) derived from phytozome v7.0 (chr-ID scaffold10493; pos 952840 to 953541)
aattccgaacaagcaaaaacgagcaagcaagcaaggtagctaaaactctcttcttcaagcccatcctctcatcgccgatcatcaggtcttttcctttccccgccgtcgttatcttcgatctagcggtcacttttgatccaaatcctgttatcttccttttatggttgctgcagttgatgagcttttttcgttatgatttgtaggcttctttttccctttagctaacctattggttgctttgggaggtaattgctgcgaggtttcgaattgctgttaacaggattttgtgtggatgtagtgctttcaactgaatttattattctcgattaggaacaattcatttttgttttgattttcttctaatctatgttgcgaaaaaaatggttatgcaattaagccttttaggggaaggctgggttttttcactatgatgattgtatttactctactttagttgtggtactattggtttctgttatttgattagtaaattgttatataacggtgtggattagtcgttgaatttggtgtgaataattgctctggatttttttttagtccttagagtttaggaactcttctaaattaaattggtaaattgaggcatatgtaaaaataaaattttacaatttttttttctgtttgaaagttatgactggattttcccctcaatatgagttaattgctgttgttcttgcagtc

SEQ ID NO: 47958 - DNA, 300 bp, Manihot esculenta
  Intron number 2 from transcript cassava4.1_008300m (locus cassava4.1_008300m.g) derived from phytozome v7.0 (chr-ID scaffold03852; pos 308297 to 308596 reverse strand)
gttttcctaccaaatatcacctctcaattaataaggcaagctgatttcttttttattctttatttgtttaataattttattttgtctatttgggtattgggtttttcaatttttttagttaatttgattttgcctcttgaaagcccatctctgactttgtaggggggattttgattctattcttatgtgggaaagtttgaatttcttatcaatgacagtagttatagatctcagaaggttcttgatatccattttcttctgttttttgcaatggattgcagcattgttcttcagtttcat

SEQ ID NO: 47959 - DNA, 696 bp, Manihot esculenta
  Intron number 1 from transcript cassava4.1_025431m (locus cassava4.1_025431m.g) derived from phytozome v7.0 (chr-ID scaffold02943; pos 873612 to 874307)
tcatcctggagaaagttcttcattcgactggagaggtgaattttttaaaaaaaaagaaaaaaaattcaaacaatgattttcagtttcatatatttggattggcaatttttttttttcctttcaagaagatgaataatgggttcttgttgcttgattgtatggagttggattgatatcttcaaggaatcagcctttttctttttaactttgattcctattgttatacgacagacatgcatggggaagaatcattgattttgcattttttattcattaagctgagatataacaatctaaatttccattttgattcattattttcattttatacaagactgaaacattgatctcattgcattctcaactttcttaaacatgataaattcttgtaaggtgttgagagtattgaagaaaacagatcgtaaaaatacaaattgggggcgatggagcatttattgtaaccatttaatttatttgaatatctctgatttcccgagattcctgaatccctgcaaaaagaaaggcgtttgcctcattttaccttcatcttttttaacaggccttcatgtcctgctttttcattttttttttctgtagggttaatctctctctcttcatgcgtatatatatgtgtgcatgctcattctgctgcttttatctgtcagtggtttcaagaaagacacaaaaaagctctgt

SEQ ID NO: 47960 - DNA, 492 bp, Manihot esculenta
  Intron number 2 from transcript cassava4.1_006874m (locus cassava4.1_005878m.g) derived from phytozome v7.0 (chr-ID scaffold11928; pos 89551 to 90042 reverse strand)
aattgtttgcggtcttttacttggcattctatgtcagtactttgtattttcgcacgtttcattctctatagcaccttgttgcttttgtaattacagcttattagaggtgggatatttagctgaaaatgacatacaaaaattcatgctcatagttttgcctttccagttgttatttagttcgaatatgctctttatcttgcatgttctatgtgttttgttagagaaattgtcatttctgttgcttaggtatgcaatttgaactgcaaaacgaagtgtttctaacttttgagggcagactccatatttaatgtcattaattgatttttaaaaacttgcatagatgtgccacatcagtttagatgataatttggaggcatctataattttttttttatcatttgttatgttgaattaaacataattttcttccattgaggttatatgatctttgatggtttatcagggctagttggaaaggtggacttcactgtc

SEQ ID NO: 47961 - DNA, 945 bp, Manihot esculenta
  Intron number 1 from transcript cassava4.1_018798m (locus cassava4.1_018798m.g) derived from phytozome v7.0 (chr-ID scaffold04043; pos 568690 to 569634)
cccgtgtctcccaagagcaggtcttcaagctccaagtacgaccacactaccctaacacatattacatacacatcaattatacaaattacaaatttgcgaaatttaattattattttgtggtgtaagaacccatttcccaatccctaacgtatttcttcaattgggcaattattattttgttaaagatcatgcaataagcaccgcaaggtttggtagaagttaactggagtagtagtttcgaaaagaagggttttgggggtaatagatttcttattggagagccgtcgtcaagttgtggattaggtccatacattagcaaccaaatggactagttttttcaagtccccagtagtgtgatggctaatatttatgctttctccccctggtattgtaagatgttatgtaggttgcagttgaatgtatgaaacaatttcaatagaatactgagctcagatcctgccaccttcttaatactaatgagctagttaggcaaactcaatggcacatttttgtcaccaaattgtggagttttttttaggttttcagtttgaaatatgtgtaaatgacaatcttgagttaccatcatggagtaggtctccgttggcttcttgtttgagtaataagtcttgctttgcagttattcctattgaaattgtgaagaatatattgtaaaattaaggtatatggtaaaaattgtcatgtattctatgtttttggttgttcattgttgaaattaaacccttttcctatgtatcaatctttgcatatgcaaatcagatttatatttttggcaagggactatgttttgttggtcccatatgctatagtagttctcttgcatatcagttttgtttaacttcttttccttccaataattatgtaaggaattttgaattcttgcattctataggagctacacaagagacggttgaagataaaatcaaa

SEQ ID NO: 47962 - DNA, 789 bp, Manihot esculenta
  Intron number 1 from transcript cassava4.1_000877m (locus cassava4.1_000877m.g) derived from phytozome v7.0 (chr-ID scaffold08265; pos 4148434 to 4149222)
tatctccttgccgccactagctctctttcttgccggtaagttctctctgtacatatacgcttgccatcacctgaataactgtaaggcactcgtttgagacctaaggaacgtcagaaaactaaggaaatgaatgcttttgaagtcgcatatttttcactcacctgagttagttttgactagtctgcttgattaagatgaaaatttgattaaatgtgaagctaacgcagttgcttttatttcatttcaacttgatgctgcaagtattactaatagtcattagttagcttttcgatgggaataatttgaatagaagttactcaatggaatgttcaagtgattttccccattttcagtaatttgactctttgtatattatgttctagagcccggcagaggacttgtatagggcataaaatcaaccaaggatggatcattcttttaagtctgagtggcctaagttttgatgttgctctttatggtcgtttgtaatcttactgttattgtagatataagcatatccttcaatgcaaatgtaaatttaatttgatactttcttctatatttggaggctatacgttaattttatccaatattgatgcagcggttgttttaagtttgtgatactatatattagagaaattttattttgatttcattaacttgagtttacgactagtaagtaagatggaggccttcaattgtccaatgccaataatgtatttactgattaatgaattcttaatgtctccccttactaatagtagtcatggtcttttctgtgcattccag

SEQ ID NO: 47963 - DNA, 589 bp, Manihot esculenta
  Intron number 1 from transcript cassava4.1_010487m (locus cassava4.1_010451m.g) derived from phytozome v7.0 (chr-ID scaffold04043; pos 1048586 to 1049174)
tttagtaattccccgactcggattcctcaagataggtttgttttctacaaatctctgtactttttagccattattgttgaatgggtttttcatttttgggtttcttctttacgtttttgttaacccagtaggtaaccaactacgttggggttgccatctgttttctgcaggaaaaaatttctgaatttttaattttctgctcattctttcatgtttcattaccagtttattcccatctttttgctctgtttatatgtctcttatggggagatttgcatttctgtgtctgattttgttatttcagaatgttattggttttattcaaagtcctattaatggttgtttagtggataacatttaattacgttgtcttgtagcagttaagatttgcagttgctgcagtctctcttcgttttcattttaatcaactgattgtgtaagtttgatacttaaattggctttgcaaaccgtccgttaacttgtaaggtatttgaagttggcttgtcaatctccacatcaatgtgttaactgtagaatgaatgcgttttccctacccctggctttttcagattttggcagtgcaagtgat

SEQ ID NO: 47964 - DNA, 874 bp, Manihot esculenta
  Intron number 1 from transcript cassava4.1_005649m (locus cassava4.1_005649m.g) derived from phytozome v7.0 (chr-ID scaffold05806; pos 300106 to 300979)
cttcccttactttgatcattggagaaaagtttgtatgtattaaactttcttctctttttttcatttcttgttaatttcagtctgcagaaattgttaacaaacgctttgaattttcatggatgccttatctctttcatctcttgctttactttccctatttcttttgatctaatgtgaaaacatgcatctttctattatagaatttaatttttgactaattctgcaacttttctttttctttttttaatttacaccggtgacgtgctatgactatttatatgtgattgctatgtatatctatttcatatcttggcgacaatgacctcaaatattgtgctttatatttatttatattattagaaaatgaaacacacccataaatcaaaacgtaacaattcatataatctataattttttttaaaaagaaaaaaaaaggaaatccccttttgcaaggaataggagggtagaacatgaaccagcaaatttgtgaaataaaaaataaaataggtgatgatttatttaaggatccgaagtggcagatagatggagctgtcaaatgaaggggaccaagtagattcggtccagtcatgaagaagtcagaatcaaagttggccaaattaataattgtttcattaaagatggtagttacatatttacattattcttagtggcccatacaatattggcttagaaaatacgaccctagcctaagccctactgcaagaaaaaaaaaaaacaattattgcagcttctgaattttaacctagtattattaaacgcaagttaaatcaaaacgtttgatttgacactgaactttgagtcaatttcataatttgcaggtccgatttacacgtactcaactgggttcaagcaa

SEQ ID NO: 47965 - DNA, 489 bp, Manihot esculenta
  Intron number 2 from transcript cassava4.1_010322m (locus cassava4.1_010322m.g) derived from phytozome v7.0 (chr-ID scaffold03852; pos 278946 to 279434)
tcaaaagccatttacaggtctggcctgaacttgaaattttcagttttttttttttaattaaacacagcacagccctttgcttgtttctgtttcttctgagctgcggtgaagactttgggcataaaaacaggcacgaaagccgatgaatgcagtgaatgaatgaacagttgagtgtgctgtttgtgatacaggacaagttctactttttgagagggggaaagagaaagaaagaaagagaaaaagtagccatcatttctcaataatagaggcaattactgaccttaccaaacatcaacttcgtggttaataaacaaaccaagaaaaatccagaaagagaagcatctgatttgatctttctttctattgaccgtttctttttctctctctttttcattgagaaaatgataaaatatactatttatttattttaatttagctatagctctcgtttgttttctattcattttctctgtctcttttgccttgcag

SEQ ID NO: 47966 - DNA, 781 bp, Manihot esculenta
  Intron number 1 from transcript cassava4.1_013587m (locus cassava4.1_013587m.g) derived from phytozome v7.0 (chr-ID scaffold08542; pos 713101 to 713881)
ttcttcttctcgtgcagaatcctcttttttaactggtttgtctgtctcaaagcatcctctcatcagtcacccttgttgtatttatcctggaatttttatttgttcacacttcacatccatgaaacacaatggatagggcaacttgcacataacacaacatgatgcagacacatgatacaaaatatatgatttttatgtgttattcattcatatgtaaatgtaaggacctatgcagatgtgataatcttgatatatcttgttgaaaacacaaaactgagtaacaaacataaaaaagaatagctgaatgaagggcaatttttactttctagcatgcttaacttcacatttctgtttcctgcaaaaagttaccaactgcatgtgaaggactgaagggtggcctctttgcttcttagtcataatagagtaatagtaactaacaaagataatcctttctgtagctatcaaagttgaaaactaaaaccaaataagtatttctgatgtctgaaatagagatatgaatgtcatgtcttgcaatgtctgaaatttttcataattataaatgtccagacatgttttggacatgatatttaaggcttgtcaaggaaaagtactctcacacatttatgatatgaacatggctgcaatgcaatggtattcatgcttcccaggtctaaattatcttcattcctgctgtggccaaattttgcctggaattgacagttcagtaatgaggattatctttgcaggcgaattgccatattttcagagattgtggaaatca

SEQ ID NO: 47967 - DNA, 709 bp, Manihot esculenta
  Intron number 2 from transcript cassava4.1_013587m (locus cassava4.1_013587m.g) derived from phytozome v7.0 (chr-ID scaffold08542; pos 713919 to 714627)
tgcagcagtcggtaatgctatcaccactaattgcacccatttgttgttatatacttatgaatttaaggttatttgtgcccttagattggtaatatagttaacatattagacaggacacaccacagctgagttgataggtgttcagaaatctaaagcgtgtttgtgaaatcatgcttgatgttgacttaggttcacttaactattttggtcctgatattaaaacagaaagctagtgtgaactgtaatcaaggggctactaattggatgcatgtgttttttccctggccagagttttgtagtgaaccaattcgttaaaatactgctgagtgatttcttattaatgtaatgacaccaagccattattaatcctctgttttatttttggtaaactattgtataaattccccccccccccattatacatctgcgtataacttacttttgattaattgagcacttgctaatatctgtccatggacattttctagtgccaggattggcatagcacatccatgagatggaatcaaatcttcatgtttttggttaaagaattctcatctttcttatttattgtcttgagatggaagtatgctattcttcattggcttaaagattatatggatgttactgagtttcgtcttcaattctctcatatatgtctttcatgataacagggaatctccagttcaaggaaattactggcagattc

SEQ ID NO: 47968 - DNA, 436 bp, Manihot esculenta
  Intron number 2 from transcript cassava4.1_010822m (locus cassava4.1_010822m.g) derived from phytozome v7.0 (chr-ID scaffold10292; pos 43605 to 44040 reverse strand)
aactgcttcgactccctacggatatattttttcaggtttgttttcgtcttcttgcttttatatcgcttgaaaattggttgacttcgcatttgaactctgtcgttcaagaacattaagtacggatcagaaactggggtttcggatttagagagatctcagcttgttttggggtgaaattgatactttaaaaggaaagaaagctaggtttatttggacttcgcaaaacgatagaattgcctcatgcttaatctttaataggaaattttatttcttctgttttagtattagcttagctatacagatctttaggagatgaaatgattggtggttgaaaggtgggcaattaactcagtagcatttgattcgtcattagatggttgtgtaaaattatctgggtcattggaatgaatttatcaaaatgtattgcagagacggt

SEQ ID NO: 47969 - DNA, 865 bp, Manihot esculenta
  Intron number 2 from transcript cassava4.1_018829m (locus cassava4.1_018829m.g) derived from phytozome v7.0 (chr-ID scaffold03823; pos 2323 to 3187 reverse strand)
atcaaggtactatctgttccttatctaactgtctattgaggtttgttcaaataagtaatgaaatttatgtaaatggcaattatgatatctagtactccttgatatttagcatatttttttggctctctccaacatgaatgtgtatttttagttctttgattggtgatggtggttaggccatcactctctgcatttttatcaccgtctgtttttttatctttcaatgcttaaatgtacattttttgaaagggttcctgtagttttgcttacataatgggaatacaattggggcatcaactcaagctttttccggcaagccctatttcccccctcaaccatagtgatttaacttcaggggactcccactactagaattcctttatgtctatggctgctgtgcttctagtcctagcatttgtagtttctactcattgatagttaatacacagcatggtttaattagcttttgtactgagattaaattttagctgatttcatatggacagaaaactagtaggttaacgctctttaataaaaataaatgtaatggggagtaattcttgtatggcttgtaggtatatgtctggaatatgtattggtatagataacagaattgatgcttagaggagtttttcatcttattagcaggcataagaagaagtcctatccttgtaatgtctgttgaaagggaaatgaacaaatagaaatctacactatgcatagttcaagcatgagtagttttactattggcactctggaaagtgaattgtcctgcataagttatgcagttttaagattttcgtatttagaacgtttttattaacttgataaatttttttatttttcatcttgtttagtggacttg

SEQ ID NO: 47970 - DNA, 826 bp, Manihot esculenta
  Intron number 1 from transcript cassava4.1_018829m (locus cassava4.1_018829m.g) derived from phytozome v7.0 (chr-ID scaffold03823; pos 3405 to 4230 reverse strand)
ttttggtctttccgattctaattcctgtccaacaggtgatttcaaggccaagcttcctcttttcactctcctgcctcttaatttttccccttattgagattttgtttatagttattattgattttagtcttaaccctaactagttcaaaagtagggttttactctttgatgctgctttttttctggtcatgaatgcgttattgtcctcgttgatctgtgttgagttatgaaatttgggatttatttttgttacagagataaatatattataggattgagctttgtgaattataggttcagctattgtttttttgatcactaaggaatttctttattgttttatacattagatgatcacaagctaggtattagagtttaccatgccttttggtttcaatcgccttcgaggggatgggttgctcgtgatgtattttttggtgcgaactagttttagtcaaatgtgagcttcatggttttgctttgtgatagagtttgagctgaattgatttgctttgaccaatgtttgtgtaaggttcagtaatctgatgggtgtaactgctggagacgatttggtttcttatagatttattgcgcttgaccagcatacttgatagctttggctttccaaaatttaaccaagcaaataatttatttcgtcttttgagagggtcaattttgttattagggaagatttcttaacgtttccctcgttctttgttatacgtgcagccatttcttatgaacttaagaggaatttatccttttaaactcccactttgtcaaagttgatcattttgtttcacttgcttcaataggtttcataaaa

SEQ ID NO: 47971 - DNA, 747 bp, Manihot esculenta
  Intron number 1 from transcript cassava4.1_028872m (locus cassava4.1_028872m.g) derived from phytozome v7.0 (chr-ID scaffold06814; pos 297004 to 297750)
ataaaggttagatagtttgaattctcttctttgtttctttggttgctgtgaaagtgtagagaaaatgacagaaaattgcaattagaattatgttactattcgttgaagatattgtagcgcagtttgaatcaatgaccgacatttagattgcttaagttccttttacctcagtttgcttttttgttagctcgaatttctatttggttttcgtgctacttttttttatcgtactgttcagtttctttggattgatatatatatatatgatcaaacatggattaggacctgaaatgacaaaggggaaaggaagtgcatgagcttggtgtctctaaataataaaatgcatgatctgagagtgtgcagccttttctatattgcagttctttgcaaaatggagcttaatgggatagctcatagcccttcttggctaactaaaatagtgcctgcagctcagttcagtatctagttttttttttttttttctaaaatttattattagagttctaaaagctgaaaatatcagatatggaccatgatcttcgtctataactgtcttctattttagcaaggattttctttgtgtctgctacagtgaattttgtggtaaaatgagtttacactcgaggaattattaggtctgcctataactgggatgtcactcttttttctcactcctccctctttatctctcatatgtaatgatgatgattatacatgttggtgcagaaataactcctcatcatcttg

SEQ ID NO: 47972 - DNA, 755 bp, Manihot esculenta
  Intron number 2 from transcript cassava4.1_032897m (locus cassava4.1_032897m.g) derived from phytozome v7.0 (chr-ID scaffold04795; pos 30967 to 31721 reverse strand)
aagcaaaaataaggagggtgtatttagcatacttggtgagtataatctgaaaatcaactgaatagtattaggttttcagtttatcatgctatttgcaatagtattttttggaaattgtggtgctcttattcttctttgctgatgtatccctttctcaggaatgtttatgatgctataaaattgatactctatggaggtttgagaaatcgtgtgtccctggcttaagaagtgcaggttccactgttatcagaatcttacgattcttgattcaaatctttcgattcaaatcaattttcctataaatcgatttgaatctatagagcaatttttaaatgtacctgaatcttacaattctctattcgatcctacattctaacgattcaaatatatagggtaaattgcaaatgcttatgaattgtttgatatagcaatttcaaatgccaggttatgacaacatttgtattgatatatgttcaacaaatatcaatgattgctggattgtgaaattaattaatgaaaaatatccaagtggggatagaaaattattttaacattgatttgctagtattgcccctgcatgtgaaattggtcattcttggagtttgagagtttgctcatatatcttttatacctgaggattaaatggtggtctttccatcttgatttgcatgtttggcataatttttcttgtttctattctcacagaaaaggtaatttatatttaccgtttgtcatcttttctaggttattggggc

SEQ ID NO: 47973 - DNA, 694 bp, Manihot esculenta
  Intron number 1 from transcript cassava4.1_003915m (locus cassava4.1_003915m.g) derived from phytozome v7.0 (chr-ID scaffold08083; pos 68367 to 69060 reverse strand)
attatcgccttccctcttgttggggtaaaattttcagttcaaaattttatattcttgattttcagttatgtttaaattttaatggtctctcctttccctcgtgtatgcttagctctccactttctttttagttctccacaatgggactaaaatcttttatattgtctctttcactgtcctccctcgaatggaaactggatgcgaatcctggagtaaaagattttaatggtctctcctttccctcgtttcttttttctcgtatagagggaaccagtatgttttaaaaatattttttggtgaatctcttcaatctaagaaaaaataaaattttatcctgaatatagctttcaaattaccgtttgaaatttgtaccttagatttgaaattttagagaaaatcttggagttgctttcattcatacccattccattcctaaggcgaaccaaggggaaccctcaggccatttagtatgtagacattatggattgcatacatgtatgctctgctattatctctttgcaattttacgcacagttaattaggaatgtggcattgcatctatttttaagtgtaatgtaaccacacacaatgttgcaccttttttttttttcatttcgtaaaattgtgcctacctttttgctaatgaatatgcaaaaccatatgctctctatatgtcaggtttcagcatcccttg

SEQ ID NO: 47974 - DNA, 979 bp, Manihot esculenta
  Intron number 1 from transcript cassava4.1_014565m (locus cassava4.1_014565m.g) derived from phytozome v7.0 (chr-ID scaffold04043; pos 1285639 to 1286617 reverse strand)
gggcaagtaaacctcagtttcaaattttaattcttgtatgttttttgttttcatttgatgcttctaccctatatatttgctgcaattctcaccaatttttgttctttctaattgttggctgctatttttaacattttctaggtttccttgactgatagaattcattttcttggcacgttgttgttgattctgcattgtattggctgtatttgtgtttgctcttgtaattgctggacaaccaaagcaaacccctcgttgttttgttgtttgtttttaatctgtttatgatacaacaaatgagtagttgcctctacatccagtagctgtgaatctgttgacttgacttctttatttggattttcatctgtttctctcaattgatcctaaaagtgtctgactaataaaacaggtgatatttgcagggggtagttttgagctccttcgatggctgaaatcgtagttatgaattatcatttaagtatgtgaaattagtattgtcttcagtcaccaaaagttcaatcatgttaacttatctgtcttggattttagtacaagagtaatgtggccctctaatatccaacatggccttctttttttctccttaccatttgtatgagttgataacttaataattattctcattaatattttttaaaggaaaaacaacaattaatcttcttttcatgaatggcaatggaaatggtagacacttagaagtgataaaaggaagtaaaaacagaatctaaggaataagtagctgctagtttgtcattcagtatggatagcaatagtcgtaagtgtgcacattgctgtgctccgctgacaatgaagtgactctttgctatacttttctgtgactgggcttgatcttctaaaaaattttcaatggattttgaaacttactatctatgacttttagatcttatgtgagagcctgatttagtgcctgtgttaggaaggtttcagatactcaaagatc

SEQ ID NO: 47975 - DNA, 815 bp, Manihot esculenta
  Intron number 2 from transcript cassava4.1_020946m (locus cassava4.1_020946m.g) derived from phytozome v7.0 (chr-ID scaffold09169; pos 83873 to 84687 reverse strand)
gaaccctctggaccatcacggttgttgtctaccatgtaagtgataactgtgcttacatttctatgttttaatttctatctgaaagtgatattattctttaacttttctgtttattcactgagaaaaattttagcattagtgcaataccgacaatatgctttcagatgatcttcctttacctttcactctaatatgaattttactgcttattaggggaaaagtagggtaaagaaagagagggagaaagaagggtcctgcgggagttttctctctctctctctctctctctccctccagtttttggggttgttttaacttatggggaagtgaaattgtgttttttttcctactttgtttagaagtccataaagtttctatcataagcatcacatgctatagtgaaaatataagatgggctaaaaactttaatttacttgaagatgtgataaaaagtttctgttttgatataagctaaagaaaagaacaagaaaaagatgctattgtgggaaacatgctggatacttggtaaaatttaaatgaatttatatggaacccaggaaagtaaaattgaaatgtgatatatttcacttcacctgtttaaaacttacttctgttcatgggcatgtatgaaatccatgctttttctcatgttggagagactaaaataagcttacatcctttgtaaattcataatgtgttgcaagaagcttttcttagatggacagtgttaagcaacttctgttcagaagtgatggaaaattatgatctgggtgcttttagtgcagaacaagaagggataaaagtcaatccaattg

SEQ ID NO: 47976 - DNA, 882 bp, Manihot esculenta
  Intron number 1 from transcript cassava4.1_012123m (locus cassava4.1_012123m.g) derived from phytozome v7.0 (chr-ID scaffold08265; pos 690556 to 691437 reverse strand)
ctgagcagctccacaaagcctttgaaggtcttctctctctctctctctctctctctctgagatccatctcattatttgatggtcctagtaatttgatcagtccactctttccatttatttgaatgctgatcgtgaaattctgtatcagatcatatgtagtcaatggttaattagatgatcgcagttaatttctttaaaattattggtctgatttttagtcaaaaactgggtttgggagggttttgatgtttgatcttgtaccttttttttattgttagattacatttgctgggctttgagtgttgatgttaagaaatagcatacttaatcaacagtagtttttttttggattttttaaaaaaattggagcagacctgtgagccaagctgaatcgccagtttcagttgattgtaaggtcgggaaaggagaactaaggctagcctctggggtctcagttctaggcccaaggagagcctttctgtttggatagcaattttgatttctttggaataaagagttccaattgcaaaagtttacttctgccttaccgtttattttatggcctattgacaatgaccaaaaacaagaaacattatggaaaaaaaaaatagcaagaagaagaatttgaacgtgtttaattagcatttttagaggtcttttggaatatgatcaccaaatgtctgtatatttataactaattaattgtgagagatctaattttcagtgaattagcatgatccttatgaattgatctatcaattgatgtcctgatttgatgtggtgattaatttatattcacagcgacgtctatgtctctctgacattttgctcccctgtattaagatggatctattctaatatgttttgatcatgttttgcagg

SEQ ID NO: 47977 - DNA, 646 bp, Manihot esculenta
  Intron number 1 from transcript cassava4.1_005404m (locus cassava4.1_005404m.g) derived from phytozome v7.0 (chr-ID scaffold02943; pos 910535 to 911180 reverse strand)
cctgaaactgccaggtagttttaaaccatcgttttttagttggattattttgaaaggtgtttttctttgactctactctttctagggaagaagaacaacgaaagatgccttctttctttctttctttctttctaagaaaacatcaaataataaacaaaataaaatcttgatttattctcgtaaatcaaaatcagtgtttctaagtccatgctaattagatcttggtttgaatcagcttctgaaaaaacaatgcatggaaagtggaaactgtgctgtttggccggtgggaaagacctaagatcatatatttattattattataagtagtcaattcatctgcccagagatttctatgttcgataagtatatataattcgcatatgaaaggcatatgggcaatcatttattttttttaataatttatttgattggcatatgatattaactttttaatgttaacataacatcatcagctaatcgagtgtccgactcttgttgcaaaagctcatttctattcgctttaaaaaaattcttgttcatgaagaatctctcagttctaactcccgtaaaataaggatttaatggtatgatatgtggtttgctgatctccatttaatgtgcagatacacagccctagtggagaata

SEQ ID NO: 47978 - DNA, 939 bp, Manihot esculenta
  Intron number 2 from transcript cassava4.1_029443m (locus cassava4.1_029443m.g) derived from phytozome v7.0 (chr-ID scaffold06814; pos 929550 to 930488)
caacggcgacactgatactgcttctgataccggtaggtagcttgcttgctcactcactctctctcatccctagctttaataaagcttaaatgctacaagagaaaaggaaaacaatgatgattttttttttaattaaaatttgaagaaattctgctaactctttcagaattttgtgcgtgcggcggagaatcacggtttagaggtaacggaggaaaggaggctgaggctccggttgattctatcaatggtactgtttcttcatcgtcgtcttctttttcacttcctccatattctatatcctgtagtgttatttggatgaaatttcattggtttggatctttcttcttcttttatgaatcgtgttcaataagagccagctcattttgttgataatgggtgaggggccagctatttattgaccaagttaatggagttgggtgctaatacattgcttatactttttccccttatattctaattaaaaatatcttcaaaaccgtggttatttattttgattggcttctgtccacatcttagtatcttttttattattttgtaattttaactgtttatattttttagaaatttaagttctagtaatgatttacttcggatttcgatggatacttcatgaccatgcgcgttgattaaatcattccatagcatcatagtttgttgatgaaagaattttcttttttttttttttttttttttatgataactccattttacatttcctaataagaattaataattagaatcaataataatattgaagatcaagtgattcctacttcaaatttaaccatgctgctttaaaattttttaattttaatttttttaaaggatgctttaaagttgatgctgtctgattagaagtttcgtcgtattgcattgctcctttgactgaactatttcttctgattttttgggtttcag

SEQ ID NO: 47979 - DNA, 909 bp, Manihot esculenta
  Intron number 2 from transcript cassava4.1_006293m (locus cassava4.1_006293m.g) derived from phytozome v7.0 (chr-ID scaffold07359; pos 38274 to 39182)
atataccaccacctgatacacgctataaaacagaggtatggcccttaattacatgtttacagtaaatcaagattgtgattatgtgatatacattgttaggagtttttagaaggttatgttctttttcagttttctgtatttggaatcctgagaactctttccgttatgttttttgacctttgattatgtggctgctggaaataatgagattgattgcctttttggcttaactaataaggaaactacaagttattgaggattgtgtgaatatctgtccactgaaattggatgattaaaaattataaaaaatggtgggtgaaagtcatatgagattgaataggcccccggaacctccacgtgccctttgtgagctacaactgttatctttcagttcatttggctctggatgcagggtactgcattatgcatttacctgataacatctcagccgtagttatcttggatctatagagaagtattattagaaaaagcaagtatttcaggtgatggcatgttctaatttctggttttactggtaatggtaggctgtacattgttactatgatcttctagaactttcttttatacttcattttcttttccttcaataatgctgaacttatccttttgagaaaagttagctgcttggctgcttgcattactgttcctaggcttaaggtaaacaggctcttgtgtctgaacgtgagtttgcaagcaagagtatttgtcccttatgatgattgtctgggtttgttgacatggaaatggtgtaaaactgtagtctgatgaatggaactaatacagtaacaagtaacaactgttaaatgtattggcgaaatatagtagtgcatggatacttttttatgtgcttatgagttgtgatatgcctctcaatgtccattgttcagg

SEQ ID NO: 47980 - DNA, 963 bp, Manihot esculenta
  Intron number 1 from transcript cassava4.1_007356m (locus cassava4.1_007356m.g) derived from phytozome v7.0 (chr-ID scaffold02943; pos 459041 to 460003 reverse strand)
tactgattttggactctctgtcttcatagaacaaggttggttgcaattgggttctttctcgtctctttttttttattattattattatttttcatgcagttctgcagcttcttctagtttagattcattggcttgaaactcataaccaatgatcagaaattgatatctgattcccacttatgaaatttcaagacaaatctaggatttcaatcctatatactggcttgattataatatccaaaatcgacgtaaagtcttaattcaaatacaatagataagataataactagttcctggaaatcttaagccttagaaaatatctaaaacttgaaacctgtgatttgttgttaatagctggaaagagacattctagtttgcaaccccaatttttcttgatggcagatgtcattatgggttaacgggcccgagtcaatggagacagcgactggtcaaccgcgtcaaccccttaaattattgacagaagaaaaacaatggggaaaaaaaaaggaaacggacatattacccatattatgggttttgtcacatcttgtgactcctgttaaaacctcagcaaacacgttatagttggtgaccacgaaaacaccactaaagtctcagaacagctctttcttgcaactttacacattctggttatgaagagctgtgtgtttcaatatatgtttatcttatctaagtagttatcagtcatgaacataactggatttagcttaactggagggaaaaaaaaatgtatgatttataagaacccattattgtgcaattcagttctgcaagaaagatttgatgccccctggtttcttgttgcaccatcatcccctaatagtattgattctcacatacaaggttcactagtttgtgttcttagttctctgtgtacagtgttctgagtttaaatctctttctgcaggaaaagagtacagagacattgttggaagtgcatac

SEQ ID NO: 47981 - DNA, 709 bp, Manihot esculenta
  Intron number 1 from transcript cassava4.1_013029m (locus cassava4.1_013029m.g) derived from phytozome v7.0 (chr-ID scaffold08265; pos 1592683 to 1593391)
taattcttgacagtaccatccgccagaggaaacttgtaagcgtctcctctctctctttctgttctttcatgttttgtctgcccattttctcttttgggtttttcttacatgtaatctttacaatattactgattttttgctttctttctcattaatgagtatggaatgtggtatatgattcagtttcttctgtaaccctatctgggttcatagctagtgataaaattaagccaagttctgttcattgcataatgagaacgtgtagggcactcaattttctggtgatttctgatgaggacatactgctagaattgttatatgtatgaatttgggcctagatttcttgtttaatgctgctttcatgtttaggattgagttcaaaattggcagcataagctattgatgcacatgattcaattagactcattatagcttgtgcttacaagctaccaactcttgcctgtttggatcaattcctattataaattttataattaaatgtatcatgcttgtcatgttttccctcacaaagttccccaatttgtcaacttgtagtagcctaatgggtttcaaagcaaatagtttttgcattctgttgcatgtaggagtagaatgtgtgtgatttcatctatgctcattaagtttatatatgcttattaatttgattgtcgtttttatcaggctattccaagaaagtttgtgaagaaat

SEQ ID NO: 47982 - DNA, 244 bp, Manihot esculenta
  Intron number 1 from transcript cassava4.1_033053m (locus cassava4.1_033053m.g) derived from phytozome v7.0 (chr-ID scaffold09218; pos 49141 to 49384 reverse strand)
gcctcaatagtgctgattttctgggtgagtatttttctgctaagaaaattacgcagattgtttttgttttctgctgagaatggctctgttcggcagctattttaaaagtaatggttagtgttttgactcagtgattaagagagtggattatgaaaagttaagctagtattcccgaacagggccaatgtataggctggtcttaatgctttcctgtgttttttttttttacttatcagctaagcta

SEQ ID NO: 47983 - DNA, 688 bp, Manihot esculenta
  Intron number 1 from transcript cassava4.1_004693m (locus cassava4.1_004693m.g) derived from phytozome v7.0 (chr-ID scaffold10114; pos 183818 to 184505)
caagcaccgaagactcaatcggcttcatcattccggtaattatttttcgtgatttttctttgtttggcctttctttgcactcattttaagcttgatttgatgtttatttttagtttgatttagtgacttttcattttcttattaattttgtttgttgcattcggcaattggaatcttgatttcatcttttcttttaaccgattattgaatgttttccattaagcaaaattaatctacatggttattttatatttaattattatcattgtttagatttcatgaggactattgttttagcttatcgttttgtttctcttttcattttctcttctttctgcgcctgttagtttcaactagctcgcattgcagctaatttatttgctacttgcacagattatgtttccattaagatattgctggagtttaagtcaccaaaagtagtaaaacttaggtggttttggttggttgatttctcctcgtatgatgcgtttagattggaattgaagtttgtagcctcattgttaaatatctgaaaatcatgcccctgtatcttcctcgctcgcgtaagattgctcctgtccagctatctagtacgtgtagttggtcaactgacaatatgtacgtgacatattcactcattttgtggtttaaatttggaaaatttttaggggaagtcgtggcagtagct

SEQ ID NO: 47984 - DNA, 455 bp, Manihot esculenta
  Intron number 1 from transcript cassava4.1_012922m (locus cassava4.1_012922m.g) derived from phytozome v7.0 (chr-ID scaffold11232; pos 113953 to 114407)
gttcgcccctggaaaccctcaataagcaaccccaggtttttccatatttttaattccaatctcaatctccccaattatttatgtattttcttaaataattatctgttttgctaagcattaagatagtttttctttcttttctatttaaaaaaatatatatttcataggttaatggttgagaaaatgtattagggtttcttttcctttctattttgtagtagtttttgatttttttttttttggcttagtgataatgaaatagttttgaatttgatataaaaagatttaatattatatgaactgcaaggattttttttttttaaagattttgatgtgcgtatggtttggctaaagaatttgttggtgggttttgttaccgttctcttttaatattttttgtttccatttattggtgcttttctttcaggtgcctccgttctctggctttccagcat

SEQ ID NO: 47985 - DNA, 1043 bp, Manihot esculenta
  Intron number 1 from transcript cassava4.1_022043m (locus cassava4.1_022043m.g) derived from phytozome v7.0 (chr-ID scaffold06212; pos 98956 to 99998)
tttcctctttctcatcctccaacctcgacactgaggtgaatagactacttctctttcaccaattgttagcattcctctttcatgtgtgcattctattagcccatgtcacaagattgttaaaaggagttttacagttagaattgcatttgcatagcaaagaatatttgttattaacttccaatgtttgctttagacaatctatgctacccatttctctaggtagccatattacaggtgctagtaagacagatcaattagttctttgtatataaattcttttaacattgaagaaagctttagaattgatccagctccaagcctttgctttatcccttgcttcctccatctcatctatagttggatgatatggcattgcttgatagacatgagagcacaggaaatcaagacttctgcctctctatctttagaattaagcatgttttccatggaaatttttatcgcctgaatcagacattagtcaagacagaatacagtgaaaatttttgtgttgcagacactttttctctttcagctggatgacctgtcattccaaatttcttgcttttataacatttaaaacttggatctagtagttgcaatctgtgcatgtgtattctaactctgacaaaaaaaaagaaggcttgacgctgaggagtgagctggtgtacgtgcctgttcatatcggttatgaatgggtgtatgtacttatatatcactaaggagtcctgtcaaaattgctatgatcttaacttggtggttgcaatccatgtgcgtgtccgaaccctgacgaaaaaaataacagttaaaacttcaaacctgttcaaagaatatttgtgtagttttaaaataatagatcttattttaactgtaaagcttttctttataaaagcaggaaggcgatccaaacagcttttgcaatttgtttttgtaaaaattatcttagaactgattcagctagaacttgttcttatgccaaaatcaattgtatttatctgagatttcaaccagtcaacagcatctttcttccaagacaatagcaagtc

SEQ ID NO: 47986 - DNA, 767 bp, Manihot esculenta
  Intron number 1 from transcript cassava4.1_017120m (locus cassava4.1_017120m.g) derived from phytozome v7.0 (chr-ID scaffold08265; pos 2057136 to 2057902)
ttcgtctcgagttctttgctctctctttgaaccaggtctgttcattgttaactgaaagttcttttgtttgctcttcgattttattgggtttctatgtgtgtagatgtagaagtgtgaagcagtgtatggttgatcttcgactaggaaaatcaaaaccttagggttttgattctgtttatgtgttatttgcttgagctttacataactgattgattaagaagggcaaaagaaaaaaaatagtaggagagatgatatgcagaaagtcaaatgtatggaaaattgttgatgctaatgtgttttaagggatatatggaaatgcttgagaaaatttaggctaaggggaaaagaaaacaactttctcttacacctccaggttgccgattaacctgatggttctatgaatcttagaagtgaacacttgtcaatgatattaacaactgtgaactgtttccaattgtattaccactaaaagtttgttagttatcgtcatttatagaatggaaagataaacaaaaggtgcctcactgaattttccttgtgattcttacttataatttttaattctcattatatttttcatgttcatgtcagtgtttttggatataagttaatcagtgaaaaattttgttaatcatgttgaaactcacagtgttactgctcattttaacttcaatctgagatgcagaagttcttctgtctccatggttttaaatgcaagaggctaatttatttatttatttttcaccttatcaggtttttgagaattt

SEQ ID NO: 47987 - DNA, 827 bp, Manihot esculenta
  Intron number 2 from transcript cassava4.1_017120m (locus cassava4.1_017120m.g) derived from phytozome v7.0 (chr-ID scaffold08265; pos 2057987 to 2058813)
acttggtccttcagaggatcttcctcttgttggtatatttttcttggtatatcgagtgaattgtctaaagacgtacttggcattattgttataactgtcattgagaaaaaaaaaaaaaccattttgaatatattaactataagtaatttttttttttttattttttttataatggattagacatattctagttaaacctaaaacagctgaacaacaatttaatttcaaactgtttttgcaacaatatctaaaataaaaggacgcctttttgatagtttgaaaccaaaggtcaaacagaagctaaatacccttgagaagcataagttttaattggtccaaatacacctttagttttgtttcaaattgttctatactgtgtattctttttgtttatttgatatgtagtatctgttgaattagcctgctacttttactatcttcatttttaagtcttcgaagcgctgcctttctagatgataagatttgctcaagacacaccaaaactggcgcaactcaatagtgatacacttgtaagaacacaaaagttgcagtttttagcctgaatccactgttatcatgtattttagtagtgcagcttggcaagtttcattgcattgaatttgaatgattttcttttcttttctattgctgggactatcctttttgctaaaaatgtaccattttctgaagcctctatttgaaaagttagttgtttgatgttttcgtttctttttgcattatcctatatttttaaaggatgttgatcactatcaccactcatcaccagtactctgtcattaacttcatggttttttgagcagttcatt

SEQ ID NO: 47988 - DNA, 763 bp, Manihot esculenta
  Intron number 2 from transcript cassava4.1_024829m (locus cassava4.1_024829m.g) derived from phytozome v7.0 (chr-ID scaffold11495; pos 665715 to 666477)
gagccttcatacggtgagaaagatttcttcactcttaatactctccaaactattagaaaaccaatatttcaagttctataaggaggcaatgtaatacaacaagtgcttttttccacttaagtttgtgagagaaacaatctagaacacgacttgtctataatactaagctcaacctcaaaactaggtgtcactggaataggagctagaggagacatttttcacccagacacttcctaaacaataaacatgggtttacgaaattaggttctagtaatggataatggtcgtaaatgaaggtattatggagtcaggtttcatatcattcactcttagtccttaaccaataaattactaattcttaatcaaattctttattcttgaatcataaaatgtttgttgagtgtactcttaagtagcttcagtgaaaaccagcgcttcctcttggtttatttcaacttcttgatgcacaataattccaaaatgttttgtgctttcagtgtcatgattaaaatggttcagcaaattacaaacttctagcagactggagttctcttagcaaacctatgcttgtatatgcctttgccaatcttggtttttcccgctgttggaaggacgtcagtagtttgcatacaagcaagcatgtattcttccattaaatacacattattgctactcacagtataacctaggttttgtttacaaaacaattatactgctttaatttgcagcacatcaaaggagattttaactcttgaagggcagc

SEQ ID NO: 47989 - DNA, 567 bp, Manihot esculenta
  Intron number 1 from transcript cassava4.1_017880m (locus cassava4.1_017880m.g) derived from phytozome v7.0 (chr-ID scaffold06871; pos 32950 to 33516)
ggcaaacaggtaattcaaattttccttccctttgcagttctgtgatttcttcttcttcctcctctaatggatgaattccacttgcttaatcgtaacagtccaaagcttttataatggtgtgttgccatattaatgggttccttgagttatgacaattaattatctggagacataggattcagttgtttttagactccttattgcttgatttgggttttacttctgttttttccttgaaaattatttccctctaattacagggaaagcagtgaagaggattgttattgttattctcatcgagattaacacctatcagaaagctgatttgtagtggaaaataaaaaaaacgcttatcctttcttgaatttacaatctctatcgttcaattcaaaatctttatccaatttgaaaatccacccaggaaaaaaaatgctttgcctactttgtttatgtttgcaatttagtttatgattaagtttagtcaatttgatttggcaatgtttttcaatattgcaattgatgttcataaaattgtgcagaaactgaagactagggtggtgcagaaaa

SEQ ID NO: 47990 - DNA, 447 bp, Manihot esculenta
  Intron number 1 from transcript cassava4.1_030539m (locus cassava4.1_030539m.g) derived from phytozome v7.0 (chr-ID scaffold07474; pos 2114 to 2560 reverse strand)
ataactcttctcgtcaggttcatattgatagcaaattttatttttgcttttctttctattttttttggttgctttatcctataagtatacgaatacattgaaagtgcgggtgttaagatccctgtttatgccatgcatgtcttgtttcactggttctgatagctcaataataaatgcaatgattgtctattttgatcctatgattcttggagattttgggttctttatttgttttttccccctttctcttttgattatatgatttttgttcttggtttgtatatattttcatttacaaattataatgaataattgtttttatattgcaatttgtcatctaaaatgcttagaaagaattaactcaatgtgctccctttattattttggaacatctattatattgttcttagccatcttacaagtcataagaatgattttcagttcacc

SEQ ID NO: 47991 - DNA, 943 bp, Manihot esculenta
  Intron number 1 from transcript cassava4.1_008608m (locus cassava4.1_006575m.g) derived from phytozome v7.0 (chr-ID scaffold10114; pos 85430 to 86372 reverse strand)
acaaagcatcaaatacattgagaagctactgccaggtgtgattctgtttcatcaagggtttctttatttttaatggagtgttctactgctctgtcacatgttcagcttcctgactcatcggttaccccccccccccccttccttttctccctcttcttttatgcaagggctaccttagttctttttgctttagcgatccaggttgctagattaaatcctgagaggtgtgcacttacctgagaggtgtgcacttacctgagaggtgtgcacttacctgagaggtgtgcatttgtcatatctaaaaatgtgtgcacttacctgaaatgggcaggttgctagattaaatcctgagaggtccatacctctagcagttctcaaaggagccaaaggcttggcaatattaactgttgtcaaagctggtgtgttggttgcttacaaacttggtactggtctagtcattgctcggaggtctaatgggtcatggtctgccccatctgcaatatgctcagttggtttaggatggggtgctcaggtgatgttttattgcataaaagttctcaatcttgaatgtttaactgatactactatgtgaatttttttctttctgctgaacaacttggggtttattttaaaaatgctactgaagcaaaaaagagatcccaggaaatatttgtgtgcaggatactgatggatattatatttcctttttgcttttatgataatgttaatttttttttatcatttttctattaatagaattaattaatccagtcttctcattacgctaaactagatattgtgaataattcaagagtttgatgctttcttttgtttatttaagtgtaaaccctttttgatggtgtattctagtgtagttgatgaattttgtattccctattcacttccagattggaggtgagctcttggattttataattgtcct

SEQ ID NO: 47992 - DNA, 904 bp, Manihot esculenta
  Intron number 1 from transcript cassava4.1_007825m (locus cassava4.1_007825m.g) derived from phytozome v7.0 (chr-ID scaffold03481; pos 84359 to 85262 reverse strand)
actgtggacgcttctaaaaatcgaggtttctttcgatttcattgcattcttataatcatttccatgtctggagttagatcctgcttttgtttcttgttcagttgtttcataatatcagaagtgaaatgagttatttgattactttataatcgggctattagttttgtcagttgaaattatggattgtggattcctcttcttaggatcgtggatgaattcagaagcccttgattgtttcttttctttgttccttttagagttgacctccttgttcttgtgttcgtatctgattttgagtttcgtttatacatcaatttgaagttgtcagttgtgtaggtagatactaagtacatgctatgaattgggtggaaaattatatgtatctgtgttaataaaataaggttcttgcactgttgatttttgtagtagattttactttggggacaaggaccttaggattaggacaaagcccgtaaacttttaaggattaataaaggaagctaaaaaatatgggggccgtacaacaaaggagggtatatgagttctcttttaaagttacaagaagcagtcccttgtgtctttgtgaagaatacaaacgagaggtttcaatataatttcaattatatgtcatcggttagcatgaataaacatcaaagtggagaagctatggatctttcaagtcaccttttgcccagttcaaatttgttgtcctggggaattttgggtgtccacattctgttagtattacagcaggcttaatcaagtttccctttcttcccattactttatgtccgtggtgctattaatgtgatattggaaatgttatttacttcatggttggatctctcacttggttataagtatgattttcttcttattagtcaagtaattcactgttggacag

SEQ ID NO: 47993 - DNA, 536 bp, Manihot esculenta
  Intron number 3 from transcript cassava4.1_001461m (locus cassava4.1_001461m.g) derived from phytozome v7.0 (chr-ID scaffold02892; pos 962197 to 962732)
caaaagttcgtaaaggtatcttcattattaatctgaaaatttaatgctctggttttcaagaaatttaggacaagggaagttagtaaaaaaaacataatgtgggtataggatgggaagcaaacttaataagggacggagaccatatattatgtaacttttctcttagaaattaacataagaatgatgataggtatcattgcatacatgtctgttaggggttgaattttcaagtaatacttttttccttattactgaaaattatttacctacttgtctccattacctacttcattattcctttatgttcatgtggtttgttttttgtttaagcagttgtgtaattttgtgcatgtgaatcacaaaatttacaggttttttctgcctctagtaattcatgtatatttgattgagtttaccggttaaattacttgaaagttccatctcttaattacttttaatgttctatgttagcccctgcattcaatattctgccactacttcatgaatctcaactgttttatctctttcttttgaag

SEQ ID NO: 47994 - DNA, 812 bp, Manihot esculenta
  Intron number 1 from transcript cassava4.1_004758m (locus cassava4.1_004758m.g) derived from phytozome v7.0 (chr-ID scaffold06754; pos 31274 to 32085)
caggtatttttgtgaacttttctgattttattattcactttttaatctagtaatttttctatgtaatttttatttggtatttttagattttattctatatgtatttcgttgatcagaatttaggtatgtagaaagtaaaaaattggtccttttgagtggggggattagttttgagatcattctgattgtgttaatatcacgatcccatatcgacaatttatggaaaaatggaattgtatataatagctagaagtagaaattttattctcattgttgcttttatttacccagtatacaacttattgtttgcccatggaattttatatgcatttgaaaattgtaataactgtttgaggaaactaatggctgctaaactttttattttattgtatcttgtttttttcttttaaaatcttcacttgttccatagcatacaaatatttgtagaagttgtgtaattacttgactgaattgagtttatcctttcatctaagaacagaatatcagacgctgttaggctttagttttttcttaatacatatttgctttttctgttaattttagtggctacacgattatcacatgttatgtgttgttcaaaggcattttgaacctttaatacatcataagaaattttaatacgggatttatgttcatccttgaatttggaaaaattttattataaataggtgcttttaaatttcagtagtctttggttttgaatttactgtatttttgtctgtttaattttgacattttatacttgttctgtttcagcaaagttatactgtcttgagggaaggagatataca

SEQ ID NO: 47995 - DNA, 575 bp, Manihot esculenta
  Intron number 1 from transcript cassava4.1_003368m (locus cassava4.1_003364m.g) derived from phytozome v7.0 (chr-ID scaffold04002; pos 174532 to 175106)
cgtccgactcaggtgcccatcagccccctcttcattccttgcaaagatcactttctgtttggttctcatgaagttgattgcaactattggaatctgggttttttgatgtttcaaggggaacccagacgacccgttcaagattgagtcaacttttttgttttggttttcaaatgtgaaaacgcaaatcttctgctttgaggcattctccttagttttccgtgtttgcttaatcagaactggatccggtcattattgtttagctattgttattttttacattgtttctcggttttgctgtctgatttcctcgaatctagaggaaaattgaaggaatctgatttttagcattaaagtaagcccacgaattaaagaatactgtattgaatgaataaataggctactcccagatttatcacgacgccccatcccttatggataatcaatatctgaaaagtataacggagtaaatgagaatttgttatctttatgttttccttgttcattaaacagaaaacttatgccatatgatcattgatttcatgaagtctttggattgtttttgtagataaggacac

SEQ ID NO: 47996 - DNA, 660 bp, Manihot esculenta
  Intron number 1 from transcript cassava4.1_014047m (locus cassava4.1_014047m.g) derived from phytozome v7.0 (chr-ID scaffold00823; pos 244363 to 245022)
aaacctccaactcttctaaattctctgccaaaaaggtcagtttgggattctgtaaaaatcctccacagcatttatttactctcgttctgattactgtgaatgaatctatgtttattacttttgtctttcaacaaacccttgaaggaatctgtgtcatttgattgagtgtttagatgttttatcagatataatcattttatattcattgcagcactctgacttctgagtaacaaaaccctagccaaattttattttttgtctgagacttagagacatttgggttcatcacaagcttctacaggagaaaacaattttaggtttgtatagcatataaaagaagaacgaaattaatagaattgggtagtttaaaatatgtctgtaatctatattatgttgcagaaatgtgtttggactttatttatattgtagggagcattgatttactggggacttttcttttcctaaatgttatgtttccaactcttagctgttacttttcccaggctttgtcatctgctaaaaagtaggaatcaacaaaatgtttggatttttatatctaattttattttcattttcttattctcttagtgtctgaggcatagagtgatcaacgtcatttgtgcagattacgagcaacaaaacctcagcggttcaaccatc

SEQ ID NO: 47997 - DNA, 832 bp, Manihot esculenta
  Intron number 3 from transcript cassava4.1_025291m (locus cassava4.1_025291m.g) derived from phytozome v7.0 (chr-ID scaffold03693; pos 113789 to 114620 reverse strand)
aaggtatctcttgttttctttgtttttatagacatggatggaacaggcaacacgccccaaagttgacaagaagctgtaaattttatgtactgtgtccaaatctagaactgctcccctcaactagtttcaaattaaggcttagttattattgttgtccatatctgcaactgtgtaaaggaaacattatatcgtttctgcaatagaagtaataggaacccagtaaactatgtcaccttattaatctctaggtttaattcaagaaaaaaaagtgcaaaaatgtatttcatagattttttatttcgaggtctgtagtttacttcaggtctatggtttatttcatagtctatggtttaatttttttttttaattaaaatagtaacttataatatgaattctaagtatagggtctagaaattgttgtttgttaatggaacgatactacgaagtattattttaacataaaattaaatttcagactttcaagacaactatagattccgaaatgaaaaaccattgaaacagcatgatttttttttaaaatacttttcccttaattcaatagaataagtcataaaaatcttgctgaactcaagcctgtctccatgagaattaagcatttaatatactgtttaacaaaatattacctgtaaaagctttataatctgtgcaggaactatcttttacttcatcaaacactcaacccagaaattctttccagtcaacaactgttcaaaactgggtaactcattattcactgttgtgaaagtaattaacagtatcagctgttatcttcattctgcagctatacaagagcatagttaaagggagaaca

SEQ ID NO: 47998 - DNA, 561 bp, Manihot esculenta
  Intron number 3 from transcript cassava4.1_024083m (locus cassava4.1_024083m.g) derived from phytozome v7.0 (chr-ID scaffold06705; pos 223120 to 223680)
aagtaagatgaagcaaattttgttatattataacattcttttctttcttgccattttggcatatgttattactgtgaaaaatatttgtgtgtgtgtgtgtttatgtgtatgttatttcagtattgttctttatgttgcattgcattgccaagaaaaagaaaaggatgagagtatttctttatctgttaccaaaatatcattgcatgaatgataaaatacagatatgtaaaatatgtgcctatatatttaatctgacaaaatcaccaaattagaatctggtgacacgacaccttatttgtaacttgttgctgtaaatctacatgctaaaacattaggacatctctcaaatgtagttgcgttgtatagcttagctgcttctttaaataagtgcctaatagcaataggaatttgagaacgggtttgagaaaatgcctctaatatttcttatttgattcatcagttgatgactactacaaataaaattacaatattaaagcataatgattcttatttcttcactttgtagttatcttcaacaacgtgtagcaaaggataagtcat

SEQ ID NO: 47999 - DNA, 562 bp, Manihot esculenta
  Intron number 3 from transcript cassava4.1_025865m (locus cassava4.1_025865m.g) derived from phytozome v7.0 (chr-ID scaffold04291; pos 38198 to 38759 reverse strand)
ttaacaaaggtgcggtagaaaaaatgttgctatagaaactaacctcatctgttgtggtcagaaatcacctcaataatatgtgatcagtttctcagaatttttggtcattgcatttgcctgttttcatcattagttgattgttctgttaaagaaatttctcaacaccaaagcacattttgatctatgactctttacagaaacatcaatgagcaattgagcatgctgaaggctactgggttatttcgcctctttgggtttgcaacagagtatttgaaaaatctgcattaggaagttattttgctcatcactgctatccatttgcagaattgacggcataggtggactataattgttcttcatatatgggaatagcggtgcctttagttctttatagtgaatcacttttccacatcagatagaagtaccgcttaatgtattttttcttgtctagttcaatttaacccagaaatacaagtcacttcagctagccttattggttgctttctcttttctcagtttttctcttctttctgcttcagtttgccctctggttttccctgac

SEQ ID NO: 48000 - DNA, 353 bp, Manihot esculenta
  Intron number 1 from transcript cassava4.1_011294m (locus cassava4.1_011294m.g) derived from phytozome v7.0 (chr-ID scaffold10563; pos 1391450 to 1391802 reverse strand)
acgatattaccgttgaagacagtccccaatataaggtttgcagtggttgctaagtttcattagggattctgaacttctgctgcgcttgggtcaatttgctatttcttttcttttctttctttctttctctatctttttagtaagtcttgataatttggctaagattatgttgatgctatgtgatttgactatgggtatattgttgggatttacaatggtatttgagatgttgttacggatctcaatatggattagtgttttcttttaataagatttttggcattcttttgttaatgtggatcttttgataacttggtttaatttaagtgggccgatgacagtggctgaggaag

SEQ ID NO: 48001 - DNA, 557 bp, Manihot esculenta
  Intron number 2 from transcript cassava4.1_024140m (locus cassava4.1_024140m.g) derived from phytozome v7.0 (chr-ID scaffold11689; pos 193115 to 193671)
gataaggtacttttgctgattcatttggtaattttctgttgttcaaaccttattgggagtttttttagttactgttgttttctttaatcagcactcaatctgccttgttttcccaagaccatgttcggctaaaaacaaaataaaggaccgttacgattgaagaaaacaactatagatttgtcaagaatcatttgaaatccttttcattatgagcatctgataaagatgaattaaacttttgactattgaacaaggaactacatgctttttgtctccatagtttctaaaatttatgcgtttattatcactttatacaaaacatattagattcattttttcccgatttttaagttcattataatgtgagcatatgttctggtgtttgatctgttatttgtctttattacttttactgttgtccttgattcccttcaacaagatgagttgatcttttggtagatcatgaccatttaaacaacaaattcttcatgtccctttcacagcattaaagtagtgtgattctgttgacaccttatgcgcattttgcttgcagatta

SEQ ID NO: 48002 - DNA, 862 bp, Manihot esculenta
  Intron number 1 from transcript cassava4.1_011612m (locus cassava4.1_011612m.g) derived from phytozome v7.0 (chr-ID scaffold10563; pos 129192 to 130053)
atcaagctcgacccttcaaatcctgctctttataggtaagtgaaccaaagtaggttttttttttgctataatattttctaattgttttgttttgagttttcatcgaagtggaaggttgattggtcattaactgaagttcattgttccaattgagtattcttttgttttggattagcattcttatttgttcatattttttttgtgggttcactttcactaggaaatgatcgactttttacacttttaggaaactagctgggcttttatgcctgagctaggaattagaacgcaaagttatatatgtgtggtaaactatgcacttctaatttaaagcactcgcgccacacagatcaaatttatgctgttaaacggttggcttttattaatttgatgaactattctaaaccttttctttttcatttaattttggtatctgtctgtaaaatgcaaagcaaatgttctgtatctacatcttcgccaaccgcaaaagtgtttgaattgttgagtgaaggaccgagtgaaaacttcatactgtgtggtgtgttcatctccatcatttcaccgaaagagtatggaaagtttagttttccagacagtagaaattggtatttgtaataccttattggttattctaatgcacatcaaagcaccacattgtttagagacataaggtgtgcttttttctttttctgcatgatggcattgctgctatcaataaaggttaaacattttgttacctacttgtgacaaaaaatgcagaggatatctctgtttgctaatgtgttgttttttttattgtctattgcataatgttaattatttcccagcaaccgtgctgctgcatttttgcaattggttaagc

SEQ ID NO: 48003 - DNA, 688 bp, Manihot esculenta
  Intron number 1 from transcript cassava4.1_001200m (locus cassava4.1_001200m.g) derived from phytozome v7.0 (chr-ID scaffold03787; pos 72850 to 73537 reverse strand)
gctcataattattccattgacttgtgcagaagaaggttagtgctgttttctcctaaattttgtgtgtagtctcatgattgttaaatgcatggagtttttaaatttttcgacaaattcttcatatttatatctgatccgctttcatcatgtttaatctttagttttggtataatcctagaatctagatctctaagttagtgcagcataaataacgatcttttccttctgtaagttgcctggagaaatttcaatttgtacaaatgatttctaatgcataatttatttaatttttcatgatctcagaatctgctctaactgttagaatgataacctaaaagtttacaggcatgtctcttataatggtcaattctggtcaaccattaatgatatatttcaaaaccaaaccttagtagctaatctgatagacattggaggattctaatcactaaagaaactggatcttctatgaaataagtgaagcaaacaattgatcagaaatcaagctgcatatttcaagctttactagcatgaacataaataaagtatgtgattgctgcaataaaatgacattgttctgagttacaagtaccacatacaaaagtccggcagaatatttattaatactgccctggaaaagcataatcttaaccccaaaagtatctgaatttcatgcaggtttgaacatcaa

SEQ ID NO: 48004 - DNA, 500 bp, Manihot esculenta
  Intron number 1 from transcript cassava4.1_014301m (locus cassava4.1_014301m.g) derived from phytozome v7.0 (chr-ID scaffold07330; pos 228613 to 229112 reverse strand)
gatacttctcagttcccacaggtaaacatataaagaaaaaaaaaaaatctttttttcctctcctttctgggttgagattttcaaggctaatgggttttttaattttcttttttgctttattttctttatacctttattcaagatgatgttgcttatacccaccttccactaatatttgaaatttatatgcttctgtcatttgaaaaagcttttgaaattgttcttgaaagtactgcactttttcctctcttttctttctttttctctccaccatctgatgataaaaaagcaccaagaaaaagttattataattttgtatgtattattgctgttgcaatcctcaaaagtaaaataaaaagcattcttcttttgttttctttgctttgtttgtttcttatcactttcttttcatttcttttctccccatctttgatttttttttttttatcatgaaattattattttttatctaatttcaggtgattggattggttaaagcc

SEQ ID NO: 48005 - DNA, 996 bp, Manihot esculenta
  Intron number 1 from transcript cassava4.1_000189m (locus cassava4.1_000189m.g) derived from phytozome v7.0 (chr-ID scaffold08265; pos 1612093 to 1613088 reverse strand)
tacattgagcaaattcactgaaggcattcaggctagtaagtttatcttgccttctgatgagaatttcagattcctcattcttcatactgagtgtaaaagaattcttgattctttctgtctggattatatatttttaacatcatagcttgtgatatttcataatgtattctgcttttacaactcctgctttgagctctgagctgaagtgatgccactgggcactgtaaaaccttgctttgtcttgtttgagattgtagccttgttgtatatcgagcaagttgcatggtcaattgagctggcaagggtaaacataaattcatatctgtttgctcagttatgtgcaagtttagtcccgcagctctctctaactctcgcattcacacacacagagataatttggggagggggatttgaagttttacctgtctccttagaagagggatgattaccaattatacagttgtgcagatacatttttagatgttaatgtcccagcaattagttacttcagattgtgaacttcaagtgaaataagaaagatatacgcggtggaaaaataatattatagatgtaatatatagaagggtattattgctttagttatttttgaattattctatttgcgaatgtctaattaatccagctcattccttggatgcatgtgataatctatttttgtcaagtacaaactccattgtgagtcttccaattttaaattttacttcccagttttcatttcttggctatgtgcttagtttttacctcataatgatttgatgcatttcggaccaccctatatccttatcttttctgtttttttccctcacaaatggagttgtttatgacttcattttgcagacttgtagtgctaatcaaaatccatatttatgtatttgaataaagagctgtgatgtattgctaattggatatatatatttggtgggttttacctgctgtatagggaaggctagttctggcgcaaatcctgccaattct

SEQ ID NO: 48006 - DNA, 202 bp, Manihot esculenta
  Intron number 1 from transcript cassava4.1_033441m (locus cassava4.1_033441m.g) derived from phytozome v7.0 (chr-ID scaffold04651; pos 170486 to 170687 reverse strand)
cgccatattctttacgagcaacaagcttccaatatgtcttcaatatctggatcatcccctgcttctctatcctgatcaacacaaaaggaaaaagccaaaaaaaaaagaaggaaataatttgcaattcatttggtatgaactttgaatttgatttggtttgtaagaagagtaaaacccattcgatttttgatatcttgaaaaa

SEQ ID NO: 48007 - DNA, 623 bp, Manihot esculenta
  Intron number 3 from transcript cassava4.1_006145m (locus cassava4.1_006145m.g) derived from phytozome v7.0 (chr-ID scaffold08265; pos 3370718 to 3371340 reverse strand)
aggtagtacattttaaactaacccacccaccactatttatttttctctgtcacatagtctcttttcttaatttgtgaagcacgttagaatctgtttggtcctgacctctttggtgctttcaagctaaatttaactataaacttagatgcatcagtcaatacaaaaataaaatatgttgttgagttgaataatagttggcactgaaaacaggctactcctgattcctttgtgcacctcattgcctctacttgctcaactatagcctttttactcttttagatgatatattttgatcttccgcttgctttccacttctaactgcatttctctcggggtaactttctggtgcttgcaagtgattcagctttttgtggttgagtagtgtatctcatggtaacttgccaaatgtagcaaatgctaaaacttaatatggcagattacgtttcaatttatctccccattttttaccatctttttttcatctcgattcttatgtgtctttactttacttattagcttgttcatgtgtctcacttgtattcatcttccatctagaggctcctactttttctgttgttaacagttgatgctgtctggtcacttaagttacttttaatgacagg

SEQ ID NO: 48008 - DNA, 676 bp, Manihot esculenta
  Intron number 1 from transcript cassava4.1_018218m (locus cassava4.1_018218m.g) derived from phytozome v7.0 (chr-ID scaffold03736; pos 122355 to 123030)
cgccaattgacatcaaggttgtagttgcaaggatacgatggtcaagctgttattggaacaaatcaaagttaatattaatttattgttagaatgtttatatagctgtgattaggtataagaaaaaattaaaatttaatgatgatatttaaaaaaaaaaaggcaatgtctttctcctgtctatataattccaggattgattgactgtttaaacccaagtgcagtatcatcaacagttaagttttgatagttttcttcacaagtacttgcgctattttgactaaacgaacaacatcctaaacagaatgacttaatggcttggctgtagttccagattcccagtggaagctattcttagatgacttgatttcttggaacgaaaaataaaaaaaaaatccatagaaacttcaaaacaagaacaaaatttccaactctccttaaatgaaatctaatcttaaataaacaattctctagttattttctccacttttcttctccgtttctctcagacatgtcctttgatcccttttgctggagcaattcaaatgtaacaaatagcacttgtgacgcaaggaaattcataagcttaccatagcatagttaacaatagaggaattacctgcactgttgatgtattctcaaagaagtttcgaattagtggcttcatttcaaatatatc

SEQ ID NO: 48009 - DNA, 693 bp, Manihot esculenta
  Intron number 2 from transcript cassava4.1_021072m (locus cassava4.1_021072m.g) derived from phytozome v7.0 (chr-ID scaffold03241; pos 664637 to 665329 reverse strand)
tctccttctctcgtatggaagtttttctgtagatttcggtcatgtcatatatacaaaactcatatatgcaaaactcatatatgcaagagcttcaggacatgccattaatttttttacactaaaaatcaccactactaaggtttaacagttaattcagatattcacatacttaattcaataataaatatatctaaataaattttataaatctcaaattttatttttccaatacacaatcccattttaaaaaagttaattcagaaatttcaagattaggaactgttcacaactttttgaaacataagtccactgttttgagttgacacttttcgagtgaacagaacgttctcgatttttttcttattttagccttaaaaaaagttaatttaatatatatatatatttatgattttaaaaagtgataattattatagtttatatacttttaaaaaatttactatttaatttttattataaaattacttaattaaaacgtccgtgtaatttgtgaaatcaaactttataatacttttattataaagccattaggagccttaaatttttatattatttaattttcttttcatatgatactactagtattattattattaattttcattatatgaaaaaagtcatttattaaaacaaagtttgtttaaacacaggattgtagcagccattggattccct

SEQ ID NO: 48010 - DNA, 725 bp, Manihot esculenta
  Intron number 2 from transcript cassava4.1_007535m (locus cassava4.1_007535m.g) derived from phytozome v7.0 (chr-ID scaffold02932; pos 4074 to 4798)
aagaaaaactaattgcacgagataataggaaagaggcaagcgctttacttattaatttgcttattccatggattttttaatcagttgttctttgcttagcatagtttaccaatgctcctttcacatcatctgtgggaaggtgcttaaatgtctaatataaaatgttgatacaagggattgcagataatggagtcaggagcaatgagaaggttgtatttttataagttctggaataaaacctttcttgctcctgaagtgctgctgaaacctttttatgttcattttttggctgactgaatcctaaactctatgatttattacattttggtcaattccaataagaaagacaaaccaaacattattctttgctctgtatgtgcatggttctaactatttatccttaatatttttcaataaatgataaataattataccacaattttatttcttatgtactgccatctaaatgttaatgagtggcaacctttatcagtggaaataacattgtgcttttctttcatttactcattccatggaatgtcagtcttacatatatcttagtggcccaggtagatgacctactctcatggtgatatttgtgctgcttggtcttatgctttccccaatcatatgcacgttcccttatagtcactttacctacatcttacaactgctctttgacttttgcagacagcaaagggagcaaagatatatagtgctgccgt

SEQ ID NO: 48011 - DNA, 1019 bp, Manihot esculenta
  Intron number 1 from transcript cassava4.1_005512m (locus cassava4.1_005512m.g) derived from phytozome v7.0 (chr-ID scaffold10878; pos 575064 to 576082 reverse strand)
aggtaattttcagtactgtgaattaatttgagcctcattattgtttctggtgagtatttcaatgttgttgtaagggattctgattttagatggtattcataaggctatgtttggttcaattataatttctaaatttttgtagaattcaattaaatttcatgttttgtgtgttagtttcaataaaaattagaatggaattgattataactaaaaccaattcctatcaaatttgatgaaatgaattcctcaaaatttacaaaatatcttttgaactaaaatacccttcctaaataattttctctcaataatttatccttatactttattaaacataaaagtgaaaaccataaaactaattttctatttatctactattattatatatagacaattatataacatattttctttatttttctaattttataatatctaagtttattttctcttactaataaaactgttattttattatgtaaaccttccagtcatgaaaatttattttaaatttattaatatatattttaatgggtttatatttttgttaattgttatacatttattagatataaaattttttgatagagtaaaaactttttattatactctaaagagtaatttaggaaatgaaaagatgaatcatgtggaattcaattgaatcaaacaatggaattcatttcaaataaattctatttagaattcaattgaattccacatagttttgtaaaatagaattgaaccaaactctatataagcgttttcttatacaggataggaaattcggctacttttctcggccatggttaactgttgcctttttggaggcacataactgaaattcagttggaaacagtgcagtttcgaatgtttcttctgttctaatcctcaaaaggagaggcattgcataaaaatatttacattacagtgtttggctttcgagttttgatgatgttgacaagtgtaatcaattataaataatgaattgcagattctttcagattctgagaggagagctcttt

SEQ ID NO: 48012 - DNA, 460 bp, Manihot esculenta
  Intron number 1 from transcript cassava4.1_013175m (locus cassava4.1_013175m.g) derived from phytozome v7.0 (chr-ID scaffold10493; pos 1259552 to 1260011 reverse strand)
agcattaattacttatcccgacttagctctaaatcgtaagtgcagaatgtcaaatcccaaagttttgttacaatccttcttattccttttttttttttgctgtctctacatatattcacctaattgtttggaaaactgtgatgatatatctggaatttctgtttggatatgagcagtttgctcctttttttttctctctctcttatcatcatcattagtttttatttttgtattgatattttagatgcatcttcacgagaaaatattatgtggtttgaattgattctactgtgtaattcttttttgtgttttgtccaatttcctttggtatcaaggtgcatcactagccaacgtaagttttagcatagtatctaaaaggtttttttgtcctcccatcaatcagtacatttttgcaatctaacatgttatattcctcattctttatgtttgtttatcagat

SEQ ID NO: 48013 - DNA, 872 bp, Manihot esculenta
  Intron number 1 from transcript cassava4.1_004247m (locus cassava4.1_004247m.g) derived from phytozome v7.0 (chr-ID scaffold06549; pos 77632 to 78503)
caccggtgtttggaaagcttctctttttattatcggtaagaactaaccgccgattttatattttttttttaaatgcttgagagtgtattttttgttaataaacataaaaattaagggctgcaattttaaaaaaaaaatagatgaaaagcatatttttaaaagcaaattgaatttttatataaaatttaaaagtgaaattatatattatatatttaatttatttattaactaaatatatatatatatgcaatttttataagagtggctgtactattccatattccatatctacggagataagcaaattaattaattagtaggaatgaattgattccaatctaaaaaccagtggagtccatttgcaatgttaaagttagtactacgattcttatccaatctaactttatttcttatatatccatatgcttttggatattatataataatatgaatgacaatagtgcctcacctcattttttttattctatttgtgtcatctgcaaattaaatatttttttcatttttacttaattcaatgattatagtgatttttggtataaaatttgtactttttttttctctttttcttcatgctggtaaaaacgttttaaatattgaattaacttaaatcgaatcaaatcaaatcgaaaaaaataaaaattaaattaaaattttaaactaatttaatttcatcgacttgtctaatgtgaaccgaatactgtttattttaaatattgaaataaggatcgaatttagaacgtaaaagatatttttaaccgagtggattaagcaaacatattttatgtcagattttgattgatgtataacatatggcagcaattgaattcagtgagaggctgagttactttgga

SEQ ID NO: 48014 - DNA, 363 bp, Manihot esculenta
  Intron number 2 from transcript cassava4.1_001629m (locus cassava4.1_001629m.g) derived from phytozome v7.0 (chr-ID scaffold03264; pos 471719 to 472081 reverse strand)
tcactggattccgaacaacaagtttgcttttagaggtacccttttctttgtttaggtttttaggcatgaagattttagaagaagtcttaatttctttaatcagtttactattgattacagttgtagtttggctgccaaggaatgtttagaaatggggggaaaaaaaagaaaatttttaaattcagcttattctaactatttagtttagctgattcgcaaaactgcattttcccccttactaaagcctcagaaaaaaaaatatcacagcaatgcgttcttttcttaactgggcaatttttagttaatgaactttgttttttgtcaacaggaaaacacttggagcagcattatctgctttctgga

SEQ ID NO: 48015 - DNA, 583 bp, Manihot esculenta
  Intron number 1 from transcript cassava4.1_003343m (locus cassava4.1_003343m.g) derived from phytozome v7.0 (chr-ID scaffold06705; pos 361745 to 362327 reverse strand)
aaccccatcaacaccgtctttggtaagtacttggtacaacaattttaatttcgctttcctcccttttctttttcttctatattatgctggtctttgttttctgaaaactgtttagaagcctgaaacttgctcttactactccttgcctgagtagaaggatcgaggtacatgctttgaaattagaataatgggagttgaagaagtgctgaattgtccttggattttcatgctattcgacttgataattatgacttagctgatgatttacaatttttattttcaaaaaatgcaaataaatcggtgaattctcgcacagcacctacgatatttgtttatgagttttaaattaggatagttcgtgaaatattataaacaaaaattattgttcaacataaattttgttctttgtttgaacaataatatattttgataaatattctcgaagtcgaatcgtctgttttaagaaccctttctggctgtgttgaatatttgcccatctgaactgattttgaatttggtatgtgcttaaattatgtgctgaagatttaatttaggtagctaacaatttgtatatgattcacag

SEQ ID NO: 48016 - DNA, 383 bp, Manihot esculenta
  Intron number 1 from transcript cassava4.1_026541m (locus cassava4.1_026541m.g) derived from phytozome v7.0 (chr-ID scaffold08265; pos 617012 to 617394)
ccttcctcgtcgccatatcctccaccttctttcaggtctttttcttttttccgtttcttttgctttattttacttttatctcttcattgtggttttgaagtctttaatttctctgttaaaacctgaagttacccatctgtgatgttgttttatagagttgaccacgttcatttattttcatagtcttgtataaagatctgtaataatcaaatcaaaaagcatttgacagaaaaggttgtcaaatggggttttaaaaccgtagctgtagcatttgaacaaattctatcaattgttcaaggtttctgtctcctggataggtaattaggtatggctgacagtgttattgaattgggtaaattaggtggcagtttcaagagggctga

SEQ ID NO: 48017 - DNA, 542 bp, Manihot esculenta
  Intron number 2 from transcript cassava4.1_006988m (locus cassava4.1_006988m.g) derived from phytozome v7.0 (chr-ID scaffold08265; pos 3638685 to 3639226)
ctctttcaacaggcatgcttttgagttctttcttattcatttgtttctttcacttttacaaaacttgttgcacttgctgggatgtgggaattttttcctctataattatttgtaatagctggaatttccctcttttgaatgtaacggaaggcttacattgtgaaaatccctaggtcaccaacttggtgctctgctttacagattgtttgctgttcacttcttcctgtcaactttgctttgcttaacaaatagttgttaaagtttgtcttaggttgaatttagggggtctgaccaaaaaagtagaaatctaagctaatgaatacgcaggtgaggtgatgcgaaaaggtgtgttttattaggtttttaatgaataatcaaccaaattgtataatttattgtggttattgattattgggatcatagatcattgctattgaactttaccttgttattactaccataattttcatttttgaaaaaagtttcacttcgcggtgatgactgttgtcttcaacaatgtgctttaatacagcttccttctc

SEQ ID NO: 48018 - DNA, 1042 bp, Manihot esculenta
  Intron number 2 from transcript cassava4.1_005551m (locus cassava4.1_005551m.g) derived from phytozome v7.0 (chr-ID scaffold02354; pos 149503 to 150544 reverse strand)
gcgggatcaagtttcatatttcatagaagaggtactctctattcatacatgtgtaatctatttcagtatttagtagtgttatgcaatgagaatatattcacttatatcttaatgcacattgcatgacttgcacatgtagaacagactttaaatcattatgttgaatagtaaagagcattgtgctggctttctgtttcatcttttcagtgtaccccccccccccccccaacgtaaaaaaaaacgctaacctctctcttttaaaatttttttattcttctactttgtttttgtcctttcaagctgctctctgcttgagaagattactgcattcttagcacaaaatgcttatgaatgtagatttttctttacaaatacttcattcatgaaaaaggttatctccatcttcatgaatagctcctatacttattctcagaagtaattgaataacaattgtattaagtttttttttttttttttaaaatgtttcttattatagttgttgttgttgttggtggtggtgttgttattttttttgttttattctattttatttatttgtgtgcttgttggtggagtaagtggaccatcgacttttggttttggtaaagttgataatagtaccaagtcaccactgccagttataataatgccccatcgcttaacaatctacctggatctattccttttcccaatagctgcttctgtggtatatctttgactgtttgcaatcactttgtaaaataatgtagtgaactagaaaagcaattctattgttttataaagtataaaactgaattttacattggctgtaagcctactatgaccctcctagcccttctttattggggcttgggaccatgtttgatttgctaagctcacataggctgagtcgttttatgtaaattatctttagcatatatatatatacacacacacacacatatatatatatatatatatatatatatatatcaaaatgttgatgacattggtcatttatgttacaggtcattggtgaaccagtttatattgtggggaactc

SEQ ID NO: 48019 - DNA, 783 bp, Manihot esculenta
  Intron number 2 from transcript cassava4.1_015701m (locus cassava4.1_015701m.g) derived from phytozome v7.0 (chr-ID scaffold04332; pos 123435 to 124217)
agctccaaagtaagattgatcacaattttgttgaatattcaaattttttttaaaattttttccctatccctttctttattgtgttttccttttgacactctgaagattatgcatggtcttacaattcaaatgtgattaatctgcataaaatgtggtgcatgtaggaactttgtttgccagcagataagttttatatggatcgaatggccaattgatgaatcagaaatggaatgatccccttttttaaaaaaaaacttttggaatactgtttgaacagggaaattatcagtttgaactccttgcttagtgtttcatggtccagcaatagaagaattttaagaaattttatttccatgatgtgtattgactttatcttggcacgaattttgcattgatcatttgaaagaagttagaacatttataattagtctaaatttattgaacatgttttgaagtacattgatacgaatagaatgcaatttataattcagcatgatactcaaagttgttaatgttataatgtagattttagtattgaattattgctatggtgatattattaccaacattcccttctgcagcttgttgatatggcatttctattccactgaaaattgtaggaacttatttaattttggtggttgctttgtttctccatttcctttaatttattagtttgttatagcgcttgatgcctaccgggatacttactatgcatccttcccgactgtgataaaaagagtgttgattttgttattttgggttttgacagcacactctgac

SEQ ID NO: 48020 - DNA, 964 bp, Manihot esculenta
  Intron number 1 from transcript cassava4.1_034286m (locus cassava4.1_034286m.g) derived from phytozome v7.0 (chr-ID scaffold00204; pos 224179 to 225142 reverse strand)
gggtgagtttatcaaatattctctttaatgcttaggtaacttctccaagcatattctaaaactccttgatgagaagtgagtagttgcatatttttggtcttcatgggtctttgttttacatagagaattatatagaaatccctgttgatgactattaaaaagtttgtgtcataaaatgtgtcgatccatgcagatgcttctatcaccttaagctccattgattgtcttttaaagttcatgccacaaaaagcagatagtccatggtatgactaatcaggcacacaccacaacaagattttcaacaaatttgagtttaactggcaatcaatagggttaaaagttaaaacaacttgtctcagcttttgttaatgtacgtatctgattacaaataaatattcattactcaaatatagaaccaaggaatcttctttttggttgaaaagaacatttcttcaaatcaatccgatttgatcaatttggctcttcctagcttatttggatgcaagcttaagaatgtagatgggtgcaaaaggaaaactggaatggagttgtttgatttgtttccatggtggagacatttagttgcatccagcaagcatgcttcccatgtagtacttcttccttctgctggataagtggttgtgtggagttcatatttaccctttcttgatcttctccttccttttgcccgcttcgttctctttgttgtgtgagtttccaatgctgaagttgatactttggtttccatgtcctctgttttttgttagcatttataccttacaagattggtttatccttgttttttaaacaaattactgatcatcattatgattaaagttgagtgatggttgagtgttggagttctctaacatcttggtttttttccttgttaaaaggcggtttctattattttgcactaccactgaaatcttgactttaaacctgctctttttccagtattact

SEQ ID NO: 48021 - DNA, 694 bp, Manihot esculenta
  Intron number 1 from transcript cassava4.1_012802m (locus cassava4.1_012802m.g) derived from phytozome v7.0 (chr-ID scaffold03241; pos 280127 to 280820)
gtttcctttattttctcgagaaaccagtatatttggtaagtgagcttcgctgggtatttgtcaaaactctaaatttgtgttatgggtttgtttggctgccaggaaaatcaaaagaacaagaaaatacgttgctcatacagttttgtccaagtaataagctgtaagacatggaagtagctggactcaaatgtttatttgtttctttttttcgattgtgaaggagaacgtcaggtggtagtgtcctttttcctctttgctcttctttaagaggggcggattatggttttttttttggactacttttttttctaggcgaccaaacaattttctttttatggcttgactccactctgttttcagtagagttggaggtttagttgactcttggtcagtagtatcctctctctttgtttaatgttttgagcgaattagctaggaactgatttatctttaacctgactaataataaagaaaaacaaaagccaacggaatttgaaccccagaatttgaatcttaggtagataatttatcatgcagagacttttttttttcagcggccagatagatgggtatttattcgcttgagttaccttacaatcttagccgaccctaactaatttggcaccaaggcttagctatctcatagtttatttttgctctcgtcttgtacaggataatctctgctgcaaagctg

SEQ ID NO: 48022 - DNA, 803 bp, Manihot esculenta
  Intron number 2 from transcript cassava4.1_015015m (locus cassava4.1_015015m.g) derived from phytozome v7.0 (chr-ID scaffold08265; pos 1414387 to 1415189)
ggctctttctcaaggtttgttctatctttggttatttggctgatcctccgatatcgattttgtcatataatcatgggcactatgtttatcattatttgaatttttctgcaatttcatttgtgtttctttttgggaaatttgaattttacttgtgaaattcactacaagtgcatttctggaaaattttatcctttgctggcaatttgtttatgaaattatgtcagtattccatttgtatagatattcatgatgttttaatgggttaattttgaataatgtatgttctagatggttttggtttaataatggttcactacaggtgaactacacatagagaagagaaagctctcttcagcctagttgttcacagtttcacacaagaagcttaagatctatgcttaactgttatcctgtaacttacctgataaatgggtgaacagtgcagtagttaaagatcaaatcacatggctgctgttacattcaatagagtggtagaaaagacattgagaaattgattttaatgcttataagcaagttgatgtcgagaatatactaagtactcatagttgttgcctaacgaagaaaataactttttgagaatactcttcgaaggctataagtgtaccaagatttcatcttgattggaataggaacataatcacactcaacaatttctttaatgaattggaaaacatacaattcgaaacaaaaagttgattttctgcttctgctatttttggtttaatttttttttatctatttttgcagttaaatccaggagacgccaactgatagcagtcagt

SEQ ID NO: 48023 - DNA, 803 bp, Manihot esculenta
  Intron number 1 from transcript cassava4.1_000497m (locus cassava4.1_000497m.g) derived from phytozome v7.0 (chr-ID scaffold06140; pos 19921 to 20723)
agaatcacctgcagtgcttctgctactgaaacaaggtaagctgcattgcctttctttatgttactgtttgtttctttttaccctgcattaggataatccatagcgcaattgggtggcgggattttttctggaaccaataaaagagcttgttgggtagataaaattttaagaaattcatttaaaaatccacattttatacgtttgatatgcagaaaacttcatttggcattctaaatttttaaatctatacaattaacgagtttcttttacttttagttgctgctggaaaatgttgggaaagcaaagaatatgaagacttatgaaattaaatcccatactttttcatttgggaaaatcttataggaaatatctgcgaatcctaattacagtttccttttcttttgctacttttcttggaaataaaagagagtttatgtgtttctattcgtttccatttaacttataagctgaatattatgtgtgttttaacaataattttgaatgaaaaattgccatggtatggaagactgtcttgaattcagtaaacaataagttaagaatagattatgttccatgttttctgctttaacatctgtaacaattacctgattgagttgtgtctttgtctatagaaggaattgatttcttctccaacagtacaagtacaacatataaatagcattgtaaatcttgtaaaagcagtgatttgtcttgatgattcatggtttcttcaagttttttagtttttcgttattgaaattggatgctaaaattgttttcatggcagagaggaagagaagaag

SEQ ID NO: 48024 - DNA, 800 bp, Manihot esculenta; identical to SEQ ID NO: 47260
  Intron number 1 from transcript cassava4.1_018051m (locus cassava4.1_018071m.g) derived from phytozome v7.0 (chr-ID scaffold00823; pos 241565 to 242364 reverse strand)

SEQ ID NO: 48025 - DNA, 499 bp, Manihot esculenta
  Intron number 1 from transcript cassava4.1_024293m (locus cassava4.1_024293m.g) derived from phytozome v7.0 (chr-ID scaffold02264; pos 812120 to 812618)
ttgaaagacgaggtacgtgatggatttgtttgtttgtgttattggtttgtttggctgccgagaaaggggagggaaacaaaagttaggaagacgatattttttgtgggttacagttagattgtttagttaccttgtacctgaagaatggaatcatcgaactactaaaagtcctagtaggtagtgttgacgagtttgcaaatgagaagatttgatgcttattgattataatgctttggaaatggtgaaagtatttactaaattaggataatttgattttcgagcggagatggaagaaaacagaaaaaattggcatccaagagcaatcattttcttgtccaactgtgactagtgtgattaatggaattggcttaacaaagttgtttactggccttgaaaaattgaagcaaagctttgtaatataacctttttctttttgtcatgagcttttgcagagattattgtagcaccagcctacacagtatccaacttctgaggagtt

SEQ ID NO: 48026 - DNA, 790 bp, Manihot esculenta
  Intron number 2 from transcript cassava4.1_024293m (locus cassava4.1_024293m.g) derived from phytozome v7.0 (chr-ID scaffold02264; pos 812699 to 813488)
ccaaggtttatctctgttacttgcattaattgacaagtagtgcacatgtgatcaatgtgtgtataacttgattactatactcaccattgtatttcaacaagtatagccagttgaatgttgacttcatttgtgtttggaattgaatgaaagagtttattttatgtgaacactgggataaataacaagtgggcatttgttgtatagcaatgacaatacgaaggttgttctccttttattttcctaattcctatttgattatctctctttgatatgcccccataatttgcctgtttccttttcatgcatgaatatgctaaagtacccgactgtttataagccataactactatgtagtatgtactggtgcctccataatcccagatgatgttgttttgtgattatctgattcatgggaggcaaataacaaaatgggagttcgctgatggcactttctcctttggaattgttttaatagtagctcaccatacatacatatgttgtttacatgcgatgtttatttgggtttttcttgataaggataccttaattgtactttcagccatttagtcaaaagttctcttcattttgggtagccaaccaacatccataatatgtagagattgtgttggccttcttatttgcctaagaattatggtgaagtgtgttgtatttttccgagggaggctatgtgtgttggtttattcatgagcatgccagtgccctttattgacagttctcctttatcatactcctgaattctttctgaaaaactcccttcatatgcaggtgg

SEQ ID NO: 48027 - DNA, 867 bp, Manihot esculenta
  Intron number 4 from transcript cassava4.1_020876m (locus cassava4.1_020876m.g) derived from phytozome v7.0 (chr-ID scaffold08542; pos 837618 to 838484 reverse strand)
tgtcattggcccaagagggtattcagaaagggaaggtataattgattggtctctttattggggtaaaccattataaacataattttctcattgtgtgtataatatatgtaccttacatcctaaaagttttgtgctcttcatcagttgaaatttggttgttaatagttttctgccataccacttttatcattattaggtattatatagtatatatatatattttttttttacaagagtatggcacatttccatttttgcggagacaaattcaagtaatatgcatatgtgggaagttgtatgcctttctgatgtagaaacggtagaagaacaatcaaagggaaatttgattaatttttcattatcaataataatggtctctaggaaaatacctaaattacataattatttattgattaataacaaatcctgctactactaggataacaggaaaacactaaacccgcactaatgagtaaaattttaaacattagtataactttttacatattcctaataatagtagaatgcctaaatagaaacttgaacttcctacttgcactaaaattctgatttgaagttcttagtttaataaaaaattgaataaaaaataatttctaaattagttgcatcaccttgcctccttggatcttaaatccgtttctcttataattgaaatgttccattatttcagtacatgtataaccatgacattcatgctaatattctggtttaattgtgattctgcttttttcttatgcttaaaagagtcatacgaatccagttaacttttacatcattctttatgatgtactttgcacttggattttgaacataaggtggtggcaattggtgagtgtggattggatt

SEQ ID NO: 48028 - DNA, 450 bp, Manihot esculenta
  Intron number 1 from transcript cassava4.1_020876m (locus cassava4.1_020876m.g) derived from phytozome v7.0 (chr-ID scaffold08542; pos 838844 to 839293 reverse strand)
gccgagcttggagcgctggtgttgatagaataattgtaaatatcttttcgtatcctgtttccattttttagcttgtgtatctattttcattctttgttcgcttcatgcttattgagagatatgctccctcgtatagaggctattttctactgatcgagtaaggtggtaggttgacttcttatatatcaaataggtctcattgaaggtgcaatttgatgcaatatagtttcaaagcatgaagtattaataagttacagaacttttaaacttttaaactcagcaagataaaatagctggagaagaaaaaactggagttcattataacacctatttcacaacataatcatttactatttacttattttgtttaaattgtgtagtgtccttaaaaatacatttggatttttggttacaggtgactggtgggtcccttgaggggtcgaaagaagc

SEQ ID NO: 48029 - DNA, 661 bp, Manihot esculenta
  Intron number 1 from transcript cassava4.1_004950m (locus cassava4.1_004950m.g) derived from phytozome v7.0 (chr-ID scaffold05214; pos 372738 to 373398 reverse strand)
gatccgtaagatcgaaatttccaaatcgccagttttttttgtgtgtgtagaatattgccttaatgtgtttgcttttaatgtttgatgtcaaaatgattattgggtttctcttaatggctgaaaaagtagtttattttttcttcttttaggtgtattttgctggaatgtgtgtgtgagatgatgagcttaatatgtttgtttgattagtctctgcttaaattagaaaagatgagaatgaagatacctgggtgctgattcaaagcactacattgggctagatttgatgcctgaagtttagcttccaagtgctactttgatgatgccttaatcagttagctttatgcattatagcggttgggcatttaatgggaagtttccttttgtgtctttgagtgatgatagtttcggctttcctttggtggttgacttattgcatttgggattttgctgaagttccattacaagtgtgatgtttctttttttaaattctattttatagaacaggaaccggtttgcagttaagattttattttttttgaaaaatattccccttatttgatatttatattcaatgagattttgggatttccaatatgaaatatatttggttaaatgtatcatactgttttataggagcttgtggcaccatcagtcgaaacaa

SEQ ID NO: 48030 - DNA, 614 bp, Manihot esculenta
  Intron number 1 from transcript cassava4.1_001954m (locus cassava4.1_001954m.g) derived from phytozome v7.0 (chr-ID scaffold00136; pos 128463 to 129076)
cttgaagttcacgaaagaacttggcaggttcaccggtttagttttttttttttttttttttcctttctttctgtgaaatcattagtgtctcggagtagattgctgcaatcattgactactttttaagtatcagaagatagttttttttttcaaaaaattttttatttgcttttatgtctaatttgaatggaattgatcgctgttgaaactttgctttctatggtccatttcgtttccttttttttttcaaagaaagaagtgaagctcgtaattacttcggagtactttttgtattttgtgttagttgtcgttcaatattgggatagacaaaataattcttgcaaataatatgtttgcgtgggccaaatgatacttcacaaatgccatttcattaagccaagggacactgacatttttgggtcttttaaatatggcttccggaatgaacttgtccctagcttcaaactgaggcttagtaaattaatcaccagcagctgagcccttctctacatgttgtctcgagtccttctctttagtgttccacaaacatggaatattttaattctgtcacttctgcagatcttcgtaccagtttattagttggtggtgacagc

SEQ ID NO: 48031 - DNA, 952 bp, Manihot esculenta
  Intron number 1 from transcript cassava4.1_015621m (locus cassava4.1_015621m.g) derived from phytozome v7.0 (chr-ID scaffold02943; pos 239420 to 240371)
ttgacgccatccttaatcccttgggaggtacatcacgcacactagacttcacactttaagaatccactaaccaaaatatgacgaatttttattttgcacattaattacccttccacctcttgggtgctcaccattcctctaaacatatctgagacagtcaagtagcagccatgtcggaggtcagcaacacgcatcatgttcttagtattatacatttgctgagaaggatctgggacagtgagagagatgtagtgctgcgactcacaagaagtgagtggtgcaaatcctaccataaagaagtggagttggggaaatagtatccggttgcagccaacttcctaaggtctgaactgagctgcctgaaaacctcacgcagcatgttaaccactcagcgttgcaaagatgaaatggttcaggtcgccaactgcagaaaaagtacaaaaagagccaagctttaatatcgttatttttcatcttatgatacttatcttagaactcagcttggactgcatagcttcctattggagaatggcggggaaatcaacccagcccagttaccacaacatctcaagagcccaagttcaaaaattcacaagtcataaccaagatgtgaagtccagtccttttttttcacaagatattcgttttagacagatttgtttcctttttattactattattatgcgaaatcattttattgccaattgtgaagattcatattctttcgtacctctgtcacatatatcgccacgtggaattcaaaagtatctgcgtcaacgatacgcggtcgaaatcaactctctttccacacccatccaagatcctgacacgcgtcagcatggacggccgtgatcaaatcctctaagatattcccaaggcgcgcctgctatgaaaaggacctcagtttctcgccttagtcattcattcattgaatcaatccaatccacagagg

SEQ ID NO: 48032 - DNA, 808 bp, Manihot esculenta
  Intron number 1 from transcript cassava4.1_019568m (locus cassava4.1_019568m.g) derived from phytozome v7.0 (chr-ID scaffold03569; pos 380089 to 380896 reverse strand)
ctccgccgaggacttgaaggaaatcctcgcatctggtactttctaactctcattctcatccttcatggatctgtatttcgacgacagaggttatttcaacttttatatttatagtttacccattaatgagattttatttgatgactatattttagctgccgtcgattatcttaattaattttgtttttagcaacatgttcattagaaaaccatctattattttcctcttcgtgtagcttgatttgctattacggcatcttagtgacgatagatgtattttgaattggttagttgaagtatattgctgaattttcttggttaatttgtcaaattcttttaattgttgacgcattttttcatgtgaacttaatatttaataatattggaataatttatatgggcagtttctgattgggttaaattccttcttgaagctgacaacatcagatacaacatcagatactattgctattgttttgccaaattctgtgttctacatattgtaggatgcgggttgctagccgtctactgcaacaactgcttattgtgttgttgtagttgtagcagttgatttttttcccagctgagcagtgtataaccaagtttcttgtcagctttatgtttctgctaagaaattgatcctattccactttgctgcgtctgttttctagtccgtaagagtatttatgcatctatttgtgtgtgaatctggattgatgatgatttccagaatggaaggttttcgtgaggatgtttgttcaaaaattaactgtgtttgatatttgttttggagttgcagttggagctg

SEQ ID NO: 48033 - DNA, 808 bp, Manihot esculenta
  Intron number 2 from transcript cassava4.1_012672m (locus cassava4.1_012672m.g) derived from phytozome v7.0 (chr-ID scaffold07536; pos 22448 to 23255 reverse strand)
gaaacataggccaggtaattagaaagtgacatttattttactgactatgaatgattttttcatacctaaatttcttttctgttccttccatataaatttatgtttttgaatttcattgaggtaattgaaactgtgttgagatagtttacttatattagttaaattgatccatccagattgatatctctttttctagcaagaaaaagacataatagttaggcgtggcaaggatgtggtgtttgtttcttttgatttgaaaaagcgctggtttaagtaatgtgaccactaaccacactgtttgtggatgtaggctgattttaggagtattgaaactgccgcttttccttgaaagaaaagaatatcacattatgatattcattttgcatgtccctctagccaacttctagtaagatgatcacatcagatgtgattgtaggttcacttgcaatttacttaacgagattgtcattgctatgaaatttctactccctgcttcacaccggctgtagagttgtccttcaattcaaactctaggatccaggttgttgaactttaaaccaaatgttgcaatctctagattggcaattaaaatcatacagagaatttctgagtgtacaaatgagaaaaaaataaaaggagcaactgcaaaaaaggaaattgtgtataaattattttcagtagaattagtaccataattttacagttaattttgataattccattgcgactttctatgacttatagtgttgaagcactgcaaattctccatataggtgaaaattggtgaccttggctttgcaacaatagt

SEQ ID NO: 48034 - DNA, 577 bp, Manihot esculenta
  Intron number 1 from transcript cassava4.1_020569m (locus cassava4.1_020569m.g) derived from phytozome v7.0 (chr-ID scaffold08265; pos 2496034 to 2496610)
gcagcagttttgcaggtttattgtagtcgagcgccgtaatatttcaactttgtctttaactctttagtttctttaatttagcatcgttaatcatttatctttccgaaacataaatctgatttttgaatcctccattctctctgcttttcttatctgtttgtcaaatttttagctcagaaaccttaaaaatctgcaatgggtatctttcatttgaatgatctatgcatatgtctgcttttttttttttctaattaattttgtcattttcctcggattttggatataattttatcattaggtattgtgctttcctgaaaagcaaacttgattgcttgctgatgtgctttttctttccagtttactggaaacgggtcattaatactagcttcaatttgatctttctattgaagatctgttgataatgtagcttaattatgagacagtttggataatgacttttttcttttgtggcttgttttaaatttaaaaaaaaaagagaaaatattactaacaaaatatagggcaatacaacagaacaatccatattaatgagcgagttcttcatcctgcagtgaac

SEQ ID NO: 48035 - DNA, 238 bp, Manihot esculenta
  Intron number 2 from transcript cassava4.1_014405m (locus cassava4.1_014405m.g) derived from phytozome v7.0 (chr-ID scaffold06598; pos 424376 to 424613)
aacaaagaaagaatctcattgagaagacagttcaggtgaaaaattaatccttgggtagcttttccccttcatacgtatgctatgttcccagggctacctttcactgtcctttctttaaatattattttgattgtttataattcatatactttaatcttgagaccattttctgaattagaatttaggaagagttattgtcttaatcgagagaaagctaatgggtttctctttcagaaat

SEQ ID NO: 48036 - DNA, 978 bp, Manihot esculenta
  Intron number 1 from transcript cassava4.1_008427m (locus cassava4.1_008427m.g) derived from phytozome v7.0 (chr-ID scaffold04043; pos 1194620 to 1195597)
ctgatcaccagtctttgaggtatttgctaattgtcaacgttttatgagattttgggtatgggttttgggtgttgtgttttctgagttttgagattgatgtaatattgttgactctggtggatttgatgatctggaggtaattgtagaagattgagttttgttagaaatcttgatgaattatgcgagtctacaagttggttttttactggattttaggtttcatgatgaatagccgtcttgtagatgaagtgaattgttgcaaggatttgttctgtgaatagcttctggttctaaaaaagctggcaacctcactttcctggaaattggaaataacgcgtaaatcgtctcaagttgttggtcaattgtttgctacgttttgctcttgatactttttgatcaacgaagaactaggtacttgtgggtgttctaaaaccattaagtgtagtaattgtacatgggctacataatctggaaatgggccggtgaaacttgcaatatagaaagaccatcttcactagaagcgattagattttatgttttaagaatggtacaacagaaatttgcgtagtcatcatcctcatttcccaaattatactgttctctatttgatggctgtgctgcgatctgatagggtccaaactgcaatattataatgacttgctggttggactctgtttttaggtcccttttacttcgcttaattatataaatatgcatatttatttgaagccatatgcttacaatggtgtgttctgttactggttctgagttcgaagttttgtgtatacagcaacagaccagccttttaagtactaataaacactttatcactattttcgtcttcgcatataagatgcaggaaaatataaaaaatttgcttctatacctcgcagtatttttcttatctggaaaaagaagcccattttaatactttttttcattcttgacagtgtatctccagaaatttgcaaacccaaa

SEQ ID NO: 48037 - DNA, 460 bp, Manihot esculenta
  Intron number 1 from transcript cassava4.1_023523m (locus cassava4.1_023523m.g) derived from phytozome v7.0 (chr-ID scaffold03802; pos 411135 to 411594 reverse strand)
tcaatctcgctaaggtttaaattttctttttctcaattgggaattagtccttttttgctagtttttgcttgttttggttgttacattggtcctagtgtctgtgattcatcatgggaaattttaggatttatgtgatcaagttctttttcttctgcaatcgcaatcagatatcgcgtttaattttgacctaataagggaaatttatatcattttctggtaagttgattgctgtaatatctcctaatacatacatgattctttacattgcacatttcttggttttcttttactttcaaatcttgtttagaagaattctatgcataatttctattgctttagaataaaatcttttttcagtataaaagaattaaattctttaaaaagaaatcaattaaattgaattatttttgattccaaatgagaatatgttatctgtttttgcagaggtatatacagcaac

SEQ ID NO: 48038 - DNA, 879 bp, Manihot esculenta
  Intron number 4 from transcript cassava4.1_014985m (locus cassava4.1_014962m.g) derived from phytozome v7.0 (chr-ID scaffold09000; pos 257489 to 258367)
atttaaatcctgaggtaggatgtgttgttatgttcagccttatcgtgactgtcattttttatgtctagtaaaactctgttgtgatgatgcttatttggcttgctagtttctttattttgttaaagttttagtattttaagtgcttctgctgtttagttgtttcaatcatgaatattttcgtagactcctcttctacatcagaattaaagagaccactttagccagtcatctgtgcacctgtggatgtgtggttagaccattacatgtgtgttacctttgaattttgagccatttttcttgttcacttaacagtaatttttgcaaaattaacactttagcctgatcttaattgtttatgatacaattacttgcattattgatattatattatcatacaaatatgccatgaatctattattaagtatgctaaaaggatttgattccaggatgaattcttttaattgggtaaggatggatgtttcttggacatggtttatgtggtagaagaataagccacaatattatattacgcaagctacatcactgcagccccagtcgggtcaatgatttggatctaatttccaactctgatagatggtcattgacaattacttggtttgtatcattttaaactgttgagtgattaagaaattggggaaaaagtagaaggcttatacattctggtggcaagtactcctcaaatgtaggatgcatcttctagtcatcatggtatagctttaagtcttgctctatttattttttttttcctagtttttggttatgtaacagtcatatgtaacattcctttcatctagattttccttatgtgaaagtttgtttgcagatactggatacaaatccccaactgtttttccatct

SEQ ID NO: 48039 - DNA, 762 bp, Manihot esculenta
  Intron number 1 from transcript cassava4.1_010357m (locus cassava4.1_010357m.g) derived from phytozome v7.0 (chr-ID scaffold11928; pos 115130 to 115891)
cagagcaagtggcctgcagtgccagcttcttgcaggtgcgtacgtgtgtgttatatctttaaactctccaggttgttaatgttcgttaaaagtatctttgaccacttctgctcctatagatttaattattaaccaatttactttcatgggattgagagaattgtcctgaatttattttgtctcaaatgaaattattcataatcttaatttcgtcgaacaagctaaaaacaagtgatgatatccttctaacattctttttagcattaagttgatatggtcttatacgaaaaagatgttccgtttgggcaacgttggattttttgctttattgttaagcactttataagtacagccaacatccttcacatgggaaaaagaaaaggcagatgatccaatcaaatgaccccaaagttcagaaatacatggcaccttttacctaaaaagcactaatggattcttttggctgtctataaatgacaggcttagagggtaatcgctgatccatattgaaatttgcttataatttgcgttttatatatattatcattgctggtaggtgaagctttttaaattatcaacccaacacatcgccttctcgtatgatgtcttgtcggtttttgtacgaaaccaaccatgtgatttcttacattattgaagttacaactccacagtttgagtaatttctgccattgcttcttctgaaactaatgcttgctctaacaatttgggcatactgatattgcagggaattggtagctgaat

SEQ ID NO: 48040 - DNA, 1019 bp, Manihot esculenta
  Intron number 1 from transcript cassava4.1_012393m (locus cassava4.1_012393m.g) derived from phytozome v7.0 (chr-ID scaffold00506; pos 643058 to 644076 reverse strand)
tggaggaattgggttctttttggagttttcaagaggtgggtttttttttttttccttgactctcttcttcttgtctctaatctctttctaagtccttctcttcattgtgcttttgtaagccatgcaattcatatggggtttgttcataattatgctatgagtaacaactctttgatgagtctttttatcaaatacgtggtgtctgtctgttgtctggtgaattgtctcagccataaatggcttaaaagctcacttataataataagtatggttactggctatctgggttttttttcagttttcttcttagggaattgtgaatcatgcagttggatcgaattgttagcatttgatggcattttcattgtgtttatccagagaaggattttttttttgtgcatgctttgcagatatttgatgggtttctttttatccttcttttctcttctgttttcctagcaattctcttacataaatgaattaaccttgtttggttaaaaagtgggcctccagttttattgtttatttgcctctggagaaagtgaacttgttttgtcctgctaggaatagaacatgcttctgttgaaacttaaggagttcaaaattgtctgtattgaaacttgatatttcttagcattgaattatggggaccatacccatgtcaatttctatttttaaaggtaggtatgttattcttctctctctctctctcacttctttttctcttgaaaataaaatataaaaagaatcatcatttgacttgatggacttgtgatttgcatgggtctaaaatgagatttgagatcatacaatttctcctcaccattgaaactctttgttcatctattgtatttggctggaatttctgtttgcaataagagattagatcctttgattttaataacatcaagtttggtgttgatgttaaggcactgttgctgattttatttctctaataatgtttacattgctttgtaactctcaaagtaataagtttgtcttgaatttacagagcattg

SEQ ID NO: 48041 - DNA, 224 bp, Manihot esculenta
  Intron number 1 from transcript cassava4.1_004907m (locus cassava4.1_004907m.g) derived from phytozome v7.0 (chr-ID scaffold00886; pos 55891 to 56114)
accaggtgagagggttttcctttgttttttcctcttatttttcttttagtaatgctaaggggaagagagtttttatttttatttttgaatccagtgtttcatttcaactgtctttcaacaaatgttaagataacttctttgtttctacacgatgatcattagtatgaattcctattattttgaatcaaggagtcaagtgaagagcacaagagccctacatttaa

SEQ ID NO: 48042 - DNA, 741 bp, Manihot esculenta
  Intron number 1 from transcript cassava4.1_032749m (locus cassava4.1_032749m.g) derived from phytozome v7.0 (chr-ID scaffold08265; pos 4203765 to 4204505)
tatagccgcaggtttattgaagccgatactgtgtgcgtatgtatttcattgattcagaaaacttttgttgattaaatggcgttacagcatgattttcataggtcgcattaattgagataattttcttacaaataaaaaaaacgtctctatgaaaaatgcaccaaccaaataatctcttcaactactttttaaattttcttttgttttttcttggtcatgaattattaatgtttatagaagctcaagctatttggaaagatttatttagtagtactatttatccatcgttgagaaatattatttgaaaatattttaattacaacagtaacctctaaaataataattttttataaaatagttttaactagctgtaattattactttatgttattacaattgcgaatggagtttgagtgcctcacatatttacattccgcaaatgcgtcatggattttaaattattttgatctgaacacttaaattttatttaattagaaataattcaattaaaaattttaaaatttttatgaggtgtgaaaattatttttgtttagttagtatattttttttatattttttgaaaaatcaatagtttgtcttcatttgaaaaaaataccccaatccaatctaattaaattattattattattttttaatcaataaattatttttatataataaattgatgtattatatgttaatgattgcctattttggtaactttgaataggagttttcaag

SEQ ID NO: 48043 - DNA, 840 bp, Manihot esculenta
  Intron number 1 from transcript cassava4.1_020844m (locus cassava4.1_020844m.g) derived from phytozome v7.0 (chr-ID scaffold09000; pos 551971 to 552810)
ggtaagctctccacattaaactcttcatttttcttcttttgtacttatggggtttcaataggaaatgggtaatgatgtaaattaggagttgtggtcgatgataggtaatgggtatgatatggtcaaattggtttgtcttctctcctctcttcagtcgtaggttgcaaattagattgatttttattttttctttcggatctcttggtgaaatgggatgtgattttcaaagtgagtatgagcgtcctatgactgaagagacattcagtggatgccctgtatcttttgcatcttttgcagttagcatacaagttgctaacctaattaaacttttaggtgtattcttaatcttcttatttatcttctactgtctagcatttcttgttccattttgattttagagacaggaaatatagttttgatcttttgattaggagatgcatctaagttttcttgtgcataatgcaaatgttttcttgatgttctatggggggagagggagagactgaaatgctctgtcagcaacttttcctaaaattggaaattttgggtaggtttatttcttttttttcggtcgtgttaattattctggacaaggcaatcttaatattcacattagaacgttagttgactggacaaggcaactcaaaacagtattctcacaggcatgtgttttctattcaatgggaaatgaatgcattatatatatatgtgtgtgtattaaagtactttgttttggagatttctactgtccttctattaactttatttttttataccattggataaaatttttttctttcatcaggattgccaacctccggaacactgggaaaagtgggt

SEQ ID NO: 48044 - DNA, 706 bp, Manihot esculenta
  Intron number 3 from transcript cassava4.1_028732m (locus cassava4.1_028732m.g) derived from phytozome v7.0 (chr-ID scaffold08265; pos 2350275 to 2350980)
ggatttaacttgggacgaagcacaaaaaatagcaggtcagtaatttctttctgtaacagtcagctgactgtttttactgtgaaagtcatcccatattgaaaaaattatagaaaattaaaaaactactaaataatttggattaatcattttgaattaaatggaaagtggatttaaaagttatttaggtcagtttgaatcggactatttcaattgatatcagaaccagtttagatcagataaattgtgggcctgtaaggaaagagttatccgtgagagacgaggtggagctgcctgaagtcctagcgaaccacagtatctaaaggtccggttctggttagcaattatattcgatttggtcttcgttgtaaaatttagtaggaccgagtgtaacggtcaactgtatgtttccactgcggaaattacaaaatttaatggaccattatagaaccgagtgtaatggtcaactgtttgttttcgcttcagaaattgcaaaatttagcaagataaagtgtaacggtcagctgtctgcttccgttgcggaatccgtcccacatcggaagattatagaaaattgaaatagtacataataagtaatacgaaactactaaataattttagttaactattttagacgtagtataaagtcggaccggactattttttcttaacaaggaaaattattaattatttatacacgtgtacagga

SEQ ID NO: 48045 - DNA, 634 bp, Manihot esculenta
  Intron number 1 from transcript cassava4.1_033534m (locus cassava4.1_033534m.g) derived from phytozome v7.0 (chr-ID scaffold06871; pos 651812 to 652445)
ggaagaactgtcaccaagtaatctctctctttctttttaaattttagttttcaatatacatttcttgttttctctgttgggctgacgagaaaatgcaagaaaataaaaccccaaggtttgagtaatcttttgattaactggcttttttgtttataaagaagttataattgtttagtggtcttgttttggttcattataacgcaggaaaatgaaaagcaagacttcttattgatttgaagcatttagtgcatttctttttctttatcacactgattcggccgtggtatgcgaaacaatttatcttagttccatttaagttgtgagaaaatgcggtcaaaagaaagtgttactttagatctcagctcagctgtgtggtgttcggtacatttgttttgatgatcatttcggaaatggttaataagcctgagtatcatttataatcatgttgttatacaaaatatgtcctctaggcttcaaccttgtaatgggttttgaattttatgtttatattcataatccttttctttgcatctacttattgtttttcttttctttttttattgcttgggttcttatttatgtgaattgtcgaattgaagtgccggcaaaaaacaagagattttgcagctgggtg

SEQ ID NO: 48046 - DNA, 864 bp, Manihot esculenta
  Intron number 1 from transcript cassava4.1_008227m (locus cassava4.1_003064m.g) derived from phytozome v7.0 (chr-ID scaffold02264; pos 496565 to 497428)
aggtacgtcttacacgtacataacggcgatcaactatttcttgtttctataaagtttttgatggtttttttcctcttaatttactttttagctttcatatgatgactactttgatcaacttgttttgtgatatgtttgatgttggatcaagacccatatatgattttgtagtttgtttcttatgtctggatttggatggattttgatcaagtttatagatttgttctttaatacccacttggaatatgcatctatagtattattaaataaaactgcacatgtttgcttctgtatatggaatttgaatgggtttagaagttcttttagatttttttcatgttcttgaaaatattccattttctctgaaaaggatgctgccttgatggttgggaaattatctggcttgcttccatgtttctcacctgagcatcaaatatctgttatcaacttttgtcaaaagtttaattttgtctttgtggtcaaaaaataaatcttcaatttctttaaagaaaatatgatagtggacaagattataaaggtttgatcagtcttttggaaaattataaataaaaatataaaacttgagatggaatggcccataagagatgggaatgtgactcttcctcagctttattatggtcatatggctatttctaattgccttttacaccactattgcattttcctgggatttgattggtgtttcctcctttttcttttctatattaaagctgtccaccaacaaaattaatttacactttttgagacatcactccttttgaacttttgggagttccattatgtattcttagttaataatagctgacaatcttgcattcttacagctagttgagaccaaggtga

SEQ ID NO: 48047 - DNA, 854 bp, Manihot esculenta
  Intron number 2 from transcript cassava4.1_021917m (locus cassava4.1_021917m.g) derived from phytozome v7.0 (chr-ID scaffold06871; pos 431386 to 432239 reverse strand)
ggagattatacagtgctggtgtacatgccctcttgttgttggagaattcaaaattaattggatttgaaaatactcttataaatactgtgtgagaattcaaaattgattgtatactcagtgactctgccatgcaaggctccataggtctaagaaagcagcacaagagtacctccacccatgcaaagcatcttcataaatgcaaaaactttagccagatggagaagagaagatggaacagttagtggtcggggaggaggaggcaagactcattggtatatgactcacgtctcatgaattgcacactttcgccctatagctagcgtgagatatgattttatgatatggtatatttaaactaattttaatatttattatttatgaaggacagttggacggatgagtgaggaaaggcctttcaggcccaacccaacttcgtccctcccaataatcaggtctactttgaaaacatgaaatgattcttaaatttcttatacatatatacacatttgattattaatttactatagatgacttactaatcactaatttttcaaaatgaaagggtaaaatctcaccccaccgacatgaatatatgtattatgcacatagaggtccgaacagacatcttcatgggacaatacatcatatgtagtccctatcaattaggctgtaaaaatgtttcacttgcggtaatagctgagtgcatctgcaacaaccacaagcttactacgtacacgagagttggatagagtgcctatggctttcaactaaattatttggcaaattttgtccctttcttcttgtttctgcttttggcattcccatttgctaatctcttcagttggtggctgtgg

SEQ ID NO: 48048 - DNA, 666 bp, Manihot esculenta
  Intron number 3 from transcript cassava4.1_031815m (locus cassava4.1_031815m.g) derived from phytozome v7.0 (chr-ID scaffold04439; pos 47741 to 48406 reverse strand)
atacccaaggtatacattgaacacatgatattgccattttggtgatatttagaccatgactttcccatttccttgcttcaatttgtttttcttatggaaactagcgatctaaaccaaaaagttaagacgaaatttcggtggttccgcatactacttaggttgcaagataaattcactgtgaacaatgacggatataagggagatggcaagagccaccaccacaaaattttaatttttgaataggaatagattgaatatgaatatatttttaatagattgccatagttagccctctagattcttaaaaaaaattaaaaagttgattttattattggcatagcaaaataaaaatgtaataagttcaaaattaataatttagagttgtatttttgctaaaatttaattctagttaaattagaattagcttattatagttatattgaaattaaaattgttaagcgcatacctagcccttctagagtgtaaatgccgcattagtgagtattttgtccctctaattgtgaatgttgtgtccttcactgcatatgaaacgatgtagccaccaataatctcttcaatcccacaaactctcaaactgatgcaccaacagttttaacaatttttctgattttccctccctttcgctttggcagttcatcattgcca

SEQ ID NO: 48049 - DNA, 521 bp, Manihot esculenta
  Intron number 1 from transcript cassava4.1_031815m (locus cassava4.1_031815m.g) derived from phytozome v7.0 (chr-ID scaffold04439; pos 48649 to 49169 reverse strand)
gactcaaggtaaatcttcaatcattcttcctttcttatattttctttgcgcatttgatcttattattgttaagttttaggatcttgagttaatcatctctaaatacctgcaaaattacccaatgattgatcctgtataagaagttttactacttactataatccacattgttaggtttctttgtagatttatactttgaagaaattatttcatgcaactgttatatatattaaaggtttaggtttcctcttgatttggatgatattttgcaatgatcaatttcttctgcactctaaaatgctaaaaaatatagaataattaccttttttcttcttacttttctcaaaacttcctcgcctaaaccaatttttagcaaagagatatatatgttatcttactctatggaagcagcatacattgcaagacttctacaagggcttcttttcatgaaagtgttcttgaatcttcgtaaaaatgttattcagcaattagtaaatcttcatctgaaataggtgttgcat

SEQ ID NO: 48050 - DNA, 685 bp, Manihot esculenta
  Intron number 3 from transcript cassava4.1_003020m (locus cassava4.1_003020m.g) derived from phytozome v7.0 (chr-ID scaffold06089; pos 72246 to 72930)
gtagtttacgaaggtatagtgaaggattctagcaggttagttttcctttatttaaaaaaatgggagatttacattttaatttctaaatattattattattaatacgtctctcttgcatttttttttatttattaatttttttacttttctttccgttaaaaatagagaaaagaccaagtgaaaatttttaaaatttaattttgattttaaataaaatttttttttattctctgaatattactgttattaataaatccgtctctaattttaattttctgaaaatttttttcgtttccttgtcaagaagatgatgaaaaagaagaaagagaaaaaaaaactatgaagaagaaaaagaagaagaaaaagaagaaaaatctcttcttctttaaaagaagaaaaataaaaaaaaattaaagaaaaataaaagaaaaaccgaagaagaagaggagaaataatcaataaagaaggaggaggaggaaaaaagaggtaatttggtcatttgctataaggattattttgttgatgaagagaaaagatgaagctgactaagagaaaagttgaaaaacgttttaataggtttttgagaaaaaattcaatgcttgttatcagtgaaatggtgggttaatgtctgtggcattatggaattgcagccctttatataaaaccagagttgtgctccggcaat

SEQ ID NO: 48051 - DNA, 647 bp, Manihot esculenta
  Intron number 3 from transcript cassava4.1_015703m (locus cassava4.1_015703m.g) derived from phytozome v7.0 (chr-ID scaffold04651; pos 28655 to 29301 reverse strand)
gttcttgtgtccgcagtgcgtgcctctagctgctggtgagtattttaattgcttttcatttgttctttgcattattaactgctcgatttagaggcatgtggttataatcccaatttggggtggctgggaacttttttatgttgttttagtgaaagctcgacactttaatggatgggcacttgcccgagataactagaggtttttgacactaggctagcaaggaataactctgggtttgagttttggctagggctagtttatagctgtgtgctgaggtttgtgtcaaacttgatcatgtgtaggtttatacatttgcgagatcccgtagcctgcacaaataattccttcatgatgtttcctttccaagtaaatggatgctaaatagatgctcttcatagtttgctgaataccttaaccaggcagttattttctcagtgtttgcagaggtaaatcaacctcttagtccattaaaatgaaaaggctttaaaatgttcagcctccaatctgtaaacttgcaatatgcatgttatttctggacttgcttgtatgtggcgaaaacacagatgtataatcttatgtttgtttactagaatggttatgattggattctctgtttgtcttagattccaacactgcctcaggctcgc

SEQ ID NO: 48052 - DNA, 984 bp, Manihot esculenta
  Intron number 1 from transcript cassava4.1_016471m (locus cassava4.1_016471m.g) derived from phytozome v7.0 (chr-ID scaffold08265; pos 3871400 to 3872383)
actccagagtagtaagttctaatccaataatcaaattattgtttatcagccagctgaaccatacaaaataatatgcatctagattttgggtttatagtttatgctctatttgaagattgaaggttaaaatcatgattaattatgatcctatgctcgatttagcttctaatcagtagttctgttgtagatcggtttattaaatgaattttcttcttaaggaagcattagatagtgtctatttcctggtaagttattttagggtttagaattaaaattctttttagtagggtagttgattttagcgttaagctgtccgagtggagcttggaaggggagctaacagtaaccgcttggtcgacagaactagaagtatttgttctgaaactggtctcgaggttcggtggtagtatccaagtgaaacaaattaagttatagatttctgttacataatttctgatattggtaatcacaaagggaatgatttgtttttgaattttttagattatactacatagatcattatattttctttttagtaacttcaaggtcatctttattactatttccaaacaagcctcagtttcattcaggtataggacataatcagttcataatcattatatggttggagttgttaaatatggttgtttgattgctacccctaaatttgataatctgagtcatgagtttcagcttgaaggttcgctaacttttcactgacaaatgatatggtcgaagttggaagttctgaggtggcaactataggtggatatgatgcctatatgtatttatgtgcattttgatgtatgcatgcttttcttaggagttttgctgtcttagaatctgataatgtttccattcttttgtaactcggccaattaattgatgcatttggtttaattacatattaaagtaggcttaaattttttattgcttcttttttatgcagtgattacctgttcaagcttcttctcattggagatt

SEQ ID NO: 48053 - DNA, 709 bp, Manihot esculenta
  Intron number 2 from transcript cassava4.1_008046m (locus cassava4.1_008046m.g) derived from phytozome v7.0 (chr-ID scaffold03241; pos 687774 to 688482 reverse strand)
attccaagcaaggggagaaagagtttcacactgaggtacatttggttaacagttaatgtttcacttgcataggcaaaccaactgtgttttataagcatattacaagttgcaaagcatgtggcaataaacataaacctttctttttatattaaagctcaattaaaaattgacaacttgctcagacatgtcttgagcagcactggatctggttcctgaatcagtgacttttattatatgttcaaggtctgactctgtcaatttcctaccattgtataatgattttcactctatgttttcttttgaaatgaatgagagatgctggataaagaaaatttattagtggaagttttcccatcagcaggaaaaaaaaaattaagtcaggcatagaagaataagaataatgagtaaaacaagtaggcaatagttctatcactgtgaatattgatatggctggagctttgcactgaagtgatgttagaaaaaaaggtagattttgaaataaaattgaccaagaaagcaccatggcaaaaatttgcctagtaattaaatctatgctgttggaaggtttgtttgatttgcccctctgcatgacttctgcaatttgaatgcattttatgtgttttgtttatatttatggattcacttattcctgtctcagtgttgctcatcaatttcaacatttgaactccttgtgattatttttcaggtt

SEQ ID NO: 48054 - DNA, 233 bp, Manihot esculenta
  Intron number 1 from transcript cassava4.1_017218m (locus cassava4.1_017218m.g) derived from phytozome v7.0 (chr-ID scaffold04313; pos 194856 to 195088 reverse strand)
ccttaccaggtactattatacacatacacacactttggggtcttgggtttgttttaatttgttgaactagttttctttatagttgtttttggtagctgatggatggtactggtattaatgtagaccaaattgcttttactcattgtaattgaattgccatttatgacatatatttgatttttcttcccttaattgtagagtagtacatttccattagctgttggtcactcaag

SEQ ID NO: 48055 - DNA, 743 bp, Manihot esculenta
  Intron number 1 from transcript cassava4.1_013451m (locus cassava4.1_013451m.g) derived from phytozome v7.0 (chr-ID scaffold04651; pos 17825 to 18567)
agagaagacgaccttggcctttttcacctctccaggttgcaattcttctgattggctcacttttttatgattctcgcttaactagctcttattgtttctgttttcagttccatattttctataaaaattattttccgtgttggtggattcgattttttaggtttgtttttaattctgtttgtcagagttcattttgcaagaaaagaattaaaatgaattattgcaaaatgtgcatgatttcattttctttgaaaacgaaaattttgtaagttgaaaaggaaatgaattctttcattccaaacaaaaaaaatcgatagaaaagaattgaattcttatgaaattttttattccaaacaagggcaatatcttctctcttgtttgtttgagttttcaatgaagctttgatgccaaaatctgccgctttagtttctttgttgttgaagcctcgatatgtagatatattccttaccccttttttcctcaatatatttagctatgtatgtattaaattcatcaccttgcataggatagaaaatgaataatttttgtttaggaatgtcaatggttatatatactgtgtatttataaataaggaatgtcaattgtttcttgttggcttctccattattgctgaactgtttcgtggcgaggctttttctggtgttgaatcaaagaaactggaacttagcttccagatgttcattaaaatgtttacagaatattctatttgctgcagcttgaaa

SEQ ID NO: 48056 - DNA, 616 bp, Manihot esculenta
  Intron number 2 from transcript cassava4.1_013451m (locus cassava4.1_013451m.g) derived from phytozome v7.0 (chr-ID scaffold04651; pos 18671 to 19286)
gaaggtaacctttagttgtgtgttaaaatttgggtgtattggctcagagtagtaaatattgttttcttcctcttccatgaaatattttaccttctttaaatgtgctccttagcctacgtaattccattcaatgatgctgccaatgccaatttgagtcttccttgctatcttatgcagctcactattcttttgattgaataaattcttggattattaattattggtcaaacggggtacagttttcctcctgaaaatagttagggacaagtagctcctcagcagtttgtgttaactgtcatgttatctttgtgggaatcttgtgacccttggtgtcatttttttttaacctgaatgatcttgttgaaggtttctgggcttttgccttacctggaggcctatggtgagagggttgccatggtggaattggtggaaattcttgccgagttataggaaactgtggcgatactttctattatgttattgcgtgtttttatggaattggcaacaatctcaaactggtgtttagttcgtctgtgaggggtgaagtatcatacacttgcagtacttaagtaatgatggccttactgtttgtggaaaccgtttcgcagagtacgag

SEQ ID NO: 48057 - DNA, 320 bp, Manihot esculenta
  Intron number 4 from transcript cassava4.1_013451m (locus cassava4.1_013451m.g) derived from phytozome v7.0 (chr-ID scaffold04651; pos 19494 to 19813)
gcagccgtattgttgtagagtttgctaggggggtaggtttttctctctctctctctctctcttctttttttttgtaaaaaaaacattctttaggtaaaatatttgttggctttaaaattggcataatctgttattaattcagagtggccagagttgttttgttgtatttcagaaatttttattgttgttcataattgcttctgaaaatcgtatgatgtaatgtaccctcccattcatgaagtttgttggtaatcattaatcaaataaaaatttgtgtttatttccaatgtgattaggtacctcgtggttctcgagaatat

SEQ ID NO: 48058 - DNA, 944 bp, Manihot esculenta
  Intron number 1 from transcript cassava4.1_015016m (locus cassava4.1_015016m.g) derived from phytozome v7.0 (chr-ID scaffold06257; pos 74655 to 75598 reverse strand)
acttctccagctttgtccggcaactgaatacatatgtaagtttctgaaaataataataataataatataatagacgtgctcgttttaatttttgaccaattcaggttacaaagattacacgcagtctacaagtgatatttttaattttttatttttaaaaaaaaattattttaaggtgttattttggtcaagtattgactaaaattctgcgttttaggttatttataaattttctggttgttgaatgaaagaataggtgaaatggtgctatctaaacctacccttttgctgttatggtcacttggccttcatcatccaattaatttccctaatttcatgtcttgttaaaacatcttacgttatgtaagaagtttcactgttcctacttgttcataatttaatagttcaagtcttcatttgtttttattcattcaaattaaaaaaaaccctttgaattcaataaatatatatccgatgctaagtcatgtttttagcagttttacataataaattagattgaaataagtaataatatatataattgtatgaatcatgcgttcaaatttttcactatatcttctttactagatattattaagtgtttatgatacatatgcatcatctcttataatcatataaggagattatttctttgtattacgaagaagatcaatatatatttttatcggagataagtactattttcatgtattattatactataagtattctataatcttccatgctttacctgttgttttcttgtcatatagtctttatctcctaaattcaaaggtaaatcaagttctttttagtcctccaagagggaaaaaaaagttagaaacctattagattattgaaggtttattatttaatctattatgtatgtgttgtgatatggctatgtagggttttcgtaaagttacaactagcaggtgggagtt

SEQ ID NO: 48059 - DNA, 993 bp, Manihot esculenta
  Intron number 1 from transcript cassava4.1_033411m (locus cassava4.1_033411m.g) derived from phytozome v7.0 (chr-ID scaffold02969; pos 210887 to 211879 reverse strand)
gaagagcgccaaaaacagcagctccagtccatcaggtatatcttatacccgcgacgcatactataataatgaaaaagtgcttgtttgtgaagaaaggatcacgtggaatggaacacggggacagagaagaaaaagttcggtgggccagacagggagaagttgggaccctgtctttgtggtaatcgtgaccgttgatggatgatcggacgtggtgggggtgttttgtggtgccaatggaagggcaggtttgggcccattccaggaatgacacgtttggagatgctggaacgtttaaacccctttggcttggtcccgagaatatttaatatttttatattactaaaataacccctgctattaatatgatcattttttttttctcttttttcagaactttttcatatctagaattttttttatattttaatatacacaataatataaaaaataatgtttatcttctatattataaaaaaatccgttactttataggaaactgaaaagatcttaatagtcttcggagtaaaaaatgataatattttattgtaattatttttttataattaaaaatcatggttttaatggttttaatttgtattttatttattgcaccgactgaaaaaaataataattatcttaaacaataaaagtcttgcataattatataaaattaaatttgtttttttaaataaataatttattctaaataagacatagttttctcaattttgaatgcaggtaagatgagattagcaatttattttgtttttttatgcataaattattcagtatttaaaatttattaaattgattaatattaaatatagtgtcaaataaatttattttatcatttaatgctaaaatatttaaaatatgaagtttaagattattatgtcaacatctttggtaaatttttttacgtactcctgacatttaacatttttcttcgcaaaaacagtgcatctctggcatcgttgacaagagaaactggac

SEQ ID NO: 48060 - DNA, 918 bp, Manihot esculenta
  Intron number 2 from transcript cassava4.1_011542m (locus cassava4.1_011542m.g) derived from phytozome v7.0 (chr-ID scaffold03264; pos 74839 to 75756)
gagctgtatcctcaacttgtcacattgacttctgggtaataaatcactctagacgccttatatatgctcttgttttgtataggaatttgagtaactaaatctataaaagtctgccaaaaaccagatttcaaatgatctactaaagtgctgtcaataacaacttcattactaacatctctccatacttttggtagttgaattattctatggactcattattttggaacaaccgagttattttttttttcgaattataatttttttagcagcaacagaggccatataaaaacactccttgaattttttgcttctggatatatgtttatttttcagaacttaaaatctggctgtaggcatggctttggtcataatatctgcaacttgcacattgtcatgataacagtaacattccttttgtcaaatgatcagccatatgacacttctcaggacatcgctccccatgttgtgcacggtgaacaacactagcagccgcccacctttatttttgaattattaactttctcattccttacccattttgacactcttgtaaccaaatgattccttcataatgaaacttatgagatacgaaattagagactcttcaatttataggaaaccaatttattccatccctcaattaacttcagggtaaaaagggtatgatctcataaagaaacttatcaaatatgcattaaagactgcacaatttataggaaccaatttatttcatgctcacttcaatggatatatttttgcttctttcttctgaactgttaaattcctgcccttgagtgatttcttgtcaggccttaggttccttttagcatctttcatgtctgtaaagcgtgccaagttaagcttgttctaaagtttgtcttgtttgctttgctcgattgcttctatagactgaaaact

SEQ ID NO: 48061 - DNA, 235 bp, Manihot esculenta
  Intron number 1 from transcript cassava4.1_017504m (locus cassava4.1_017504m.g) derived from phytozome v7.0 (chr-ID scaffold07437; pos 40931 to 41165 reverse strand)
cagcaactctgctgctctcacttccttaaaccctagtcagtgttctttacacttcctgttttataaacttgatttgtttcttgggtcgcttatagatctggaaaattcaaatcttactcttgcggcgtttcttttttccttatcttttcttttcatatttgacttcggtgattaattttcttttgagttttgattgattgtattctaatttattatctttttctattttcaggcc

SEQ ID NO: 48062 - DNA, 619 bp, Manihot esculenta
  Intron number 3 from transcript cassava4.1_005535m (locus cassava4.1_005535m.g) derived from phytozome v7.0 (chr-ID scaffold03150; pos 254701 to 255319 reverse strand)
aagtaaagcaacatttggttgactgggctaaagaggtaataaactactgttcaatttgtttgtttttttttatatatataaattagttagataagatttcgcaaggatgttccatgaaaggtgtagtttcattgttcgagtgctgattttgattttcattgctccagtgacttctcaagtttttctacacaaggtcttataaattgtgcaatggaaaatttaagttgtgtatcttgagtatataaattaatgcttgggtactcttctacaccaaaagcactttcttctagtctcttttatttctgtcctctatttggttaagaatcgagacctagtaaccaagctggctcaaaatgatgtctctgaacatatctcatgcttatttaaaggactaaaaggatatcaacttgtgagcgtttctcatgcttatttaaaagtctaaagggcatgaatgaacttaaaactcaaaagtgcagtggttaaaccctttaaaactaattgtttcatgcactagtttatgtggtattgctctatgttctgttctttctgagcaccaatgctgatgaggttgttctgttcaccagtcaggtttacagtccccagaagtgttgagcttgaa

SEQ ID NO: 48063 - DNA, 860 bp, Manihot esculenta
  Intron number 2 from transcript cassava4.1_021946m (locus cassava4.1_021946m.g) derived from phytozome v7.0 (chr-ID scaffold01441; pos 160758 to 161617)
cctggactagcaggttagataaactttaaaaaaaaaaacacttcctgaaatgtgtgattgaaagaaatgacatgaaaaaggtttacgaaatatatctaaaatatacataaataagtagatgaagaggcaaaatgtgaatgataataaaaggtgttttttttaatatatatatatatgttcatatatgacaaatttaattatcacctaaacctccaatatttcattgcctcgaacataatcctgcttatataagaaaatcttaaaaaaatataggtaggcttttgtttcttatggtatcactccgtacctttaaatgtatcttctattattacttttacctttcctccattgttatcatcctggtgttattgtatttttctgtaattgctgttatttttaataaatgtatgagcaaacttcaaatataagaggaagtgttaaatagaaaatgagatcagcttattataaatttgttaagatatatatttagataaattattcatttgaataattctaataccgtttgtattattgagtggatttagatgtttaaaacataattaatatatggacctttgacctttcactatgattattttaatggtgtattgaactccgaaaataatatttgattattacaatttataaattgaggattaaattatagtgttactggaataaatatatttatgagttaactgaaaaaagaaaaaaagagggaggggggaggtgttgatgtgcaacgcacatgacaaaatgactggttctattgaattggtgaatgggtctgtgcatgacttgagcatatgaatctctgttgcttttttaactgctttcagagaggctagagaaagaactgc

SEQ ID NO: 48064 - DNA, 581 bp, Manihot esculenta
  Intron number 1 from transcript cassava4.1_000338m (locus cassava4.1_000338m.g) derived from phytozome v7.0 (chr-ID scaffold03693; pos 247256 to 247836)
cagaaaactgtggacatttttcaatacggtaagccttctttttcatttttcttgtgtgataaatttctaggttttttattaatagtctgatgctgtatggctcagttactcatatcacatgagtagagagagtgcaccatatcttccttcatggaatttgtctggggcgcattgagagtatacagttaattagtggccaagtttttagcaccttttatatatttatacacacacacacacactgttacttctttaggatctttaattaactcattttatgttcatatacacattgtgaggcttccatatattatttattttgttttaactactgaaaatattgtcaatgataactgaggaaaagtttgtcatctggagctgcttactgttgtttgctgaagtgaaattaaaaatacaattagatattgtggaatgtaaaaagagaaatttggtatattgagatttgttttttctttatttgtattgatagtaccttgttaggaactatcttgtcactgctatatatgattatggattttctaccaaactatgccttacaaattgcctttattgcagtggat

SEQ ID NO: 48065 - DNA, 396 bp, Manihot esculenta
  Intron number 1 from transcript cassava4.1_021963m (locus cassava4.1_021963m.g) derived from phytozome v7.0 (chr-ID scaffold06700; pos 164778 to 165173)
gtgccgctgatcattcttctcatcgtggccgccatgtatgtaatctctaatgtttggttttatatttaattcagtttgcttttatacttgtaagtgattaattttaacacacaagcttttgggcttcattcaattttcgttcttttcttgtagttgtagatgtttattgcaattgtgaaactgaacttttcgtttgtatgaattgttcttacaagcttgaaaaaatagcgaaatgcactatctatacatgtacaaattcttgtatcaaacccacaatactgtttttcctatttttagctgctagcttgtttttgataaattagtagttcttatgtatcccattgacgttattgtctgatggacaagttccctgttgtcttttattttgccaactag

SEQ ID NO: 48066 - DNA, 272 bp, Manihot esculenta
  Intron number 2 from transcript cassava4.1_022856m (locus cassava4.1_022856m.g) derived from phytozome v7.0 (chr-ID scaffold08265; pos 4155437 to 4155708)
aagttcccactcaccaggtaaacaaattggattacttggacttgaattctacctctgggtaatggttattttgagttcaatttattaaattgcatttaagggaggtataatggaagtcataggagaatcaagaagcattaaatcgaagggcaaaaatatcggctctgtttatctagtcgtgccagtttatcatgcatgaaaagctctgttctgttttgttctgttttgtttggtttttcttctatgttaaggctccggtgttcagcttttca

SEQ ID NO: 48067 - DNA, 923 bp, Manihot esculenta
  Intron number 1 from transcript cassava4.1_004542m (locus cassava4.1_004542m.g) derived from phytozome v7.0 (chr-ID scaffold08673; pos 45858 to 46780)
agcttgggtcttatctcgttctttcccagttccaggtcagtgttcttctcgccaataagcaattgaaatgatctggagctttgttgtattctttgatgtagtatccgattacaatatgtgttgttaattgatcaaactgggttttgttttaaggcctggtagataagaatttgaaggtcaaatattttcctttgaaattataaaaacacaagtgtgtgttatttagacatgtaatggctagatgctttgtgttgcaggaagatgtgttgtctccatcaatctgtgtgattactattattattattattattttacatattctggtctatggctccaccactggcatgggggcaagttaaaatcttttacatatgattaaaatactttagtattgcccccataaagtttatcaattttgccccattattcactatgtttttcaactttgcccgcataattcatttaattgtctatttgtttatttgctgtatttagattaaatacaaatcatgacttttattttagataaattgctgctcaaatttaggaaataaatataattacaattaaattaaattaatttattcattataatatatatatttttattttcaatctcacacgtttggcataaaaaaaacatattgctcctactgactaaattttctgaatctgcccctactgtccactcttcattcttcttcattatagtttttagcttagtaattcagctaccgaatttatattattttgatctatcattataccttttttttccttctcattgcaatattcatgtccagttgtccacatatgacaatttccttctacccttaaaggttttcatgttctgtggcttatgcatttctcttttatgatgcctgacagtcttctgggaactctagtgcgcttttcctgaccgc

SEQ ID NO: 48068 - DNA, 511 bp, Manihot esculenta
  Intron number 1 from transcript cassava4.1_011822m (locus cassava4.1_011822m.g) derived from phytozome v7.0 (chr-ID scaffold03802; pos 901205 to 901715)
ataatagttataggataaggttgtctctgcctctggtaggtgtttttctcagtttatcatctccttatcaactttcttttgtattttccctctcttctgcttcaagaatttcaatgtcgattgaatttttttttttctatcattttacctttttgttttctttcaatgcaggtttatgcttgcttattataaacttttgattcattaattaatgagtttaagaatagttggtttaatctacgtgttcttttttcatttcattttcttttatctgtatgactttattatagcgatatcttttcttggaaaaacggtgcctttaaagcggtacttatgctatgtctggtttaaatatcgagtaatcttattggaaacttgagttcctcgaaaattttcaaggttttatccaatgggttttggtaaattcttccaatgcttgcaatatctggggattttttcatttgctgatcacctggcgttttgcgatgcttatgcagtgatctgacgaaga

SEQ ID NO: 48069 - DNA, 627 bp, Manihot esculenta
  Intron number 1 from transcript cassava4.1_029032m (locus cassava4.1_029032m.g) derived from phytozome v7.0 (chr-ID scaffold03235; pos 70872 to 71498 reverse strand)
aattgcaaggtttttttcaggtgatcatgtctttctatgtttctgaactagtattcctgcttaaatgtgaataaagcacatctccatatgccaacaccttgaagtttactgttggttatttaattatatacaggtttattctccattcaagttttttcacctaatctttccatagtgatggaactacaccttcaaaatgttaaagctaataataagaatattataagattgcaagggttgtatgaaaatcttcaacttctttttttattattttttgaggaggaagtgggggacatgcacatatttctaatttctaagactttgatgcctagataaataaaaatgctactttccaataatgtagaaaagcgagggttgtagtaatgtttttgatagaaagacatgcaatttttttagtatttcttattgttctctctctgaagggacaatagtaaagtgaagtggaaaaatttttatacttcagctctttgttctttgatacgttttcactgaaaaagaaaatgtttgcagagttgccttatgtttttagcacatgttcattcatatcatgagttgatgatattactactgtccaggttgttgcagatttacttttagcagtttctt

SEQ ID NO: 48070 - DNA, 724 bp, Manihot esculenta
  Intron number 1 from transcript cassava4.1_015833m (locus cassava4.1_015833m.g) derived from phytozome v7.0 (chr-ID scaffold08398; pos 37617 to 38340)
tccaattccttttaggggcgctcctcgatcttcttgtaagaaactcaacctttcccaatctttctttttcctgcttcaaattcatctttatttttgtttcctgcgatgtctttcattcaaacaatgttggatgattatatatatatatatatatatatatatatatttttttttttttttttcttatccttctctttttcctggatctgcatactcgttttcacttcctgttggttgctggcattagagggggatagaaaagaatagaaacattttcctttcatgttgtgcagcatttgtgaaagttaaagcaattttcttatgaggaagtttaatgactttctgcttattctatgatgaacccagcctggttgcaaaaggttcagtttgttttatgattgcatctctaatgctacgtaaatttattatttctgaaaatactgagattctacacatttatggtgtagaaatgtacggcctatgatggggaaccttggataggactcaagggttccctttgattgggataagtgaaatcagtctccagaatatttgaatttaccatgatttgagctctatttgtacattgttttgatatataacaaggtagtttctacaagtagtgccaacttgctgcataaattattagcttccactggtatgcatatatttttggaattctgaaatcattttgaaacttcaattcctcaggggtcacataaat

SEQ ID NO: 48071 - DNA, 711 bp, Manihot esculenta
  Intron number 1 from transcript cassava4.1_008916m (locus cassava4.1_008916m.g) derived from phytozome v7.0 (chr-ID scaffold11388; pos 57948 to 58658)
tctccgccattgttgctacctgctcttcttcccaggtactttctaattttccttcttcgccattttccctgcattttctttctcctttgtgttgtgtgtgctgttgctgtgcttttgatatcagattcctcacctatcatcgattcttgatccctatcttttctcttatattttacaaccttcactggcactgtcattcttttcagatttcttttttcttttttttgctttttacctgtttggttgctgagaaaataaggctgcaatttcaatctttgtggtttctctttcactctcccgctcttctttttctcataatcttacagcaacctcatcttaaaatgcaagactagggaagtaataggtcttttttttttatgtggcagttgaacttcaatttttttaattcagtagaaaaaaatccttgaagttagtcttgctatttgtccaagagcgtgaaacagaggcttaatctatggagagttgaagcaggggatcataatatcttaattgctaattaaatatctaatatcacgcttttgctgtgcattagtagacgatgagcacccattccttttcgacggggagctcttagagcttgtgttatgctcacttattggggagctcctccatgctctcattttcattcttattttaattggcttagcaaacgctaattcgttttgtaatatttcgtatttgcagtaattc

SEQ ID NO: 48072 - DNA, 965 bp, Manihot esculenta
  Intron number 1 from transcript cassava4.1_027366m (locus cassava4.1_027366m.g) derived from phytozome v7.0 (chr-ID scaffold08265; pos 877188 to 878152)
attttattgaggtcagattaattcagttttaccctttgaattgcctgcttctttttctaatcaatttaagtatttatttatctcttttgtaatgaactgtaaccagtttatgattgtttctattagggatcaaatttgaatttgattcctgtaattgtctcgcattcaattgcaaatactggccttgaatgtcaatgaagcaaatgaagttgatatgaatgctcttgtgaactccacagggcaagtacttgctttataactatgtctttggccagaagaagaagaagaagaagaaatatcaagggggacgaggatcgtaatacatcacttgtttttccaacgttttcatgagttatcatgcagaccagcatgttctgttttgatggattacacattttatcaattgaaattgtgtataagatagattcgagcaatggagaggactgtgctgcttttctaaatagttatggttgtagacaaagggtgaaatttggaatcaataaatacaaacttccaaaaattaatgaagttcattcattttatatcttcagtggtctgggatgccatgagaagctgtgcataattaaggaatgaatgtttatgtgaattagcctgaactagcaagtatttaaaagataatttggttttgatcatgtcatctacaatctacatctttccccttcttacattccactgcatttcttttgttggtttcctctaaaaacaactaatttcttaacttgtaagattgtacccagttttggcttttatttcttctcaatctgaccaccattcagggtaggtctcagaaaatttctaccactaataatgttctatttttttcccttccaatttgagttgatgtttgcctagccatgaggaaatcaattaagatgttattgaaggatatgtaggcattactttagaggttacacatgaaagttgattttggttctgtgcaggtg

SEQ ID NO: 48073 - DNA, 796 bp, Manihot esculenta
  Intron number 4 from transcript cassava4.1_003457m (locus cassava4.1_003457m.g) derived from phytozome v7.0 (chr-ID scaffold02767; pos 48125 to 48920)
ccaaaagtgtaataggtattgcttgtgttttgttttctccttcctacctaatttttaggattgtccaaaaaaatcctaactgttttaaaatttttattggaaaaattacgatgcagtttttatgatataagactcgttaattaatcaaattttaaaaattaaaatattttaaaaattttaaaaattttattaattaattattttattaattttaaccgttaagtaccgtaaacaaaatataaaatactttttatacctttaacatggatggatagattgatagactatttacgaatagaaagatcaactaatagatttttttatactacaatgattaaataggaaaatatttactagtaaaaattaactacacgattaataagtaaatttttttaaattttaaaaatattttaatatattttaaaattaaaaaatcaattaatgagtttcactttattataaaaattaaataataaattttttagtttcattttcattttatacttaaaaaaaattccaattaaactctaaataattgagcattgtgcaattacaatttactcttaggatgtcaatttttcttaaccctaattaagtgaaaataattaaaatataataaaaaacgaacatcattttaacccctctccataatcatgtgtcttctcccctttttgttcttcttgtgttgatgtgtatcagatggagcatacgatggattgcattggtaaccttcatctagtatgattcatgttgatcttttacatggtatgtggttttaacaggaacccctgagttt

SEQ ID NO: 48074 - DNA, 721 bp, Manihot esculenta
  Intron number 3 from transcript cassava4.1_026209m (locus cassava4.1_026209m.g) derived from phytozome v7.0 (chr-ID scaffold04223; pos 11009 to 11729 reverse strand)
ttttggcagaaccagcagaagtggtaagatttttgtttatcatcctgaatcctgtttgaatcaaatgtttgatctgttgcatgttaaacagaagccatgcaacccattatcatgattatataaatataataacatgattaaactttatccaactagttatgtagaaaggtggcgtgtgccttttttcccatgaggtaatggggttggagcttggtgtggcaggagagagggagagaacagcaatttgttggactgttatatataattgtgtttaggccaaatgcataatttatctcttcatcttttcactaaaagccatttactgccaaccattagtttcatcctgtttatcccttcaatttaaattatgaatagctgattccaatgattagtttacctgtggacgtgatatttgcatgccccaacatcgcaagtattgagttattccataattaaaagttgaggagattatttacttacttcaaagtcccaaggataagttgtccataagatgcaaattgaaggagtaaatatagtgaagataaagttgagcgagtaaatgaatttttgtggtgagagagaaaattatgcattaagcctgtgtttactttcacatgccacatccattttctatgatgaacactgtttcaagttcttttcattcttttttcttgttcttgtaacaggttgcagaatacctcgttccaaatataagatctat

SEQ ID NO: 48075 - DNA, 863 bp, Manihot esculenta
  Intron number 1 from transcript cassava4.1_004520m (locus cassava4.1_004520m.g) derived from phytozome v7.0 (chr-ID scaffold05432; pos 171190 to 172052 reverse strand)
ggcttgctgctattgctgctaattgtaggtaagaattgaaagttattgtgtgagctcttcgcttcggcttttgttttgttctacagtggggtgttgattatgtgggttgctttaaaagaatgttcctttgactttctcttgaggttactttctagtttttactttgaattgcttgtagaattgcttttagaagtagaaaagtctattgccattttggttaagaccctcctgtgcaggatttaggacaggtagcacttttaaagttttatattgtgaattgggttttgtttgttttctggttgcccaaggttttcagttaatcaagtgtcttgttgcactagaatcctcggcgaaattcaggaaggttttaagttaatcaagtggatctaatttgacagttccttgcgcagagcattaatagttcctccacagaggttggaggatttgctgattttcatgcttgtttgtgttgtttcagtctgcaagttcttgtctatttctaggttggcttctttatctatatagaaaaacattgttggcatgccaataaatgcagtgaatgctcttattttaacttaattatcagaagctcaatgcttaatgagcgcagatgcactgcttttctgaaaatttcctggttttcttttcttgccgctaagttctttaccagtgtgcattgattgtctggatagttggttcccgttctgttataatagcagcaataatatcacctggttagctgactacagtgacatatgatgcatgtttagaattctgaacgacattaagttgtgttccttacagttctatgcctttcctcgatctttaccttaggtttcttagagagctggacctgcaagaaa

SEQ ID NO: 48076 - DNA, 980 bp, Manihot esculenta
  Intron number 1 from transcript cassava4.1_018119m (locus cassava4.1_018119m.g) derived from phytozome v7.0 (chr-ID scaffold03241; pos 12840 to 13819)
gctctcgctcagtttcttaagctcttcactacctggtatctcccttttcttccgtagtttattttttgtcttattattttgcttggttttgaacttttaatgtgttacgccgattgttgagctacttaataaaattatgctgttgggtcttttatttttgggttgatttcagtgggtgtggctcttatttatatatgcccctgctctcgtacgagtaatttcaggaaatttcggtacatatttgctgtttttatatattataaggatatagacatgcttctcgaacagcattaatggttcaggacagtgaatggatttgaagttcgagagctagtgcatgctgtctctgtaacaaatgaaggttaaatttttaaaatttatttctataagtagttacatatcgttgcaatctaaattttgttacacatcaaattttgttacctggggatagagtgacaagaaaggattcgattggtcaagaacatctttcgaagattatgattctggagagagaagggagggaaggagtttctgtacatcacttcagttggtatggaattaaagattaatggagttgtagtggctttttgtacaaatcaaaggaagtactttagtaaagaagcaagatgttgcttatttttccatcactcaggagcctggagaggttaagcaatgttgggaaagtagaaagatgatattctatatatcttattttgactcctcttgtttttgggtatttgtaataattgtatgtgttttgaccatttgacaattatgggtatgtttgtttgaaaatgatagctgatgttactgattcaaagtaatgtggcctgtaagttcactcgtatttatgatttgagtagcatgaaatttagttacagaaaagtcttgtttattaaccattttgtcatgccgctatggctgttcccttagttcttttccaatatgtaatcctagacgtgcaggttcaaagagaagag

SEQ ID NO: 48077 - DNA, 633 bp, Manihot esculenta
  Intron number 1 from transcript cassava4.1_004265m (locus cassava4.1_004265m.g) derived from phytozome v7.0 (chr-ID scaffold03802; pos 831998 to 832630)
agtgttagtaattcacttgtattttatttgctttaatcgtgttctttcttctaccaagcgttattattgtgcatatctgatttcgggatgttctttagtttttgatcatggagtggagatagtgctgtttctagatagtattgatggatgaaatatttaattgtggtgaatttgaggcttttacatttcattatgagtttgttttttgagagggagttagtgggtgagaaggtgtgtatatttgctattaagttttgctagatattaacagcaaatgagcttttgggatgtcggcaattcacttgatctttagtggcaatgtgcttaataaggtagctattgggattaattttcccttgtgaaacaagcagaaagaaatcgctataaatggattcttatagtgtgccaattcataaaactcaaatgttagcgacatttagttgatgcgattcctgatatgagtttttagctccaatctcatagttttgaatttgatatgagaatatcaataagatttctttatgttcgccatttattttgtaaagtatgctagtgtggattattcttccttcttaccatacaatggtatgcatgccagctccaaaggggttgtttccgccagaacctgaacgt

SEQ ID NO: 48078 - DNA, 769 bp, Manihot esculenta
  Intron number 1 from transcript cassava4.1_009784m (locus cassava4.1_009784m.g) derived from phytozome v7.0 (chr-ID scaffold08542; pos 1370 to 2138)
cggagagtgcagaaaattctagttctatattgaaggtaatttcttgttaggatttgaaaattgtcttcctcgctcgagaaaatttctggcatttcctaggaaaacttttctggtctcttgtttcgcatctcgctgcatttttgcttttactaattttgcaaattttcttcttcttttttcttgattcagtttcaattagaattgttgcatttctttgttttttttgttaatactaatggattatgaaattaaattggaaatgtggtgatgtttatcgcgattcgtaatctgatttcaggccagaattaattctaaacgaatgtagcatcatcatgatggtgcattctttgagactcgattaagtttcagagtttgtattatataataacaatgaggaaatccaagaatggacttttctgatcatgcaattattgtcagtgcggttagttttataattattaagcactgtgaaggcttatcccatattaccatctaaaccagcataaccaaaatgaatcttagattcgcattgcaatggttatgcatatgagattgcatattcgagtgcattgaattggaaataaactgttaaatattcttttgcaaatatggttgtgaatgcattgtaaatcaggccgtggcctttcaatcattggatttttgtttcaaaattgtgcatattgtttttatatcaggtgttaatgattggatgaaagtacctatatgcgttttcatacaaggttggtaattgtttggcaggcttaaggaa

SEQ ID NO: 48079 - DNA, 776 bp, Manihot esculenta
  Intron number 2 from transcript cassava4.1_008947m (locus cassava4.1_008947m.g) derived from phytozome v7.0 (chr-ID scaffold08265; pos 4260726 to 4261501 reverse strand)
tgctcacgattctgtttccaggaactcttgtcaaggtatatatcttttgttttatttgtttttggtaaacatacatttcttttcaagtcaatacgcacatttattttttaataatattaattattcagttcattaacagttgggtaaattatatatgttggggatgtgaatcccaagaaagacatatcctttgtctgctttttaataatagactggttgaaagcaagtcctttgctttcctcaaaaaaataaaaataaaaataaaaataaaaaagcaagctaagtcctttctgcttgtaatcaagcatttgaatacgtacacattcaatttagcttgtgatcattcactctctcccagttatatatataatgcaattatttgaggataatacacaattaatctgctgcctcaaatagaacaaacttgtcatgaattggtattgaaaatgataatcggagagtaaaacagaagtctgctctagttaatgtttgggattcctcccatttcaatggaagttattagaactgtaaaaggaaaaatcaaattgctcatattggaaaccccttaatagaaatgacttttgaattactgcaagcagacgttcgttggcttagttttgactcttaaattattgcattgagttagaaattcagcccttaaattatcagcttgtttcctaatagcattacataaattatgtcgagaaattaaataaaaaaaaaaaagttaaacttaatgaagcatttggtcaatttcttcctcaacagacaagctg

SEQ ID NO: 48080 - DNA, 654 bp, Manihot esculenta
  Intron number 2 from transcript cassava4.1_023743m (locus cassava4.1_023743m.g) derived from phytozome v7.0 (chr-ID scaffold04002; pos 248169 to 248822)
ctttgattcttggcctagttgagaagcgtcaggtaaattatgcatgaaatgaagctgggggaacctacatgtgctggatttagtccatatttgatgtcttcatgtattttactagttgttggaaccaaactttacatttctaagtatctatcagtttgggatggtgtttttgccattattggtgggatttgatgggcaataaaaataaatacttgttttactagaagcacctcaaatgttgctgttgctaactttccaccttcattggaaaaaacattttgttcgataaattagtattacctgtttcatggcttttacacaccacaaaaataaaaagtaaaaaataaagataaaaaataaaaaataaaaaataaactttgaaagaaataatacttgtgaatgtcccaactgttgcttattatgatccaaggtgacccaccaatttagcctatactctattcttcttcttctactatctctttttaacaaaaaccaagttccacttaaactcttttgttatctttcttttcttgttctgtagttaacttttaagttttatttattttttcaatgatacttgtctatctctgttgattatctagaatcgctcatttagtgtcagatgcaatcctatctttcttgtctatattgcag

SEQ ID NO: 48081 - DNA, 928 bp, Manihot esculenta
  Intron number 1 from transcript cassava4.1_030033m (locus cassava4.1_030033m.g) derived from phytozome v7.0 (chr-ID scaffold08265; pos 881236 to 882163)
attttattgaggttagattgattcagttttaccctttgaattgcctgctcctttttctaatcaatttaagtacttatttatctcttatgtgatgaactttaaccagtttatgtttgtttctattagagaccaaatttgaatttgattcctgtaattatctagaattcaattgcaaatactggccttgaatgtcaatgaagcaaatgaagttgatatgaatgctcttgtgaactccgcagggcaattgcttgctttataagtatgtaattggccagaagaagaagaagaaataacaagggggatgagaatcttaatacatcgcttgtttttccaacgttttcatgagttatcattcagaccagcatgttctgttttgttggattacacatttttgcaattgaaattgtgcataaaatagattcgagcaatggagaggactatgatgcttttctaaataaatatggttgtagacaaaagggtgaaatttggatcactaagtacaaacttccaaaaattaatgaggttcattcattatctgcagtgatctgggatgccatgagaagatgggggaagtggaaaaaatagtgcataattaatgactaaatgtttatgtgaattagcctgaattagcaagtatttaaaagataatatggttttgatcatgtcatttacatctttcctcttcttgcattccactgcattcttttgttggtttcctcaaaaaccaactaatttctcaagttgtaagattctacccagttttggcttttatttcttctcattcttaccatcattcatggtccaatttgagttgatgtttgcctatgccattcggaaatcaattaagatttcattgaagtatgtggaggcattactttagaggtacacatttttaatgcagaaagttgattttggttctgggcaggtg

SEQ ID NO: 48082 - DNA, 775 bp, Manihot esculenta
  Intron number 4 from transcript cassava4.1_012478m (locus cassava4.1_012478m.g) derived from phytozome v7.0 (chr-ID scaffold10493; pos 1270772 to 1271546)
tagaaagaagccacctcctgttcccaaggtaaccacatatgttgtaggataatttcattttgcttcatgaggtttcttcaaggactattacttaagaaaagaacatgttgatcttgggaatttctcatattgaaaatgggattaattgtggttagaaattagaatgttgtagttgaaacgctgatagcttgcactagtacaataattgtattcaattttctggattaggtatggcctgttttttcaaggttttagctgtatcctgtatttgattttacatgtgatgtgatgtgatgtattgtatatggattaacagtgcatctatcactatatgaaatcattgaagatgaaaaatgatgttgtaaatgtaagtgaagatattatcaacccagtttctattttcttatcaatttattaattttgaaaaatgatgttccctatagacattattcttaaatgttggttaagaaaatgtgccacgatgctttctcttcgcatttaatttttccatccaattcattttttctccaccttcaaatgttctgctccttatatgctttacttgtcttgttactcatgaatcacatatcaacaactgaaggtattttattatcttcctaaagagcagaatactcataatcttatatgacctttgctttatcaatatgttaaacacattccatttaagaaaaataaagcttagttcagtccttaagttggtttttatttccatgttataggataggactccaggagaagcatttgtgccaaaatc

SEQ ID NO: 48083 - DNA, 724 bp, Manihot esculenta
  Intron number 2 from transcript cassava4.1_013383m (locus cassava4.1_013383m.g) derived from phytozome v7.0 (chr-ID scaffold07027; pos 449046 to 449769 reverse strand)
ataagttgtgctgttttggtgcttcctactctcgggtaaagatattaatttcctctctggtatggaattacggcgttaaaaattttgcgaataaggggataggaaagttagtgcagaattctgttcttttggggggtcaattgtgggattctagtggattgacgttagtttacctgcttggggattgaggtaatcatcatatcgagtgttgtcttttttttttttttttttttctttttttgtcgaagagtgttgcttttgatgggatgagtaacgctctgggattttatctggattcatagactttagttatttgatgtatttcagggctttggagtgttcaaccttattgtaagttttcctatgcttcaaatattagaactgccccctaattgcagggtgtaagtgctttcatgctgtcgtacaaaaacttgtcctaaaggttatttgtaatatataggtttacattattaaatcgtgctatgcaatttcttcgcaaaagcacaaaaagaagatatggcttctagcttcctcacctactttagttattgatccagaaacttatgtgcctcatttgcatggaaattggaactatgaggagctattttttctttgtgtatggacttggaactcattgctgtatgcctctgagctttcctcaaacataactgagattgttttccgtatagcttgtaggaggccgttcatcatcaagcgctggtaa

SEQ ID NO: 48084 - DNA, 553 bp, Manihot esculenta
  Intron number 2 from transcript cassava4.1_000754m (locus cassava4.1_000754m.g) derived from phytozome v7.0 (chr-ID scaffold10563; pos 515067 to 515619 reverse strand)
ttctttcctacagagagaggatcgaaataataaaggtgaagatatatatgattcagttgatcttcaaatggctgaaatacatgggctaagagaaaacaaatttgcattatgccatctttgcaatttcgtttagcaacataggaaactgtatccagatgataactatagatatgcccaacagttcttgtagctggagtggtaaaaacacttgcttgtttggaaatgaattattcttcttgttctggaaatggactaagctgaatgaatgctttatacttccagtaattgggaaaaattcttgagagttcctaaatttctactaatgcaataccaatgctagattttttattgtctttttcaagcagcttgcatctgatgtaaagcaagctaagatttgtttttcttcgtcttatatgtatcttaggctctcagtatcagaagataatgtagctttgccttttgactttctcttgcctgactaaaatggcattgatttctccttttgtcaattgaaacagacaaaaccggactggaagtggtacaaaataatcaa

SEQ ID NO: 48085 - DNA, 690 bp, Manihot esculenta
  Intron number 3 from transcript cassava4.1_030223m (locus cassava4.1_030223m.g) derived from phytozome v7.0 (chr-ID scaffold03241; pos 147837 to 148526)
cacagcttgtaggattatcaggttgcactaaagaggtatgcgtgcttcagtttttttgaatttattgtgttctcattctcaatagagggctgatgaccggaactcctcctttccaatgaaaattttatatattttcttctcaggattgtgagtggaacttcttctaagccccatgaaataaagcataattattttttttaattcttttaccatatttatttatttttccttttatttgtcaaaacttccatgggcttcctgtcattgcctttggtgttgggctcagcacgtttgataaagcatctgtaaggattttataaacgtttgataaagcacccgtaaggattttataactttattatatatttattgtacttaaacatgacatttaaaattttgtattggcagtattttggatcatttattttatgtatatgaagtggttgggacaatgtattagatgctcgatacagcatcagtttgttttgtttttttgtgtgcgtgagagagagagtaaggaactgttatatgggagtgaaacgtgtaagacaattttcttttagcttgaaacttggatgtcacggatatttaataatttgtatctcttgacttttggaaagacagttgcctctttttcatctccttgatgcaatatctactaattatctctgttttttttttccgctttag

SEQ ID NO: 48086 - DNA, 823 bp, Manihot esculenta
  Intron number 1 from transcript cassava4.1_027568m (locus cassava4.1_027568m.g) derived from phytozome v7.0 (chr-ID scaffold10292; pos 31293 to 32115 reverse strand)
taaagaaatagattatattatacaaagttcagtagaattaaaattcaaaagatcatgttcctttagacaaaccagttctacaatatatcaacctagccgacactcattagaatcatcttgtagaagacacaatatcgaaatccaaacagatactagtatttctggtgaatctacaataccatcttacaaagaaccttttgtaggcgaaccatcaggaacaaaacctttagaagaaacttttgatcaacaaactagacctcaacataccaaaggagtcaaaatacaagaaggtatctttcgacaaggacattttagccaaccttacgaagatagtgaatttactataaatactttaacaaatacttttatattagataaggaccaaattcaagctgactatatgtcagataaaaaccgggggaaaaggaatatatttaaaaacacctattctttaaaggaacaaacgcaaattaaaactcaattttttaaattctgtgaacaagtggaaaaaactataccatttttcacatatctaaaatattaccatgaagataatctaaatattttagaaaagaaagtacataaatggaccaaagtaaatgaaataggaggaccaagtgaccaatattatgaatctgaaaggccaccaatgaataaagctttctttaaaaaagatcatgaatataatgtaatacaaccaataatacatacaaataatatacaaaacaatgaattaaaagatgtatgtttacaaaacaattggacaaatgtaactcttcatttaataggaacccaattagatagaatagaagaaaaaatagac

SEQ ID NO: 48087 - DNA, 689 bp, Manihot esculenta
  Intron number 1 from transcript cassava4.1_000561m (locus cassava4.1_000561m.g) derived from phytozome v7.0 (chr-ID scaffold02264; pos 923653 to 924341 reverse strand)
cttgaagaagagaaattcaaggagtctgtgcataagtaagccatcttcgctctctaaacgtgtttcttttgtgcatgaatatgtttgtaagtaggtgctactttagcttcaattgagtggagggtttgtgcgtcgtcatgaaaaattttccgagatacaggcttctctgggtcgtagaatattctgggagtgaggagagttaagggaagagataagtaaagctcaagtattggttttggttatttccctgaatggaaaaaaaattgtattatcatgattaaaggattttttttaagacagttataacttataagcaacgaaatggcttgtatagttaaattggttttcttggctgtgcgaggatttttcccccctcgtgttgagtgaatatcatgtttatttatatgattccgaagataggatattaccgttacagtgagatagagcccaattaatacgtgttacaattcaagtatttgagaagtgtattaaaagaggttcttgtcggttattgaactaccaaaactctaaaattaagccagatgggtaaattgtattggttgagttgaggattgggtttgaattgatctgcatgatttgattaggaagtaaaaatattgggaagtcctctcctaaattatttgttttttctccttaggcttgagaaggaatcaggatttttcttcaac

SEQ ID NO: 48088 - DNA, 1018 bp, Manihot esculenta
  Intron number 1 from transcript cassava4.1_007671m (locus cassava4.1_007671m.g) derived from phytozome v7.0 (chr-ID scaffold04043; pos 1354601 to 1355618 reverse strand)
ttttctgttttcttccacctccttcactccaacaggttagcaaagcctttctttctctgtttctttttgtttttattccttgtctctttgttcaatctcttaaaatgtggaatctttgtttggcttttttatgatgtcaatgggtttggttcttttcacgacttgtttcgttttttcaaaatggcgattgttcagattttgatgatgatgaatttggaaatgttttcccttgaattgatgagcgaagagatgaggtttctaatctgtctaaaaacttaagctattcttgatttcgtctctttttggtgtatataataatggattttcgttggaagctcgaccttttgtctttgttttttttttttggttaccttgaatgcttttaaaatggtttgccgatgatgtcaaattagagtttgtttttggtttacagcactcaaacctgaatgcgtcaaggaaaaagacaatttggaaatttaagtacgttgatattttttgtttccttcctgaatgagataaagtaactcacttaaggatttgctagccgtttaaatggctgaagtcttgttgataggattgttactttttccttctgcgaatgatgattggaatggatttgtctgagaacttcaatttctcattctacatgaatgcttgtatcttatttttacatttaattgtattgttgaaatcttaattacaagtgtccaacatcaataaacagtaaagctaaaagcaaacagcacatccttaggtttagtaatattcatctgaagggagttcttcatcattggcagttgatgtaatggtactccaggaagaaattatttataatataatctcttggccattctatctgttaaacggctgtgatattcaacttctgagttctttgacctatttgctatttgaagatgtatttatcactacataataatttttttgtttaatttcgcattactcagactcattattttttctgatacaagttgctggttgtctgtctgttcagaggcct

SEQ ID NO: 48089 - DNA, 721 bp, Manihot esculenta
  Intron number 3 from transcript cassava4.1_030879m (locus cassava4.1_030879m.g) derived from phytozome v7.0 (chr-ID scaffold08265; pos 495038 to 495758)
cctgatcagccaaccagaaaaaatttctcaggtatgttttattagatgcacaacatttaagcattttttttcatgccaaaatataatacatatctggacctactccatcctccatcgtgtccaagtcacatgtaagtgggtcccacaacaaaaaaaaatttacgtgggatccacttttatatgtcttgaactaatgaatcgagtccacctaagaatttgagttatgtaaacatggtgaatcattgtttttattgaatctatgtgtgatgaccaaaagccacgtagacatgaaggactccaagttcagcttaacccatgttgcaaaatcaatgtagctgacctaaaaatataaccagttttgttggcttagatattttgtaaactagagggaaaagaaaatatgatggagacatgggaattctttttcatgcttgctgttgacctgttgtccttttcattgataaattgatgattttggacttgaggatttaattaaaagttaaaaccatggtgttgatttctttatctacttgcagaaagacaggctagttctgcaattgaaggcctgaacctatcaaactttgagcatgctatggcttcagaaacagaaactaaagaatttaggtacgagttatagttgttattttttcaaaaattagggtcacgttcctttgcagtaggaacattaattgtgattgggttgcaggattttcgtaggaac

SEQ ID NO: 48090 - DNA, 712 bp, Manihot esculenta
  Intron number 2 from transcript cassava4.1_019769m (locus cassava4.1_019769m.g) derived from phytozome v7.0 (chr-ID scaffold02892; pos 21618 to 22329 reverse strand)
gaccaacttcggcgacacttttggtaagacctttttctctgcaccagattatcttcctaatgttgctttgggccaagtggcctatctcctgcattgcttttaaaagaaatgctttctgttgcctgttccttttgagttgttcaggtgttcaatgcaaatgatatttatgtatacaagtctgtagcatggataaatatgcaaacatcactctagtaacttctgattgctattgtactgcacactgaacgttgtagttgtacaactactgacatgcagataacttatagaagctaactataaagccagaagataaccatacaagtacttgtatgccttggtaaaaaaacctaattgcaatcaaacaacatcttgtttgctgatttttttatttaattttaatggtctattttccatttacaatcaaatgtcacagctagccagcaaattgaattttaatgcctctggtgcgcatgctgtgtgttgaagctggaaattaacaaggcactaaggttatgtctgggttgtttggttgatctaattttgaagtattcttggcggttatgcttgtgatatgttttggggttgaaattcttttcagttctttgggtctattttctcatgtttttagttgatataagccatctgtatcttctaatagtctattcttattttcgcagatacatattcctacaatcagctttgtcagcttgca

SEQ ID NO: 48091 - DNA, 503 bp, Manihot esculenta
  Intron number 2 from transcript cassava4.1_001551m (locus cassava4.1_001551m.g) derived from phytozome v7.0 (chr-ID scaffold03787; pos 96491 to 96993)
tgccatctacaggtatgcatctagaatcgaactcctgaagttattgcttaggttcatctttatgagtttaattttttatgatattcaatttttagctaatttaatgcaaaataatatggttatatattttggttttctggttaaatttcatagtcaatttttgtcatttatgctttctcttgtgagtttttgtttgtttaagtggaaaattacaatgaattttctgttaaaaattttgtatttcttcttttggatgtaacttgatatttgaaaagtggcctaaaaatttcaaatagttgtccacctataaattttggtgctttttttttgcttcttttctgacatgcatttggatatgaatgtttcttactgtttagtcaaggcttcaaaatttggtttctttggtctgctattctgttgcttgtcttttgtattgtatttaaaatggaagttctttgtttgcagagttctgatttttatatgtgcttttattttcagataca

SEQ ID NO: 48092 - DNA, 671 bp, Manihot esculenta
  Intron number 1 from transcript cassava4.1_012446m (locus cassava4.1_012431m.g) derived from phytozome v7.0 (chr-ID scaffold03150; pos 305028 to 305698 reverse strand)
cgccgtgggtattgaagcatttggttgagaggaaggtatatttgagtaatttactgtagtgtttgaagtttgtagatttgtggaatgtacttgtatatgtgtgaatgattataactgcagatgctgttttgttttcgtatttatgttttcaattagttttgtgtttatttcaattcttgttatagcagaggagtatgaattggtttaactacagtctacagtgtgttaggatcacttggtgtttggttggatttttttttttgtttgttgctcttccgcatgggcttgcattaggtatatctttctgccccatttgttgaaacttcctaattttcatagttataaacgtcatctacacttgcgtctctcttgctaatcaattcatgcaaaataacaataattgtttaatctaatgagtgtcagatgttgtatgtcagcaatctatcctttttggttggtatggtttgttttctgtgggaagaagtctagacctgtgcttatgttttgtataccttctgtggttctttcaatagctgtcttgtactgtcagtttattagtggtgttcattatgaaacaataagtggtgaagacatgcttgtaccttttaacaaaatatgataggctttctgatacaggtttatatagtgattcttcctagtgttattgttat

SEQ ID NO: 48093 - DNA, 723 bp, Manihot esculenta
  Intron number 1 from transcript cassava4.1_011720m (locus cassava4.1_011720m.g) derived from phytozome v7.0 (chr-ID scaffold04043; pos 1344489 to 1345211 reverse strand)
gaaagtgcggggtctgtgtccggaatttttttttcaaaattttttctcccttttcaagttcagaaacttacctattcttgcagctgtttgggttaatttgtttacggtttgaatgacttagatgttggagaaatgctcgtcggaccaagattgcgacgccggactctattgtttctactgcgtggaagggtttttaagctataaatgtgtgaggtcgtccgctacagaccaattcaagcttctggtactctcaaatgtgtttcttcctctctcttatgccctctttacttatttatttaatatcctgaaaagaaatggtgcacatcatccgccacaaaatattgcttttggaatttggcaatttctaggaagttcacaagagtggttgtgggctccttagtttagcggctgccatagccgataagacacaagagctttggtctggcccatttcatcatagatggagaaaaagtcatcatgtgggcttttgttagcctgcaattctgggtgggaaattctaaaatataacccttatacatagaacgattttatatttattttattttatccgttgataatgatgcaatcctcaaattataaataatgaattttatatatttatgataaaagataatatctatatcaaaagcacttgataatttgttcatggaagactgcaatatactcgattaactaatgctactctcactctttgtcaacaga

SEQ ID NO: 48094 - DNA, 1019 bp, Manihot esculenta
  Intron number 2 from transcript cassava4.1_004161m (locus cassava4.1_004161m.g) derived from phytozome v7.0 (chr-ID scaffold03264; pos 474775 to 475793)
ccattggttacgatctctcaccaggagtaaatacctctttttatttttcctttttttgttattaatttaattgattagttttgtttctgctataattctttaggttttttttttttttttgtccaaagctatcattcttagtttattagattgaaacttgcactctgtgctccaccaactgtaataaattgtgctgtctgatagtatatttgtcccttttttttggagcaaataaggtttctagtcatactaagaaaagaatacactgaacatttggaattcatgcctgctggggaactaaagggcacgcgtttatgtttgtagaactcactcaggctacagcgttggattttgaaaccagccacctagtacaaagaattcttctcgagtaggagtagccaaatctttaaatacgaccatacaacttttcggcatcgaacctgaaaattcagaacctcttaccgccaatatgtgcatactgatatatgttgatgttcgttcagatgctcactatatatatatttatttgcttctagtttgtgcaaaaaaggaacagactatacatgttaacttggattccactctcaagttggcaaatgaagttaaatactttaatttcctttttttactaagtaaattcatatgcatagtctgttttttgtctaccagaaaacaatatttatactgctggcatcttactgcatctttactatttgatttttgatttagttacctcttttccgttgagaggtaacttctgcatatctcctcctcatataagtttaaaacaatctcaataactctagacatgttaaaacaatataatcagcttgcctttcaataactgctgtgtaatgataaacttgctcttttctcctacatagcttagagagatctggctgtaataaaaaaatttgttaatatgtgtggtactgctcttatattatgtccccaccatatgaaacctcaacgtcttacgcatgcatgtaatgtgtttgcagtgttcatttgcacgatac

SEQ ID NO: 48095 - DNA, 268 bp, Manihot esculenta
  Intron number 1 from transcript cassava4.1_033992m (locus cassava4.1_033992m.g) derived from phytozome v7.0 (chr-ID scaffold05378; pos 3060 to 3327)
atccttatttccatccttcctctcttatcctgcaggtagcttctcttctttgttctttgatttttcctgtttctttttccaccagctagaactcttttttttgttgttattgctgttatgttggctttgtgggatctgggatgttttctttgaagttttttgtgaattggttaatggggttatattcttttctgtttttgatttgtgtggtttgtgatttctacttaatacagagggagcaagtgcaagttgatattgaagatcgagg

SEQ ID NO: 48096 - DNA, 787 bp, Manihot esculenta
  Intron number 2 from transcript cassava4.1_003493m (locus cassava4.1_003493m.g) derived from phytozome v7.0 (chr-ID scaffold02943; pos 771405 to 772191)
agacgaaagaacaggtatgtgagttcaaaaattgtgtctcaacaaagggtgccttttatttatttatttatttttatgactgaaattatctagcttatgaattttcttcaaaggtgtgctttcagtctcagttgatagtgaattttgctatatatttggattccacttttcatgtcattgatctggaagctcatctttaatttaatgcaatcaaagcatagcttgaatcactaatacaatgggaaaaagaagaggaaagacctataaaaccagtatcatttcttttgtttcttaacctcgaagcagttggttaattttcccggttgtcatcccatcatttcaccccagacctggagtagtgttctttttctctttttagttttctaatctttataaacatatagcctaatattgatgttagaacatgaattttcttattctcattcttgttttttgaattcctgtcaaagtttttctttgtgttgtatattggagggacgataactgttactgacacttgcagagctcccacttgaacttattgttcaagcagtttgatgatagttgtcttgtcattatcaaaggttaaaagatagtaatcttgctttcaaatctatagcaataagcttctatgattgacacttgtcatctggttcattttatatctctgcaagttccttccttggtagaatcatgaacatgctgtgagataaatttacatggttgatcaggtggaactcatgtggatgcagcttaaacgggcaaaggggaaaacagatactctgga

SEQ ID NO: 48097 - DNA, 526 bp, Manihot esculenta
  Intron number 1 from transcript cassava4.1_021122m (locus cassava4.1_021122m.g) derived from phytozome v7.0 (chr-ID scaffold04083; pos 270601 to 271126 reverse strand)
caattcttttgaaggtatggctttgatgggattttacttcttatggtttggctgattgtttggttttgaaagagtggacgttgaaaggcaatggcttttgcttccgacattataacgaatgttattcatcaaaatcgatgttgatttattattgtgtgatcaatactattatcatattattccgtgtatcaacttttacaatgaagggttgaattattttcttctatgtggtgttcctataaaaatttcgagaattctttatgtgctggttttcttgctacatagtttgcagtttagggaatggaaacttggagacggtaatcccttgaatccataaccttcttttcatgtttgatgttgctgggttgaaatttatgagttctggagaacctccgttttgttctgattgcactagtttaattaggggttactgccttcacttcaggctttagtactatttcagcttttatttctgtgtttttctgggtaactatttgacctcaagttttgtgctttcagctcaggt

SEQ ID NO: 48098 - DNA, 867 bp, Manihot esculenta
  Intron number 1 from transcript cassava4.1_017554m (locus cassava4.1_017554m.g) derived from phytozome v7.0 (chr-ID scaffold03802; pos 335570 to 336436 reverse strand)
cgtctccagctgctacctcagggccctcttctacagtgagtactttctctgcgctattcttacatttccgtttaacctctcgttattgcatttgacgttcacttgatcaatgggaagctatatccttatgtgtgattttgtacgcacaaatcgaaggcttgcagttgattttactaaagcttctgttagctcaaaacctgtgcaatattataactcatccagcaaataataccctctaggtttatctcactgttttgcttgaggatctaccctggatgatgtacatttcatgtccttgtgggatttcgtgttatctctttgtgaatatattgagtctgtttctattttatgttattatctttatgtgagttaatgtacatatcgtttgcttagattggtctttctgttcctcttcggtttctataaagccaatttgcagagcaagagcgtcgaaaatggcgaaatttgcattgaaggttggcaatatcaataaaaatagcaattctccgtgcctatcaaatttctcattttcattttgattatggcctcgaacaaattgctaaatttttatttatttatttaatctctactttccatcttggaagtgggaaaaatgtatactccactttgtgttgtgattatttccgatttattttatccgtgtatttggaattgttagttgataatgtatagatcagaatgaataaaatatttactgtggattttgactttttttgttctagtttacgttcaagtgtaagtatcagttctgaatatgtgttgtgatgttaataaaaaatgtggatgcatttttgtgtttcttttcttgatcttaccaagccaatttgcagagcaagggcgttgaaa

SEQ ID NO: 48099 - DNA, 443 bp, Manihot esculenta
  Intron number 4 from transcript cassava4.1_011979m (locus cassava4.1_011979m.g) derived from phytozome v7.0 (chr-ID scaffold04065; pos 307476 to 307918)
ttcaaggcctgtcgtttctatctgctgtttgtaaatttgactctttattttcttgtatcaaatgcactgctttgtgatgggtgaactttgtgaaacatgctcaacatgacccaaaagctagacatatggggtattggggtttaatttcttgtcatctccctgttgctactactaaaccatgttgtgtgttttttttctttaggtaaattgtttctcattgttggttttggaactttttcgtaaaaatgtctttttttttatgcccctcttagtcctttactttgcaaggggggtaccataagatttctctggaatttgaactgcaactagtcaatttgcttaataattaactagcataaccatttggtttcttccaattatgtgactaagttccacgtgtcatttcagtgcggcaatcatattctgaagcagtgaagagagcc

SEQ ID NO: 48100 - DNA, 959 bp, Manihot esculenta
  Intron number 1 from transcript cassava4.1_002703m (locus cassava4.1_002703m.g) derived from phytozome v7.0 (chr-ID scaffold11960; pos 59400 to 60358 reverse strand)
acagcttcgattcttcttctattttctgtctataggtacgtagctctactgagaacttcacgtttgcaatcttttgtttgttcgattcagactgttgctctatctgcttttcttttatttaatccttgaattttatgtctaatttgtagttcttgaacttgaactcagttttaagaagttgaaatgagaagtgaagcttttttgtttttgtgtcagttttatggtctgttcatctgttgtatcggtcattacgtggtaaaaatttctgcaagtaatttagaacatgaaattggatgtgaagatgagaatcgatggacctgaagattgctttcataacaattgaatccaactattggtttgattatagtagatttacattgggcaaaaaaattagattatgtatttcattgatggttttagatggtttttggtatcgcccgattgacgtgccattttgaaaatgacaagtaaccatattatggaactttataattgaaatcacaactaggttttttctcttgaaaggaattatatttaggtttgatgtacaaactcatgcagttacttcttctatgttacttgaaagccacacaataatagatggacaaaaagagggggaaaaaagaagagaaagtctgtgtagtgtagactgtatgtgatacttgtacactactaactagttactttgaaagtgacatgacatcttgtcagtctcaaccatgcactgcgatgcaacactatttttattcttctagtggcattcttgttaccatttagtaaacgggttgttcctgtataaaaattatgtaataattgcattttttgcatagaatgcccctacaaaaaacttaaaagccatggcagctcgctttttgtgcgttgcattatcaaaatactgctctctacatttttcctttcaaattctcattggcgtgccgtgtgcgttttgcttctaccag

SEQ ID NO: 48101 - DNA, 900 bp, Manihot esculenta
  Intron number 2 from transcript cassava4.1_006789m (locus cassava4.1_005739m.g) derived from phytozome v7.0 (chr-ID scaffold10493; pos 981554 to 982453 reverse strand)
aagaggttgccattaagcttgtaagtgctttttcctttatctcctttccctgatttctgttcggatctcgtgaatttgttcaattttacttgggtgttttactttgtttttttgggtgttcctctggaactttgcttgatttctgcggtctcctcttcttacttagtcatgtaaataacatgggttcatccaaagctgttatttgggtaagttgctatgcagcaaattatgcgaaggaaacgttacaatggactactttgagtggcaacctttaagttaatagtgtttagtagacaatcatgtgttcaaccgtttaaaatttaatgcccagaagtaactggtgaaacctgaatttttttgcattgccaataattactggccattgtgactgagcccacttgctatcaccccaataccccattagcgttagaagaaaattttatccttctgcttttcattctgaatagaaactgaatttgagatggaatcatagaaaacatcttatggatttagtacataagaactgaattttttgtcggcaccattaattcttttcctctcttttgcttacaaggacactaaaggaaccattgaaattgagtcaaacatttgttcttcacttccactcaattttatgtgctattaatcattgcatattacttttaccgtgaagtaaaaaacatttattctttgcacccatttatctttatttgcaaataattcatgtgtattacttttatgtgttgaacagtttgactatcttaaactttatggttccctgctgattatttctttctaaatgttttcgccataaccagttcatgctctgataaaatgctgaaattgatttctaattctcaggaaggtgtcaagacaaagcatcctcaattgttatacgag

SEQ ID NO: 48102 - DNA, 1038 bp, Manihot esculenta
  Intron number 1 from transcript cassava4.1_002100m (locus cassava4.1_002100m.g) derived from phytozome v7.0 (chr-ID scaffold03283; pos 203466 to 204503)
agatttgggttgagagataatcctggttttggttagttctcttcaccccttattttttccttctcccctcctcctcccagtggatttctctttgatcccagtttatttcttaatgggtttttttaatattaaaaaatgaaatcaaagttttactagcgatatgattgagtgttaagacttaaagactcaaagatggaacacactgttcgaggactaattgtgtagcagtgtgttcggccgtcgatggagaattaactttgttagcagatgaagattaatttttcatgtttaattaactacatatttcaacaactggaactcgaaagagccagtttctgtgttctttgatgaatgaagacacaataatattttctaaagggcttaagaattgctgcattctttctctttcagtcagaagtatgtagaaatggaaaccagagtatttagtcaagcaaataaatgaataaggaacaatagtcagaggtcacagaccgcagtgccaagaattcacctcttacgcttgacactttaagggtttgcatgtaggacgcttgttgactccgtttcgtcttctctaattttttttagcaatttttgcaaagtgtagtttatttttaccgttttagtttaaactaccctgaaatttctagtgttagagttgatgaaatttcaagatacaattaaggggaatgttatagaaagttgaatttatttaatatagaatttgtttttctaaatagatagaataattatgtctgtgattataggatttgatatattcctattatagttagagaatcttttatttatggtatcatatcatatatgtcttggatcttctattataaatagagaatcttttgtatcagcgagataaccaaagctgtaagagccacaattcatttttaatatgactcttcattctttcggtcctccatgatgatccccaccccctttctttgtgttccggtaagtttcatagaaattggatattttccctgatccttgcttgtttgtcccttgactgcagtgccactt

SEQ ID NO: 48103 - DNA, 435 bp, Manihot esculenta
  Intron number 1 from transcript cassava4.1_000512m (locus cassava4.1_000512m.g) derived from phytozome v7.0 (chr-ID scaffold07301; pos 115895 to 116329)
gttggggtttccgctgcaattctcagcccctacaggtacacctggaaattacattttctcttcaattgaacttgaatagctgtggctgcaacctgataaatttgcttttgattatatgttcgtattaattaaaataactattctaattcttggtttcttagttatcttggttcttttttacatcacttattcgctcagccctcgaaactccctttctgaaaaagttagttatctcacttgtcgctccagaagatgagcttcttggatttctaacttatagtcctttgggtatgcaatgtgattaatgaatttctatgcctaaatagcaaatatatcttgttctagagaatgaacttttgcattagtacctaaatgcgagaatgttcttgttgctatgcagactactaattgcaatacgtctggctgcccttggca

SEQ ID NO: 48104 - DNA, 632 bp, Manihot esculenta
  Intron number 2 from transcript cassava4.1_019194m (locus cassava4.1_019194m.g) derived from phytozome v7.0 (chr-ID scaffold03802; pos 502989 to 503620 reverse strand)
aaattaagatcgccaaggtacttctctctctctgtcctgcgtggccacaaaattgatggatactttaatactgcccaatttgattggtacatggatggaattcatttggttaatgaacggtcagaaacttgaaaaaagtatcgctagctatgattaattttgattatgaacagtgagttcttagtaaaaagatggtgttggattagtttgagcagcataaagggttaggcaactgttaggtcgatgaataagccgttctggagagttgtttgagctcattttgaattgttagcaggtattgtggttgagttgtttacttgaaaataaacttggagaaactatcttcattgaactaccagggcaaatttaaaatatgctagttaatggcaaattaaatggcaaaacatatatagaagtagattatctggaggatggctccattggactgatttattttgtacaagtaaatttacgttggctaatttcttatattttggcagtttactaatctttttctgtttccccttttcttcaattgcttggaaaagttattcttgagtttactgagattgatagttggtttagttgtttttactacaccagtttagtgtctctttttcttcaggaaacaa

SEQ ID NO: 48105 - DNA, 400 bp, Manihot esculenta
  Intron number 3 from transcript cassava4.1_030730m (locus cassava4.1_030730m.g) derived from phytozome v7.0 (chr-ID scaffold03802; pos 637972 to 638371)
gctacatttcacccaacgaggttgattcattttctttcttctttgttttttcattataattgaatctctaagagttttatataccattcgatctaatttttagagtaaattaaatatacctcaaatttaacatggtatcaaaatttaattcggattgtgaatttcacctgatcgtaaaattgcacaattagaaagtttatattaagttattttaaaaaagtaaaaatgattgtaaaatgctaacaatatggtttcacttgaggggtagtattgagatgaaaaattaattattaatatcttgacacactctttaaattaatatttactttattttaatttcttttaatgtctgaaatgcttaattcatttgggcataattgataatgcatgcagttgaggc

SEQ ID NO: 48106 - DNA, 711 bp, Manihot esculenta
  Intron number 2 from transcript cassava4.1_015334m (locus cassava4.1_015334m.g) derived from phytozome v7.0 (chr-ID scaffold08245; pos 55568 to 56278 reverse strand)
atatttgcgagaaggagcttgaaaatgtatggtgagattacatagccactcatctcctgcacttcactgtgtgaaatgtttgagttaagagtttccatgattagcttcaaacggttcaaagctttatgttctttttattgctattacttagtgcttctcattttaaaaatatatataaagtttagttccttaatcaagggtcttcatcgtatgctatcaatttataaagctacttagctacaaatgtcaattgcaacagtttcttacttgctttatccattaatgtctactttaagttacaaaattggattcatgaaaggaaacttgcttcatagctcaattttatgagaatgagagtagcttagcacaagctttatgtctttcttttcagatttacttccgtttgtcccaccccttttctaatctagagcctgcttttcgattaatttcattttgtaaacaatttacattagtatattggtgctttcagaactatcataatcagtttttacttgttttgcaacatacttttttcctactttacaatggactaatttggatacatggggtcattatcttgcaaatgtggtattctcaacgtgattagtctattggacttctaccttcagttctggttaacataagctactgacctagaaggctgctgttcggtactaagcatggaagtaattttcttttgtgaaggtaccg

SEQ ID NO: 48107 - DNA, 913 bp, Manihot esculenta
  Intron number 1 from transcript cassava4.1_027096m (locus cassava4.1_027096m.g) derived from phytozome v7.0 (chr-ID scaffold10563; pos 1437873 to 1438785)
ctggtttcgcttttgaagcatatacaagtccccctgtaattcattctcctgcctctatactgtgtctcgctttatgtttgagaaatgttaacacacaaaaaaaatgttgagcttttcatttttctcccccctctctccttcttgtttttttttccttctttttcttttggggatgaatttaagatgatgggattagtagcgttttcaaattagcaaaaatttgattgttgttgttttggggatttgttttgttcaggaaaagttcggcaggcgtgaggttgatgctgcaggttgtaagactgtgtacctctcagagtatgtagacaatttgattttaacacataaggcttagaaattagtcgttctctttgatgttctagagtagatgcatcgaccttttccttttactatctattgttagtttgctactgttctacgactaactatatgttcaatgcagcaactgatgcgtggacgtacaggtttatatgcttggaagcaaataataatgtcaaacagggaattaagttacacttttggtaaccatttaataatgtcttctatatgtttgcaggacatttgtacgtgagatatatgacggccagttgttcataaaactgaaaaggggtttcgatttacctgcaatggatccatgggtgcgtgattcaattacccctttctgcatttaggactaggagttcttatttgtgtgcacacagtacatgcatgtgcgcacatacactctctctcctaatgctttggagattttgattggctcagaatccaagcacctttttctctcaatggccattatttcaaactttgcttgaatatttaaattcagccattctgctccaattttttgtcttgtttattcaacttctgatgttcttccagggaacaagtgatccat

SEQ ID NO: 48108 - DNA, 606 bp, Manihot esculenta
  Intron number 1 from transcript cassava4.1_007268m (locus cassava4.1_007268m.g) derived from phytozome v7.0 (chr-ID scaffold03098; pos 81221 to 81826 reverse strand)
gccatttcaggttaattatctgatgtttgatgatttactttctgaattgacctgcgtaacttttttttttccatagattctgatccgcggagttcagatttgatttcattattctgcgagcatgtttggcttgtttgtgcgtctccttttgtttttggtgtgtttttccctgttttgtttctagaatgttcttcttttaaagcaggtttttgtggataaagtataataatgcctgctaattatttttgagtcgtgcaatgaatttgttttattttttaacttggtaatgagattattgatacctgattttctagatctcttaaatgttttacatgtaatggtctgctgttttagctctggatttgtcgggtttctcatatttagcaactgaagattatgcttcattaaaggattggagtactacagcatttcaaatccaaaattattagtgaatgacctcgccaggacagctaattcatgattatgcttaatgaagggtggaaattgttattagaactgtttttaatttttttatgctacattgcttatgcgctcaagaatgtggaatcaggatctggaaagttcataacttggggttcgacggat

SEQ ID NO: 48109 - DNA, 441 bp, Manihot esculenta
  Intron number 4 from transcript cassava4.1_032233m (locus cassava4.1_032233m.g) derived from phytozome v7.0 (chr-ID scaffold04934; pos 245 to 685 reverse strand)
ggtaatgcaatgacgccttcaattgtttgttatcaaatgttttcagtcctttcttccttttaaaaattctgtgaagtcatttgttaatgaatggttaaagtggcattggttctgttaaatgcattttctgtttgaggaatcaaaccatccttactgttaggatttcttttcatggtgtttttttttaaaagaaaattcttaaacaatttttgttgtcttttttttatcatgttttaagctgaatttcgcttttgatctttttgaccttttattttacattaagaaaagatgaatagtaatcatttagttgatggggacatccgttttaattggaaaaattgtcaatgcaagtcattatttatctgaagtattaaattgcttgtgttttggaaaaccataaatgcagagtcggcccatatttaataagagcacggtttcagg

SEQ ID NO: 48110 - DNA, 985 bp, Manihot esculenta
  Intron number 1 from transcript cassava4.1_002661m (locus cassava4.1_002661m.g) derived from phytozome v7.0 (chr-ID scaffold08265; pos 1365630 to 1366614 reverse strand)
ctcgtgccgcaggtgattctaaatctctgtttttgttgactactgtttttttaacttcagtttttaggctccatggaaaatgaatgaaaagaaaggagaatttttcaagttttatcagttacagtttttgattttggttcttgaaggataaatgattcaacaggagcacatgcatgcgcgtacatgtagcttgaactagttttggtttcgaatttccttttggtcttatctgcatgaagctctattttctgcttgtttagtgagaaagtaaagtttattgaagtaatgtatctgactttgattttccaagttctcatggatgatcaattcaaactacttcaaaaatagtgtttattctctctctctctctctccaaattttcttacagtttcttggtgataaaagcacggttctgctatgtggattgcactttttctacgcatgttctacttctctgtttaatttgccatggttgcatcaagcactcaactgtaattgattagatacggatcgtttttccaattctcatcagtatcaaatcggattctgctctgaagcaatggatcgtggatttttcgagctttaactttttggtgatttcaatagtttttttcccaaataagagctgtttcactgtttgacttttggtcccttattggttgggatttgcaaaagtttgtgccaatcagatattagggaccatattttttaagttaggtcgtgtttggttgctagaaatggcatgttggcccagggtgatatcaaattctgtgcaaccgaacacagcttctgatgttttattagtgttggaatatcttgaactggctattatcatcttgttattgtcgttactgttattatcaatcaattaatcaatgggattttgtggctatagaagtgtaaattggttgatttatttatttatgtttcctggaaagtgttgatagtttgattggttgttaatgttctggtatttgaacaggca

SEQ ID NO: 48111 - DNA, 723 bp, Manihot esculenta
  Intron number 1 from transcript cassava4.1_014866m (locus cassava4.1_014866m.g) derived from phytozome v7.0 (chr-ID scaffold04651; pos 175058 to 175780 reverse strand)
caaaacccaacaaacatattgcacttatcagaaaggtgagtaaaagtcagttaagcagcaattgcatttattgcaactcatctagggaactgtgtgtgtcatgtgctgcagtaagctagcgtcacattatgtgctctgttatctaccacttaccttttgtcctatcccattaaacactcatcaattggataaacttttgtagtggtttcactgattaagaagggactcggtcacttagagaatttgcaagaccacttatctaggctgcaggattccattttttagcctcttttaagctttgactttaatttgtttttttttctttttatttctcgatatcctttctggagtaacttaaagaaacattgtttccccaaaacaacacttcctctgtttccactggctgtcactgtgtccattcattcccttatgtttttgcctctgtagttgtcatggacaaattttttctaagaatatgtatattctctaataggatttttcccctcggagcagattttgaagaacatgcgtggggctggaattgaacctgatgttgtcacatatacaacagctatcaaggtctgagcaaccttttgtttacatgggatcataatcttaactgcatttttggggttttcttaatttgattttccccagatgagatatttcatgttcttttgcttcacaggtttgtgtggaaagtaaaaatttgaagctggcatt

SEQ ID NO: 48112 - DNA, 307 bp, Manihot esculenta
  Intron number 1 from transcript cassava4.1_033306m (locus cassava4.1_033306m.g) derived from phytozome v7.0 (chr-ID scaffold02618; pos 177173 to 177479 reverse strand)
ttttgcctctctaaactctgttcttcttggctgtactatttctataaccaaatttttggtttctatattactttgctccatttatttatttattgcttgttcgtttgtttttgcggtgacccattagctgttatgcttagtagttgctactctgtttcctgtttctcggaaaatctgtagaatttatgaatatatctaattcttcaattatttttaagcacagtttttaagtcctcttggaataaattcctacagcaattactttattcttgttttgaacttataaaatgaaataataaaactgcag

SEQ ID NO: 48113 - DNA, 796 bp, Manihot esculenta
  Intron number 1 from transcript cassava4.1_014807m (locus cassava4.1_014807m.g) derived from phytozome v7.0 (chr-ID scaffold04043; pos 652903 to 653698 reverse strand)
cttcttgcttctgcctccctcaacttccgctcaaggtatttttttttgggtgcttttctcattcttttgtattctaattgtgtcttccctttatctacgcgattgagttactattattttctagaggatatgttttctgtgctgtagtattgcaacgattgaaggtgatattttgtttcttcacttcacctccgaatccctttttctaatatgaaagaccagatatttttggacgaatttcttttggattggagttggtaattgaatttccttgaaaataaataagttggcctgcaaatttaatatggctgttttcccccatttgttggattgatattttggggttaccattttaaatatcttgcccatgttttagaattgttaatcagtagtatccatgtttttatatatcagctgcctgaaatatgcatttgacaagaaactcaattaagttttgtgtccttttcaccaactttacatcagtgtctggtgggttcactgatgtaacgcatgcattttcgtatatatttatattctgtttctttcggtattcgattatgattcatcattgatcatatgtatctcatttacgtggtagatgggaaacagatttatagaattttcatgtcttcacctctaaagcagctctgctgctttgaatttgccttttggtttggattaccaatagagtggaccaaaaagggaattaagtttgcattcatgagcttgagttcttaaggtttaaatttcatttcttatagatttgctatccagagcggaatataagatctcagca

SEQ ID NO: 48114 - DNA, 987 bp, Manihot esculenta
  Intron number 1 from transcript cassava4.1_026766m (locus cassava4.1_026766m.g) derived from phytozome v7.0 (chr-ID scaffold11759; pos 53938 to 54924)
ataggaggtcgactagtggttgctgcacacttgtaggaggaaatcttgtcacttggagaaacaaaaagcaaagtgatgttactcgatcaagtgccagggtggagtataaagcgatgatacaaggtgtctgtgaactcttatagttgcagagattattggaggaattgaaactattggagagagacaaactcctcttatactgtgacaacaaaactgccatcaatatagcccacaatctggttcaatatgactgaataaaacacgtagagattgatcgacactttattaaagagaagttaataaatgatattttgatattaaatcatgtgacttttaatgaacagatagctgatgtgtttaccaaaagactcaacaacaaaatctatcacatcttaatttgcaagttggtcatgtgtgatatctatgcaccaatttgaaaggtagtgttgaccagcacaacaggtttcctaattaggaggattcagatctttggaattctaattagacttgattataggaattttattcttattataaatatttctaatttaagttacttctttgtgtataaatactcaaaccttgtaaaaatcaattcaattagaatagaataaaaaattcctcccaaaatttttcagttcctcccaaaattcttcatttatttatacccttatcccaagcagcaatcatttccaagtgattgtcatccatgattcccgctaattgtattatccccttttgtctgcattctcagctgtcccgattctccctttttcctggactgatctcctatgtctctcttccttcgcctatagtagaccctcaaaggttttggattgctaacaacataacttttaagaatgaacatttaatctctaggatctgctataattttgtagtatctcacatccctttttctaatgaatggtttttccactctttgatattgcagggattttgagaacaatagactgacaaacatttccg

SEQ ID NO: 48115 - DNA, 510 bp, Manihot esculenta
  Intron number 3 from transcript cassava4.1_024900m (locus cassava4.1_024900m.g) derived from phytozome v7.0 (chr-ID scaffold08542; pos 701720 to 702229 reverse strand)
cgcttagtgatccgcggttaagggcaatatacattgtaaagtttcttctttctaaccttatgtgtacctgttgggtgttatgtgcatatgtgttattgggtacttcttgactcaaatattctcctttacactgaacttattggcctgagtgctttttctttcattttatttctgggtttttgaacacaaaactcatgttacctaatgttgcagtgatgggaaatccgcactgaacttattagctaatgttgcatttgctttattgaatatctggcctgttggaccttggttgttttgatatttgatgtggcttggcagttagttcactctctttcatagactctgtcgtactgtggatttcttggtgaacttaattgatatgcaattcaatgagggccgcttgtcttcccttttttttttaattttcctctcgagcatattagtggttgttttttaggatcttataagatcaattctcgtgtcttttacagttaaagcttcaaggagtaa

SEQ ID NO: 48116 - DNA, 677 bp, Manihot esculenta
  Intron number 1 from transcript cassava4.1_003575m (locus cassava4.1_003575m.g) derived from phytozome v7.0 (chr-ID scaffold03060; pos 99215 to 99891 reverse strand)
agcaggttgccgtcaaagtcatccccaaaacgaaggtatgctttatgttttgactttgttggagaattgacctcaaatctcttgggttccttagtcaaccacgagtgatcttgtcactcattcttggttcattcagattttgacattttgtggtttgatccgttcttatatttctttggtgtactttgtcttaatgcacattcacgtgggaccagttttggagtatgaggcttttgatgagagtccatgtgaaattggaggtttatgtacatatgctcatcgattgattggttttacgtcaaataagttcagtctcgcttggaaggttaccatttgatactgattggaaaagaagaagggggaatattctgtttggggtttgatctggtttctgttttaatttcaaactttatggaatttggagttttctaaatagaagttaaacaggtgcatggaatgacttgatcgataggtggctggaatttttttttaatattcattttgcatttcttaatacttttattcattctgcaaatattacccttttccttatgctttggttagaacttctagagcctatattttcattgctctgcaatccattcttaggtattattgtttacagattgtgcaactgttttctctttgcttattgtgattttcgtttctgttatcag

SEQ ID NO: 48117 - DNA, 469 bp, Manihot esculenta
  Intron number 2 from transcript cassava4.1_014968m (locus cassava4.1_014968m.g) derived from phytozome v7.0 (chr-ID scaffold08265; pos 4453987 to 4454455)
aatcagatacgcttgcccaggaagacgttaagaggcacttttaccttcttctgcttattaatatacctcgtagttaatacgtccgctgcttgttacggttcatattgtgtttttgatatcacaattaaattgcgatttacaaattatttaacattcatgatttagcaatatgaagattgatcacaaatattaagaagatgatttgccatttcagtgttgattttgagtggaaaacaagtgtgtattttttcggaagtattttcagtgattgataaagagtgttaaccaggaatttcatggcgctcaataaaattcattacatgcagtttacttatgttgtttccttggttcctttccgagtatgtattgataattgaatgggattactcaaatggtttagttgtaggaagtcgacaagggccataaattaccagaaaagaggaacacgtttcagagcctcaacagaaag

SEQ ID NO: 48118 - DNA, 939 bp, Manihot esculenta
  Intron number 1 from transcript cassava4.1_021741m (locus cassava4.1_021741m.g) derived from phytozome v7.0 (chr-ID scaffold00204; pos 41090 to 42028)
gtaagatccaaatgttaccctttatggataactcaaattaacagagccctaagtctccaaaaaaaattttaaaagttgacgagagagacaaaaaaaaatctctacgagaatgactctgatactatgttgaaggataatatttgttgtatttcacaatagatattacaacctatttatacatgagagacgatatctaaacaggaaggaaaattaagcctatgattatacaatcctaagattaagcaactgaccatctatcaatatttactttctatattaacatatgagaaaaagagagagagagagagagagacagatttgagagaagagtttgtgattgattattcttgaatgaatctgtagctgatctctagctggcatttatacatctctaactgcttcagtaacagagtagttactggtagttacaactgcttacaacagaattattccttctattcctgcctataccaacttctagaactgaggatctctattcttcttctctctgcgtagtatgtgtcatactgctgcaagggcttgctaacattgtctcaacttcttgctgcagaataagtaccttctccttgtgaatgttcatactttgttgacaagttattttcttttgtacagtaaacttacttgtacatgctatagatgattctttttcttgtactactgggggttttcatttataaaatctagcagttccttcggaaatttagatgttatatgaattgtatgttcatcatagtcatgttcatgtgtagtttattatgcttcgttcttattactcagaacttgtgcaagtttaattatgttcaaatttcagcaccttatttggcatgttttaacatttttttttgggtttcagttttggattaagctagttctttcttacaaatgatgcatattttgcgcttcaggtgcttcttgggg

SEQ ID NO: 48119 - DNA, 872 bp, Manihot esculenta
  Intron number 1 from transcript cassava4.1_012559m (locus cassava4.1_012559m.g) derived from phytozome v7.0 (chr-ID scaffold01982; pos 955 to 1826 reverse strand)
tcgaatcaaacaaaggatttgctcatctttagaaggtaagccttttcttagcagtagtactatgttcacgatctgcaatttcttggttggaaaaaatatggatccaacttttcttgctttaatgtaaaaatgttttgctcttaaagagttttctttttagtgtcagagctattgaaatgggatttgggatcttggattttgagagaaactactactaagttgttttgtgatctctgggttttgaatttgcgttcattttgctcttaagcttgttcctctactatttagtttcttttcacatttcttggaatgtgtttatttttgcgcctgtttcagctaattatggggttttggttgcgatgtttttgtttaattgcggagaaaatgtaaggaaaagagtttggatcttaagctcagcttgcttttgtaattctactctgctgctcgtatgatgcaatgtttttgacgataaaatttaattattatatactatatgatttattttatttccagctaacaaagggtgtggatgatctgttgctgttgtcccagattgtgtataccgcgtagagattttgaaaccttttgaagttatggtttggcaacgttaccatgttctctgtttttttgtgtgttgtaagatgtagacttggatagtgtgggttgtaaaattgtcttgattgttgttaatacgtgaagcattagatttttacagttctctatctattcttaatagattttctcaatctggttttaattatgattttttaaaaggatttagtcctacataaatgcaacataagctgatagaaattttattatatcatgaaatttcaggatctgaagagacttctctgttagtaaccaaatat

SEQ ID NO: 48120 - DNA, 620 bp, Manihot esculenta
  Intron number 1 from transcript cassava4.1_005741m (locus cassava4.1_005741m.g) derived from phytozome v7.0 (chr-ID scaffold03150; pos 167008 to 167627 reverse strand)
tcctctgtgagtattcatttatctattttttggttttcgcccttttcagccttaatgttttacttaaatctattggaaagatgattttatcggtcgaggttctgaattgtgaaaagtataaataattgctggcatatatatgtacatgcatatattgatggaggtcaaatttttggagggagcaggagagaagaaggggacggggttgaattgaattttcactgattcagcatgagttgacgtgaaaggtttatcttatttactattgttaattactttccctatgctgggactagatgtagttgatacattttgaatgttgtagaagggagaagtcaaacaaagcgaacttgtaactggttaacacggtgatctggttgttgaaatttacaaggtcaaataaacttgaagtttgattcttgtctaattcaatggagttgtttacttgcggtttattatttgttcgtttacaccaagtccaccttaaaaatgatagcatatgacattttattggtaatattgcatggctaacattttaatcaatgcttatagttgaagtggatgtgttgcaattatatgatgtttgatcataaaatttttctttgcaggtcagtgtgggt

SEQ ID NO: 48121 - DNA, 441 bp, Manihot esculenta
  Intron number 1 from transcript cassava4.1_007452m (locus cassava4.1_007452m.g) derived from phytozome v7.0 (chr-ID scaffold01072; pos 25214 to 25654)
gaggcccagctcggccacagcctgcttgcctccaggttaattgagactaccctctccgttctctagttctttaatgcgtgagtgaatgccggaaaaatgattgttactctttctaccagtttatattcgtgtgctgaccagttgtttgtttttatgtcgctgtgattcctgaatgatgtataatctaaaattttacatgcttgatattggttaatgtgcaagcaattaagaatttatgctactaagggaatggataaataatttgtgtttctgaatgaaacttgtgccctgaggttgaaactgcattgcggtgattgtaatttcgatgaagatgcatagttatggttctcaatactctcctttaattttgattcttaaatttgtacattaagaagagtacattattgacctcaaaatctggagtaaatttagcagagatac

SEQ ID NO: 48122 - DNA, 695 bp, Manihot esculenta
  Intron number 1 from transcript cassava4.1_007904m (locus cassava4.1_007904m.g) derived from phytozome v7.0 (chr-ID scaffold03802; pos 63025 to 63719)
atcttaagccttagccatcacaggaggaagaagaggtcagtctagctcttcatataatgcctcgtatctgcttttattactcctatttctactcgtaattgtgcttctactttaccttcccaattttcttatggctctatagctcaaggccgtagccgatcatctttttcgcttttaattgacgaaaccctaacccttgtttttttttggtaaattttattattattatgttttggattctaatcagttttcccgaattatttccttaatggaaaattctctgccctttttgagttatgagcttaatttgtcaaacaacatgccgttgtgaatttgtagggttctctggttgtaaggtgagaaaaattaaaatgtgtatatttcgacaatttagatctaatcatgtatagttttccttgcagccttttactaacataaaatttgcgatctttgtgggagtgagctggataatttctttgttatgaatgaatttgtgtgatcaggatattggttctattcttaatcagcagttgcaggaggtggatattggaggatattgtttcacatttgttttagttcgacccatggattggaaactgtaattgtggtgtgggcatcaagaaatttcgttgctttgatccccttcatatatagttcaccgtttgccttttgctttatgtaggtctagaaatatc

SEQ ID NO: 48123 - DNA, 767 bp, Manihot esculenta
  Intron number 2 from transcript cassava4.1_007904m (locus cassava4.1_007904m.g) derived from phytozome v7.0 (chr-ID scaffold03802; pos 63751 to 64517)
ggaaagcagcaaaaattcttccaaagatattccaggtactctaatggccctaacatttttttaaaagaaaaaaaaaactcaatttgagcttgttttataagaattcttggagaagaaagcaaacttggaatgctaagatgtctattgctgttttggttttgtttgcttctgtttagttctggaaaagagcatacccataacatactgatttctaaggttttgtctcttgttgctttttactggattgaaattgaagatctcttttttgtttttttgggcatctctgtgatgattatttattgtgaagctaatcagggagccaaaaaaacatatgatgaatagttactttttgcactaactctgatgataagggagaagtatgacagctacatgagcttatctgttatgattggagtagcactttgtttaatgtgtatgtttgaattaatattgtttataactacataaaaattgatcatcatgagtcagtgttcattatgtaaatagacttatagcagagaaagatgtaatgttaataggtgaatttagttaattattttttaagaaagatgtaatgttcataggtgaattcggttaacatttttttctttgagaagaaaatccgattaattatgttcctgtcaccatgtaagtgttaataagttgcaaggccaatgtatgtttcatctaagatgtcccaaagataattgatttgatttatttcaattgcaggtttggtttcagtacatctaattataaactataat

SEQ ID NO: 48124 - DNA, 320 bp, Manihot esculenta
  Intron number 2 from transcript cassava4.1_003759m (locus cassava4.1_003759m.g) derived from phytozome v7.0 (chr-ID scaffold08265; pos 2370600 to 2370919 reverse strand)
gcagtaagcttgaagtaagtctaattctagtgccattttgattcagaattacaaatataatttgcttaatctgtcaaggatccattctacatcattataatctattatcaagtgaaaaagcataggatgttaaacaaatgttgttcatattagataaatttctttctttattagcatgcaggcaatttgtgtcagaaaaaaaaaacttacgagacattaaaaatgcaatcaaaatctaaggaatttagttaccatgaatcattcttaattttcctgttcttccttttccaaagttaaataattttctgcctttgtaggtc

SEQ ID NO: 48125 - DNA, 348 bp, Manihot esculenta
  Intron number 1 from transcript cassava4.1_003759m (locus cassava4.1_003759m.g) derived from phytozome v7.0 (chr-ID scaffold08265; pos 2371257 to 2371604 reverse strand)
ttccaagtttaaaaagctgagctcaaagatttcaggttggtatttgtgtttcccttttcgttattttcttttttcaaattttaaatgcatctgttcttgaatattaaataagagtgagattttgaaagaacttcaattccaagtctattcgactatatgaaactcaaacttcaaaagcaaaattttcaaattgacatttctttattaatcatggtacacatcttcttcttttttttctttttttttctttttttttttataaaaaaactaaatttcttttataaaataatcattgggttaaatttatttttagtaattttgttgggtaaatttggtgcagagattgat

SEQ ID NO: 48126 - DNA, 631 bp, Manihot esculenta
  Intron number 1 from transcript cassava4.1_004187m (locus cassava4.1_004187m.g) derived from phytozome v7.0 (chr-ID scaffold02264; pos 389792 to 390422)
gagagaggtgaaaattttatttggcaaaaaaatagaataaatatttgattatattctgagcctagctttataatatttatggaaaaattaaaaaacaatggtgggttatctttctaccacaaagctaattagtacttagtagttagctacagaacaagcgcttggaaagattccaaaatctgttttttagcggttcgcgcaggctttaatagtctaatagtgaccgccgagctgattggaggcagcattatcatgtacgtctgtagctaaaacaaacacataaaccactttccctcttttcactgttgagataatcgctttaagtcttggatttttcattcagttctccaaaaccaagtgggcagcggctaatggctgccaatttttctctcctacatgtccctccatccatctcttctcggcaccagctctgctctttccaaagcaaacttcaactcaaaaaatttaaacccataaacccatgtttatccccttcaatccaaaatggtatgtcgggtatttgttgcttttagttaatctgtggaaaagtttgttactttgatataaaatagtgatcgtcttccactcttgttcagggaagtgtaaattttctgttatttcttgtgcttct

SEQ ID NO: 48127 - DNA, 880 bp, Manihot esculenta
  Intron number 1 from transcript cassava4.1_013805m (locus cassava4.1_013167m.g) derived from phytozome v7.0 (chr-ID scaffold03569; pos 84515 to 85394 reverse strand)
gaattctggggtaagctcatgttttttcatttaatatcatttcttctcttttatgtttcatcttcagcttggaagttttttcattgattcatttcctgctattgaattttacacttcttaatatatatggtcacagattagctgtgcgttgcctttcatatttgctcgtgaaatggtgcttattgattcttttatttgcatttctatgttgtttggagctgctttgtttgcgaatagtgagtattgggaacttataagtgcgtatttgtgatttttcagtattgccatgtatataacaggaggattaggctatgattttgcttagcttgtttcactttcagccctgtacatgaacttttgttctgggaacatgatatgtgagtgtgtattcatttgtattagttctatatctaaggtactgatgttggagtttataagagttataggaaaggaagttaatggttaatgaagctaaaggaagttgtttaacattagtttccgagtatggttatatatgataatatttgtcctgtagactttctattactccatgatgttctgtggtagcaatttttgtgctgcattggcatttggaaagatctgcatgagtggagttaagttctgtttcatccatggtgtcttcattttgttggattgtttttcttttttgatgtctttgttgttgtgccttgtaattcctattgccttgctctcctactggtgtctatttggttgatctaaaattactcgttggtgaatttctgtttccagcttcctattttttcaatatgatgtgcttttaattttgttatgctaatttcctatattctctttattataactaggtattgaggtcaaggctggggagcctgtcaaagta

SEQ ID NO: 48128 - DNA, 738 bp, Manihot esculenta
  Intron number 1 from transcript cassava4.1_000477m (locus cassava4.1_000477m.g) derived from phytozome v7.0 (chr-ID scaffold10563; pos 952820 to 953557)
tcaaggttgtacctaccgaatcaccaaaagatcaggtagcagcacgggaaggtcggaaagacggtcggaatcggcgccagagtgattggagcggcgaagcagagtcgaacgacatctcaagcaccgggaagggagggtgcgtgagcctcacgcccggggctttccggcattggagctgggaggtcgggttggtgacggtccggtgattcttctagtgccggtggtgagagatggaaaggttcctagatggggtagtacaaaaaaagtagatataggattttgaaaccctaaagaggaaaaaattgaatttaagctataaaattaggaaaaaactttgatgccctgaagaattttgaagaattttaaagcatttttgtatttcactcttaatctttacaagtaatttacataactatttatacacaaaaaaattataacttaacaggtaacaaataattcaataataattacagagatttaaaaatcctaatcaaatcaaatcatatttctagaatcagcaaataagtcaacaagatgcttttttaaaattcctatcatgtggttgtagttgtattagtttgaggtgttatatttatcaagtttcttttcttttcttttcttttttaataagagttagactctgaagaatataggttccagatttttggtcatgtttctgttggttttggcataacactcaatcgtatttgacaggtagcagggctttgctggattcta

SEQ ID NO: 48129 - DNA, 753 bp, Manihot esculenta
  Intron number 2 from transcript cassava4.1_004800m (locus cassava4.1_004800m.g) derived from phytozome v7.0 (chr-ID scaffold06871; pos 613108 to 613860)
ccaacattcaggcttccaaggtaaacccttagcggctctgccattatcttaaatctgtaaaaacactttcttgagagaagcttaacttttttaatttcggatgtagagatacagaggcttaagttttttgcatgtgtttcctgttcagttttgtttttttggacggttcaaatgtttaagtctgcttcatagagttgaatactatgtgctttctgcttgttgcattgtgttaacttttcgctgtaaatggtactcaacccggctttcttaaattttgaactggtcggggccagctacagatactcttttccttttgctgtgtatgatggcagatgaaattattgactctaagacatcgacttcacagttgaataccttaaaactatcctttttgctgcttgacatttttgcctagtaacatttgacaaatttctgggcggtttgtgtttctttgttcaactgatggctttatattaattatttctgtttttctaaacgacaatagatcaccttgctgcattttcttcactaaactgataagaacgccttcaagttttttatctttgttcttggatatttaatacactaattatgagtatgattgatagtccagcatcaatgcgtcaccaacctagttagtctgagatatatgagattttagaacttccgattttgttgttcaatcatttgattttgatctgtgtctaatacttgacaggcggttgctgacattatccgcactactttgggtcc

SEQ ID NO: 48130 - DNA, 509 bp, Manihot esculenta
  Intron number 3 from transcript cassava4.1_004800m (locus cassava4.1_004800m.g) derived from phytozome v7.0 (chr-ID scaffold06871; pos 613890 to 614398)
ctggtggaggtgggccgttttttgcttgtgttagtttttgaaatgcttgtgcatttgtctctctctctcacacattcactcatacaaacacatgcggaggaacatattttgccatcttcagtaccattaacattgaagtacttaatgatcgttcttcctttctttctcttcctttttgttttctttttttttagttgggcgaggggggatgctagaaattgttaaaatgaagaacatgtggataggtgcatatgcatatgaaaaatgcacatatatgttaaattaatatgaaatcccattgcttaagtgtggaattagcttgttaaaggtgccattttataattataggttgacatggaggattgatacacatacatttactaaaggacagtgaaagttttatcaaaattcaatgatgagtgtcaagatattgcattccttaatggagattttcgtatgggtgatgatgctattgttttgctggttgttaacaggaatagttgtcacta

SEQ ID NO: 48131 - DNA, 660 bp, Manihot esculenta
  Intron number 1 from transcript cassava4.1_013904m (locus cassava4.1_013904m.g) derived from phytozome v7.0 (chr-ID scaffold10493; pos 1040148 to 1040807)
gctcactccacccaaaatccaggtatcccaattcgttattctatgtatttgattgatttctataagaatgcttcctcttctgttcctatttttgctgtttcgcatctgattcatagctaacccttcggaagaagtgataatttggaggatttggtgtatgctaaagtaagcaaggatagttgctagttccctttgtttgcattgaggaaatggagagaagagaaaataaaagaaatttgattttgatcaattctcttgtttggaaattaaatagaaaagagcaagcagtaaaaatttacatttcgtaatcttttttctacccaattaaacatccaaaccaaaggtttgtttttaatctacgaagtgtctgagttgctggtgcttttgaatggagtgttaattgtaataatggataagcgaatttttttgagaaggtttcgtatttcgtttttttcccctttcattgataactggcgcatggataactagataatttgtgggatttgagattggagtctattatttatggttaattgagtttatgatgttgaattagttctgatgattcttcaaactccaagtttgttcattgttgagtgttgatgtgtctgttgcttccttttagttcctcagcagcagaaagtcattttaccaaacaaa

SEQ ID NO: 48132 - DNA, 1052 bp, Manihot esculenta
  Intron number 4 from transcript cassava4.1_014374m (locus cassava4.1_014374m.g) derived from phytozome v7.0 (chr-ID scaffold03823; pos 13712 to 14763 reverse strand)
tgtacggtgccctcgccaaaggccagagccccaaggttagtgtatattggaatttctttgttgtttcatggtagctactaatgcgggcgcgtatgtttattagccgagatttatgataattttaaattttatagtatttgtaaataacgtagacttggtcaaaatgtaaatggacaattaagttaatatatatatatatatatatatatttttttttttttttcaattgttttcttatttttatatagcatgcagaaatttgcaattagccataaacaaaaaaaaaatactatttttttattttttttgtcaaatatactatttttctatttatttaccatttcttttaatatactaatttttcagccatttccacttatagaattttttccgacgtcttctaaattttggtcctatttgcaaactcattctaccgtctctttcccgttctgctttgatttggaaaagaaaaggccaataatacatagcttggaaaaatttttgtctccctctttttgttttgtttttttttttttgtaaatggggatggggattcgaacctgagatctatcagatttaaccggatgcacttaccatcaggctaagcctgggagtgcttgttttgtttgtcgtgcttactttggttattgagtatgtttttttttcttggtgtaattaactctaattagaatttaagtctaaaatttctaagttttaaagataacttcaatatcaataaattaaaggtcattgatctatatatgctgcactttaattacatttatataaataatatttaagttgaaatctacgtgtcctcctttgaaaattttgtcgtgacaaaaaaaatgtggggtctgaaatgagttagggacatggtgttctagctatttatccacctaatcaagtggggtttctatataatggctactttgtccttatctttttcttcattcaatttagggaatcattatggcgccgtcacactaagctaaccaaacatttttgtatttgcagtttttggtatttgcttgctcagattctcgagtttg

SEQ ID NO: 48133 - DNA, 427 bp, Manihot esculenta
  Intron number 1 from transcript cassava4.1_007620m (locus cassava4.1_007620m.g) derived from phytozome v7.0 (chr-ID scaffold03264; pos 103027 to 103453)
cttactggagttgtcttgacggaactctccgatctgtaagctagctttctctcttctttaatttttagttttattgaactcttctgtggagaaacagatttgttttcttgcttaatgggttgtttcgataaaattcaggaaacccatgttgctttttttcccttgacggcctgtgaagagcttgctgtttgtttgatttggctatagttttaattctaggtgaacttttttctgagtgcgtagctgtgctatttgatagctcaagttgcattcgctgtgattcggctgttctgcttggcgattaattatatccatattgtagaagttctaatttcttaaatgggttgttgaattaattattttcgtttcaattttgtttttgtttgatgcaggaagaaatattttttcttgatcttcaaagatttga

SEQ ID NO: 48134 - DNA, 735 bp, Manihot esculenta
  Intron number 2 from transcript cassava4.1_033771m (locus cassava4.1_033771m.g) derived from phytozome v7.0 (chr-ID scaffold03150; pos 278145 to 278879)
agaggtggcacaatcatttaaggcctgatatcaaggtttcttcttccactttcattttctttagggttttcgttttgctgttaattatctctccttcatgttgtgatttctatgatttaggtatatgcctgacttcaaatttgtatggattttgcttatatttgtaagatgaacatccataaaaaaatctaaattagcatattttgtgttaatttcaagcaattcaacgagataaaatcttaaaataccttatggacgctacaaaatactctatagttttcaattttatttttattttttttaagaatggtaacttttccttaaaaaaagggaaatctttagggttttgagttttatattacatgcatctaggtgaattatctagttaccatttttttttttaaaaaaaatggaacatttctttaagctcattgaaatgcaaaactattgatctattgcatgcatactttagctttttgatgcatcttcatcacatttcttcttcattgagtatcttttttcatgtgattttgtaatcttttcttgcaaagcatcatcattgacataaaagttgatgactttactcattcataaataagtttcctctagcttttcaatatcaacccttctttcttactgtaattgtttactctcctttatatatatgctatttttccatgttatggtttttgttttatagaaagagagctggagtgaagaagaggagaagatttt

SEQ ID NO: 48135 - DNA, 1035 bp, Manihot esculenta
  Intron number 1 from transcript cassava4.1_027546m (locus cassava4.1_027546m.g) derived from phytozome v7.0 (chr-ID scaffold06700; pos 269582 to 270616 reverse strand)
agactcgctcggtacaatcctattgtttcagtgtttttaattttggattttgcatttgctagttatgattgctgggccaagtcgttttggaaaattcatttttctttttgagcttgtgtaaattttcttttgaattgtgtgcgagtttgcttgcataaggtacgcaacttgtggttttagctatgatagagtgataatttggattggctgcattttgacgtggtttatattattgcagacttatctttttaacttgatcaggtaaaaaaatggacctgataagaaatctggaatgaaggttttttttttattcaagtactctctgtttatttgcgtgtaattgatagtagtggactcattagagtttgagttcttgtttgatttttgtctttcttaattcatttgctaaatctactctgtaaaatttatgataggagatgaattttcagatggtggttttggaatctccactattggtttgcctttccacggaacttttttttttaaattgattaagtaatgaagaacagtaagatccttcctctgttgccaccgttcatttatttctaggtggttcagtgagttgtttacgtgttcaacttcttgaaaatatttcttttttctcctcaattaaatttttgttagaaagtagttaacaaatttgacctacgttgtttgtgtttctcttttattgtattaatttcattttacttgctcttttgcctacaccgatgttgctgtcttgatcatatgttgagatttattaccaattattgcaaattttttttaggacaccttccacgtgtttattgtctacttttgctcctctcaaatagtgagatgtaaaaagcctttgtctttgcatttgattcaccaaatactatgtattttctgtttttatcaatataaaatgactaatttatgttgattatgaaatcagaatcatatattgtgacacaatttgtccactactcatttcatttcatttcctttgctacagaatttttatataataggaagagataagaacagaac

SEQ ID NO: 48136 - DNA, 905 bp, Manihot esculenta
  Intron number 2 from transcript cassava4.1_018145m (locus cassava4.1_017106m.g) derived from phytozome v7.0 (chr-ID scaffold10563; pos 693641 to 694545)
agtaagctcatcgcagatctgcaactcttttttcttagaaatgttttcagattgggattatcagtctctgtgctttgtcattgcgacaatgaagtggcattgaagactgaggcgtagatagatgtgatgtttagaacttgagagattttatttaccttcgcccgtacggtctgtgggttggaatgttggttttctgtttcacaattggtagttcatgctttattaagaacgtctctaaattctaaactcttgcactggctccttttttgaggctttgaatctgatagtttcatttttcttttcgcattttcttttggtgttaaattttgcatttgtgaattctttttttacattctcaattctcatctaactggcttttaatatttatatgtaagaagaatttcatatatatgcgaattttggaacgagggcttgtgaactggtagatcacaaattttgaatggatcgaataagcacttgaaacttttaccacgaataaaacgagatgctgacttgttgacagcattgtaagctgtgagctgccttttctttttaatatatatttttttatttgattcatttgcacacaattagaaacatggtgatttgtatagagaattttgattttagatttggactagctgcatttccatgcggtcctttcctcttccatattaccttgctgttgtcatttaatggatttttgttaaattcttttgggattttgaatgttttgtgttgatcattctgatacttaagtcttcacatgtcttttgacctgattcttaaagttatccaaatgcttctcctgtaaaaggatgttaaaaatgtgtttaattttgagcttgttatcctggctgttaatttcatcttgtatcatcttgttatttttgttcatagattca

SEQ ID NO: 48137 - DNA, 851 bp, Manihot esculenta
  Intron number 1 from transcript cassava4.1_013802m (locus cassava4.1_013802m.g) derived from phytozome v7.0 (chr-ID scaffold07238; pos 86219 to 87069)
attgcccccctgatgtacgtcacatcatgtgcacataagcatgatttttcttctcttctaaatataattattgtttttgtttcctatacttctttattctggtttaacggcgatagtcggtgctgcataatttattttgcttttgggggaacagttggctttattactcatgtagtgctcgtcaatttcttttggagaaattttattactaatcatttatgaaagaaaataacagaatttaatagattttaaatctatttcttttagaatagaatctttataaatttaaaacaaacaaaaattgttctgagaattaatagaacagttcaattgaattaaattgttgcaaatttcttgattctaaagagggtctgaaactcaaatgagagttgccaggaaaattgatagactgtgctgtgttcatctgacatttactcagcttagctagtacagcttctgaatcaatagttggtcaatgcttgttaatataatggcagttattgcttagtttattgcttttcttgttattgctacttctcatcttctgagagaaacagcagtggaatcttatggaaaagcccatttgattctgtagtgtagcactttcattctggaagttagctaatgagttttactggttctcttgactattaagatttaatggttattaatcttgtaatccttaaaaatgtgatgggacgaagttcactaagcaaaaccccacaagtcaaaataggactaaccttgcatttagaatctcaactttgtcttgaatcaatattaaacctttacaagctttttgttttgtaattgcagctatacacccgcctagttgctactgtggattctga

SEQ ID NO: 48138 - DNA, 183 bp, Manihot esculenta
  Intron number 2 from transcript cassava4.1_015004m (locus cassava4.1_015004m.g) derived from phytozome v7.0 (chr-ID scaffold04651; pos 131524 to 131706)
gaaccacaaggttttcttcctttttttattcccgatcaaatccatctgtcttcgccgtctacttttattaatatttctcaaaatttttctgatgcacaattcccatttgtttttggttatggtttcactgatttttttttttctttcggtctcttacgcttgaaggctgtataccgcttacat

SEQ ID NO: 48139 - DNA, 887 bp, Manihot esculenta
  Intron number 4 from transcript cassava4.1_015004m (locus cassava4.1_015004m.g) derived from phytozome v7.0 (chr-ID scaffold04651; pos 131884 to 132770)
gagaaaaagtttaccccaccaataaggtcagtataatttgtataaatcttcttttatataaatacagtgtattatataattaacgtatctaaaagtatattatatgttcactagtctaattaagaattataaagtaatttaatatatttatgtctaaatttaaaaaaaaacataaaaataaaagattatatacatctatacctaaaaatagcgtagtatatatataattttattagaaatataaatatgtctaaaaataaatatataaaatcagttttttcattcggtttcagttcattattgtccaaaacagttctggtatggttttaaaatgattatggttcggttcttgatgaagaattaaaactgaaccaaaacaatgaatgtaaattcaatttgatttttacagtattgattttttttttggtttaaacatggttggttttggttatttggacaattcgagagcagaatcatgcacaaccccatttggaagcattggggccatatttggtttgaattggaagtctctataatcttattttattgtttggtatgtaagaaactttaaaaggtaaaaatattgtctgtttccggaataatttataagcatattattgaattataattgattatccaaactgattctctgaatgagaatcagcatccgttttcaatgaatgtgccccaaaaaatattttttctagaatttatcattgtttttggaattaaaatgcttttctatcagtcaaaacttcttgctatttcatcaaacggcatttttttgtatactaattgtaagaaactattcctagttttcttggttgataatgaaatatttccttcttacaggtgccagctttggaacacaacggcaaaatcattgg

SEQ ID NO: 48140 - DNA, 859 bp, Manihot esculenta
  Intron number 2 from transcript cassava4.1_024360m (locus cassava4.1_024360m.g) derived from phytozome v7.0 (chr-ID scaffold03264; pos 423316 to 424174 reverse strand)
gagtgggggccttttgcttcctggctcactggctggtacgcctcttcttttatctctttgttcttttattattacatcgttatggcagtatttgttttgttccaagcatacttttatctctaatttttattttaaaaaaataaattgcaccataatttttttaattattaggtaaaattaagtgtacatttcaatcataattagcatcaacaaattaaaaaaaaaaatcaactaaatgagagtggtattaaattagtgatttgatttatatatccaaccttttaaaaagtatataaaaaatatttatatgtttaaaaattaattttattattttttaataataattaaattaaaaaattattgcataaattaaatttatttaattaattttgatatttatagtgtaataaaactttatgtagtctgagaataagccacttaaagaaatatttttttattaaattgacataatttataggaatttaatttatttaattacgtgttttatgaaaaatttaaacattttttctttaaaatatatttttaaaataagagtagattaaaaaataaaatattcaatttattcatcacttattttcaaagaataaaataaatgtttattttaatatttatttgtaatacataatttttttattgaattatttaaattaattttgaatttattattccacacaggccagtaaaattaacaattttcctacgcattcaattttctcctcttattttgaatttttcacagaaaatctttttaaataaaaaaataaacaaatggaaagtgggattttaatgccttgtcctaacaaggacttgtcagtcttacaccgttacaggcccaatc

SEQ ID NO: 48141 - DNA, 256 bp, Manihot esculenta
  Intron number 1 from transcript cassava4.1_013326m (locus cassava4.1_013326m.g) derived from phytozome v7.0 (chr-ID scaffold03802; pos 342466 to 342721)
tctttctctttaattactcctaggtctctgtaaaggcaagtttcttgcatccttctctttttttcttcttcttttatcactgatcagatcattatttgcttccctttttgattcgtatgtttacttcttcactaagtgtttaaatttatggacaagcaacaatcttgagtttgttcatatcagatccgaaggagatcaaactattcctagcaagttatcttgtttcttgtggtgattagtgtttctttttacagcc

SEQ ID NO: 48142 - DNA, 834 bp, Manihot esculenta
  Intron number 1 from transcript cassava4.1_033114m (locus cassava4.1_033114m.g) derived from phytozome v7.0 (chr-ID scaffold08253; pos 8188 to 9021 reverse strand)
tggagacaccttgctcttgttgtgggagcctgaaggttagcaaggctcttatttgataatacaatttccagttttgggtttgcttttttgttttaagccatagaagcaaaattttcataatgtacccaataattttggatgagttatatgggaaactcttgatccatatcactttccatttaactgattttattgtcaacttagctgccaaattaaaattttgcttgttttactagtaaagagaaggattatcacttatcattatcttttggaggtttcctttcttcctccaacggctaaaacataatcattccccttgatataactagtttcttgtataaagcttgatgagcttaagaagaaggattttgcttcttctattataccgtgaaataattacagaaacttgcagtgatcattgtcttccaaacataaaaggttttgataatatcttgacatcattgtcaacttttcaacatgggaagtggacttctgcttgtcatgttaagcacatagagttcttgttgctgtcatatatgatacactgatactgcaacgaagaccactggataatcacatatttcatgcgcattccaggctaacagcatggacatcctgcgattctgtaaattatcgatagctaagttgtgcacattccgactcaaagtcgaaggtgttgatttaaccatgttgcttctacagtctctatgcagtaacttacattaatttgtttcatttcagtgttcattctcttgctaaagattaaactactataagttaaattgattttttgtcctgttgctacgaataatactgattcttcggacatgcagt

SEQ ID NO: 48143 - DNA, 796 bp, Manihot esculenta
  Intron number 3 from transcript cassava4.1_006923m (locus cassava4.1_006923m.g) derived from phytozome v7.0 (chr-ID scaffold06659; pos 279409 to 280204)
tcgtccagttaatcgttgttcggcaactattgctggtatgatattggttttcttcttgcacttacatttacatgagaattgttgtacagaagcctttgtttatgccatcataactatgtagccaagtttgataatttttctttacttaaaactgacccatggcaccttgtcagtcaaggtcactgaactgttccttttgattgaggaaactcctttgaattttaaaaattttccttctgagtatctgattgtattgtaattgcaaatttctataaaatgttcaaaaggtagctcaattattttggggctaggagttagtgattagggtttagttaggaatgcaagtgctggccattcaccataaaggaagctccacaattgatatgctattaaaatcaaagctaagaaaccaatagatattatggatttctgtcaatttattattaaattcttaatttgtgcaagcatatgcatgttaatgtggaccttcgttttatcttttatctcatgtctagagaacgaaagttattatctttatgatgtattaaatgcttggcgaaggaaatattaggtaagcttgatcctaacttttattgattgatgataaatccctatttgtggctttggtgttcaaagaatgcttcttcctatttgtaaatgagtaacatgcgtgagttcatatttagtttgtgtgatttgatttatcagccttcgttttgatattattcactttttttttgtgtggtgttatgtgactgcaggtcatacagaagctgtactttcagttgcttttagt

SEQ ID NO: 48144 - DNA, 531 bp, Manihot esculenta
  Intron number 2 from transcript cassava4.1_015001m (locus cassava4.1_015001m.g) derived from phytozome v7.0 (chr-ID scaffold04083; pos 132935 to 133465 reverse strand)
accagactatcaagcttggtggcggcctccgtcaggtctttctctttagggttttaagttttgggttgtttctgtatagttttttggtactttggtgaatttatgttttcgttctcatttcctttccccttaaaacaagggatcatttttgggggctgatactggatggtcagggtccttatgattttgtttgttgaagtccatataattttctctttcatttttgtatcttggcattacgtatttctgtctagatacacactgaattaggattatggtgtgcaattgctagggcacaatgtggattatgccctttgattttaaagggggaaaatttctcattttccaaacatgtgagttgtagctggcctagttgcctattagctttggttttatcattatattctgttcttaatccattggagctttgctacatgtataatttgtgtagttaattaaataggaaatgtctctgtgttccagtttgatgaggggaaactgatcttcttttgggtattttctaggaatctg

SEQ ID NO: 48145 - DNA, 806 bp, Manihot esculenta
  Intron number 5 from transcript cassava4.1_026404m (locus cassava4.1_026404m.g) derived from phytozome v7.0 (chr-ID scaffold10493; pos 1128836 to 1129641)
gctcgcattgttggttttgaagtcattccaattaggtaattagattgcatctattgttacatgggattatatttattttgcgtttaaaattgaattaagtgatgccgctatcagattgtcaaccccacttagctccttggtgtatttacttcaagtcatcaacaataaagtaggtcatacctatcctcttgcactttgtatccttgaaccaaatacaaaatctaagcagggaattgttgcagaagaggcgtttgaagttttcttgaaactgtttcttcataaactgttcacgagttgaacagagtggtccattgctagaaattagaagtcgacatttgaaagttgaaacactagtatgcaaaaataaatactactttgaggataaagtgagtattggggtggcaggtgtatgatttcatgaaccgttcaccagctttctcctgataaaaaatgttagggctgtcgctgagagatttattcatttaaggaattgtttagttaatagattattagaaacggcaattagcttcccgttttctttatccctgcaaggtttatttaaatgtagaaaagctgaagtgtctacttttccagtattgctactggttttcagttttgcttaccttattagttattattggtctattaagaaactaaaagttgctactttagttgcatcagatatttagatcgcttctaggtgcatatttatctttctaagcatctttcataaggagcttttgctaaacttcagccttttcacctttattatttaaacagtatcaatcataaatacgaaaattggg

SEQ ID NO: 48146 - DNA, 1016 bp, Manihot esculenta
  Intron number 1 from transcript cassava4.1_007837m (locus cassava4.1_007837m.g) derived from phytozome v7.0 (chr-ID scaffold03802; pos 606491 to 607506 reverse strand)
tcaatttggcttgcgccgccgttgccctgtcccgggtaattaacttttttctttgttgttttattattgttgttatcattgtaagtgggaaaatcagtttttatctagcctttatttagaaactcaaagcggctgtttttggttctctttttttgtataggtattctaccaatacccttctccttcccgattagatatagctacaaggttttggttgtggatattttggtgcgttttagggaaagtaacttttgtcataagcctttgtagctgaaacaaggactaaagctaaactaagcatgagctgtataaagaaaattctccttgaatcttgaccaaacctaaaccagagaacccaccaagtattaaaaagcagctcttttggtatcactagatagtaggataccaaagatatgaaacatatgacaagaattagtaaagctgggtagccaagcctatttgacgcttaaatatgactttcaactttttaaccgaataattgtcaaatatagcttgaatggttggttgatcattaaagcatttgccttttgtggcaaaaaagcttgttgcctattttagaatctggactctggaaatgaatgtttaaaaagccaacactgaacactcttctgtgaacaagaatgaccacatttcatgaactaagtggttagtagaacaagtcttactactggcaaatgagagttattggacttataagggaaaggtggttagctgtaagatgcttgttcacatgtgtatatgacagggttatgcattgtgattcagatgttcgttcttattcttgtgattgtgtagcataactccatacatactgcatttacactatgctacttcttatcctttactgcaaagacttgttgcaaattgaagaatctatttattcaacaaagaaaattttaaggcatccttgtgctttccaattttatctggttactttaatatgttctattcttgcaataggcaccttttctgaaacctcaagattctcctgctag

SEQ ID NO: 48147 - DNA, 616 bp, Manihot esculenta
  Intron number 2 from transcript cassava4.1_011530m (locus cassava4.1_009010m.g) derived from phytozome v7.0 (chr-ID scaffold08265; pos 4442733 to 4443348)
gcttctgattagggtttccccctatttttgtggtaaatattggcaattttagttcatgatttctgatgctgagatttaataaggttggttggtgcgaatttgatgataaattagttctttttatatatatataattgataaattagttcttcaacgttattagtatttagttttttggtctctttgattttacttttgttttaacttaattgtaatttatcttattaaccgtagcacaatttgtatgtcttcatattctactttttgcttccatcctgttttcttcggcctgtaactgtttctaaaactcccattaattcctgcacagtaatttattaaattatgatacaactacttggagcgattaaagggaacttttacttattaaaagaccagtctagagtacttgtgtgttagattgtagaatgtataatgacctgcataaggaattctgcaaacaaaccatataccttctatcttagggcacttaacgaaggggaagtttttttttttcctttttcttgtcctctatggcagttctcatcttacttcagatttatttatttaattatgcgcttcagtgcttggaaagcagaactcttatacaaagttgaga

SEQ ID NO: 48148 - DNA, 674 bp, Manihot esculenta
  Intron number 1 from transcript cassava4.1_005007m (locus cassava4.1_005007m.g) derived from phytozome v7.0 (chr-ID scaffold11495; pos 603215 to 603888 reverse strand)
tcatattctccagcttcctcgtctggtagatcactgtgaggcttctaattttttgtttactcgatgaccctttgattttttcttacccctgagatttttttgatgaagagtttaatattttatggcttaagacataagagccttatccctgaagtggaacgagaaaaaaagatcgatgttgtggtaattatcatagggtaattatggtgcctaaaccaatctgaagccttttttgtttgttggatctgaagccttttttgtttgtttgtttttttgtttgttactgttctttcctgctggctactctatgatattatgatacatctagggtagtgatcctataagagaaaaaaggtattgcatcttggaatagatgggtgtcacgtgccccaagctgggatgtgacaagaagttgaagataacaatcttgtcatctttccctttcttgggagaagctgagaagttggaaaatggcaataaatatttaaattattttcatttaaacttttttaagccatgtgcagaattagaagatcagaggcagaaaaggggggctgcaatcccatttcccttccaaactcacagttttcatgtttccgtgtatttttaaataacttggttgtttttttgaccgatatgtatatcctttgcgctcagagaaacagcagctgagg

SEQ ID NO: 48149 - DNA, 1038 bp, Manihot esculenta
  Intron number 2 from transcript cassava4.1_006842m (locus cassava4.1_005081m.g) derived from phytozome v7.0 (chr-ID scaffold08265; pos 2512355 to 2513392)
aatacgggctaatttattatcgggttctagttgaggtacatttttttattcaatttttaatgatcttttacactgattttgcttgttctgtatcttatttctatcggaaatggaagttctacgttgatttaaaataagctttatcgtgaaatgttaggattttatcctgcctgtgtgtttggtgtgtctggcggattaaaaaggtaccaactttttgcttaatttggagtactgttcatctggaagcttggtgttagattattatttatactggtattacagttcatagttgaggtttaggtttaagtttttcaagtacagaaaattgttggccttaatcgatttatggtatgaatagggagttcttggtagattaccaaggttgccagctatcttctggtgaggtgcatctggtccctgattgaattggattgtgaaagagtagatatttgtgccaaaatgagtgatcctaggaatttcaataaaaataatatttatttggctaaacaattgaggacgtgctgatgctgagaattagttcaaatttgataaatatacttcagacttatcctggtagaagcatctctggagctcaaatgtctaaagggacatatggcatggttatgagcaattatatagcattgtctgcagatccagttccataattcgtgtgatattttatgtttgcctccatccaaagtaatagcattttaagtttttaaatgctggtgctgtattcgtgctcatggggatcttttctgagttttgtcttttcctatgttgatattatgaaggtggctttgatgtaatggtaaaattactccaccagatcatgggtttgagccacggaatgtcctttatgcaaagcaagggtgtacatcaaccctcactagagcctacaaagtggggatgtttcatgcattgggtcactgttttttctttatattgacgatcttgattctgttgttctgatattatagtgccttcttccccaaaaaataaggttaatgttaaatctggattcccccttcaggttaa

SEQ ID NO: 48150 - DNA, 799 bp, Manihot esculenta
  Intron number 1 from transcript cassava4.1_008759m (locus cassava4.1_008759m.g) derived from phytozome v7.0 (chr-ID scaffold08265; pos 1968583 to 1969381)
tgtgagaatcaaagctgagagtcctcttcatcgtatgtttttttgccttgtttttcatttttttaatgctaatttgagctttgtaattagcggcggacttttgtttttctttccttttccgggatctttcttttaacgtgaagctgtttggttttgattagtaaaacaggaaagacagaagctttagatagcttttcttgaaaaagtataatcatgttggatactttttgcttacattttcggtgttagattctgtttggttcctgagaaaaggtaaaggaaagaagagaaagcgagaattttagccctttagacaaaaagaaaattttgattcctttctaagatccaattaatcttcacagtattctattgatttcactgcgaaattttgttgcattaccattctctgctcattagaaattttgtatcaccatcaaagaattatccaatccattgattttgttttcttaaaagtgtagacaaccaaaaatagataaaagaacacaagcctctagttgtttgagcctaactagctctgccatttggcaattggcaaggcttagttagtaggggctttgattatgatagaagtgtttaaattttacttcctgttgtttattttcccttaaattgatttgctaattgagcaaagatttggttatttattggatggtgagttagattgctcattatttattttatttggcattatagctttttgatggacttgcaagatttgtgatatttaattgttaattctgtaggggcagatccaaaatctggcagcaaaggtggatat

SEQ ID NO: 48151 - DNA, 965 bp, Manihot esculenta
  Intron number 1 from transcript cassava4.1_009310m (locus cassava4.1_009310m.g) derived from phytozome v7.0 (chr-ID scaffold00823; pos 334142 to 335106 reverse strand)
atccgtcttccaagttcaaatcttgtcaaacgcaggtgggcttccatacctcctctttgattccagtacagtgagtttgtatcgttgaaaccaaaatgtggttttaattattgggatcttctcatctcatttcattagattttgtgttaaacgtttcaattgctcagtgatcttttagtgcccatttgcatgtgaaaaatgtgttctgtgatcagagctgctgctgcttctacatgtggtcgaatccatttcctctttagtgggtttaaacaggagctttcaaatttgacttgctgaaacgatgaaatgtttgtttggtttaatatattttgtgatcctggctggctattatgggagtattactccactattgttcctgtattgtttatagatgagtgttttttgcattgccaatggagcccttcactagttatgacataaaattttttcccatatgaaattgttcttactaaaattgggaatgcttctcatttttttcttggtttatggctagattctgcttgttattgtgaataatttcagctgatcagctcagcaaagtcattgacgccattttttgttctcctgtgcgtatttaaaatgtgggcttcgaatgtaaatgttgctactaaattactaattaaaattctttgttttggttacttttaggtcatcttagaacagtaatctagtgacaaatttgcatcttcctttttaactaatagatttggtttgtgattctgttggcaatttttgatgatttttaacttactgtacattgtattggggatgccattttggtgatgcaatcatatataacgggtagcatcactctttctcctccaccgcacctaatttttggttaatatgtaacaggctaagtcactatgctcctgtcttaattactatttatcatcttgtttcttgcagttgcgggccattataaaattttgcaatttggaagg

SEQ ID NO: 48152 - DNA, 1002 bp, Manihot esculenta
  Intron number 1 from transcript cassava4.1_013137m (locus cassava4.1_013137m.g) derived from phytozome v7.0 (chr-ID scaffold05249; pos 9944 to 10945 reverse strand)
ccaagcttactcaggtctaatttacttattcactttctcttcaattttaggaaattatacacttcgctgaataaatataagattttgctctttagctgtggattttccaattttgtagtggctttaccatcttatacgctatgaaaatgctaaccttcggatgttctttaggctatggaagattggttaatgcgccatgtttagtactttgattgctagctattttctatcattactatctaaattttgaaattaatgccagtccttcacggaaatctggctgctgaagttgtaggaagtgccttaatgagagagcattggaaagatggctggttgacattgatacacttgtggggataactgcagaccttgaaagagatgctgcacaattgggatgacaaactgggaattgatggcttttgtcagacgatttatttctagtctttatctggttctgtctcagtcgcagaaccagtacacatgcctgtgcatatgcacatatgtatgatggcagtggcacctcagaacatgcatcaatagcataggcgttgcataaattttatttctgctttgatgtgtgttaatgggaagcacaagtttacaatctcacactcacagcaaaaagaaggcattgaccctgtccttgccttcatgaaaatggttctattcctgaaagctccctcaattgatgctcacttattggctttggcagtgaaactcattgctacaataacaatgggagaattaaaaattttaagcacgtagtttcaaaccatgaatagaagttataaaaaaaaaaaaatcaatatcaactttctttttcctgcaatttttcttgataacaaggagcctatatctgtttttgtttatttatttacagttttgtatatacttttaggatgagttgccattgatgtcttgcacttgttcatgatgttttcctttgatgaataaaagaagcaaaaattataatatttgattttttggcttttcttttatagg

SEQ ID NO: 48153 - DNA, 391 bp, Manihot esculenta
  Intron number 1 from transcript cassava4.1_029819m (locus cassava4.1_029819m.g) derived from phytozome v7.0 (chr-ID scaffold10563; pos 29559 to 29949)
gaagtacagaggatctccggaattgatttgttcaggtttggatttaaatcgaatccgtagttgatttcattggatctttcttgcaaaatcttttttattcaaactccacatgaaacgtggttggtgttaattttcatttttaattttgggcgcaaattatgaatttatcttttaatagacagctaaaagagaaactatgatcacagcttttgtattgtctaacgaagtagcttcctagactcctaaaaaaccaaagtaattctgtgaactgtgaatctgtgatgccacataattataatttaggttccattaccaacgattccctaaaactattatatgtattctttgcactacaggatcgccagcgttgccctctctcctgagcacaaca

SEQ ID NO: 48154 - DNA, 604 bp, Manihot esculenta
  Intron number 2 from transcript cassava4.1_014582m (locus cassava4.1_014582m.g) derived from phytozome v7.0 (chr-ID scaffold06871; pos 685362 to 685965 reverse strand)
attctctgggtgatctggtgccttttagcaacaaagtaagttttttacatctcagtttcgtttgtttccccagaaaatctaccatgttttttttgaagattctgattataatttgcttttatgctcgcaaatcataatccccaaatgctctttctccgtttcaagctcaaaattaaccggatttactgtgtcttttttttttttttttcctgcggatatttttttccccgcaaaagatgatatcttttcagtccaattatatatataaaaagaatatttgagaatgaataaaatggggtgtcatatcaattattgagtagctgagttgtttgccattgacatataaatttgataactctatttaaaaatagctctatttaaataaaaacttattttcactataaaattagaataagcatcacgagagagattttttaaatattaaattttaaaggggaagaataagcactctggcagaatagagacaattaaagcgggttggtaggaaatggttaattagtcttacatcactgatgatgattttctttgaatgtgtgtaaccattacagctttacaccggagacctgaaaaaacgtataggaat

SEQ ID NO: 48155 - DNA, 926 bp, Manihot esculenta
  Intron number 1 from transcript cassava4.1_003513m (locus cassava4.1_003513m.g) derived from phytozome v7.0 (chr-ID scaffold09000; pos 471359 to 472284)
ggccagcctgatagaaaacgaccagctttagctaggtatattttcttttttgtttatctgatgataatttgagatttatattactctctggaatgttttgactatgttgtgctcataattcggttacttagtttaatcaagacgtcgtcttcgcctcttcgttgaaccttttacttgggtatctgctgatttatgcttctaggaatctattccccaacttcatatgcatattatgtaataaacatgcacaagtttagtaaattcatttgcttagtaatatgaatttttaattttcagctgaggtagaaactagattaccttatcaagctgtgtattttaggtaagttctgaaaggaagacaccagaatgcaatttcttgttggcttggatgctaacctgctgactttgtaagaaaataaactgggacgttagtgttggtgctctaaaacattatatttgttatatgtgtcttttattgcatatactggaaaaatacttaattttgtttctgtaaaatttattgtattcttttgttaatcttgtttgaatttggcagctttacagcttcccttctttgagttctgtgaggatactaacttgaattcattcttattcttgttatgtccgcattgatgatgttttaacttttaaaaagaggcatttatctgcaatttttttgcatattcttcctgaattctactgttcataagctcaatttgttaactgcccttgcttgacttccatgttccaaactgccctttataatcattgcttcctactcgttgagaatttattgaatgtagttttgactgaataggtggactcttatggttaagcctctgtatttgaaacttggttgaaaatcctgtgcatattttaactttcttgcagtgtaattgttgaagctctcaaggtggatagtctgc

SEQ ID NO: 48156 - DNA, 585 bp, Manihot esculenta
  Intron number 1 from transcript cassava4.1_010729m (locus cassava4.1_010729m.g) derived from phytozome v7.0 (chr-ID scaffold02264; pos 99709 to 100293)
agcggcaggaattgctgctcctatacccctttcaggtaattggagtcggaggctttctgaatatcaatttattgttttgggccttcttggccttttttttgttctgttttttgctcttaaagaagcagaatttatcaggggtttatgcaataactgtggttggtctcaattcttaataggatttatcatacagtttgttttccctctctctctcaccatggattttagatatatttttttgtcagagatgaatgattttataaagttggtggtggggctctaaccactgaatggtgtgggttgattctctatgtttcttttattttgcacctattttccccttcttctcggttaagtgcactccatggtgtttcgtatccatctccgatcatttattatttattaatttcctttttatttttggggattggcgaggagcgtttgcaagtaataaaattttgcttttaattagattatggttgaaataaaattttacccatgtgaactacttgctgatatttaatatttatattttagttttcttttgattttcagagaagcagtaccacccagctcttgaagcag

SEQ ID NO: 48157 - DNA, 993 bp, Manihot esculenta
  Intron number 1 from transcript cassava4.1_010162m (locus cassava4.1_010162m.g) derived from phytozome v7.0 (chr-ID scaffold09607; pos 14122 to 15114)
ctggaagaggtgcttttggaggctggttcgttctttttaattctccttttctttgttcattagccttaattattcatttcaatatctggattttctttaaactttgttcgttgctgtaaattagccttaattatgcattctattatctgggtttttcttttccagcttcttttccttctggggagttgttttaagctatttctgagtgtggttactggggttttagatggaattcttttgagtattgcatcatcatgtttgaatgtctattggtaaaactctttgaatttatctcctcttcaaatatgtgtattttaattctgcacatgattggattcttcaagtaattggtagattaagatggtcttttcatttgattagggttttaattcttgtatggaaagcatactgttatattgtggatgaagtcctaatgcatgctgtagaatttagaatggaaatttggggatgaattcttgaacttgcacttgtatggggaatttggaaattgggaaatcttaagtgtttttttattttttttattttttttattttttatttttattttatttttaactttatcaattgaaattacactttctagaccttcttagtatgtcaaattcatgataagcagattttcatccacattcgtcaaatttcatatcaatacggaatcctccattttaatttctcatccatacacaaagtgacataattgtctaggatgtgatttgtttgtcattcattcttaatttctcatcaatggatggatgctacttatatagacaattccagttgaatttctctgacagaagggatttatatactaagaggtagaacgtgcaaaaaaaagaaagcacacgctcagacatgcacctatatacataattttaattttgtaaaatcttgtgaatttggatatattaacttttctactttttttggagaatttagttgtattgctttcaatgttctttctcaggtgaaaga

SEQ ID NO: 48158 - DNA, 559 bp, Manihot esculenta
  Intron number 1 from transcript cassava4.1_023866m (locus cassava4.1_023866m.g) derived from phytozome v7.0 (chr-ID scaffold04043; pos 768696 to 769254 reverse strand)
cagttgtcgctgcagtatctcattcttcacaacttgtaagtacttgagctccttattgtttatttgtgatcgcttgaatgttgaacatacttggcaatggtatcaatcctccaaattattttctttgaactccttatgagttgaattaagagcgtccttttattttatgaaggtgtgaaacatatttgaaagtccttgtacattgtgattgtagttgtcattcagaagtctctttaatcttctagttttggtcatgaatggagattcaaattaaaggtttagaaattagaatactgctgaaagtgatgaatttggatgagttatcagcgctgatgtgtagcaattctttaagcaattcaggtagaaaattttttatgtcaaagaaagcaaggtttgattggtattactatttacacatacaatgtcgttcctttctttcattgtagttggactgtgttcacgatccagtgttctaactcttttgttatttttgtaatgcaactcaattgaaactttgtgtctaggtacggattgaggctgctttaacgttgcgtgtatt

SEQ ID NO: 48159 - DNA, 546 bp, Manihot esculenta
  Intron number 4 from transcript cassava4.1_017938m (locus cassava4.1_017938m.g) derived from phytozome v7.0 (chr-ID scaffold02892; pos 558744 to 559289 reverse strand)
caacagctattggacatatatctcacaccaaaaaggtactagctttttgctaatattagcttaaaaatgtgatggccttttattcttaggaactttagttgaatcatatttctttatatgtacaattttcagtgggaataatctttttgtttttcattttttaaaaacaattcaaagatgaactttagttgggttgcatgtctttgtatgtatggttgttctcaggagcatgaaagtgggaataatctatttttctttttcatttttttaagaaccaatgtgaagataaactttagttgaattgcatgtctttgtatttgcaatttttctcaggagtatgaaagtgggaataatcccttttaacaaacacaaagaaaaacttttgaagcaacatttttcttgtgaaccagataactttttatggttttatttaacagtgtggaaggtctaccatgcaatccaattagttggcatgtattttctttttggttgactagttgggaggtatttcttacatgaaaatttcttcttcttagaactgggagc

SEQ ID NO: 48160 - DNA, 436 bp, Manihot esculenta
  Intron number 4 from transcript cassava4.1_027750m (locus cassava4.1_027750m.g) derived from phytozome v7.0 (chr-ID scaffold08265; pos 1494788 to 1495223 reverse strand)
ctggtctagtttcatcatccttcaggtaattagttaattatatatatactccttttacttgcaatacatttgatagttttctcaactcaagagttgaaatgggttcgacacaaattctctaatttgaatactaggtgtggagcacttctaaaatttggaagaaacacttcgctgtgcaaatttgaataattgagctagcatggtttcgattactctttttttttaaaaaaatgattttattgaaaaaattatctttttaaatttaatattttttagaattatttcttctaaagtaaagtttttcttatacaatttactccgactgagattcaaactcgagatgaccaatatcaatgagttaaaagtctatataggttctaacagtaatgggtgatttacaggcaataacactaaaaacataccctgctcagctctc

SEQ ID NO: 48161 - DNA, 458 bp, Manihot esculenta
  Intron number 1 from transcript cassava4.1_027834m (locus cassava4.1_027834m.g) derived from phytozome v7.0 (chr-ID scaffold10551; pos 97425 to 97882)
agctttccaaggtaaaaatgttattgttattttgatcgaggatttgactctctaggttattacttctactcttgtttggttgctgagagagtgaaaagaaactgttctggttcctacatctttaaattgatgtcaattaagctggtagcgaagtttgttagacgctgctccttattattacagtattgagaattgaaaaagtatcgtgtttttctctcctgctttttgtggaattttgaacgtgggcattggtttaaagattcatcttttgcaaattttaatccagacaaatcaaatcaagactaagaacgagccggtacctaatcttaatggattaaaaccatgttggaatgaactgagctgggatcttaatgggtggaacgtgaatgttaatagagttaattcaagtgcaacttcaataaatacggatctggttgatgaaaataaggcagttgata

SEQ ID NO: 48162 - DNA, 656 bp, Manihot esculenta
  Intron number 1 from transcript cassava4.1_009460m (locus cassava4.1_009460m.g) derived from phytozome v7.0 (chr-ID scaffold09000; pos 82123 to 82778 reverse strand)
cctggcctcgttaggcacttggagccaaacgcaaggtttgttaattaattctctgagacttcttctccttttttttttggtgattttgaatttgatttttttaattatattatgtatttttttttttggtttgagaagtggaatccatttgcttggcatttgttgtttgccactgtaatttcaagatcagaagctctttgagcttcccttgatttaatggattttgttttctttcaggtgttgggtgatttgagcagttgcatttccaaattcttagattgcatattcataaacgttttttcagaattgtagctctgggatctaatttgccgttagaattttaattgcttaactaatgatgcttcagcagttaacgaaatttaatgcgaagaaaggttttttaaaaaaaactgtactttgcatcaaaaggattgtttgtttggcttcaagaactggttttagttataatagcatttctgaatctggaaaatgggacataagcaaatcataattgtagttcgattcctagttattcatttctgcaaaatcccatttttttctaattaacccatctctgtttcttgatcatttctaactgctctgtgtttcctcttgtttcagcttgttggaggctatagatttcatccttgaaggtg

SEQ ID NO: 48163 - DNA, 830 bp, Manihot esculenta
  Intron number 3 from transcript cassava4.1_024441m (locus cassava4.1_024441m.g) derived from phytozome v7.0 (chr-ID scaffold03773; pos 114426 to 115255)
tcaagaataaattattaggtaatctttaaaacttacactagaaaatttatgatacaactattgtatatataataattatattatagttatttaacgacgctcgtcttataatttttatttatctttcattttattattattttaagattattgtccattttctttttttagattataataacatataaattaactattataatcctatttaattttatttcattttcaagaaatctctaaaatcatcttttcgtgtgatatcctgaaatagaatagagggtgggctcaaaatgtattttgataaatttggtgtggttgactcatgcctttcttcttttattattttttgttttgttctctactgatatataaccatctgtcgtacgtcctattattatcacgtgggaccgtacctacgatatactgtatttttttctatcgttaaatgatcatttaattactttcgaaaccatgtagacatgattccagatgtctaggattctactgctttataaatctattaagtcaattgggttggacctcctttacttggacctgaattctgtcatgtcctgtttctccgagcgtgacctaaactgtgtattggaggacagaactatgtattgaatagttatggtatagcctttcagcatggactctcaattatagtctgagtgtataatcaatcatagtatttaataaaatggatataattaaaaatttaataaaaattatattttttaatacatataaaaaagtaaaataaaataagataataaaaataattatatgtagatcccatcgtaatcaatcacttaactcataatcat

SEQ ID NO: 48164 - DNA, 960 bp, Manihot esculenta
  Intron number 1 from transcript cassava4.1_031207m (locus cassava4.1_031207m.g) derived from phytozome v7.0 (chr-ID scaffold09294; pos 147108 to 148067)
tatcggtatgtgaccttacagtgaaaagatccttttcttttcttcctttttttgcctatattagtttgtaattgttttgtgttatcttttctttttcattgtccttaatgcgaatgaaatggaagtattgaaaaagtgatcaaagtcatggaaataaatgaggtgtgcagagtagtaccatatactgagaatgaagtttgagcgccggcttacaagtcagtcaaattatgaaaattgtttcagggtagttcccgcaatgttttgaggcacttgaatatctaattggttgtccatttgaatatctcctattttgcttctggtcatcgccatgcattgacagacccaaggggctggcagctgtggtcgcctacagaaatcctcctgaaattttaattcttaaaagggagtaggttgaatacgagtttgtttttaatatattgtgacatttagcctctttcttttttaaaaatttttctaggaagtttatttattttttattgttctagctaaataaagccttattgagttcgtatttaataaattagaattatgtttttactaaatctaattttagttaaattataattagtttagtaataattatgttaaattaaaacttgttaaatgtatactttgctactacatcactgctatgctgtggcaaggaaccatacttggataggtgtgtgcattttgctgcctagataccgaatggctagatattaaaactgcatgttaaggtagcctggaagcgaaaaattggacatcgcaaaaatatgtctagtaagatacagatggctacagatgtcatagtgaccatgagaaacaaaaataatgtcaacaatgaaagatatatatagagaaagaacgataatgctagtcttttgtattataattttattcatttctttcttaaatgtgttggtaggcctttccgcttccctggtgttctggtgggag

SEQ ID NO: 48165 - DNA, 279 bp, Manihot esculenta
  Intron number 3 from transcript cassava4.1_013075m (locus cassava4.1_013075m.g) derived from phytozome v7.0 (chr-ID scaffold04209; pos 574730 to 575008)
ctaggctagttaaacccacaattcttcattttcaggtttgtggtcttttaatgctatatctgattatcatttatatctactttgttttcttacatgtttttccttagaaccttcttttttcttccttgcaacaaacatatgggaattatcttttcttagggttacttggtttttgatgactgaattgatataatttgcaagttctgttacctgattaatgatccttatcttgaattgcccatatgcagctcaggaacttggtttgggctacctcgaaac

SEQ ID NO: 48166 - DNA, 449 bp, Manihot esculenta
  Intron number 1 from transcript cassava4.1_031998m (locus cassava4.1_031998m.g) derived from phytozome v7.0 (chr-ID scaffold10563; pos 474491 to 474939)
tctccatacctgtgagtttctctccctccctctattcaatttttgtgatttttggtttatttgctttgtttcttattgtggctgcctattacttcacgtaatctttctaatattttttcttcttcttcttatttgcatctctcctttattttccaaattaaggtatactttgctctcctgtatccattttattagcttttttggtttggagtgctattatgcttgcttgaatttgatttagcgacccactttgctatttacgaatgcgtgatttgggatcttattatgttaaaatttctttcgtctcaccattaatatggtgtcaccttgtgattttacctcaagtacatgagcagctatatacgtatatgatatgtatgtactatatattttacctcaaacaagcaaacatctcatcatgtctctgtaaactaaacagtttgcaggaa

SEQ ID NO: 48167 - DNA, 785 bp, Manihot esculenta
  Intron number 1 from transcript cassava4.1_003716m (locus cassava4.1_003716m.g) derived from phytozome v7.0 (chr-ID scaffold03802; pos 44622 to 45406)
cgtgagtgcttcttattcatgtcgctgtgtctattcatttccgtgcatttgatttttctttttaaattcaattgggaaaatactgtttgcgagattgttctctattttattatttttttaaagcgtgatgcttgttagtgtgatatgcttaatagattggcgaagatatgttgggttattgcttccatatttaacttctaacaactacgagcatttgaatttccgtgtgagtttctgtatatatttattagtttggccaatttggtttctcagaatatgaagacaagaaaagggaaaaaaaaagccaaattagaaagctttttcttcaaaattgggatcggagtaggtctacttcttgaacatgtccaaagaaagagttgaactttaaaggcaaaaaaagaaatgtatttgtaatttaatttccacttggttgctgagagtggttcaaaggactaattttattcatttaaaaaagaaattaattaagtgtaatttacgttttaagtgaatgaatcacttttctgtttatataaaaaaaagaacagtataaatagtattattttcttttattttgtcagttttcagcaggattagattgttattatctggtagatacaacacctgaggcgagtttcaaaatttgtaacttccatatatgatagatattttcttcttttttatccccatcttttgccttggtcgtaatttacactacttcaactaggatatttattaaactattttggggtttccattttgctttttttttttttgcaattttaggt

SEQ ID NO: 48168 - DNA, 965 bp, Manihot esculenta
  Intron number 1 from transcript cassava4.1_015887m (locus cassava4.1_015887m.g) derived from phytozome v7.0 (chr-ID scaffold06871; pos 150797 to 151761 reverse strand)
ttggtagcataggagagaatcttaaaccacgtgaggtatggaactgattggatttttttctttgaatttaatcaatttaattccatgtcatgagttgcttgcttctattatatttatttatatatatgcatgggcatggccctcaattatgggaagatttaagcaattggaggattaattattttttcttaagtcttactcaaattcaattagattcttaattaatgctctgagctcactaccaactttctaaatcaacgttaggtctgcttttacacatcagaactgaaaatcttgaggaaagagatccccataatgaaaaaaacttatttttaaatataattaatttaaagtcgaaaattcaaaattctgaatatgatttcagcgataaattacttattattttgataattgatgcaaatatagaatccatttttttattaaagtaagaaattgaactaaatagtagctaagaaatgtgggtttaattagtcatttgtggatttttcacaaatggcaaacattctggctggatattcaagaatgaagatgacagaattcctactcttcatccatattcctccatgaaaacagaaacatgaacccaaatttgacttacaaagcaatgaggataatgaagtcaaattcaaggggctaatttatggtagggaactgtggatgttattagttttatagttacacagcggcaagtgggacacaatccctgcagttggaaaatagccccaaaattttctatacttgattgtgctttgaatttgatgccagaaactgaccctacaaattaaaaacattaaattttgtgctcttactttagggaaaatttcctaattaataattactactacaagtattaatttacgaagctgcattatgctaatcctgctctgtttttttataaaaaatttgcagaagagagtgagttttgtaccagacgaaggggaaat

SEQ ID NO: 48169 - DNA, 390 bp, Manihot esculenta
  Intron number 1 from transcript cassava4.1_032767m (locus cassava4.1_032767m.g) derived from phytozome v7.0 (chr-ID scaffold06871; pos 1012581 to 1012970 reverse strand)
ttctgttcctgccaaagttcttcttcctcctaagagtgagttgaagatttttcctattccttattttttgctacttgtttgagtagtattgcaaaactgaagaaaatgaactgaattatgtaatcaaaatttgctctgtcttcctcttttcccttgtcatccgcttctattaatatcagtctgatatttgacttatttctcaccctttgctgttgtttatacatgactactgtttcttttttgtctcttgatttacctgtgatttcagtaagcatacttaatttgtttcctctgtaggtttccacttttgttttgataagacgtccgaacttattattttatctgttcttaaaatttggtaattgttgcttgcaggggtttataagaata

SEQ ID NO: 48170 - DNA, 770 bp, Manihot esculenta
  Intron number 2 from transcript cassava4.1_011328m (locus cassava4.1_011328m.g) derived from phytozome v7.0 (chr-ID scaffold08265; pos 1878565 to 1879334 reverse strand)
ctgctatcttcgaggatccaaattcgttgaaacaggtaattggaaatatctttttttttttagagaatatgcagttggtttgtttgaccttatttaaattccgcttggtggctgagaaagtgagaaaaaaatctgattgttgcttggttttcttatttactaacgaactacttaacctagatgaagctgaatgcctttgatcaaagagaagaagttctttttttcttttgaaaaaaaagttacgatttgtattagaaggctgttgttgtgtaagctaataattcaaaaaatgaggtgcgttgcctatcagtgagatgatctttctcacttctacccagtggttctttgaagtgaaaaagtcaatgggctagattggctttaattttaatattgatggatatatgaaggcttttctgaaaggaaaatctgatcgcagatgaatcaaaattttattttgtctgcttacttggctttgattgtgctcatcgtcacttggtacaattgggtcttcaagtcttcccttgtttacactttatcagtattgagtaaagactttacacaaaagtgttttcagtcttatgttatggtaataggatggttttgtagattgttatggtacaacttcaatttgaatatctttggctcttgaaggatacaaactgtctagccatttttgagaataactaagattcattcattttattattcattgatatttgaaatgcttcttaattaaccttaccattcttgtactgtttctcacaggttcc

SEQ ID NO: 48171 - DNA, 820 bp, Manihot esculenta
  Intron number 1 from transcript cassava4.1_018387m (locus cassava4.1_018387m.g) derived from phytozome v7.0 (chr-ID scaffold02264; pos 868329 to 869148)
gtctgcagacctggtattccaaggtacgtttgtttaacttttgatagtttttcttttgtccccttacatcattaggataccagtttatgaactgaaaaattgcaattttttcgttaagttacatgtgtttcttcttttctttttccttatgattggtatggatgtgagttaatgtaaggataccagcagctacttgtcatttttcagttgcctgcatgttactggtgtcatatgaacgaacaaaatacatgttccaactattggcccatgagaatttgggaagcaaatacattcttgaatggatatttctgaatgcttctaaaaaacttgggccaggttatataaaatcacagtgccatgagatttgtggtcaagcattttgtttagataccatttaattcagtagaagcgggtgaaccttgttgcaatagtaagttgctctattataaacagtctcttggtgtctcagcacaagattctcaaagtggattgtgtatatgttcttatttacatgattgaaaagcctaaagatgcctattttttcagacattgtttttcaatttgagccaaattgccattttctctctcttctatttgacatgggtaagagttatttcattcctaatttaccaattagcttttatggttcttcatctgtcttgcatgtcaataatgtatactgtgttattgattgcatcaagcgagtagtcactgagaatcaagcttgccgttggttaatctttctaccattttgtttactggatatatatgtttgattaaatgattgacactcaaatattatttctggattttctgaagg

SEQ ID NO: 48172 - DNA, 726 bp, Manihot esculenta
  Intron number 2 from transcript cassava4.1_000246m (locus cassava4.1_000246m.g) derived from phytozome v7.0 (chr-ID scaffold11495; pos 781133 to 781858)
gtttcttctcgaggagaaacgtaagctctttcctgtcatctctctctccatgtgttatctttcattattaattttagtttttctgattttattgtaaattattttatttatggtttttgagttttgttgaagcaaattgcattgattactcactacatgtaaaatttttgggtgctttctgttgatttttatggtcgagttatttgtcccctctgttaaatcttgtttagtgtttggggcattattcaagctttaagaattttcatatttgtttgaccagataagaaagacaggttttggctgggattctatttctaggagtttgattccatttgtgaatgtgactggaatcaaaaataccaattatcataataaccaattttcttttaaacagatcactttagtaatatatgccccatgtcttagatgaaaaaatttgctagaattctattcaattgatttattttttgccaattatcatgcttggaatgaatgaattcaaatctttttgacttaaaaaaataattccaaaaaaaaaaaaaagaatgcataattgcatattatttattcctaataaagccatgatgttgatatggtttgagatgaacttttagttgaatctggtccatgatctattgttgtttttttttttttaaaaatcttgtgatttattcatttacttatcaaatgtaaatctttgtgcaatgaagctcggtgcaaccccag

SEQ ID NO: 48173 - DNA, 629 bp, Manihot esculenta
  Intron number 1 from transcript cassava4.1_006467m (locus cassava4.1_006467m.g) derived from phytozome v7.0 (chr-ID scaffold02943; pos 144780 to 145408 reverse strand)
gagatttaattggcattcttcgaaggttagccccataaatctctctatgcttacttttatagtgcaggtgctgcattgttctatttaaaagttaatagagtacaaacaaattacgcaatagcgtaaattttatatttgtctaatagaacgtggaaggggcagtagccaaccttatctgtgttacttaaataatctctatggaagtcaaatcagatgcacatttgtagttttcgctttgggagtagcacatatttttgttttttgagctgcaaaagaatgctaggggaagcttttggaatcaaagaccagttcccaaatgcgtagtcaaactaagcaatgcaactgatagattggtagtaacttcataatgaaaaccaaattggtttaggcgggttcctcggcagatgaatttgacattccacagcttattttgatctatgaaagttaattgcttgtccttatgtagttttccatgacctactttttaatattaaaattggattcttgttgtttacctgactcaacgttacctaatacatgatttttgttttcttagccaaaggatatgccctaaagttgtcttttctattgcagtattgagatatacaagcataacaaagaggaaagaa

SEQ ID NO: 48174 - DNA, 648 bp, Manihot esculenta
  Intron number 1 from transcript cassava4.1_000528m (locus cassava4.1_000528m.g) derived from phytozome v7.0 (chr-ID scaffold06598; pos 116403 to 117050)
ctttccctcattttaatagtagccatctttcaagtgtaagtacctgtatttaggacttcttgatcctttggcttcgtttactgctcttgcttagatgagttctcttcttctttcttctttttagccattgaattgtgtgctctttttcttattttctttctttttgagtgttcatttttcaacaatgtactaattttacttaccctcgtttggaatcaagaatttcaattcaattgatttcttttttaacaattttcttgttttggaatgaaagaattcaattctttttcaacttgaaaaattttcatttaaaagaagttgaatcttgcaagaaatcatttgaattcttttctttcaaaatgaatgaattcttttcttgaaaaaggaattatgccaaaggaggggttaaagatttccgctattggagttgccagatttttgtcttttgtgtatgccttctctgttattgattgagtctcatgttgtcccttccattaacttctgttgtgtggtgaagtgattttaattttgaatcaatgacttatgcaagcaggtggattgaagtaaataggattgaattcactttgttacgtaataaattaaataatcctaaaatctgatttcatgtgtttcctgtcagcttacttc

SEQ ID NO: 48175 - DNA, 191 bp, Manihot esculenta
  Intron number 3 from transcript cassava4.1_012377m (locus cassava4.1_012377m.g) derived from phytozome v7.0 (chr-ID scaffold12439; pos 110965 to 111155)
gactatttactgagtaagatcatcacctgttattgctaagttctttcttctgttttttgattgaaataaactacctttgacttggactatctgctgcttcgcaaaataattgaacctttcgttgatcttttcttctcaggtttgccttagttttctgtgttattaataagtttttatctgatattacagtt

SEQ ID NO: 48176 - DNA, 856 bp, Manihot esculenta
  Intron number 3 from transcript cassava4.1_016105m (locus cassava4.1_016105m.g) derived from phytozome v7.0 (chr-ID scaffold08265; pos 4504599 to 4505454 reverse strand)
ggaggagctccctaagccaccggtggtgaacagacgtgagattcttcactatttttttttctctacttctctaacatgacatctgggcttttaaattacagaaagtccctccataagttccacattttaggtcaatggacgacctttgtctagttgaagacgtgaaagttagttaacaccgttgagtgtttgtaggattctctagccgcagcggtcccttaatcaacagtgcctgagatatattgttttgtttcaagcaaggatctttcggacacttgtttcatgcctagctttcttcttcattttatttcacattaaaaatgatactaccagaaagcctacttcagacctccccatatagctcctcatatcactttcgagaccccatgtagctatgacctatgtgcaacaatatttatttaccacttgctagtttcttcatttgtctttaattactaagccccaattttgtagctggaagagaagcctaaaaagatccctttatacttgcgcgtcaaacgggtttttgaattcctgtcgtgcattatcgttaactatggaaacgcatagtttttattctatttgataattttgtctagttttatgtatgtgaaagagatttttgcccccggaaatctagataatggattgatagatagatagatagatagatagattgatagagatgatgatgaagaaatgatgaagagagagaaagataatgaaatcagaaatctttcacagagtcagcgaattgattttttaatgtctctgtccttttgtttgtctttgttatgtctgcgtgctccatccaagtccagctccggagaagagacagagagtcccatctgcctac

SEQ ID NO: 48177 - DNA, 926 bp, Manihot esculenta; identical to SEQ ID NO: 47691
  Intron number 3 from transcript cassava4.1_011441m (locus cassava4.1_011441m.g) derived from phytozome v7.0 (chr-ID scaffold03648; pos 109266 to 110191)

SEQ ID NO: 48178 - DNA, 718 bp, Manihot esculenta
  Intron number 2 from transcript cassava4.1_018400m (locus cassava4.1_018400m.g) derived from phytozome v7.0 (chr-ID scaffold10493; pos 885233 to 885950 reverse strand)
gatcaaagtaatatgtctttcttgatgtatttgttcaattcttgaacataaatgtgttcgttcagaattgatgatcatcatcattatttttaaaatcctgctacaatttgattttcttacaaatatgaaccttgtgataccaggaatataaatgtgtttgaaaagttttgagttcggatagacaatttagttgtactatgtctgtgcgccttatatgcgtcttgattgtatgaaaaagtttatcctttgatatgttcatgtgcaaagatataaatttgtgacatgacagtttcttctcatccaactcctcgcaagtgatattcttaaaaaaaatatatacatgtacttgataaattaaaaaaagggactaaatcgtgggattctttgcgatttcacttaatctatttacttaatattttgatatattttgactttacataaatataacaattattttttttctttacttcaataaataaaagaacattttgattttttatgggttggtttttgttctgattgattattatatgtgtgtgtgggtggaatttctaggctcaatttctatggataattattttactgtagagttcttcattaaggttcttgcagtacggcaaaaaagcaagtaggttagtatgtcaaaattaagttatttcatcgaatgtccaacttgttggtactacaggtcttgctattgaggaggagggtatacgga

SEQ ID NO: 48179 - DNA, 437 bp, Manihot esculenta
  Intron number 1 from transcript cassava4.1_009154m (locus cassava4.1_009154m.g) derived from phytozome v7.0 (chr-ID scaffold06814; pos 946177 to 946613 reverse strand)
cctcacacgcattccaaggagattctacgcgggaggttggttattatttaggatcagtagtaattttaattttaattttttatataaaaagatatttgctgcttcaatttcttcatttttatcaaaattattggggttcttgttgtttcccctataaattctttgcctcgtgcgcctttggatttcagtttcttctactttcttgagcctccttgtactgtttctttgagtttgggttccatttctgcagcttttatcggagtttattgggtctgtgatctgaaaactcttcctttttctataaatcttttttcattttgatctttgaagctttgtatgaactgggttttctttagattatttgtttggactgataactttcagtttttggtttttgggttgcagtacgaatacattctgtttctactgatacaaaa

SEQ ID NO: 48180 - DNA, 1064 bp, Manihot esculenta
  Intron number 1 from transcript cassava4.1_007779m (locus cassava4.1_007779m.g) derived from phytozome v7.0 (chr-ID scaffold12549; pos 16104 to 17167)
gcaggtcaacgtgaaattcagaaagccttccacaagtatattctctcttcgcactctgttcttgtttcaaaatctttggctttgatgtcttttgaactcttgatttagttcctttctactctagatgtatttattgactatgcttttgaatgtattaaaagtcagagcatttatactcaattgttactttctttgtgcatgatttgaagaacattggtattgcgttagtctcatctgagggccttaatgtgtatttggaaggtaaaccttaggcttggtcctctcttttggttatcgagcattctttgtgttaatgatttatgaggtcccagtacaatgcattgtagtactgaagaaggaactgggtttaatgtaattgatatagagaggtagacatatctgtttctctgagtagttatacagaagaagattcccagaagatcttcatgatgtggttttatatataacttgtttgaattttctgttatagatcttgattttattgttcatcaatttgtatgtggtgcatagtatgtgttacttgcaagcacattcttttgaggtttgagacaaacaagaaattagagttcaaaaattttggtctgaaagtctataaggtttagaccccaaatgacacttcttaaccactttagggggctggagggaggtgttatatataaccaatccaagtggtctatgattgcatcttagaggcattcttgtcgttccatagatccaagtccaaggcctatctctagttaactaagaactttagcgtgccaccataggtggtgtggcatacaatgtggactcatcgcctgtttgggatggtctggtatttatttagctgtgtttcatattgttatgttttctaatgctacaatacttgctgttttatgtatttcattctatttgcactgtgtacataattttccacacaaagaggctaacagaaacctcccctcccacccacaactatttttatgccgtgtctaattgctcatcatgggccaacttatctttttgtaggctctctcttcaatatcatcctgacaagaataaaa

SEQ ID NO: 48181 - DNA, 550 bp, Manihot esculenta
  Intron number 1 from transcript cassava4.1_002721m (locus cassava4.1_002721m.g) derived from phytozome v7.0 (chr-ID scaffold11232; pos 355848 to 356397 reverse strand)
gtgactctcccttctctttgaagccaattgaaaccgtaagtctccatctgtgtttggctgatgtttatgttttcacacacgcactcacttgtttgctggttaaattttgttttatttatttttactcataatgtgttggaacatcgtgactatccctcgcatatttggttgttggggtttttgattgattgggtttacattttttttctttttgttatgtgggtatcaatgattaattattgtggttttcaatctgatagctgttcgaagcagcaactttttagctttcttggactttgatttttttttcttcctttttttttttgtttgtagtttgttttattttactttattcttttttcgagattttctctctgtttctctgtcctttctgcatatacacaaaattacattgattcgttgatttcggttgttttttagaattgaaactttgatgtttgtgggtttcttggatggggaaaaaaactgtgggcaattgttgtttgctgattttattgcgttttgaacgtttgttgaattttcaaaacag

SEQ ID NO: 48182 - DNA, 1057 bp, Manihot esculenta
  Intron number 1 from transcript cassava4.1_018588m (locus cassava4.1_017810m.g) derived from phytozome v7.0 (chr-ID scaffold02943; pos 871690 to 872746 reverse strand)
tcctaccagaaatccccgggttcagttctctcctggtaatactgctctttctctctttttcatttctttttctgattcttcttttgcaatccaattccttactactatatggataagttctggatttccgacatcttaaattaatgacttgttctttttattttaatttttgagcatgttatatgagtgagaaaatcaattttagcatcacttgtttggtgcatatatcgagaaccgctgctgttaaaacgtttaggatgctggttttaggttgaattcgtcacaaattctaaaagtcctttgcgtcctcaatcaaagaattacgttttactaaggatttgagtttatgtaatcagcgaaagctgagattcttgaaaaactataaattcgaatttaagttcccaatatactgcatattttgtttgggaatgttatcctgggtatgtgactggggccttatcactttgataacttcaaaacaaagaatggaatctagtaacttaaatccctttgaaatttttagggcttgtttcctccaacaaccagatcatcgaggcattaatttagatcaacaaaatgttaatttccatcgtgcaaaatcccatgccattgagggtctggactgtcctggtcctggatggcaccatactgacacattattggtagttctcaattataaataatacaacacatgtgtatctcattgctcttattgtcatatttttgttatatgaggcaggaaaccaaaatttcttcaaatgttaaacctgtctacatttgaactatcgaattttcatgtcctttgtgaattctccatactcgaagtgtcatattcagaatgcatatatctttataagttctaggcttagttcgtctctgttttgagctgtgaatcggttcattgaagatttcgtggctttcatattatcttgattggtttttaaatttttttctagtcccattggatatatgtcttcagagttctatgcccaccaagttgtcgttcaatttgaattgtccaggaaaacttcaacttgctacctccagaagggcattc

SEQ ID NO: 48183 - DNA, 676 bp, Manihot esculenta
  Intron number 1 from transcript cassava4.1_033427m (locus cassava4.1_033427m.g) derived from phytozome v7.0 (chr-ID scaffold07933; pos 186951 to 187626)
ttgagattgttgatagaggaggcgcttctgttcaggtatgcttgtgctttgttgtcttcttgggtttatggcaaagtatgtgctgtgcagttgatggtggattttccttttttcttttttgggttcatgaaactgggttttgattatgagatgccttttggatcagatatgagttgcttggttgtgttaattatgctagtgaaatttctgttgatgaaggaagcataagtaatcagaatatgaattggtttcatctgggagttgtctttgagatttaatgatttattcattcagtttcaattcagcatgctgattttgcttcctagtttatttgaattagtttcattttggggaaagattttgcagcttgtgaaaaagttacaattttacatatactttttcttttgaaattgactttgatttttatgtgactatttatggtgggaattaatattgtttgtgatattgaatgccatccacatttgagttagagttgttcttattattgtgcagtagtacttgtttttgcataagtttgaattcgtagttgtagcttaacttgcttttatttatttgtttatttctgtatcaatgtgtttttctgctcatttatgtccttatgtaccttttaacaaagggacattgatgaatcttgcttctgggtaaggttgaaggc

SEQ ID NO: 48184 - DNA, 428 bp, Manihot esculenta
  Intron number 1 from transcript cassava4.1_005723m (locus cassava4.1_005723m.g) derived from phytozome v7.0 (chr-ID scaffold03235; pos 179830 to 180257 reverse strand)
ctgccggcatctgggcctgttcgccgttcctctaggtaattggataatctcccctttttagtgaccattttgtccatatttgacttggcagtgcccttgcttttgggaagtgtattgattggattttgagcttgtattttgtttgggggaatatggtttcacctcagtcttcctattttaatcaattgaagtttttccatttaagtgtctgtgttcattatctaagcaaaatcttccattatgaacaatgggaaacctttctgccggtgaaaattggaatacaaaagagctaactgtaataaccaaatattggacggttcttaaatgctatgaatggtcttctttgtcttgtttttccagttttgatgattgattgtttattcggggtgtttttcccctttttctttggtgtgggtttaggttgcaca

SEQ ID NO: 48185 - DNA, 705 bp, Manihot esculenta
  Intron number 1 from transcript cassava4.1_019888m (locus cassava4.1_019888m.g) derived from phytozome v7.0 (chr-ID scaffold08265; pos 1713153 to 1713857)
caattcttcctgcttctaaaatttattaaaatcaggtactaaatctctcttttcttctccacttttctacagttattgatagatcttcttcattttccctcggcctttatgattggttgctgcttttgttagtatcctccttttttctttttggatttgtttgtttgctttgagcaaaatgggaatttggggttcgtcgagtttctgatgggttagtattaggcagaattttattaacggttagggttgcttagttttcgtcacctttctgatttaaccaaatttcattaggggattttgtttattttgagtcgagcgttctgtgcatttggttttgatgtttgaattagggattatttgattttgaaatgttttcccattttcgttaaattttcattatcctcttgctgctacttggtttgagttagtgtaactgtcgatttggggcggggaaaatcacggaacccattagcagctgttagtttggcatttttttcaaaattgtttttaatcaccccctcctacagttatagctgtttggttgaggagaaaatgccggaaaagtttagcatttattgcgtatttattcaagcatttctcaacatctttttatttcaaaagttagtagctcagcttaacagcgtcttcgctcagtcctaattttgatcaattaaatcaaattacagatccttctcgtgaagaaca

SEQ ID NO: 48186 - DNA, 649 bp, Manihot esculenta
  Intron number 1 from transcript cassava4.1_016805m (locus cassava4.1_016805m.g) derived from phytozome v7.0 (chr-ID scaffold01072; pos 35476 to 36124 reverse strand)
gcagaaccagctgctccactctttctttggtatgtaaatatttctccattattacttaatttcatgaaaaatatatatatatatttttaatttagctgctctaatagtccaaaaattcctgctgtaaacatgatagttaaataattcttgaattatccatctgggtttggattgttacaatgctaattcaattggattttctttttgggaatcaaatcaatattcaaaggtgagaggatgtcatgtaatccactgtttagaacccaagaggaagataaattctggaggaacctcttctttcattcatattaaagcagaggatatttgataggctattaataataatgggattgcaatttttttactgattaatctctttataattattaaatactgattaataaataattttataaaattaaaagactgactaatgaattttattgtataaaagagttacgattaaaactaagtaaatttaaaaaatatcttaacctatcttttaaaaccaataggtcaaccaatgagttgcagagtaaataataaattttcgttttttttttgttccttctttttcttgctaagtaatctgcatcatctataaatgtgagcagcagattgccagcaagtcagctacctcaagaagaag

SEQ ID NO: 48187 - DNA, 1048 bp, Manihot esculenta
  Intron number 4 from transcript cassava4.1_010836m (locus cassava4.1_010836m.g) derived from phytozome v7.0 (chr-ID scaffold10493; pos 613255 to 614302)
tggatccttgcgtctagagaatgtatgtacatgttgaagttttgagtttccttgaaacaactttttatttacatttctgtgccatcgactgttgttcatatgccaaaatttgatttattgctgtcacaaggaggtaacatatctaatatatttatgtttgcatctgaagttctgaacttttatcggtgactctttgttcttcatggttgtagaaatgggagaactaaatctcttaggaccataatttgtatatttgagcatagccattgatttgggaacttcctttttaagttaattgctttatgttgctttgcttttcctgatgatataatattgatgcaataccgtaaacatccttttccttaaaatatggcttcatgagttcatgttgatcatttgaaatagggaaattcattaaataacatggattttaccatgttctttcaattgacttggtatttgaactattgaagttgtattctagtgaacatgtatactctttgatttgttaccatcaagtacttagccaatggaaaaagttataatatgttttaatacaaccacagtgtaaggtcataaaagaccagttgttcattctcaaatgtaaaattttttatacagtgaggacagaaatgcatgttattaatgtgcttagtattgtgttttactatgcaggcatcgggaaatgggaatagtattaaagaagtaaaatggctttcagaaattaaacattactatatttttttagttaaattggtgctcggtaacaccaaaataaataattaggtttcaatagaataaaatttcagttgaagggtttatagcaaaaggttgaagggcttcgcgattgatttggcatatggatgtgtctattttgtatattttataaaacatgacaattgctacttagtttatcagttgatatatgatgattcaaaacatattatccttttattgccatttttgagatattcatgaaaaacaattttggtaatgattccccttacatgcaggtgttgacactgtttgccggagcactgctggagaa

SEQ ID NO: 48188 - DNA, 891 bp, Manihot esculenta
  Intron number 1 from transcript cassava4.1_018614m (locus cassava4.1_018614m.g) derived from phytozome v7.0 (chr-ID scaffold06871; pos 63435 to 64325 reverse strand)
aggcttacgctgctcacctcaaacgatctggcaaggtatagcttcttctattgctcttatttccgtccattctatctgtaatgtatattttttagggtttttaccaattagattttattttggaattgctgtgttttaagtgctgcgctgtcatatctgtgtttgcgggtcactctatgttcttttattcattgatagatactaagttatgttccatatgtgagatgcgaaaattatgccgacaccttgtgggttcatgaactgtgttgtgagaatggagtgggttgttaattgatgatgtcaggtagaactgtgccttgagcgttaatgaactatattcttcagggtttaaggttaagaacataaggtgaacggaaatatgccccatctcctttatgttcactcttcactgcatttaggcaaaatttttatcataaaaaatcacattgtacatggatctcagctgcctgccatatgatgaggtctgaaacaacagttaggaggaggatgcactctcggaaattgagggctatgttcttcagtgtttttggaagacatttgtgttcctaattcttgaaggatagcaaaattctatagattgtgcttttgacttccatccatctttaatggatgatccttgcttatcttgaaaattttagttcattggtgatgtgggtgtgggagatttttaaggtgaattggttattctgatgacaactttttttatgttcatgacaaaagagaatgacctatatttgtttgaattttctgttgacacattatatatgtaactgttttgtttttgcattacactatacgatctttattgatatttcatggtgttgtgggtttacagattgagttgcctcactggactgatatcgtgaagac

SEQ ID NO: 48189 - DNA, 959 bp, Manihot esculenta
  Intron number 1 from transcript cassava4.1_030804m (locus cassava4.1_030804m.g) derived from phytozome v7.0 (chr-ID scaffold00571; pos 3855 to 4813 reverse strand)
gcagtgtaccacgtgaaaggtaagttcccaataatctccagtgcaacattataatctttaacacattatgtgagtccatgtgaggtttgagaagctctgtttgagatgaaaccgtggaaggctctaggctcaaatgggttccatgcaggtttttttcaatctcaatggcatttgataggaatgagtatggttgaagaggtgactagaattttaaatggaggctttataactaatactctgggtagtattttgatctctctaatcctgaaagttcctaatccgatacatgttgttgattttaagccaatagctttatgtaatgtggtctataatgtgtttataaaaattttagctaatcagataaaggacattctaactagcataatcagggaaaatcaaaccacttttgtgcctgggaggaatatttctcataatattattatggcctaagaagttatgcattcaacgagatttaagaaagataataagagttttatggtgttgaaaggagaacttgagaaagcttatgatcgtgttagatgggatttctttcgggacaccttgaaagaagtcatttccccttctcattttattaatgttatattaaattgtgttacatcttcaaggatgtaggatttatagaatggaaaggtaactgccccattcactcctactagaagtctctggcagggagaccctatatttttgtacatgtttattctttgtatagagcagcctgcacatggcattactaaggcgatggccaatcgtttatggattccttccttttttaagcagacgtggtccttcactgactcagctcttttttatagatgacttaatccaatttgctggagccacgaattcacaatgtgaggttttaaataaggttttggaggccttctataagatctctagataaagagtgaacacgaataaaatcaaagtgcttttctcta

SEQ ID NO: 48190 - DNA, 931 bp, Manihot esculenta
  Intron number 1 from transcript cassava4.1_026791m (locus cassava4.1_026791m.g) derived from phytozome v7.0 (chr-ID scaffold07951; pos 57428 to 58358 reverse strand)
cttatcaaggtagtgatatgcactattgcttctttcgctttccatgcttatcaacaccatgtttgcatggtctactattattgaatatttttgtccttccttcaggaacatcactattagaataactactcttgccatgatccaagctctactcaattaaataaaatcaataattatatttttatttagaagagttaataccaatactcttacaaaagagcaattactataaatatcacctccatatcgacagtttacgaaaatatagaattgtagtttacacgaaagttaatttgatatttctacttttacatccatcccatttaacttctaaactttataaaattataattatttttttcctaactttcgtctgaaaaatcacttggtatttttgtatttatttatattccattttatatctataaggttaaataagatgatataaatttaaattatcttgaattgcacataatatttaaattatttaggtttattgaaatgttgggtttattttttattttgagaatcattttcaagtcagtattttgatttgatctatccatcgaatcgcctaaataaaacatcaatttgtaaatcaaggattgcatgttgttgtcgataaagagaagaaatgtttttaaatttaatttttgaataataatattaacttggaactaagttaaaaggattaatatgttattaaattttaatttatattatactattttaatgtggaaattctatatctagcaaattctacctcctaggcttttgataatcacttatttattgtagcaacctgttattcagattaacaaacatttacaaatattgttaaaattaaagcttaattttatgtaaaataattacatttttatattattatttttcaatattcaggcagagaatcgaatacaaccagctttga

SEQ ID NO: 48191 - DNA, 699 bp, Manihot esculenta
  Intron number 1 from transcript cassava4.1_009240m (locus cassava4.1_009240m.g) derived from phytozome v7.0 (chr-ID scaffold09150; pos 365141 to 365839 reverse strand)
gctcgctttcctttgcctcggcgtcctcttttggggtaagatttttctagggtttcttgctacttgtgattctttgtttcttgcctgggttttgcttttcttctttttttgaaaaaacattttggagttctttcaatctgtataggtttctttctttttcttttgatttctctgggtcttcttctgaaattttattattccttagttgttatttcttggtttcttgctgtatgaatcttttattcgtgttttctgtgtcttgactctgtttgtggaaaagaatttggatttgattttaatttatttagggtttctttttattttgatttcatttcgtagtatttcgttagtttattattggttacatacgggtgctttgttgtttctgatgtttatatgcagtttcgttgtctgaaatttaaattttaattacggtattcaaattctctatctttctcgcaactttaatgtccggtgttgtctgagctcttgaagtttttctgatgatattattttgattatgttggataagggttattggcaatttcagggtaaatattgggtttgaatttgttctttggtgtaatatttggttataatatatttacgtttgttgccttgttttattcatatacctttttagtacctttgcgtagtgagcctaataatgtttgaaacaggttttatattgcacaccaa

SEQ ID NO: 48192 - DNA, 627 bp, Manihot esculenta
  Intron number 3 from transcript cassava4.1_008990m (locus cassava4.1_009015m.g) derived from phytozome v7.0 (chr-ID scaffold04767; pos 78239 to 78865 reverse strand)
aaataaattagaagactccattcttgacttgcaaggtatacttattttcttattctctatggtacttactaaaatttcagaagaatcaaaactaattaagtcaggtacatacattccttatggacgaagttacatccaaagatatcatacaattatcttctaaatagagtcattgtatcatgttttcaattttcgaattcaatctagccttgtcacagttgctgatcatcaaaacatcaatgattgactctccagataccataggaccttcttgattgcttcaggccccatttccacagtgcctgaatgttttgaatttattttatttatataaataaatattatagttggtcatggatgtttctccaatataagcaccaaataatgtggatacaaatagtaccattcctgttaaaaaaaacaataaaaaacgaatttaatctcaactttatgtgatggttttttttttttttgggtgaaaagttgtattgaattcagaacccttttttctgtgaagttatctttttattttcctatataggcatgttgcatttatcccccacattttctctactaaccaattttctctcagttgttcttggtaagtatcattctgcgacccagcct

SEQ ID NO: 48193 - DNA, 829 bp, Manihot esculenta
  Intron number 1 from transcript cassava4.1_011624m (locus cassava4.1_011624m.g) derived from phytozome v7.0 (chr-ID scaffold12753; pos 232892 to 233720)
gtttcactaatctcaggtaaattatttcttatttttctttatgttcttaaacatttcttttaaattttttcctctcttgttttctttttaacattaacgattttattataactatggatatgataggctttgcgtgtcattcgttacagtcaactttaatgataaaatcgtactatttccgagtttttttttagagtggggttctttgatgtactcattatcttcaagtctgcatgtgtgctgaacaattacctgtactagggagaaacttcataaaccacaggttttaatggtgaaaaataatagtaataacaaaaatgacactaaaaaaaacctatctgttgctgcaacaacttttactaaagatcagatcatcatgtacgtacagttttgcatgcatggtctgctattttcttcagaatctattgatattattaattaaacacatcctcacgtgaatgaatgttacaaattgaatgagctgtaagtcagatttagccagttctctatgcttaggatgtcaacagctaaaatatctgcaaaaattaaaatatccatatcaaatttgttaaaaattaatataaattatctaaattcatttcatacttaattattattattcgattgaatcaaatatccgaaaacaacggacacattcactcgtgtccggcctcaaatagatataggtcccatcttgctcataattgatacaaatggaccacaccatgctctctctctccccatagtttggagaaatttctctttcattcgttgtttttggatttcagttattttactaatttgaagttttttttatcctagttcaaca

SEQ ID NO: 48194 - DNA, 579 bp, Manihot esculenta
  Intron number 1 from transcript cassava4.1_017628m (locus cassava4.1_017628m.g) derived from phytozome v7.0 (chr-ID scaffold03241; pos 397293 to 397871)
ttgagcaggttctctccctctctctccttatttctatttagaagtgtttggaattatagatttcaagctttggatttcatttcacgattgcggttttgttgctgattaattgtttttgggattggagtagctttctgatctatgcttaaattgccgtattcttcaattatggtggatttattttagttttcaattgcctagtcatgaggatcaatgtagtaaggattaaggataaaggatttgtctctacacttttttctaaatattgctttatgtttctgttggaaaataaaaggaaactcaaaataaaaaataaaaaatatatgataaaactgaaattaaatatttaaaaataagaaatagatatttcaaaaccagacgaaaagaattcaacaatgtacctttggctttaggcagcatattgcttaatcagaggccataaaacatttactatatgggtttgcttcatgagataaagagagccattgcattgtatatgcatgtaccaactaagttaagatttgtgaaaatgctgtgttgactgaaaaaccatttcataaattacagtactttaactac

SEQ ID NO: 48195 - DNA, 951 bp, Manihot esculenta
  Intron number 2 from transcript cassava4.1_015947m (locus cassava4.1_015947m.g) derived from phytozome v7.0 (chr-ID scaffold03150; pos 588170 to 589120)
ccatcggtgtcgaattcgccactaggactcttcaggtaatcttcaaatctttctctctatcctttgattttctctgttatctgcagttacatgtcgatccgttcatcttctggcttctgaatcgttctcttgtttattgcctagcatattatggttattatttttgtgatacggaaatgaaatctcttagattttaagattggaaaattgttgattggaacttcttgtcattttctggacaaggtggacgtagatacatacttgctggtatctgtattgttttagatttgtatattggctttccaataaggcgatgaagcaaccacagactagtggctatgcttgcagaatgagttgcgggtgagatatttgtgagtgggaaaaataatttcttccgattccactaataacaggccttaattgaagttcagcactgtgggatctattgtgcaagagggagattgcacgtacccttatactgttaatggcttcgtgtgggagaagccgagtgtcttagaagttttcttctggttgttgagcgatgaaatatcaccaactaatttgttttcatagctaaagatacatctttacatggatccctatgatcttctcatgtggaactgacttgattgatgaagtgctattgatgatctttcgttacaatggcctattgtcatactcattgtcaggaactgcaggatttagagagtctatgacttagttctttattctaatccgagtgttggtataccattctgtaaagagaaatgtccattaatgatctgaatgaatgacacctcgcatggaggtatcaagatatgatctaggcaataagaactcatgtggtagtgggtttcatctattgttttcagatttgtgccatctaggctataactgatctgcattttttcccttttcttatatatatgtctttttctctgctacaggtgc

SEQ ID NO: 48196 - DNA, 518 bp, Manihot esculenta
  Intron number 1 from transcript cassava4.1_029306m (locus cassava4.1_029306m.g) derived from phytozome v7.0 (chr-ID scaffold10563; pos 204376 to 204893)
atttctcgagctttgttaggcagcttaacacatatgtaagtatttttcttgtgatttgcagatctttatactgagtgaaagacaattacaagtggatgtgaatgctcccatgttcatgaaagagatagaatatatgttatttattcatattttatataaataaaatgatctttttattattttcagttgagatccagttggtcccttttcctgctatttgtttaatgagttacaaaaagatgtcttcttttttccttccccatctgagaagagtgggaattcacagatccaaatggaaaatgcataaaactattatttggttactttagcatctatagtgcttggactttagaacttgtttgatatttgatgcatcatattttatatcctatgtagttgttgagagttcttatgggagtttttagttcaaagatcaactgaacttgctttatcttttgtgtttgatcatgaaggaaaatttggtttgtgtaggggtttagaaaagttgatccagatag

SEQ ID NO: 48197 - DNA, 854 bp, Manihot esculenta
  Intron number 1 from transcript cassava4.1_028598m (locus cassava4.1_028598m.g) derived from phytozome v7.0 (chr-ID scaffold10980; pos 154546 to 155399)
aggttaaacatcgagagtttagatcagctcttgaggtcttaggcccttcctttaaggatctgctgaccaaagcgtcttagaaactagcatggatgacatcattgaagatgtggatgtcatgctggaagatggggacacagtaatagatagatcggattcatgtataatcctacataatctcgaatggtatcaattttggtacgtagaccaaataatacaatacaagccaaagttcctagatttatggagatatagaagagcgacgtaatttttgtttttctttaaacgaatatgatattgagattttttaccggagcgtgattaatttctaagatcgctcctgactctagaccttttttttttgaaatagttcacttactcatatataatatttacgcctgtaaaagaatcatttcatttatatttttcatttatgtttgaagagagcagccagtattcagcacaagattttttcttaagttgatccctactcccatgcaaagcataaaaggctttccgctcaacaataaaagactttttttctttcaattactatttttcttaggctttatactttataaaccctaatatgaatctagatcatttgcaagataataatttgtgagaaaaaaaaggaaagcaaatcaaataaagaacaggtagagatatatcagaaattttgaatttttttccgtatcagacattttgagagaacaaaaggagaatattggggtgaatcataaaagtttggatagagccaaatctaaatattgattagataagcgtcctatagtaaaaggagtaattatgaacctatagaccatccccaagaccaacgaagttaaagtgctgga

SEQ ID NO: 48198 - DNA, 774 bp, Manihot esculenta
  Intron number 1 from transcript cassava4.1_009233m (locus cassava4.1_009233m.g) derived from phytozome v7.0 (chr-ID scaffold03264; pos 326642 to 327415 reverse strand)
ctagttcttacaaggacgagcttgttcaaacggctgttagtttatctcctttccttcttcactttctattgatttcatgtgccatttcagtgcctgatatgcgttttcgatttacatctcgtttcgtttttgtttttgtaatttctcgctaaatgaagtcgaatttgatttattctctcgtattttattgaattgttcaagttatcctattcaggattctgtaaactttcagctctatcttatgaaaaatatatattttttgaattaattgattgctctttcttttgtgtcccccccctccaactccactattacgattaacatttcgtttgatgtctcgatatattttcggtttctctctatcagtcaattagtacttttagcttttcagtttaacgaaatcataacggctgataatggcatacctctttgaaacaaagattacaagcattgcaaaaatgggtatcttgttagacaaagaggtgatgtggtgaaaactgcggaaaatgccttctgtgatctccatgcagttgatattatattgggatcgtgattcatttcaatcatcctagtttctattattgagtcacctcaattccctagttcaactcttcccaaatatgctgccttagaaagttttccttttctcaattgatatatgtaaattggtttatgatttttcattgtctatgatgtttcgtgctatcaactgcctttggcttgtttcttgattgtgtagaaatctattgcatcgcctggtcgcggcatcctcgc

SEQ ID NO: 48199 - DNA, 361 bp, Manihot esculenta
  Intron number 1 from transcript cassava4.1_032568m (locus cassava4.1_032568m.g) derived from phytozome v7.0 (chr-ID scaffold03264; pos 278286 to 278646 reverse strand)
tggaggtgttggctcggctcttgaggataggcctggtgaggggataaatcataatttgtctttttccccttttttcttttgtgaattcaaaacttttagctaatctgtgtttagcgcttttgcttgcatatgctctgtttgttagctggtagtatgtcattggaagatatgatagattctgggcaaagcttggatttctttttttaattaaagagagcaagattagaaacataaatctgcacgataaactgtcgatgatactctctcttcagtctgctgatgtctttctcatgttatcaagaatgaccttattttgtacttgctgtttttcttctttttttttttaatggacattacagat

SEQ ID NO: 48200 - DNA, 612 bp, Manihot esculenta
  Intron number 1 from transcript cassava4.1_006066m (locus cassava4.1_006066m.g) derived from phytozome v7.0 (chr-ID scaffold07670; pos 23408 to 24019 reverse strand)
gccgcagagtttcaggtaattttggggacgcaattgggtttttactctggaaagtataagatttgcttcatgtaagactcgctgttctatatcttttgacaagaaaaactacataaataatcaagaggaaacatcatttgagtctagttcagaaaatcgggaaattgttttttcggagaacaagtagattggctgatgcaggggaatccttattgcttcctatgctgcaatttcccccaattggaaatgcaaagtgcaattgctattctaaataatgtgcaacttgggatgcaattgctttacaagtttcttagttttgaacagagagtcttgcattgaaactgctatactaaacaaatctagcttggaatgttggagtataattcacttagctgctagtgatgaaatattttgacttaaatcagtgcttttgaatcagttccagcctaacaatttgattagatcattaaaatatatagtgtggaatttacttttacatgttatacttgaaaacacatatgtcttgatgcactctgaatttgaatgacacggtttacctttggtatttttgtggcagggaaactgtggattctttctcaatctcagtgtatc

SEQ ID NO: 48201 - DNA, 983 bp, Manihot esculenta
  Intron number 1 from transcript cassava4.1_017209m (locus cassava4.1_017209m.g) derived from phytozome v7.0 (chr-ID scaffold01195; pos 51443 to 52425 reverse strand)
aggtcttttttcttttcttttctttcctttccttttcttttggaaatttcaattttataattggagtgtgttacattttacgtgtattggttaatgtaggtttatatgaacggtagtttagagcatggttaggaatttgcattttgtgtttgtgggcataagttgaaaatgattgaaaatatttctgtttattcttgctaaaatcaactgggccattaggttgaaaatgcatgattgtcttatttgttcttgaaatgattttcttgaaaatgcatgtttctgttttttcttgaaaataatagaaaatgtttaaactggattcatgattgccctgagttgaaaatgcagtttggtatctaatggcccagtttcaatgttgcatgtgttaattttgcattcggagatcgattatgcagccgttgattcccattcttccatgtcaaggtgatctgttattttgcacatctttttggattacttcccacttttgcaaatgcatgtttttagctgtggcattcatagctgagggaatgtaatccgtttctatgtctgtttttatcataacattttgactatagccatggccataacccttgtgtgttttggctttttggattctgtttcataaccctgcttttagggtgtttaaagggaattcgtaattggaatctcttcctgctgctagtagtcttgcatcgctaacctcttgttgcatgtgataaatcagtttggatcctttttccttaatttacaatgattttgagtttcaaccttcattattatgtcagcagcctatgttaacattgagaagaatctgttgtctgaagtatatgtttcaagcctgaatatgtcctcatccataagctacatttggtatctaaatctagatgttcctagaattgaactatgcatctcattgggatttttgtttctctttatgtttattttttacattaatgactgtcaaagattcactgcagggc

SEQ ID NO: 48202 - DNA, 789 bp, Manihot esculenta
  Intron number 4 from transcript cassava4.1_007434m (locus cassava4.1_007434m.g) derived from phytozome v7.0 (chr-ID scaffold09107; pos 11482 to 12270)
taaaacttcatcgtccagttcttcattcaacctctgtaagtaatccctcacaattgtgaaattattttgcaaaaattgcatcttataattcatgagctatcaaataaatttggcctaataggactaaaaatctccatcttttcgcgctttgatattttagttgtaaaattttaattttggccctacatactaaaaatttaaaatttgaaaaagttttatccaaatccaaaaatgaattcgagagaagtttgataatgtccaagtggccatctatgtggcatattttatttttttggtaatgaaccctgcatgatatatcaatattactaatattgatttgctttagtttatggaaaaccaaatcaaatcgaaaaataaatatcgattacatcgaactgaaattcccaattcccatatcagcaacaaggaaccaaaacaaaagtttgaattaaaatttgcaagcgacagaaagcaactgctcacccagacacttctcttcataccacctagcttccttccttctttggatgatgagagcccatccatcactaatcttgagcagcttcttctttttattcttattcttcactagagatgtaaaacgataggatcttatctcttttgcctcgaaagtggaaaaaattgtagctatttgggtttattacctttggatcttcttctaaagaagtaatttgttgagatccatgctttaaattcacctgtgtttttatgcctccaagtttgcgtgtccaagccgccatacacaaattggagataagggtttttgat

SEQ ID NO: 48203 - DNA, 873 bp, Manihot esculenta
  Intron number 1 from transcript cassava4.1_006305m (locus cassava4.1_006305m.g) derived from phytozome v7.0 (chr-ID scaffold07330; pos 62775 to 63647)
gctgttttcgccgccatattcttcaagagtattaggtaataactgcggaaagaggaattcagtttctttgattttgtgaaagagaagatttgcaatttctaacaagcattaggaaagcccaattattttttttctcctttattttcgttttcggatctcaaaatggcgaagaccatgagaattagagaaattttaagtaacgaaaggtataagacgaattcatacttgattatcttcttcatcgtcttcgtcgccagttttaacatttagcaattcttcccatgggtgagtcctctgctgttcttcgattgttcttttcttccctagattggatatttcactttcagcatccatgtcagttcaatttcttctttctatctcccgcttgacattttactaatgggttcaatgttatgtgtcgtgaataagaggggatgttcatgatttgttcctttgatttatcccttctttagtaacagtggattagctttggtgagttggatatccttcttgctccttgctctgaatttcagctcatagttttggaattttttgggactttagactgtgagcatttcttggtggcagttcacaatcatagttctacctgcaaatagcaaaattgtttgcgttggacataattaaccatacaaatccttttcttatggacaagggtacttgatggattgtgttcaaactgagctatttgcttgtgcccttccataaatcatcgttgttcttgttatgatattttttttctttgcaaatctgttttttcttgtttgttaatgatgtttcttataaatactagctcctcagttcctaggattggtgattatgattgttcattcttttcaggggtggtaagtcacc

SEQ ID NO: 48204 - DNA, 971 bp, Manihot esculenta
  Intron number 1 from transcript cassava4.1_020172m (locus cassava4.1_020172m.g) derived from phytozome v7.0 (chr-ID scaffold07301; pos 281647 to 282617 reverse strand)
agccttgagcctgcttgagtccccgattatcccaggtcaattcgcttccttttttttttttgtttggaaatcgttatccattcctcggttagcatgttgtacggggctcttcgtcgtaatcatttgtatattgcttttctttcccctttctaaagaatggtgtacgaggcttggagctaagttttgtcttagcttaatgatcttgaaatttctttaattgatttgctgggcaccgtcagttttttcttgggctttatttcaagtctctactagttgtttaccgaatttattttgtctcattagatccttgttttgctctctgttaattttcaatttaggtagcttttccttttctgtatataaataccttgtggaatttgaagataatccggaaactagtgttattactggtagagtataaatttgtgtggatttcatggtagatgacagtctcttttaactaattcatttacaagactggcaataggatgttacatttagtttgaagcttttggaagtaaagatgtaagcattttggggaaaaactgttcacttatctgatatttcatatgtcagttctatgccaaatctctgccttactgcaaaggtataaagtgtttttctcttcccctatcattattattattattattttttgccataactatatttcatgatcttctgacccacccttttcctctgggaatgtatcttaacaaccttattccttctctctgtctcttgagcatttgagttgttgcattcttcattttgaaagccgtgatcacaattgtatagttctttcaagtttatggtgagtgaaggtagtccaggataaattggagcttgggcctctgatgaagatattaaaatccagttatatggaacaaagaaataaggttgtacatatcatgacttattaaaagctgatgttttaactgttgaaatttcacagatttccaaaggccaca

SEQ ID NO: 48205 - DNA, 909 bp, Manihot esculenta
  Intron number 2 from transcript cassava4.1_026474m (locus cassava4.1_026474m.g) derived from phytozome v7.0 (chr-ID scaffold04313; pos 124079 to 124987)
ccccagaagtaagcccctgaaatatttctttttccttaatgcattactaaggtagatgcaaacttctgaaaagtttattttacttttaactcttaagtgcatcattatgtttattgaagttggtgcagaaaggaattttcatgacatgaaagatgaaataaaacattgttaagaaaaattacaagtcttgtagtgttaatcaccttttggtgaaaaggccaaatttgcccttaaactataaagtgggaggccaaaaaatactaaattttatttttcggtccaaatgtgttcttgaactactattaaaaggccaaataaatccaaataaggccaaatagactaagtagagcgtcgcacgcacattaaaaaccttgacaagtgatggcctcatttagtcttgtaatgacagttcatgggaaaatttggatagaaaattgaaatttggcatatttggccctctattgtatagtttaggggtaaatttgacattttagccagaaccattttgtttcattttctttaaccagagtacttgggagagtatcattgttttgataatgctctcctaacaagcaggcaaagaaagtatttcaatggtaaatccattcaggttaaattggaatttaaaaacaactttccaagtaatttggtcatctgaaaaatctatttagagaatcaatgacttgttaattttggttgctgacatcagttgtttattatgattccagaaaagggctgggattgcatttcagccttaatcttttgaatttatcactgcatttattagaatgaaacaagggtttggtcctgattcatccaatcgaatgaaagtaatttgtttgtcttggtattttctattactctctgtttctagttatatccaacctctgtgaggtcaactggtgctgg

SEQ ID NO: 48206 - DNA, 730 bp, Manihot esculenta
  Intron number 1 from transcript cassava4.1_030703m (locus cassava4.1_030703m.g) derived from phytozome v7.0 (chr-ID scaffold03743; pos 142047 to 142776)
tgtcactgtcacgcctgggaagccccaggtatcccgcgtttttttccctttttgttttttggattattattattattattattattatgatttttggtgttatgagcttagttaagcatttatgttaacgaggattagaggaaattgtttccttttttggtttgtaggataatctttttggataattgtggtagttgtaatgtcttctatctgaactttttttttctttccctcttctgtaaatctggttattgactatgttacaatgcgctgtgctttgtctctttacttcaacattaaaagttggattcttgagaggtcatcacttattaatgagtataattaattactgaatttggattctgattctggttgtgtgttacatattctagttgagagggctcatatttcgttttattaaatcttgaagaaaaatacagataaactttttccaagaataaagtttgtctgcatgactaaaatatggttttgagtttcatattctctgattttctaagtttcagggtattaatattgtatgtacagcttctctgcatagcagagaacagtgtgcttaatcctacctagagcccgcaaatgtgggattgcttcgtgcactgggtcacccccttatgtactactggtatcatcatgcatatacgaaatatgacattggtttttttgttatgattcaggtgcagatcggtgcacattcttttacatttgacaa

SEQ ID NO: 48207 - DNA, 682 bp, Manihot esculenta
  Intron number 3 from transcript cassava4.1_020993m (locus cassava4.1_020993m.g) derived from phytozome v7.0 (chr-ID scaffold04209; pos 548757 to 549438)
ctacctttgtagttcttgataggtacagacacatttctaccgaggaaatatatttcaagaagaattagttttggagaggcaaatgcttcttttttattcataaccgaggtttctttttgctttgcctaactagagtgtgaaatagaattttaaaaagaaaaaattactatttggtcatatgtaaaactattaattaatttatcgattttaaaaaatataataaaatacttttaaaattttaaaaatttactaattaattgttttgttaattttactcgttaaatattttattatttagtttttatagtataaaaaattttattaattaatttttagttttataaaaatatttattaattaatcgtttgaggatgatttaattttttatagaacatttaagatttaaaattaatgaaaagattagttagtaaattttttaaaatttttaaaattttttatgtattttttaaaatccaatcattggccaatgaatttgctgtggaacaaaataataaattttccttttagaaccgcttcttttaattcaaaaccaactttctttttgcattgtaaaagtagacttttaattatccaatctatttagctgcaagatgaaggctattgaaaaggattggtttgaattataggcatctgagaaagaacaaagcattctttgcggaga

SEQ ID NO: 48208 - DNA, 667 bp, Manihot esculenta
  Intron number 5 from transcript cassava4.1_014994m (locus cassava4.1_014994m.g) derived from phytozome v7.0 (chr-ID scaffold03283; pos 61263 to 61929)
ttcccttcagtcttataggagttttgcatcatcaggtagcatgatatgatagttataatgtcattttattttattttatttttgtacacagcagaactgatgctaccagttagaaaaagaaagcaggaattcgtttgaagtgatgcataactagtggttttatcagcgtgtcaatggtactgttacacctccagtaagcagatcacttggtctgctccaactttgctaaaagaaactttttcagtctataaactattattggctgacattttgcttcttgctgttttctatcacgtcaccaacctggtctaaattgacaactgaaggaagcagtgtggttttttaaaaaattcaatagttgaatttatcagtggaaacttcttatgccagcaggttcatcggaggctttacaactttttgtaaaattagaacctgagaataagttgcatcatttcttcatctctgaataccagttttttgcacattgttgttgttggacttattctcttcccccttttctttgcttttcgtttttcatttttccgaatgaaaagggtacctttgatgttcggcaaagtgaatttatttttgccactgtacctgtgttcttatctactgcttggttgatacagttacaatcctttcaagttgagaacatcaggcaaga

SEQ ID NO: 48209 - DNA, 464 bp, Manihot esculenta
  Intron number 1 from transcript cassava4.1_020918m (locus cassava4.1_020918m.g) derived from phytozome v7.0 (chr-ID scaffold10813; pos 27312 to 27775 reverse strand)
gcaatgtaagttcacatctcatattcacaccgtcacctttctcttctctccctctcttattatttaaaaatttactatttaatttttataatttaaaaaaattcactaattaatttattaattttaaaaaatttattaaaatatctttaaagtatcaaaaaatctattaagaagtcattccattaattttattcatcgaatatttcataaaaatatttaaaaatttaatattttaatgtccttttaaaaattaatgaattagctaataaattttttataatataaaattaaataataatttttttttctttttcttataaatgacctattcatacaaacttcaaatctcgtagtgttagaggtgattcgatactaatgagttactgcccattgttcgcatgtttcttgtatatgaaatttgtattacagataagcagatatctgtccaatcctcagtattattt

SEQ ID NO: 48210 - DNA, 543 bp, Manihot esculenta; identical to SEQ ID NO: 47273
  Intron number 1 from transcript cassava4.1_004795m (locus cassava4.1_004795m.g) derived from phytozome v7.0 (chr-ID scaffold02792; pos 73533 to 74075 reverse strand)

SEQ ID NO: 48211 - DNA, 685 bp, Manihot esculenta
  Intron number 1 from transcript cassava4.1_009685m (locus cassava4.1_009685m.g) derived from phytozome v7.0 (chr-ID scaffold03693; pos 108907 to 109591)
gtctagaagacttgctctcctaaaacttggtgccggtaagcaacttcaaggcctgcccttgctctcttactacagtactattatctgtaaactgtaaatggttgtatatgtgattgaattatctgtcttgctgctgagaatcccaaagaagggaaatgtagaggaagtgtttgatttttgtctattggatagtttttttttcctcctctttttgggttttatacagtgaagtggttctaataaacagcgtggttctgttcatcttggtctgttctttcctcacggttcattgatgattgcttatcttttccatgttttcttggtaatgagcattgcatagatgggtaggagttcatagaactcgtacaacgttactgatgagttatttgtgaattacaccataaattctagaaaggaattagagattttggtgacactgttatgcttctgataaaattggaagagagagaaatagtagatagtgcataaggatatattaagaatatattaatcttggacgttatggtgaatttcttgtaataattttgatgactttaagtcactctgtagtctatagttcagtcgagctttatatacttgcttgaagttgattttccttctgtgctaatggacttggagtggttatccagctatccctgagtcccacttgttgggcgtaagagca

SEQ ID NO: 48212 - DNA, 808 bp, Manihot esculenta
  Intron number 1 from transcript cassava4.1_012724m (locus cassava4.1_012724m.g) derived from phytozome v7.0 (chr-ID scaffold07927; pos 18044 to 18851)
ttcactcctcaggtcagtttttctcttttcttttgtttctttttcttgttctttctttcccccttggttgtgatgattctcttgtgggtttccattattgatttaacatacatgcaaggaaatggagatttttattgtgcaagaacatttacattgttgcctcttcaaaggatttgaagaatctgattacttgttttgttttgaggatttttcgagggaacaccgttctgtctacacatttgttagtataatgggcttctcttttatgcttaacgcagttttatgtcagctgccggaaaattttatccttatttataaaagctttttatttggaatgttggctcttttgggtagaaagcatagtcgaggaattactttcaactaaattgaacgtttgcttatttgcttgtcaattgcattggctacatggtttctttgatgagctcctatctctgatattgtgcgatgagcggatatgatttgttgataccatttgtaaaacatataatagctcttcccatgaatgttctatgaagtgttgaaatttgattttgctttacaagaaaaaaaatgagggtgtcaaattgaagaagatcaaatttgtcacaaactaaatctgggtatatgttgatggaactcagtgcttgatcatttcatttaatctttgatatttcaactcacatactctgtttaatgcatataacacaggttgtgtgcttaaacaatctatataaattcttaatcttcattgtcttttggcgcttttgtttccctttataggttccaatagttccactacaaagaccag

SEQ ID NO: 48213 - DNA, 602 bp, Manihot esculenta
  Intron number 1 from transcript cassava4.1_012072m (locus cassava4.1_012072m.g) derived from phytozome v7.0 (chr-ID scaffold00886; pos 28821 to 29422 reverse strand)
tctccttcaagcttgtattcaatctcgccctctccgtatgctttctctctcccttactctcgctgccacactttggatctaagtgttccatcttcatcttttaacatggttgatttcatcctatgatcagtatttacttgtcaaaataacgtctgctttattggcaaatgtttttccaactgtttagcaagtggatcttcaccttgctgttatagtccctactagttcacttgctatcttgtggatttcgatctagggtataatatatgtaaacttctctatgaattaactacctgcaaatcttatacattttcaattgaattttggaccctctgtttggttttgggtactagttcaatcaaatttactgaatgcattatttactagtttcaaaattgtgatgctatatccaaccaagttaggttttccattctagcatcttgataattggagctagtgccctccattaccgtattacctcgtatgtgttgcagatacttgttctgtttatgataatatgattctaattattgtctttctcgcattcttgcttaacagattttgaattgtaaaaacttgttacgttttcttgggtgcaggac

SEQ ID NO: 48214 - DNA, 356 bp, Manihot esculenta
  Intron number 1 from transcript cassava4.1_024363m (locus cassava4.1_024363m.g) derived from phytozome v7.0 (chr-ID scaffold03150; pos 336841 to 337196)
tgcctctccctactatctcagagacttcgctattggtaccctcttcctctgttatcatgctctctaaaacattaagcttaaatatatctcgatagtaatataatttgattttgatatatattcttgatgacccaacctgaaaattgtttaactgaagttttttaagttattatgaagaaattaattagttttcttttacttactgggttctgaaagaaagaaagaaagatggaggggaagatgttgatcaaagtgattgtatcaatttttgttcgtttattaagcattttctcataaacttggtggactactttttggtagggagtatacttagcgttggaggtagtgcacccttt

SEQ ID NO: 48215 - DNA, 664 bp, Manihot esculenta
  Intron number 1 from transcript cassava4.1_000781m (locus cassava4.1_000781m.g) derived from phytozome v7.0 (chr-ID scaffold11495; pos 289417 to 290080)
gtcctgccgagagggatatcgaccaggtttaatctgcttccttttatttttgtaaattttcttagatattgtgttttgatgatgacatattattttattgagaaattgtttgcttattgtgcaaagtcattttcctgcatttgtgactgatgtgttcactctctgtgtctcccgcttttcctttctagatttgtgtcaaatgtaaattcagcaaaatccttagagtaggtaacttgtcgtctgcattgtcataatgattatctcttctttagagaaaaagttgcttgtcacctcctggttaatatgcttttactattactgcaatatttgatgtattgaacatttgccttcttttttttttttttttcaaattttgtttaaatatcaactatctatccacttcctgattaacaatttctttagtgaattatccaatttgaaatttaatttgtgatatcttggcaacatatgaacagcttttatctacagagagggctaaacaatgaagcatggagctctcataatgcatcgttagtttgattacgatgcagacaatggttatctctgatgtaatcacctgtagcacatgcactgttttttagtttctaacatattttggttcattgtaggccattacagcacttaagaaagggtcatatttact

SEQ ID NO: 48216 - DNA, 655 bp, Manihot esculenta
  Intron number 2 from transcript cassava4.1_017827m (locus cassava4.1_017827m.g) derived from phytozome v7.0 (chr-ID scaffold05701; pos 36474 to 37128)
gctaacttgagttaattttccgttgcaggctgaaagtactgatcttgtagcatatggccttataccagaatttattagtcgttttcctatattagttagcttgtcagctcttactgaagaccaacttgtgcaggtaatacttcattccattattctaattgttggatatttttaccccttctcatgtcttgtggcggcatgtctatatatttcggttgtttgtgaatgtctgatataggagcatacttcattaactgattgtagaacggtactcttgagactcaagtataatgcttaataatatctacttccagaagtactttaagatgtattaacctagtttagcagccaaagtttgactttgcttaacattgtgcaaagtagttcaagagcatgttttctatttattttatatttgtttgtgtcattaatatctatttggcctttgtaaaactctaaattttaaatggtttgcttttagcccattttggtttttgtttagcccattttgactatgtgatgccttttcatgatgtactcttcattctctgctacccttgaaaatgagcaaacagactgattagaactcatgcccaaaatcttcttttgtataatttttttgcttttggtggacaggtcctcacagaaccaaaaa

SEQ ID NO: 48217 - DNA, 503 bp, Manihot esculenta
  Intron number 3 from transcript cassava4.1_014237m (locus cassava4.1_014237m.g) derived from phytozome v7.0 (chr-ID scaffold02892; pos 97396 to 97898 reverse strand)
caaatcttcaaggtatgacaagttctgcattttgtcattttttggtgagagataacgttaaagttgcagttaatgaaacattgccagaaccaattatcgtttggcttattatgaagtttctcatctaatctttgattcaaaagttttcatcagactttatgcccgtgatattggaaccatataatgagatgttggatggttgcttcttagttcttaatgttctttgctggtacctctgtatgccatgagatagtgtctcattattaaaaaatgtatgtcttggtgggatgtatacaattattgtttctaaggtctgcgatcagatttacatttaatctggaaactggtcgacaacatgttttttatacaaaaaggagacagttcttatgtctgcttgtgcagtaatacaatacttgaacaggctcacaattggtttagaaatgtgatttgttgtagcaatgatgatctaaactttttacaggaggtgcaaactaaagtgagtg

SEQ ID NO: 48218 - DNA, 868 bp, Manihot esculenta
  Intron number 2 from transcript cassava4.1_014237m (locus cassava4.1_014237m.g) derived from phytozome v7.0 (chr-ID scaffold02892; pos 97959 to 98826 reverse strand)
aagaggtgagctatttaaatttttgcattgggaaatttggttcagctttcttttagcatggtgaaggtttattcagaaacggtgcattctgttttctggacctcccagttgtagatagttggagggactgtaccttcccacgcatgcacacaacagtttctcactgcatatctatcttttttctatcaattatgaacatattttaaaaagaaaattgaagcattgtcttaggtttttagccgactcttctagactttgcaaattgttaaacaatctggaatatgaactatcagatgtacttaattttgaaagcataaagaaagtaaacagagatatgttaggatatgcaaaagcttctgtttggccgccatgccaagtcaatgatttgaaaatattccttggaatttactatttgcaattgcaccaaaatctaagatcaattcctttggtagtttgaaaaattccattagtagatttcatgagccccatctgcttcaatccagtttatgtgttttcattatggcatcggctgcattttttcctacctaatacagtctaggagactagaactactgctggtcatttatgttgagctgctactgttgtcgcatatcattggtaattctggaatgtggatttcatgaaatctctttgaattgtcaaagtttattaagacaataacatacttcttctcttaaccatatttaatgtaaacaaatattttgctttcttctttattgaagaaaggttttccctgatagaatccatcagcattacttgtaattcctagttttgttcattggtttgatattgctagggtcagagtgtgtgttataatggtactaatatatttcctattttccagaca

SEQ ID NO: 48219 - DNA, 841 bp, Manihot esculenta
  Intron number 1 from transcript cassava4.1_026701m (locus cassava4.1_026701m.g) derived from phytozome v7.0 (chr-ID scaffold11495; pos 423121 to 423961)
gtaaaaaatctggcctctctcaagcatgtgaaacttcttcatggaattaattagcaactaggaattttcattccgagcaaattggcccaaaaatattgtttcttaaccaagccactcgattaatttaaagattataaagaaatttgcatatacagtgtatattgagttgttcaaccaaatacaattgatgatagaacaattagtcaataatagtgtcagaataatgcagtgccatgtgaatcagatttcatttctaattaattattgatttctttattcacttacttaatttgaaccttgcttcaaaagaaagacctgcatgtctgaaatttacttcttttgtatatatatacgcatgatcccacaaaaccatgatagaattcggtcaaccctagttacattttaaaaaaataaaattattaagttaaatcaacacgatcaaacatagattaactatgttattaatgatctatcaaaaaataaaaaatagtttttattcattattaattacactctaaattgtattttgtattataaattttatttctttttattaagggtaaatttatcattttataaaaatttagagcataattaataaaatttagtttataataaacaataatttgtatttttttttttgttatttttcaaacaagttattggctaatctgtattaaaattgttataaattttagtttttgtaccaaaattaggatgtttagatataattatcaattaaccgaaattttagccttttctatttaattagccacattaaaataaataaataataaagcgaatgcactaaattttatgtgtactttattttgacactagg

SEQ ID NO: 48220 - DNA, 457 bp, Manihot esculenta
  Intron number 1 from transcript cassava4.1_004708m (locus cassava4.1_004708m.g) derived from phytozome v7.0 (chr-ID scaffold07301; pos 195661 to 196117 reverse strand)
ggcttgcggccttcgaatcacttccatcaaaataggttttcttttagctgtatttacctgtagctctttatttacttttgttttgtcttattttggcttgttctattatatgttggtttctttttgggtaatgtgtatcgcttgaagtacttgaattattggcatctttaaatttctaagttttcctgtttaattttattaatattgctcttttagcattggaattttttattgtttcttcggaatttaatagttcgatgtttttttttattactcttttggtgggtactgtagcgttgagtgtgcaccaccttcttctccttcttgttaatccacttgttgatttatattccccttatctcttttttgatgcagctaaataatttgagcaactgcctttcaattttcactgtcttatatttgtgcatatgtctggcagatccttacctgaatactg

SEQ ID NO: 48221 - DNA, 860 bp, Manihot esculenta
  Intron number 4 from transcript cassava4.1_002370m (locus cassava4.1_002370m.g) derived from phytozome v7.0 (chr-ID scaffold11689; pos 425306 to 426165)
gtatcttctggagaaatcgtttgaatctgttgaaggtatttgtctatggtttccttcttggaagttattttctaactgttgttatctttagtttttttatgtagagttcccttataaataatggatttagttatggaactcaattgtaatatgtttgtatttataattttggaaacaaaacaatcggatattctgcttctactcataactgaagtatattaaggttgtgtacttgttggcctatctaacagcctgaccaattgcgtatgtagttacgtttccaactaaatgatatgcacttacgttctgttttgccatcaaaacataaacccacgatcaacaatctcgtcttcctgtaaattattatatgaacaggttgactctctgaaagctatataatcagttagaaaattcttaacttgtacagtataaatattcaactctgttttgccattcggtcaacagagtacctatgcaaatagtttattgttgctatcttcacttactgaagatctaaattctgaagatgataggcttgcttatgctcgcttgaagactataattgcctactgttgcatcaaatcgatctcttcattttcatctgtcaaaaaatgactgtgaatggcttcatgtttattatattctctcttttcctcttaagttgtgtgaccttatttcatcttctatttccatcttgattgaacagccttgctgtatattttactatattacattattagttgatgtcttaaatgttatgttttaagtgcatgctttctatttcttcaacctaatactgcccttttttttaatttgagttttcaggtcgtttgcctatcaattttggtggctgatttact

SEQ ID NO: 48222 - DNA, 609 bp, Manihot esculenta
  Intron number 1 from transcript cassava4.1_030498m (locus cassava4.1_030498m.g) derived from phytozome v7.0 (chr-ID scaffold02932; pos 34808 to 35416 reverse strand)
ctcgtgctgtctctgtaaatccccttgatactagagtgagttatttcttcctattcacaaggaatgatctagtgttatggatacacttgtttgattctgttcctttttgtttgtttgttcatttatttaatgaaggacctgtgcttgatgaatttatgtgtgattgaggcaaatgataatataaatgttgatattgggtgtagagagcgtactgtattcatgttcaactgttttagattttgtagatccctatcttcgacatggtatagatagaactcaaggcctttttgtcttgttccagtcactgctaactcattttcattctttcattcctattatttattaactagctctcatgggaaatgaaagtcagggaattatggccttttttttctgaagtttttttttaaaaaaattattaagtaaacgctcaaggagtcatcatgttcctagcgtcttcttcccttaactaagcttactttagtgaattatcattgttcataaaacaaagaagaaaattgaataaaagagggaaagaaaatgtatgacatgtctgtaatggataagtataataagatattgaatatttgcaaattttaatgctttcag

SEQ ID NO: 48223 - DNA, 959 bp, Manihot esculenta
  Intron number 1 from transcript cassava4.1_006910m (locus cassava4.1_006910m.g) derived from phytozome v7.0 (chr-ID scaffold03402; pos 71130 to 72088 reverse strand)
tcaaggaagtggtttggtttatattccaggcaaaggtgatttgaagaatttaagaatctctgtgctttgggttagtgatttatgattagtgatttacgtagaaagtatttgattggggtgggatttattagagattttagtattttctaaagacatttgtttgctaagttcttaatgttaatctaggttctgttatcctcctaatcaatgttctaacctaagcttacattggattcctcctttgtaacagtgggagattcacttagcatgcttagttattggcgtagattgaacaaagttttgttgatgcctttgttattgaaaattttgttggatttgctctcttggatataatttatatgctttttgaacttagactgccttttactgatattttgttgcatataagaggaaatcttaattgggcaagtgaatatttaacttgtagatgtcgatgggcagtacatttttctaaaagttaattgctccccccacatcatgacacagatagaaagttatgttatgcttattataattaaaatgagatatattaatctcatgaaaatggtattttatatatgctgggaaatgctatgaatgagactcactgaaactgtttctgtattgcagatgaaaataatagctaccgtcctctgacatcaaggtaatttgagttactgtattcacaatatctttattcatttcttttattttactccacatgactacattgggatttcttatcaatacaaattattaaatgcttgagttttttcctgaattttttccttttgcagcacaggtggtttgaacttctctgcatgtgcttttgtgatgatatcttcatgttttgatatttgggcagcaatgctataacgcaaacttcatgcttcatgaacttacactgtaccttcatataagcagggatagcaggtggacttattgctgttatatccata

SEQ ID NO: 48224 - DNA, 805 bp, Manihot esculenta
  Intron number 1 from transcript cassava4.1_006582m (locus cassava4.1_006582m.g) derived from phytozome v7.0 (chr-ID scaffold00081; pos 44928 to 45732 reverse strand)
ctttgcctcaccttagcatcaaagacacacccattgtaattctctttctctgtctttctgttcttcccacttctaatgcttaagcgtttctgtttctgtgttcttggaactcatagagtatttctcaagagtttaactaaagaaagaaaaattgggtttgcttaaagttttggaaactacttttctttttacctcattttcgttgattgtttttcttatacaatgttttattcacatacattaatttctttggagcttggactgggtttgatttaccaagagtagtagtattttggagttttccaactttttttgttctggttatgtttaaaagcgtgattaggtgtatttgaagaatcttagatccatggcattatttaattttcttttcttttctttctctgttgattctatgtttggtttgcaagaaaatagaggaaaattgtaaagaactccaaagtcagtcctgggtaaaattgttgttctgtttgccaaatttgagattattgctttgatttgtttatctgagctaccaaacagatcaaaattgcgccaaaagaaaagaaaaaatctaccatttttttttctttgcttagtagtctgaagttggttgttgctagctgtcaggactgatgtctggctttttctactaatgtgaacagaacctcatttcctttgttctgtaacttcatggtggaaataaactgcttaaacttcatggaagaacaaatattcttaaattttgtcttataaggaatgtattattgcaggaaacttcctctgctcagtacatattgcagcagta

SEQ ID NO: 48225 - DNA, 751 bp, Manihot esculenta
  Intron number 1 from transcript cassava4.1_016389m (locus cassava4.1_016389m.g) derived from phytozome v7.0 (chr-ID scaffold11786; pos 133528 to 134278 reverse strand)
aacgtttctcaattcgatcatacaccgttctactggtatttgtttcgataaatcagcattaagatttccgcaattgcatactttgatgacgatcattccaccagaaactagtctattcttcttctttttctccttctgtttctgatttctgtgcccattggtttcagttaaaatctacaagaggtttaaattttagggttttctgttatttttgtttgtgatttctagaaactcagctaaaatatgatttcagatatgatttataggtgttaattttcgttctatattttcatggaattttcttttttgggttaattttcctgcggctatgaactttcactgtgaattatgagaattttatgttatatgagagtgcttgatgtttttcaagctcttatttttacgtgtgtttgagttttaatgtgctgatttatatgaaagaaaaggttccctttttttttttaagtttttgcttaatgttttaaaacctgaggctgtatgagcgtgtgataacaatttttatggggctcaaaatactgagactgaaaattttgtgattgtctttttatttttgcatttgtgtctttcccatccatgtattgcaccgtgtatctaaatttgcctgaatgttcggaaaacttggtactgtttttttttctttttttaatcaggaggaggaagtttttctttgtattttgggcttctttgctgcttttggtctcatattcttatgttttttgcagtgaggaga

SEQ ID NO: 48226 - DNA, 853 bp, Manihot esculenta
  Intron number 1 from transcript cassava4.1_030026m (locus cassava4.1_030026m.g) derived from phytozome v7.0 (chr-ID scaffold06089; pos 591372 to 592224)
tattttggggaaggtttaactcttcttggtgaaaggtttgtgactgagttgcattttggttatcctgttgattcaggaaaaataggtttacactggcattgttcacatccttcgggtattccttgagatttagcacttcttcagttgaacaaatagtgtgatgattgattgcttatatccatattggtcttaactagattgcaataaacataatgcaaaatgatgtagggaaattcctcgttgctttcttagatatcattccacacaagcaaataaacgaaattgttatttgttcctctgcttttcattctctgaacctaatatatggttaatatcttatgtctcatgtgaccaatttagtattcctgagtcccaagttttgtgctttgcacttgagtttgtagtgaatacatacttgtttggtaagatttacattgtattagtgaataaaagggtcaaactgacacaggaaaagagaaacttgaaaagtataactgatgttgagcatttgtacttttttcattcattatatatgttttgttttgacctttgaacaatgacatgatttcacttgtctctttctgcctggaaaattagttggatacttctgaaaagtccaaagaaccttattagaataatggattgctgtgcatgtgcaaggactgactcacagcacgctttggatccagtttaattgtttttagttccttcagttgctggcaaatggttttcttgattgttgattattttcatatgcagctgtgtgaatacttgaaaaactaatatgctaatataccaatttttatgttcttttgtaggctgttccaagtaacttggttgacaaaaactggtt

SEQ ID NO: 48227 - DNA, 540 bp, Manihot esculenta
  Intron number 2 from transcript cassava4.1_030026m (locus cassava4.1_030026m.g) derived from phytozome v7.0 (chr-ID scaffold06089; pos 592246 to 592785)
taagcaaagtttgtgctttaccatttctgtttcaagtgtgtgtacatattatatatgcttgtattgctgttattattctgtctgattattcttctcctgtcattatttctgatccaagtatggcatttcttagatgtttcttcgaaatttcattttgtttatgtacccttcatcctcttgctaacatggtgcaatgttgcctcactctatggattctaaaaaccttgcttgttttttttatatatattcttttcaaatgatttgatttgtgtgatacgccaatgctggcttcttacaattgtgctcagcttcctacgcatagaattgcactctctaccggttggtagctttattacaaattgttacccgtccattgccatactgtaggctattattaagattttttttttttacttggtttcttatttttgattgaggtgcactttttttttcttggggtggctgaaaatttccagattccagatgtttaataattttattttcattcacttggtgcagattgagaaatttactcatcag

SEQ ID NO: 48228 - DNA, 656 bp, Manihot esculenta
  Intron number 3 from transcript cassava4.1_011781m (locus cassava4.1_011781m.g) derived from phytozome v7.0 (chr-ID scaffold06871; pos 592350 to 593005 reverse strand)
ttgcatcagcttctcctagacgctatttctttgaggcaaggatcctgtatgttttttgctcttctagcaaactttatcaaccaacagcaccgaggacatgttatttgatattccatctgtgtgctgtttttgtcttgccacattgtgcttatgacagttacatcttccatgtggcattgcaaatatacttattggaaaattaacgaaaaatacaaaataacaacttggtttttgtgaattcataatttggatccttaaatttgttgtagtttttcttgcttataaactgtatataagttccactaagcaataatttagttgattggaaattattgtgctacttgatctgcctggttgaattgtgaaactaaaaaacgtaggatactaattggatgtctggcagtgtcgcacttgataaaattcaatatctgctagcagaataaccttttcctgtctgagactgagatgagtgttacttttgtttaatctaatctctatatacagtgaaaaaacatgtgtcagtgactaatttagttaaggctgatgattaatacattaaggtgatcccactaaattttgatggttgtacacttctgttgcctgcatgattctcatcttccatactattaatgattatgcatatactttttcaggtt

SEQ ID NO: 48229 - DNA, 374 bp, Manihot esculenta
  Intron number 1 from transcript cassava4.1_010227m (locus cassava4.1_006326m.g) derived from phytozome v7.0 (chr-ID scaffold11960; pos 92685 to 93058)
aggttggcgaaacttttgagagaatcttacaagaggtattttcttcttccattccttcgatttttctgctttctaattctataatgctctattttctttactactgcttcagtttgtcactagaacctctttgaattttgtatcccataatcatactcttcttgtttcttttttggtggtgtatttcttgcatgtacaaagagatttgatttgctatttatgcttgtggataattccccatgtcactttctaagtttcacccttaggccacaagagaataatggccttctatttgtgttattagcatttccttactttccttcatgtttcaaaatgcagacagagaaagtaagactggaatacagtgaagacat

SEQ ID NO: 48230 - DNA, 547 bp, Manihot esculenta
  Intron number 3 from transcript cassava4.1_005181m (locus cassava4.1_005181m.g) derived from phytozome v7.0 (chr-ID scaffold03235; pos 361933 to 362479 reverse strand)
gtcaataagctggatcaacctttcctcttgacttggtgagtgttttccttgttctaccttttctattattgcattttccactgcttgtttctttcaatgtactgaattcaggaatgaaatgagagtctacattgttctttctgacttaaaaatgttatcccttgaaacctggaagaacagaaactgctgtatacataggtattttcagaaatagcaagttccattattccttacagaatcaggatcatcaatgtgggccttttctttttagcaaaatggtggattagtacgcattatttggagttctggtgaatttgaaagtgaatattagaagaaacaatgaagttttactgacattgagatgaaaatcactgatttcagctacattatcaatattcaattatataatttttagggctctgtttgttagctcgatataatgcttgtgtgttttgaattttgagtttttggttttttgctaggaagaaatatttaacaagatttagcattaaaatatctttttctggttattgcattgtcaatagga

SEQ ID NO: 48231 - DNA, 507 bp, Manihot esculenta
  Intron number 1 from transcript cassava4.1_028497m (locus cassava4.1_028497m.g) derived from phytozome v7.0 (chr-ID scaffold06598; pos 80729 to 81235)
aaagagagaaagaatcctttatctctcatcctcaggtatgaatatgatctcgcccgtatcatattcgtgtttttgcctctagtttcttggcttccctttgaaccatatatggtactgcaacttcatcatctacacattttgattccaataatgttggattaatttctttacttgatgcaatagatgtctttgatgatctaatgagccaatggtttcactgaagaactttgctagtgaaatataacaccaccaatttcagaacttctgcaaatgtttattttccttaggctaatctcaatatattttctggacatttcaattttttgatcactttcatttattgttgatctgtttcagatgttgtttttgttgacatgaaactaaattcaagtaatatctttctgaagttggcaaaaattgacgcttgaacttatctattccttgccttttcaattcacagtaatcttagtatcctttattatgttctctctcagggaagttgtctca

SEQ ID NO: 48232 - DNA, 755 bp, Manihot esculenta
  Intron number 2 from transcript cassava4.1_007259m (locus cassava4.1_007259m.g) derived from phytozome v7.0 (chr-ID scaffold10563; pos 1238848 to 1239602)
ctcgtctctctctctctctctctctctctctcttatttatctacgcgtatttgtttgctccaaagttcatatactgtcaaaatctcaacgggtagtagtttgatttttatttctttttttatttagacttgtggaagattagagtgtgagaattggcgtcactggcttcttgtatgtgaaattctatgtttttaatatatttttgtatcttgtattcttccaaattcatttttatttttctagctgtcaaaatatactaacataagttatgatttcgtggatgaatgggcttttttttagtttgaatctcattttaatgcatttggtgaaaacatgaccatatttagggaaactagtttcctttacgattgctacattgtagggaatgcaggttgctgtagattaaccattgtattgctttgcatttgcaatgatgtgccatagggttcacatggtgaccttagataacaatgatgtcattttataacgtgtccaattgaaaagaggttagacttccttttttgtatattaagaatccaacaagttttttggatatggtattcaacgcgacaataatggttatttgctgcccttacctaatcacaaaataaataaacaaataaataaaagcaagtgttttggatattgttttcttgtttatatgtactccatgcacttttgtttattttgtatgtgtcgagtggagcacttggctaatatgttgccattcccttctctgttctgccagcaaatcc

SEQ ID NO: 48233 - DNA, 732 bp, Manihot esculenta
  Intron number 1 from transcript cassava4.1_020042m (locus cassava4.1_020042m.g) derived from phytozome v7.0 (chr-ID scaffold07238; pos 29702 to 30433 reverse strand)
gctgttagaggtctggataaacaagaaagttgaaggtacttgttgactcataatctatgctgcttacgtataacattgcaaagttagttctagtagttacatttgataaggttgatggtatagttcatgtgaaaaagaaatagcattaaggaattgctcaataaactttaccttaatgctatttctttttcacatgagctataccgtcaaccttatcaaatgtaactactaagatcctaagatccataatttccttaaaagatccaatgtacataattaagaatatcttatgaaattgaactttttcagacaatgtaaaacatacatttggtattctagatatagaaaagaatttccacaattgctttgccagatagcaaaacatggatccattggatttatattcattttcatctttttttttccctataaagaagctgaaaatgaattttgaatctgttagaatgatgagatatgctgtacaattatagtgaacttgaaatgataacatgacttataaaataaactccaagactgagatgtggaataatttgagtcccagttggagtcaaatgaagaaaaaataaatcattttttcttaattcttacaccaccaatgaacattggcaactatgaattctttaaagtaattctttactttgttctggacttgcaatttcaatcgttctcagagcttatgacccacatatgtttgttctggtgtttcagagg

SEQ ID NO: 48234 - DNA, 636 bp, Manihot esculenta
  Intron number 2 from transcript cassava4.1_015693m (locus cassava4.1_015693m.g) derived from phytozome v7.0 (chr-ID scaffold03852; pos 120762 to 121397 reverse strand)
agacactgtacaggtctgtccttctctaatcctctccatatgcattgcctatgagtagaagtttgtatgattttgatgattctatcatatttattaacttcaagaaaaaaaaacaaagaaaagctagaaatttaatattagcaaagggattttgaatattgaaagagggattatcaatattgaaagactggcctagatcggatgtgaaattttagttggcagtggtgtaaattcctagatgtaatatgaattagtattctacacatttgttcaatggaaattcttagtttttaagtttaagctgacttaatgcgctgagaaaatggaccaggtctaactcttctctaaaagctagatcaaggagtgaggattgcccaagccttatatttagtattgaagtttaagttgatttgatgttgttgagaaaatagaccgttttacctatatttagtattgaagtttagtttgtgctgaatagcatgctctaatgattctagttctttgtttatctttttccatacttttttaagagttaaggatttatgaatttattaacttgattctacatgaattaagcactatctttttattgtctatatagtggggtacacaagcagatatctacaagctccacta

SEQ ID NO: 48235 - DNA, 506 bp, Manihot esculenta
  Intron number 1 from transcript cassava4.1_026079m (locus cassava4.1_026079m.g) derived from phytozome v7.0 (chr-ID scaffold07238; pos 423908 to 424413)
aagggtcaagaacttcgattccatcgtctaattcggtgggtttttgttctttactttgtttggtctctcagagatgaaggaaaaagaaaatacttaagtgggtctgaattatcgtttgattttttaataaatgcgtccttattagacattgaacggttcaagtttctgtgggggtttgagcattttctgtacagggtttgcattttcttctcaagggtttgcagtctgatttatcagcatgaaaaaccaagaattagagaagggtttttttttttgacaacaacaaagattatagtatctgaagaaataataagattaattctcttatgtgatcattagtttactcttacaggttttctagtttaatgaataaaccttccaatattgaaatgaaaatgccatgcatagactatatctttgtgagtagcgagtgacaagtagttcttactaactgaatttttatatgtgaaggcaacaagttcaaataaaattgccaaagtgaaaaa

SEQ ID NO: 48236 - DNA, 850 bp, Manihot esculenta
  Intron number 4 from transcript cassava4.1_009259m (locus cassava4.1_009259m.g) derived from phytozome v7.0 (chr-ID scaffold04043; pos 796628 to 797477)
atcaaggccgtgcctacgcctggggtagataatactgcttttcttttatccatttggtcatttctttgcctggtaacttagtatgaaaattattctgcaggaggagtgcggtttgacatttggtgtggcaattgttttaaattatattcttatcatttgagtaccaggagatttaattcattatttctttgtatcgtctttttgctgaaatcattaaaattaacaccttgcagcgtctatgagccataaaatgtcaattagacttgcatattatccttgctctaactatatgaatgaccatattttatcaattcaatgaaacattaatcaattttttctttttaaacaaattaataatctggagttttttttcctcctacgcatattttaacttgattaatgaagtccttggtttcatataataagtttaattcacttttttctttgttaatttacgatggaaggatattagttagttataaatttaacattagtaaaaatggtactgaaattactcgaaagtttaactgttgaagtgtcaattaccaaaccataatgtattcttttgaactgttcccaagaaaaaaaatggagagagagaaagatatcctagtggtacagagttttactttgcttttctacggaagttacttgtaattagttaatggtctgaattgcctgaatttagtgactttttacttttttgtattttttatgtatttttttaaaaaatttcctttctccaaatgaagtattgtagcccagggttgcttattatttgtgtatctgtttgaaaattggtggtgattgatgaatatgaagatgtaatgcatgatatgcgtaggtggaa

SEQ ID NO: 48237 - DNA, 767 bp, Manihot esculenta
  Intron number 2 from transcript cassava4.1_028978m (locus cassava4.1_028978m.g) derived from phytozome v7.0 (chr-ID scaffold02932; pos 39612 to 40378)
caataagatctacttcaatattagaggtgctttaacaaatgcatcactaaactaccttattgtttggttattaaatttgacataaaataacagcgtgttggaaagttaatgggattatgttgaagtcaaaatttggtatgtgatagaatatcatgagatccacttatagtgatttcattgcaaccttggagctcgcatgcacaaagggttatagaagaatatgttgtagattttatagtagtcatttgatctctatgtactttggcagtttgataaacagacattttaatgcaaatctgcgagtgttcttgcattttaactattacatagaaagcccaatttttggaagttaaatatgatacttttgactccctgtgagaaatagctaggaatgagctttttagctttccttgcaagttccaagttagagagtacaaagaatttttggtgtaaagcatcttcttcttattggtgtcttccatgctgaagtcaaatggagatcttgaagtcttctccaagaatcaacctgaggatactcatcagcatcagcacagttttcctaaccacattgaatattactagggacaatcatgttcttttccttttttttttcttttctaaatatggttttcaagtaaatgacttgatgtttgttccaatgcatagcgtgcatgaatttcaattcttaagtgaaattgggtaagaaaaatcacattataaatgcgtaatttatgttattgatttggttgtaacattctagaatcaat

SEQ ID NO: 48238 - DNA, 748 bp, Manihot esculenta
  Intron number 3 from transcript cassava4.1_023671m (locus cassava4.1_023671m.g) derived from phytozome v7.0 (chr-ID scaffold02871; pos 428794 to 429541 reverse strand)
catacaggtatactgtccgtattcattgtttgtgtacatgcgtgccacatgtcttgaaaattcttgttggcaattaattcatttttaacccaaatttgaacttccagaaactccattatgaaggaaagtttgcagtacaaccttctttctctctctttccctttctctatatatatccgatattaaaactgctgctttcggtgctcctgttttataaaaattcaattaggatgactgtttagcataaacaaacaaatgcataaaagaagaaatttgtgagtaaaatccagttctacagtagagtacatacaactttttaaacaacttcctttctaaacttgttttgtggtcggttatatctagtgtctaacgtgaattaagcatgagattttagtttttcaagttcacaaacaaatgggaagttttcagaaaatggctgcatggatatccatcagaagtaggaaactaggaactgaatatgtaacatttctcgtagcaactttgaaattgctattcatacatgttatctattaaacatcctctcacttggtagttcaatagacttaaatcaatacaataagttatgaattctggtgctagtgatgtaaaatgttcacattctttgcagcacacagatatttgttccactccagctagcttctttcttgatgaaaaacttcagccggtttattgtgaatatcaacagctaaaacatttatttatttgttttgattaattaggaaccaaa

SEQ ID NO: 48239 - DNA, 398 bp, Manihot esculenta
  Intron number 1 from transcript cassava4.1_029029m (locus cassava4.1_029029m.g) derived from phytozome v7.0 (chr-ID scaffold03992; pos 659 to 1056 reverse strand)
tcgaatattgaagcttttctttgaagaaagggagggtattgtttccaaatccccatcccagcaattcataattattatttttttgtttcatcgcaactttccgttaattctctgcttaatttgttaaaatctatagatatcacattaatggttccacactttttgaattcaaaggcttcccttgaatttttcaactttgagattctgcaaaataaacgggtttagttgtgtgcaaattttcattctcttacataaagtaatccttgagttctttgctttgtacggtcgttaaaattcaactttgtttgattggattgttgcatgtgattatgttacatacaaattctaacttctttgtttgatttacttttgcagtgcaattggacacatttataata

SEQ ID NO: 48240 - DNA, 832 bp, Manihot esculenta
  Intron number 1 from transcript cassava4.1_000696m (locus cassava4.1_000696m.g) derived from phytozome v7.0 (chr-ID scaffold08265; pos 172425 to 173256)
gaatttcaggtacggaattcttcatttccgttggtaataattgtgcttttgatttgttgagtgtgcaggttttcccccttgtgttagaatttgattggagtattcagtcaactgacgtaataattatgattaacttcgactagttttaaggttaaataaattttaaatttaaaatgtgatgttgttatttaaatttgcttgttttattgatgctgagatcctggaatttgactctttgtttttttcgtttgatctcccccctctgaaagtgaatttatttgttatgatttatctgacttccctatttttagggctagcatgggtgtaggcaaaataacattcactttccaaagacagggatagatctgtataatctttacgttagcatggtaaaaattttcaatacattaaattgcaattttgagttggaacaaatttatgtgtagcttttgctcatcaactttactccatcactttctatatgtatttacacattctaattagtttagatatttttgctataaattaagagtttaaagacttgaaaagaggatacagatgcacataaaattaaattccaaacctaaataaaaggtaaacattttttaggtttagtatcaaaagttaaatggctctgagtgtatgggttatcttcttccagcatgactctccaatatctgccatgtctgatatttcgacatttatatctgtacaagtcctatgcaagtattaattcttctgtggtgacttattgctgtagggtgtctttctgatactaagcatttatctaattgcagattctattcctggaattcaatctacaactctgaat

SEQ ID NO: 48241 - DNA, 320 bp, Manihot esculenta
  Intron number 1 from transcript cassava4.1_008379m (locus cassava4.1_008379m.g) derived from phytozome v7.0 (chr-ID scaffold06705; pos 421916 to 422235)
aattctcgagtttggcctttccattactcgcgcaggttccctctctctctctcttcagttatcgtcttgttattttgagtctatattgtttcttggtttttttttttggagattttgttttttgtaatttttaatgagcaatttgcttgtgtttgtggattattaagttggaggcaaaatgaggggaaaatggaaagaaaattttgcatcttgtgacctctactagcctttttcttttttctgatgttctcttttgtaaaattttctattgatagagagttgaaatgggataattttttggatggcagacttttcaaccg

SEQ ID NO: 48242 - DNA, 358 bp, Manihot esculenta
  Intron number 1 from transcript cassava4.1_009962m (locus cassava4.1_009962m.g) derived from phytozome v7.0 (chr-ID scaffold10563; pos 742011 to 742368)
tcactcgacccacaagagttgcctcttgtttgcaggtaatttaattcatattgggttgctcatttatttgcttgtagttgcacattttcagttgatgataggactctgtttagcaaaattccaactcaaaggaatcacaaatttagaggataagcagcaaattgttcaattttgtgctttaagttaaaggtgaaagtatgtttaagctggttcatatccattttgtctgaactttatgggtttctgttgaaagaagagttcagttctttcactgtgaaaagctggaactttcactaaaactggatatcatctgaatctagtaatttgcatctcttattgagtttgcagagaccctata

SEQ ID NO: 48243 - DNA, 868 bp, Manihot esculenta
  Intron number 4 from transcript cassava4.1_015880m (locus cassava4.1_015880m.g) derived from phytozome v7.0 (chr-ID scaffold06700; pos 160742 to 161609 reverse strand)
gcaggaagtacttggtgttggtgaaaaactagaccgtaagatacacccccttctattttcagtatcacttattttctgtagattatgttgttcttcttttgcttaatgaatctctaaataataaaatgctggatatcataattaggatgtggggaagatctcagattaaaataagtatccgatatttttaattacccatgcttgcaagatttgatgagttgatcaatgcatgcagatgaaaactggtttgacaggttaaccaagtcgtgtttctttgcattatgataaataatttagacctcaagcttgttgggtctattaacataaacacctttggtttccagaattgaaggtaatagaaactgcaattgcatgtatgacattctctatagggggaaaagtcaaacagcttcctttagttacattcgtctgttgtgatatctttaagaggaatactatttgctgtatacatgtttctttggaaaattctggaggtgtttggtcttgctagggaaaatattagaaagctgagttctactgtattaccttctttgttcgactttcatcactctcagcctttgcagtcagttcattcaaatcacatgggtcaaggttgggtaagctagaataccatatatatcacatgttatgggaattattttttcgaaaaccttgttgcatgtgttctttacaagtagatttgcacttgagctgtcctatgttatgtttgtattattttgtgtatttgatgttggtcatctgcttctgttttctgacattttttgagagccattaacagaaaacacatgatgtcgtactgaacaaaatgcaccttacatgttttactgataatgcagaggtcagcgaa

SEQ ID NO: 48244 - DNA, 806 bp, Manihot esculenta
  Intron number 2 from transcript cassava4.1_002231m (locus cassava4.1_002231m.g) derived from phytozome v7.0 (chr-ID scaffold06871; pos 965284 to 966089)
ctggtactagcttccttttttcttcttctagttgcattacttacatagtctatcaattaggttagtaatgtgttgaatttcctcgaatggacaaacgtcttcaagttcatataccttgtaatcaaggatgttggagtggcaagttaattggttttgattgtggaaggggcaaaaatagttatatgtttgagccaaactacatagaaaaagtaaaagaaatccaattattcatttatatcatctgttaattgagctggactgtgattatgtaacgctcgtagtcttaggctactcaaagcctgcatttagttttgccatgcaagcttgccgcattaacaattgttatgcctatactcctaaacttctgcggttctgcctctgttaaagttaggcagaatatgagattatatgtaaagctctagtgcttttagttaatcttctatctattctagccctaggtaactactgacattggttggattaggaaggattattcaaaaaataacctcacgacaaacacacatatggaaattagaatacataaaaaagagagagagaaagaaatgaacacgaggaattttacatggtttggcaatatgtctacatccacagtgagtcagccatctgcaattttccaatatcaatatagagaaaagggtttcttcattatgctaggaacatgaaacaactgcaaattacaaatataacacataatttgtttgaattttaaccataggttcttggaaagttgttaacaatacttaagtatttcttgttgtcagttctccagttcaaaagaagtggag

SEQ ID NO: 48245 - DNA, 449 bp, Manihot esculenta
  Intron number 1 from transcript cassava4.1_017003m (locus cassava4.1_017010m.g) derived from phytozome v7.0 (chr-ID scaffold08265; pos 2502505 to 2502953 reverse strand)
cagctcaatttctcattcttcttcttccattttaggtatgcacttttaatgggtaattttgtttttatcccattttcatgttttttcttgtttcggatcttaacccattttctcttttgtgtttttgcctttagttagatcaattatttgggtcttagctgaggtttctcaattaagttcttgcattttcttacatttgtttttcatgagtttccagatcggtggaaaaaaattgtgccttgaggtttatattttatttgtaattgcacccagaaagcaaatatgcatcaatgtcaattcaaaatccttttggttttgttaaatttgatttgtttgcgcagtgaagattgtttgagagagaaaacatgttagcaaaactgatctgatttttattattaatttttttttcattagtaggtaagcttggagagataaaagaacagtcagat

SEQ ID NO: 48246 - DNA, 318 bp, Manihot esculenta
  Intron number 1 from transcript cassava4.1_018256m (locus cassava4.1_018256m.g) derived from phytozome v7.0 (chr-ID scaffold08265; pos 1974430 to 1974747)
caaaaggcctcagaggcactgatttcttaggtatatatataagcctaatcccctctctaccatcatttttctctccttctcttctttttcaccatatcctcactgcttcttgtttcaaacgattttcctactgattctgctcaaagacgcagttaaaagctggatcatttccaataatattattgatgatcagaaaatcacataaaattatttatttttttggaaaatgaaaaaaaattttcttttgtttttgtgtgaaatttaagaagttaattttgtttggtttttgaaatgtgatgataggtaagatagatccat

SEQ ID NO: 48247 - DNA, 712 bp, Manihot esculenta
  Intron number 1 from transcript cassava4.1_029108m (locus cassava4.1_029108m.g) derived from phytozome v7.0 (chr-ID scaffold08542; pos 357613 to 358324 reverse strand)
ctctgcgtctccgactgctcttcctatcggcccaggttcggtctccttcacttcctctactctgtcgctcgctctcctttatatgaccctttggcagtcttcgcttgttgctttgaatgtatatctgggtaggttttagaatttgcttttgggtttgattttggtggatctaatgatatatattttataacgttttgcttcaaaaggtgtgttttattggattttagctttcttcaaaactttcaagatcagatgatgtttgtctagtatatgctggaaaagtaaatataatgagattgtttaagtttattttctattataactattgaagtactagcttggattctctgctgagcaagttttgtgcattggattgttttattaagattctgtttggcattgaaacattttggtaaacatgttagtaagagatattaaactttgatttaaaacgagttttttaaactgttattttcaatagcatctaatgaagctgccctgttttggcctacaaattatgcatcagaatttattttttaacccaacactttagattgatgataagacataccttctacaaaatgggatggccaaatttaccctgcagatttctttagctgctatggtttggagtatgtgtgtgtatacagtgatgtgtttgaactggtcctttttagaatttccctttaacctgcatttggtttcctgcagg

SEQ ID NO: 48248 - DNA, 1047 bp, Manihot esculenta
  Intron number 1 from transcript cassava4.1_027561m (locus cassava4.1_027561m.g) derived from phytozome v7.0 (chr-ID scaffold08994; pos 4607 to 5653)
caaactggtgagtcttcagggtcatcagctgagaggtttcctccccctgctccaaaaatccgtttcaggtacctttcttggctagtctgaaacttgacaagctgatggttaaagaattcatttttggtatcttgtgcggcttcgataagaatagaagattctagctgtgttgggcatcttaaagtgggaataaaattgttagatgttcagatgtttgtccatgtattgtttctatgctggattactgtttaaaattaaatttgcttacatattgaagagagtaaactgctattgttcaacatcttctattcattcatattcttcaaataaaactttgacctttaggggctcacttgtgacctgtgattcttcaaagaattaacattgatgagctgacaaagcttgcctttttgccatatgcattatgtgccttaatgagagcgtgtcacttcttcatctatttcttcattgcagtgcctcttggtatattaggaatcattcatttggcatttttgagaaaaaaattagtaatgttccaaatcttagtcatgatattttgccaaagggaaaggatgttataaattatggtagttgattgagaaatattttcatatctaacaaccaagagttttctgtgcactcactttggaataaagtagtctcttatgtcctcttcgtgttttctaccttagaaagtctgaaagggttgtctcttggtttaacacaagtggaggacattgtttcatttccactttgacagaaggatatcatctgcttcattttatatttatttctttctttattaaaatccaatgctttttctataaagatcggagaggttagggttatagggtttagttatgcctttgcactcttttggtttggtgggatattaaggtaagtagttttattacctctctgtgatcctaatggatcttggtcttgtcataaggttaccatcttcctaacaatgactatgggcacttcatttgatccattttctctttttggtttttgttagtgaagtgggtgaagaaggaattttgc

SEQ ID NO: 48249 - DNA, 877 bp, Manihot esculenta
  Intron number 1 from transcript cassava4.1_007986m (locus cassava4.1_007986m.g) derived from phytozome v7.0 (chr-ID scaffold05214; pos 1069249 to 1070125)
tcgtccagctaagcccttccaattttaagtccaaggtaacctgattacccctatgttctgctagttcttgtttggtaggcgagaaagttgtgggagaatgaaagagaacagtaaatttggaactttcgtataaagagcaagaaaatgattctgatgattatttgaggaaattgattatcttttcgtcggatcacaaattattgaaagtgttaaagtatgctgctttgaattggttgcaatcagcaattttccttttttttttctcgtatattgtagatctagcatggtgttcgtttctatgttcactttcgagttctagctcttgtcttcggaaatatataaggtcccatccccttcactttccttctcatccaatcgagaaatgtcaaactcttaaatatgctgctgcgcctacttatcagctccatattgggttttcatttgaaatcgttaatttttgaaattgaggaatgtaaaaagttcagttgaagcttatgtgtcatctccgttatttcaaataataggccttcgcaaagagaaaggaactgtacaacaggatttagtgggtttgaattagaaaatagaaatggtacaatttaaatcgttggaactcatttgatatgttttcaattacgcaattgttttatactgtttcgtttggatataacatctgtgccttacatgtgagattgttctcataaaaaattttcaaatctggtcttctcctttatctgtataaatgatttgctacacgctgttatcttttacatgaataatggattctttttatgaagttttagtaacattaataattgtgtatttttatgtagtgttttattaattaagaactttggatgttggcaggtcctgaactcaa

SEQ ID NO: 48250 - DNA, 512 bp, Manihot esculenta
  Intron number 1 from transcript cassava4.1_019430m (locus cassava4.1_019430m.g) derived from phytozome v7.0 (chr-ID scaffold05806; pos 137645 to 138156 reverse strand)
agcctaaatctgtatccactgtcactaaaacagaggtgcccatctcaaagcttgttccctcttttttttattgctattttttgtttatctcttgatcagttttcttctttcctattctgtgattggttcgataatttgatcatttgggtatctgggtttctgatccttcgtttattttatttagatgattgagtttctgagctgttgaataattgaccgattgggatacggtattctggatttttttttttaaaaaaattattatatatatatgtataatctgcgatgagttggttaatttggagatggtatttggctcccattttattaatttacaataaattgaatgattttgaggtgtatgatttcgtcattaatgattgattttgtggatctaatattttcccaatttccattttctcaattctgttagattcataggtcttagttttaatgtccatttgtttgaatttgaaggtaaaactaaaaacatcatccagttcatcaaagac

SEQ ID NO: 48251 - DNA, 1012 bp, Manihot esculenta
  Intron number 1 from transcript cassava4.1_024087m (locus cassava4.1_024087m.g) derived from phytozome v7.0 (chr-ID scaffold02895; pos 222174 to 223185 reverse strand)
gcaaaaggtaaaaaggtcttgatttccaactctgataatccttccttacaaattagtcccgtaaaacttgatagaaccaattatcttgcttggtcaaggtcttgtttgttatttatcaaggctagaggattgcagagttatgtcaatggtaataagaagcaaccggataagagtggtctggattttcctcaatgggactcagataattgtcttgttatgacatgattacttaactctatgcaacctcatatctctaaatcctatttgttaatttactattgcaaagatatggaaagtgacacaaatagctattcccgtcagttacatcttattacacttcatttttctccttgttagtcatatgagtgagatccatactcttctctgttatgattctattgtaactctgacctcaaggctaaggatcttttgtaattaaggagtacaagcaatatcaaacagaaaattggtccaagatttattattacattattaatattgttattttttaaagacatctttttctgggcttcattgttgaatgctaaacagaaaagactagaaagatatcttcctgaaagtaaatgcatgttctcagggacaatcatttgttgaattataatgaataatgcaagctactttgatgtgcatgcttactcggccatttcacttttggagagaaattcatcataggcatactgtatagtgatttcagttggggaaatttattatctgctgcatttctgaagcaggtccttcctgtgaacatgtaattcagaaaggtttctagatgtggattattccttctgtcctttggcaaacagttctttactgtgcgaatgcattatgtgctttacttcattttggtccaattctcttctaagaaatgagaaagaagccgagtaacatgaaatctgtttgttcttttagtttgttgtaatcaaattacttgaataagtgttatccatttgaaacaggtgtaacccatttatctccccattccttgacgttg

SEQ ID NO: 48252 - DNA, 774 bp, Manihot esculenta
  Intron number 2 from transcript cassava4.1_009134m (locus cassava4.1_009134m.g) derived from phytozome v7.0 (chr-ID scaffold06871; pos 165567 to 166340)
ggtccgcattttgtgtactatagttcatccagcaggttcgtgtttgagtttttcacaaaattgggattactggttactgtgtattggctgatttgcctctgaaactttctgtttgatgactgatgcgaagttttttttgggtttttaaattctctttgctggatggaattatttggctatgctaagaaaagagaagttgattttaggccctaactaaaattattggttgctaatttcttgttggttgacgcataaatcaaattatacgctcaggtgtagctaagaattctctgtatggttaatgttatttgctagtaatatggtcaagttatcttgtaatgtttgcacttgtttggttgtttgtttttacctaagatgttatttttgtcattgttgacttaaaaattacttttgataggcgacattgacactggatgttgaaattgaattactatcactattattaaaatttcccattattgattgactacgtgcttaaaattaagggagaaaaccaataaagagattcatcagcagtgcccactttaagttatggttaatttctggttctggtacagatgatttctttgttataaagcttgtgtttgtagtcggtcatttctaaaaagatatttggcacggataactgttcccagttgctcagttatcttctttctgttggaaatagtgtcataagattgctttctcattctattttgtacttattttttccatgcaggagtggcaaggagttctcaccaattactggcttct

SEQ ID NO: 48253 - DNA, 691 bp, Manihot esculenta
  Intron number 1 from transcript cassava4.1_009975m (locus cassava4.1_009975m.g) derived from phytozome v7.0 (chr-ID scaffold08265; pos 699149 to 699839)
ataaaccctctaagcaacctcctcctcctctcactgtaagtatctctgttctgtttctatctgtaattgcgcattgatgctcccttattttgttttgaaggattccttttcattttggtgttaaaccttgataattccattaatgagttgttatttaaatacccatttctagattgatgatggattgcctgactgtaaataattgatgtccttggtgttttggtttgtgatgttctagtaatttttttaatgtttctatagtgtttccctttgctttcttatgggttggtggaatgagggtgatgcatattcctttttctttctcatatataattttggaagcatttgaataattgggctgattttttagctaaaattcaccaatgaaaagctgaatacattttactaactcctgggagcgtttacaagaatgtttgattctaatcttattacctttttcctgttaacccttaacagagcatgaagttaacccattacaaattaaaaatgtcaactgatagcttaataaattatactcttatttcaagtcgccattgcttttcttccatttatttgagcattcaaatgtaataattgcaagtgtagaaccgttgggatgttgcccaatcataactattgatttattatttggacaggacgaccagagtgagcccaaaaatagtcagctaga

SEQ ID NO: 48254 - DNA, 307 bp, Manihot esculenta
  Intron number 1 from transcript cassava4.1_030880m (locus cassava4.1_030880m.g) derived from phytozome v7.0 (chr-ID scaffold11495; pos 143955 to 144261)
tcttgagtttctcttctacaagaacacatttgtgggtacgtaaaacaataattaatgttaaatatatgatcaatagttatagatggtgctatatattgatgaagattaagggtgttcttgctcagaagacattgaatttcttgattgattccaggggaggaattttacttgaataatttatccaacgcagaggaatgtgtttcttgaaagttataaaatagtagtatacattccccttgaatcttttgatttttctacagatttatgatgtttaatgatgcattattgtaactgcagacaaacatct

SEQ ID NO: 48255 - DNA, 865 bp, Manihot esculenta
  Intron number 3 from transcript cassava4.1_003747m (locus cassava4.1_003747m.g) derived from phytozome v7.0 (chr-ID scaffold10563; pos 433272 to 434136)
gattggtaaaaaccttcggtttgatatagtgagtaagcttcttttttctgttttttctttgagctcacatgttaatataattctgaaggattagtagtttcctgaagctgtgaattttacttttttgaatttgacttttgtgcttttgtaagttggttgggcgtccaaatatcatcttcaacaacgctatgaaaaacaaatcttctctctcattagctggccttccttttgtgacctaaagctttctatatcttacattttgaagaccgttttccatgtgctatctctgcatatgctataggattgttccaatatatagtattcttgcaagctccaggaattctaagtgacctataaacacattatattgaagcacgagataaaaagttgtaattctaactgttattgatggtttagtttttttcatatatatatatatatatatatgtatatgtatgtatgtatgtatgttgcttcatcacagtaattgtttcaagacaatcacatgcatagagctatgagcccatccagtttttagacatgttactggatgtaaagaatattttgtcattcagtttacttcatttatttgtctttacattttctcctcaaatcaaacctttttcttgggtgggtctgtgtgcaagcctgtgggagcatagttgtatgtgcctattccatatcaattcattatgcgtgtcctttactatttacttcaaatgattttgtcaatcaagcaattgactatttattggaaggctagatattattttagttttataggttgctgtttgttctaagttttgtagtttcttctatgacgtttgcagaataaaacggtgtctgtctttgagactaccatccg

SEQ ID NO: 48256 - DNA, 614 bp, Manihot esculenta
  Intron number 2 from transcript cassava4.1_006725m (locus cassava4.1_006725m.g) derived from phytozome v7.0 (chr-ID scaffold10563; pos 555227 to 555840 reverse strand)
tattagctcgcaggtaatggattgattatctcttttcgcggattgtgattcaattaattgtgtgatcattttgatcgctttcatttgcacttaattttattgttagtttcatccctactatttcttttatattttctttcacctacaaatacaacattggattgataaagttggtatataaatactgtaaacgtcaggcttaatgttctcttgttcctattttatgggagcactggttcacctatcaaaagaatatgttagtgtgtggttgagcaattctagactgaaggctggaagatctccaatagctgaaacttttactttttttgcatatatttcaaaaatatggttttgatttagcttcttatattgagaaaatactaatgctgctgcaactgtgttggaaaatcatttggctttgtaaattctctgtacttcatgtttagaaacaataggaaacttgttaaattaaatcatatgtagggactactccagctacacattttcctggttgtccctttacttctctcatgaaggcacttccttatatcattggcaatcactaatatttgatgacaggtacatcaaaaacttgttgggactctctggtttat

SEQ ID NO: 48257 - DNA, 806 bp, Manihot esculenta
  Intron number 2 from transcript cassava4.1_008614m (locus cassava4.1_008614m.g) derived from phytozome v7.0 (chr-ID scaffold02770; pos 17504 to 18309 reverse strand)
tggtttgaactaataggtgagcacatatgcagtctatttacctgaaactatagtatacccatcagaagtacattgaaaatggcaatgattattatacattactaatgtggatgattatgatgaagctatcagtgcttcatccattataatggaataccacaatgaattctactgctctaaagatgcgagaaaaaaacgttttatatatttattgggatacctgttttcctattttcactacattttgggatacctgttttcctattttcactacattttgggatacctgttttcctatttttcatagttttagaattaggataaagtactatagactgaaatctggctaaggtttgttgtaacataaatatttttctttgggtaaattacagtgtaatctccaagatttcgcaaaatccactacatagtctctgtttttttaatagtaaacaatctagtccctaagtttttgtttgtcaaatctcatggactgtattgaagattacctttttttccttctgctgtttcaaaatagcatttagcaatttagattcttgtagcatgttaaccactctacttcggcctttgatgttattatattctagcatcaaacgttttagaaactccatgacattttaggaattagagaagtgctccatctcattccatttacagtgttgaaattagagaagggatttgagaaatgctatagattaacgaagcaactatgcaagaagatttagtaatatgcttgtcaactgtcttgttcaggttttgatcatagaagcactgcattcctcctcagt

SEQ ID NO: 48258 - DNA, 768 bp, Manihot esculenta
  Intron number 1 from transcript cassava4.1_002458m (locus cassava4.1_002458m.g) derived from phytozome v7.0 (chr-ID scaffold07301; pos 235189 to 235956)
tgggaagcttggcctattccatacccaaaatcaaggtactaattgtgctggtttgttttcttttcaatcaattattttgagaaattcatttgtttgacgtttcttatattctgtttctgtttaaaatgaataaatctgttggaactcattttatcttggtgattaggaagggagtgggatggctcggcatttgattgatgggtttatacattcttagatctagctaaaattctcgtttcttttttagatagtgattaaatcaattatcgttcttgtgggatagtctgaatcatatggttgttagtgaggatgagctcaataattagtaaacagaaaaacaattgagacctccaagtttgctgtttttcttttatcctctgctttaatggaatggaatgcgaggaaattttttggttttgtaccatgtctttaccatggatgtcttaggcaccatagttcctttagctcctgaattgattcgctaataatgcagcagctatcgtgattcaaccagaaggatggatatcatgttaggcaggtttttgattttgtaggatgtcctgtttttgatgcccttgaattagctgttcattactgaacttgttacaaggattgtattctataatttgttgtcttcacagaacttagtttcattgttttttattctatgttccttacaatttgaatattagttagaattaattggaaagaaaacttttccatggtaaatcaggcaggaaatctcttgaaataccgtggcctccattt

SEQ ID NO: 48259 - DNA, 676 bp, Manihot esculenta
  Intron number 1 from transcript cassava4.1_016839m (locus cassava4.1_016839m.g) derived from phytozome v7.0 (chr-ID scaffold05432; pos 26533 to 27208 reverse strand)
caggttactgttagcaattacggttttgattccaggttattctttgattctatcattttcttctgtatttatgcatattgtctatctgaaatcagtttggaaatataaagatttgtgttttttatggtctatatcattctagatctgctcctgatagcctttttattggtttggatcttctgttgtttttttgttttttttcattgacgatgtatacctgcttaaatggtagcttattagctgtatttgggtcctgaaatttgggtattcatttattttatgctttattttggattattgctgttatttttggattttttttgtcacatttgataggcaatagattttgttgctcttgtgttttatagatttttagtatggttgtaccgttggccttatactgctggtgtttctttcagtgttagattcttaatatgattatgaaatcaaacgttttgtctcaagattgtgaagcttcacttgcatgaatactagcacacaaacttttgtgattaatgctgcaaggctgttcttcatgattagtgcatgttgaccattgatttaatctatgctaagcatttttgttttgtattttgcttctgggcatcaatgaatttgcatttttgtttgattggcgttatttacgaattctccaggatcgtgatactaatatcaa

SEQ ID NO: 48260 - DNA, 677 bp, Manihot esculenta
  Intron number 1 from transcript cassava4.1_016698m (locus cassava4.1_016698m.g) derived from phytozome v7.0 (chr-ID scaffold02369; pos 25134 to 25810)
gtgcacgtctccttctatcgcaactgtaattctccatccctcttcctctccctcgacgtgcattttctcctagtaaatttcgcatattttgttttgaagggattcaaggtttatgtgtgaaggatttacaatgaaaatattttaagttgatctgtttgatgtaaagttgtttttgtttcttttctatgcttgatccatgcattatggcacttacgctgttcggtcgctgagaaaattgtggaaaaaaaagggagagaaagtgctctgtctagatcagtttatttattttattgttttgattcccgaatagcctaaaaatggttgtgttttgcacttggatggaggggtttgtttgcctggatactgaaaaagtaaatgttgaggcgttaaggttctattttgcttttcgtttaacggagtgatcgagataaattgatttttctagctgtaaatatttgggtttaggattttttgataaaatgagatgaaaagttcccacctttatcttaagctgaatcgccattatctagtttttttaattgaagagagatctgcttcctatgcatcttgttagtgtcaaacagactaagcataatatatgcttgatatatttttttttagtttcataattaattgtgtttcgtttctgggtttcacttaaaatcctgaataaatag

SEQ ID NO: 48261 - DNA, 762 bp, Manihot esculenta
  Intron number 1 from transcript cassava4.1_000043m (locus cassava4.1_000043m.g) derived from phytozome v7.0 (chr-ID scaffold07238; pos 582699 to 583460)
acgagttctacctaatcactaatcaaatagtaaaagtatttcgataaattgttctctctctctctttctctctctcagcggcaaaaagcctttcgcttttctcttttccgtgcgacgtgcgtcctatttttcctttgataaaccaattaagcaattccttctccgtatttttattttgttatttatattaaaaaaaaaagagggaactgtttggatggaaaacgaaatcaataaataaatgaataaaactctcctccaacggctttaaattctgtctatctgctcaggtatttgcttctctgattgtgtttttctcgcactctttttaattttttttgttttattttaattttcggtgctcaatgtgtgtttgtatgtatatgcattcaagtggtgctttgttttctgtatatgcattatcctgtaaaatctgagatagggtttttgcttgtgcagagagcgcggaatctagggctgtcgtcttctttagttgttttttttttaattatctggctgttgttgacccaggtattcttttattgttgttgtttctgttgtgaagaagatggtgaataaaattttgaggttagggttttattgactgggggtcgttgggattatgcattgtcaatttactactgttttgatgatttttgtgatgtttccattgatgggtatgcagtaattggtaaaacaaattgatagaactttgatatgctcgtgtgagaactcgctcgaggtccacgaatctttgcaccaggc

SEQ ID NO: 48262 - DNA, 667 bp, Manihot esculenta
  Intron number 1 from transcript cassava4.1_008502m (locus cassava4.1_008502m.g) derived from phytozome v7.0 (chr-ID scaffold00506; pos 275768 to 276434)
cattaaacgcaacgatcaaacacgacccacttcaggtattaatctaatgtttcatgatcattatatatttctttgaattttgaaatgtaaaacccttttttttttgggaaatttaaggtttattctctcactttcagtgtggccccctttttttatctttgaaaattgatcaaaatggatatttcggtgggattttctattttcctctgttaatttcaggtcttttgagtataaatttgctcttgattgtcagttgagtgatttgggaatgccaaattttattcttgctgaaatgggttgaaatgatcaatagctcgaagttgtaatgtctctctctctctcatggaaggcattgctgcttctgttttctgggtttagggtttacgttgctgctgttgttggtgatttattaatggccaccaccaatcatcaaaaccttcctatggttgttcattattttgtctttagcaaaatgttctttgtttgctttcaaatttgatggctttggcattttctgtaatatcctaaaatataaatcattcaaaatcatatatatgttttttcttcatttgggtctttatggtacttatgatctcatcatgcattttaaaaatttttatttcgttctacaggatcattgaaagtaaagccagttgcaaatttaaag

SEQ ID NO: 48263 - DNA, 679 bp, Manihot esculenta; identical to SEQ ID NO: 47768
  Intron number 1 from transcript cassava4.1_015232m (locus cassava4.1_015116m.g) derived from phytozome v7.0 (chr-ID scaffold03104; pos 151744 to 152422)

SEQ ID NO: 48264 - DNA, 701 bp, Manihot esculenta
  Intron number 4 from transcript cassava4.1_016433m (locus cassava4.1_016433m.g) derived from phytozome v7.0 (chr-ID scaffold10563; pos 972045 to 972745)
gtctcctttggctaaccaggtgtatcctattgctaatatgtcttatctttgtttagtttcagctagctctttcgcgtgaatgttataattttttggtatgtaaatttttaaaagaatgtagaaacatggctatcatttatagttgtgtgccatggaattcattgagtgaaaaaatgaaccagttctgagaaaaaaaaaaagaataatctattgaatggaagcagaaaatgctacttatagccggaactagttagaaattcagttacaacaaataacaatcaatcgaatggaagcaataaatgctacttacggacagaactagttagagattctgttacaacaaataacaaactttctaccattatttagtaacaaaaccaactagcaacagaaagtaattacaacaattttctttcatatcagttcaagcataatcaagtacaagaaagtattttgcacatctcattggagtttcaaactgcatgattttatagtcttgaaagttaggttagatcaagcataaaagagggacaagataagaaggaaagaatgcttgacttttgcttgaatgtttgatctgaaacattttggaattagcatgccagaagaaatgaaatttaagcttttatggttaagcaagcctcactgacatattcacaatttctcataatgttgttatcttttgctgattccgcagagca

SEQ ID NO: 48265 - DNA, 615 bp, Manihot esculenta
  Intron number 1 from transcript cassava4.1_014754m (locus cassava4.1_014694m.g) derived from phytozome v7.0 (chr-ID scaffold11960; pos 76364 to 76978)
ctctgccttcttctttcgtttcctctccattttgggtatggctctgtaccttttctttttggtgggtgtttacttgcataattcgtgcttctatctccatgaattttatgtttctttacttgatttgttgcttgttgatcttggttactctctgatgattttattatataggaagtagaagtctttagagaacgatttagggctttatagttttgttttgttttttttttggcttagcttggtctcttgatgaattgcttatttgggggaacttctgcttcagctaaaagcaatggtttttaaggttccaaaataggtttttttaattaaaatctgaagaagattttggtatagtagggatattcttctttcgttcttagatggaagccgaaataataaaccacttaagactgtattctgctattaatgaagctttgaagttgacttttgagttcgaaggagatgccaaagtaatgaattagagtagaaaacgtgtacacaaggaaatatagttcaataatgatatctgattttagaagtaaaaacatcattcctggtggaaatgattttttttttttggatgagatgcagcaaaatcagttctaagttctactt

SEQ ID NO: 48266 - DNA, 770 bp, Manihot esculenta
  Intron number 2 from transcript cassava4.1_010398m (locus cassava4.1_010398m.g) derived from phytozome v7.0 (chr-ID scaffold06089; pos 252200 to 252969)
gggcagaaagacatccttggagctaaatatccaaggttcccttctttctattttcttgctgtttgaacactaaatagcatctatattctaaaagtagaactctttaattaacaccgtatcctaggttatcatgaagtcctatttttcagatttttttttacctaagtgcatatgaggtagtgcaatataagatcggtaagaagtacacaagagaaatatatgtgttaaggaaaaaataaacataccatatttataatcaattaagcagcggcatgcaagcaatgatctccttgagttgcttgctgctttgaatattagtgcctgtgaaggaacttgtctagaatttatgtggatgaactataatttcaactatatgagaaatcaaatcaaatacttgcaaaactatgctttaaaatggttccattgttggtttcttcttgtggctattagctacgctacgttctctccaagcaataataccctctctactgcatgtcattaaataatattaatggtttctacatcaataatggccacagaaaaaagcaaggttacagaatttaatgttaagagcaaaatcttcgtaataaatacacgaataactattcaccgatcccgattgtatggatatcgaggacgcaatttcattggacgtattcatactcatacttcacatcattatctttctgttaactgtaaatatcacccataaaatctccttttcttctcatcaaaatagtataaatttgcatatgcaggggctattatag

SEQ ID NO: 48267 - DNA, 712 bp, Manihot esculenta
  Intron number 1 from transcript cassava4.1_006563m (locus cassava4.1_006563m.g) derived from phytozome v7.0 (chr-ID scaffold04065; pos 245028 to 245739 reverse strand)
ccaaccgccgctgatttcgtcaaatccattaagaggtttttctatctctctctctccgatcacaatatatgcatacaaatatttgtataattatttattttttgctttcgttttcattgctttcagttataatgagaaggcaattggtgctggtctttgaattaggcaattatagcttgtagttttggcttcattttggattttccctttaatttagatggggaatggcttttttcctgtttccaaatcaagaggagcatttccaagatttttggtgacactctacccaaaaatgttttggaattgattgttccttgtttatattggttcagggagagttaagtagttttgagtttaaaaattgtagccgtgcaggagtccaaatatttctgtttttttttctttaaatttttatttttcataaattataagaatgcagtgatacagtacattgcgtggctagtttaagaagaagcattaggagctctgggaaaatgggaagctggcttaggccatctcatgtccattctatgacaagtttaggcttttctggtatgctaatatagtaacatttgagagagaatttgtacttcttgaatttgatcgaaattggtaggtcaggttaagagtatgatagtttacaagtcaaattcgtgcaaggtttgaatgtagcttgctccttattgcagcttcattgtctctttctcaaaca

SEQ ID NO: 48268 - DNA, 894 bp, Manihot esculenta
  Intron number 1 from transcript cassava4.1_018226m (locus cassava4.1_018226m.g) derived from phytozome v7.0 (chr-ID scaffold00506; pos 637211 to 638104)
gcgccagctaaaggtatggattttgagctccaacaccactagcattacgcccttcttgaatagtttgggttgttttactgaatcattcattgttttgtattctatttcagactccaaaaatgccaggagaaggaatgattaatttagttagacatgttcatttcaccttttagacttttagtggctgtaatctcatgtacatacattggaagaaatatttgattcttatggtttgctcgaaatttacatgagtttgtgtgacccatgtgaattgtgattaggttgttatgctggttttaggtttttccatgtttaagggatttgtagtatttgttgtgtttatttctttaaacttaatttttactgcctgatcacaagtttgttgtatgcttgtggcatgtaattttacagtttattaaatgccatgaaaaataagaaagttgtccccttttactaatggtaactcacatatttctaatgggttctccatctttgtatttttcataaagactttgtttaattgatactaactgaaacaaataaattctatggtgaattcatgtaatttcttgttaatcttttctttgtggcaaatatattctttagtttgtggttggctgctaattagtctagtgactatataattcaacaataggaattaataaagattattgatttagtagcgtttataaggatttgtcttttttcatttgcatttttttgtgtgtaattgcctctgagctcttatacctcgttttcttaattcaaggatttttacacactaaactatgacgtaatgggatgtatgcttatgtatttttctctccttgatcatttagcttttgtgctacttgtgcagctgacagttcaaagaagcccgatccaaaagcacag

SEQ ID NO: 48269 - DNA, 715 bp, Manihot esculenta
  Intron number 1 from transcript cassava4.1_006755m (locus cassava4.1_006755m.g) derived from phytozome v7.0 (chr-ID scaffold02264; pos 38557 to 39271)
gaagcagaggtaattgctttttgatgtttttggtgcattacttttttcgttttcttctaaatatttttctatagaattatttaattggaagtgtatgtgaatcatatttcaattcttgagtctcaatgatgaggaagggattgtagaaagagatgcagtcaacggcttttttaattaattggtagctttcattagattggagtttgatcgcacaggtgcatcagtgagagaaggaagcatatacactggcgggaacagaaatgtgcttctttatgtgaaaaaaaaaaagagaggaataaatgatcttatcttagctctatgtgagtgataccaatctgtccatagctgttcaagataaagtttcctggttatgtaaaggacatttccatgtaagatgcttccttgcgttgattaaaatctaaccagccggtattttatttatcaacaaagtgtctaggatttcttttaaaaagtttctgcctatcattttgtattgcatctttggctgctatatttattagcatgttctctgtaaactggtgttgttcagtatggtgtggatgtcggcatgttgctgctctagatatacgattccttcaaataatttccagataatatgcctacatgatgtaggcattccatggtcctaatttttgtgtttgcattgtggaattggacaggattacttctcaaagtggggagagagtggtgaagt

SEQ ID NO: 48270 - DNA, 793 bp, Manihot esculenta
  Intron number 5 from transcript cassava4.1_016551m (locus cassava4.1_016551m.g) derived from phytozome v7.0 (chr-ID scaffold02264; pos 820747 to 821539 reverse strand)
aggttgtgactcctatagcaccgctaagccagcaggtaattcatagccatgctcataaattgtttggttatcatataagcatatgcatatgtaatatctttgagcgctgcagttggaaactgactcttgtgtgttgcttgatttatctttcttggagttgcttgaagatgttccttgcatctttcttttggtgcttgtggcactatgttttgctactttcaatttcacccagagaaagctctggcatgctatccttgtactagaatttgctttattttatttacttttctttatcatttattagaaactgaaaatagaaatgggtggtgatgagcacaagcaaaaagggaagttgactatatcttgtataaagaattgaaagtggaaaagaagttgctgtgtttgattattaactgtatgcaacttcaaggattttatgaattatatctaggctatagtggtgcacttcttagtttattgttaaatgttaagactctttgactttaggtggttcagacttttggtaggagtgatctggtctgtgattaaggagatattattggctgctcttgcatgagcttagtttgtatctcacaaacaagtaccccttccatatggcgatgtttatgttgacactctttgtttgtggaccttgtggtgctatgtctgcattatttgtttttctatatcttagaaggagatattgtggttgttgtattgattgtttttgtatgtttgttttggttaattctttatgagcctctgttttgcaggctggatactactgttcagt

SEQ ID NO: 48271 - DNA, 982 bp, Manihot esculenta
  Intron number 1 from transcript cassava4.1_005619m (locus cassava4.1_005619m.g) derived from phytozome v7.0 (chr-ID scaffold03823; pos 103669 to 104650 reverse strand)
atacaaaggttaacttccaattcccatttataatttcaagcttaaatgtctgaagtgcttggtaagaagaaaattgcatgaaaaacaattaacaagtataattcccacaaatttgaactaatcaaatttttctttaatattaggtgcgcagtttaatcttttttcgcttctttctagtgataggactgtggacaactagatagaattttctctatccattaacccaacccctttccagtggcttgagttcgagacaacaaattagaatttgacattttaacctctagagtgtccttttagagggccatggcccagcatagcgcccatagtcccaatgaaaattacgtacacactcatagggaaagatcataccaatagcatacagaatttttttttttgtctcgacatgcatgtcagcttcaactgccttcattcacatgcaaacagagcatttcttcatattcctcaaacaagatgttttaactaaaaaaccatgtatattcacaagcaatgtaactaattaacactagaagaacatttcctctagagacgcatagctctcacgtttcgcacgaattcaacaagcaaagagaatgaaggccaaacccaccaaatttagatctcgtgagcttggaaaaggaagacatacctaggccttaccataatattattttaaaacaatttgatttaccccaggttcagaaagcttacacgtgaaaacaacaagggaaacctaacaagtaaatagcatacaaatgaaaagacaacagaggcacaaaactgaggggtccactcaaccccacccccactaaaaaaataaaaattctcgttacagccgtttgttcatggtcccaactcccaccaataattgtatacagttatgcacaaaccaacacaaaaaccaactgtaattctctgcatatttcattgttacctagtaaaatatggtttgttatggtgcaccgcaggcattccaatccgc

SEQ ID NO: 48272 - DNA, 594 bp, Manihot esculenta
  Intron number 1 from transcript cassava4.1_012287m (locus cassava4.1_012287m.g) derived from phytozome v7.0 (chr-ID scaffold02943; pos 396168 to 396761)
gagatcttggaatcactaccaactcttccaaccaggtataatctaattaagattgctggttaccttcatcttctttttgtttatatgtccaactagtagagattaaggcttagttgttgtaaattttcattataatatgttagggtgatatcattaaactgactggttatgttctaatctgcatgtgtattttgaaaacatgaaaattgaccttgtatcaacttttttttattagattagcttaaaaagtaaatgttatgcatgtcactggtttctcacccttttgagcattaaataatgtttaaactttgatcttcttgcagttatcattatttttttcctgttacattccttcagtagcacagattcctttagttaatattatggagcatggtgctctttctactgcattttgtgaatcccattgtgtcataactgcattgtcaacgggagcagatctgtgcttcatccttgtgtgtattttctttgattatgactacagtcacgatgatttctgatattctgtaaataaccaggaattctctttttattctgacagaaaaagggcctgactgatctttcctctgttgagcc

SEQ ID NO: 48273 - DNA, 676 bp, Manihot esculenta
  Intron number 1 from transcript cassava4.1_006565m (locus cassava4.1_006565m.g) derived from phytozome v7.0 (chr-ID scaffold05133; pos 129729 to 130404 reverse strand)
tcatcgaataaagaaagctcgttgagatctggctggtattttccttcattttcctcgaatttatggaccccaactacaagatttgctttttcttctactttgttttatgtttttatatgtagtttctttctctgtttcttttttcttttgggaattaatgtctttgttcaagatgtgtgaatacagcattgcttggaatagtttgtttgcccgtggcttttgtgtttgtgtttatttgtttgcttgctcagaaaatgtaggaattaatataaatggaattttctggagaattttcacttaaaaaatttcatttatatgtgacctgagaatggcaaaatcatttgtaagcgatgacttgcctaagattggaaaatcgaaactgcaccaattcaaccatttggtttacttcttaaattcagttccttacctttcctttaggtccttatgccggttaaattctctatatttttcttagatttccaggaaattgagcattgcccatttacttccctcatcctagtgttgcttgtagcatagtttgtatcactgttcatgcttattaagaatgatgcttatttcatttagcttatctttgaaacttacttgatctataaattgaagcccaagttccaaatttgatgtattggtttattgcttgaaaagattgaactagcaa

SEQ ID NO: 48274 - DNA, 813 bp, Manihot esculenta
  Intron number 1 from transcript cassava4.1_017684m (locus cassava4.1_017684m.g) derived from phytozome v7.0 (chr-ID scaffold03264; pos 79839 to 80651 reverse strand)
ctttctgggtatgttcgttttcctctctattttctttcctattgttgtagagagacagagacaaacattctttctgcatattattattattttaagagaagaagagcgagaatgggattaaattatttggttgttttgcatttccttattcgtccatcaccttattttcttgtttttgagattttattttttccccattttcactggacaatctctctccattttttacatttgctcttattgggtaacccatcttagctcgaaggctgtcttcttttcagaaactgctcagctcagctgcacgggaatgccaatgatggcatggcattggtcttttttactgtctatcccttagacttgggagctaggaacactctctcatgctcataaccactgcttcaagcaataattcccttctatgtttttttttttaaaaaaaaagctgtcattaactggaggatttcttctaaaactgaaattttaataataataatttcgtcatttaagttggcgcttgctgttttgattctacatttattactataacatcccatttaatagcatttttaaaacttaaaaaacccatttttattgcattctattattaaaaaaaggaaaaaatgcattaaaaataaaataagaaataaacgtaaaaggagaagcgacatatactttgctttccaagttcatcttatgttgatgctttagggaccttaatcccacattagtaatagtttcgtttgtcctctatttgcatatatttataaaatataaattttcaagcagcgggggcaacggtgcaagagaaggcag

SEQ ID NO: 48275 - DNA, 805 bp, Manihot esculenta
  Intron number 3 from transcript cassava4.1_012032m (locus cassava4.1_012032m.g) derived from phytozome v7.0 (chr-ID scaffold08265; pos 3907726 to 3908530)
ttcccaggtatttgcagtgcaccttatgtttctccataatgccatggattcatcctttcgtcggcagttgattgttatatcaaggtcacatatagtcgaataatatcctctaacaataactgggattttatttatttatgcactaattctggcctgattgcttgtggtagtatccaaaggaaccacccagtattgattttatagaatcgaaggggcttgatgaagaaaggcagaaggaactaataaaaagcatacaagacaaagcatgtgaactctcctcatgtttgatgcttgtagcactttgtgaggtaatggttgtgatgttttgttcatgttggtatagatacttcatgatgttgcccatttgagaaaactgcattagcagcctgatagttgatatccacattgtttaagggattgttaattttcatcaagtacatgatgattatgagaagtaaatacctgtaggcgtaacgttaagcaggagctaatatgttttgcccattctttgactatgaggataaattttattctgttgctgccttttccttctttatcatgaacttattgtctaattacctttattttcctaaacaaaatttaaaaaaaataaaaggaaaaaaagaataaaaaagaggaatcctccctaagggttaaacttttctcatgggacatcactacttcttcttgatgacatatattttaaagtgtctgctaaagtgctaattttgctgaagaatcattcaggtaatattcctttttacccttctttttttgacttatgtagttgcaaaaattgattgag

SEQ ID NO: 48276 - DNA, 693 bp, Manihot esculenta
  Intron number 2 from transcript cassava4.1_013285m (locus cassava4.1_013285m.g) derived from phytozome v7.0 (chr-ID scaffold11495; pos 359926 to 360618)
cactccaagctcagaaccagaagcttcacgcagaggttagttccaactttcaactggatatataccactgttacatgatctgattgaaatttgcataatgttttccctctttctttctactctctttttcctctattgttcttcaagggaattattgcttttaggagtgtagaatagattttgcatggaactacaataattttgaagaatacattcagagttgaagatcttgataattttttctgtgatttttcctttttgactttttcttctgtaatgatttttatcaactttatttctggtaacttctcgaaccaatcatggatgttttagcaaaggttcttttcttatcattagtgcgaactttttgagaggttgcttgaacccaaaaatacaaaataataataaataaacaaaagaaaagggaaactttttaattgattgtttaattcttgacgttctgaaactaaaggtaatcatgaccctgaaagatagatctctcttgcaatatatatctatttattcttcctttataagcagcctctcctttcttttctatacatatatattttatttaagttgttggaattaccagattggaacttattgtgtctgcaaacatgagcaatgatattgatcggttagttgctgtttgcagatattggcactgaaaagcagggaaccaaccgagtc

SEQ ID NO: 48277 - DNA, 791 bp, Manihot esculenta
  Intron number 2 from transcript cassava4.1_014644m (locus cassava4.1_014644m.g) derived from phytozome v7.0 (chr-ID scaffold08265; pos 1629714 to 1630504)
aggatattaaggtaaatctagtgaatgcattttcttctcacctttttctaaaaaatggttggctattttttgtatttctgacttgggggcattttgatttccttctttctagaaactgtattgtatacttcggtatttgagaacttgagtattacaactgtggagttgggaatgtattttcataagttagacaacacttgtgaattattattatgagtcaagattggtttgtaatttatgaggctttcttaacaggctttcgagtatccccttctgttttcacgttgttctacccttgaggtgttgctgattttaactaaatttgttgatttcttcactgttgtggattgcacattttcaatcttggtttcaagaggtagcagcaagtcatttgttcttgtactcaccatgagatgtgaatggtaacaggtctattctaaccattattttggtgggtgggtgatgacattattgtgcgagttgttggaatatgttgatgcatttaggctgttttagcataaggtggcaatatgactcttgaagccagctcacgagtctcgtgtctagtgatactctgctaagggacaatctctgtaacataggagtaagccttaaatgatcagaaagtattttatgatattatattaaaaggcaaatattcactgtcctgtcgcacttgcctttttttcatgtcttattattttcctaaattgtagaaaagatgcaatattgaagaacggtatatatatgtaattaacatatattaggttccatacagttccttttctctg

SEQ ID NO: 48278 - DNA, 566 bp, Manihot esculenta
  Intron number 1 from transcript cassava4.1_014194m (locus cassava4.1_014194m.g) derived from phytozome v7.0 (chr-ID scaffold04002; pos 3993 to 4558 reverse strand)
gaactaccaggtagtcctttcttgatactgtccggtctaattttggcacttttgaagtgtttttattgcccttgcaaattctgctatgtgttggtttgaggtttgaatttgctgaatgtaaacatgtctgaagtttgatctccatcaacttcagaaaaatcacttcagtgtgtgcttattatggatgcatgaattagagttattagtttacatgcgactctttttgttcttgaagcttgaaggtacttgtgatatgttgtgcaggttcttattgatctgaatttgttgacattctattataatcagttgaacttgagagcaagttttagtttagactatgatggattagatcttcaaaagtatgagaattggtaaatatcttagttgggcttgtaactttgaagcattttcaaaatagccacctatgagttttatagctacaaatgaaattgttcctttagtttaatgcatcaactgccttttaaccctttatgttttttggctgtgtggctgttgattgtatttgtttagaatcaagcttccttctggagccaagaaaattgtgc

SEQ ID NO: 48279 - DNA, 976 bp, Manihot esculenta
  Intron number 1 from transcript cassava4.1_022783m (locus cassava4.1_022783m.g) derived from phytozome v7.0 (chr-ID scaffold10563; pos 489912 to 490887)
agatacttgaggtttgcttattctgattttggtcatcattcttatgtgtaatttgtttttattttctatattttctgttctaggttataatttagtttattaggtttttttgctagattcataattggatgttaatttagagaaaaggaaaactaaatcagtaagtgtagatgtgaaatagagcctgcactgatacaagtttgagtctgtattcaagactggagtttctcgtggttgtcaattttactgaaatgaaaaataaactcacaagtgctattttaccagcaagcataaggttttgtatgtcattatcttgtaggtgtcatctcttatcactgtttccacgccatagtctattaaagctgactttgttcatcatttcaccctgaactgaatatctcagtacaatgagaaactcttcttgcttgatttcacataaataagaatataatcaaaatctaaaggagataaaatgttgataactaggttatatccaggcaacagctaggtatcaacaacttccacaagcaagcttttttgtttttttgtcctgaagtaaccatctggctaatgaatggcatgttaatggcgctaacatttaccacttttgtagagatgaaataaactataggtgtagtagactgtactatagactggccagtgaaaagaggtaagctataatgattttagtacaatccattcctaaagaaaggaatatgcataacaattttaaaaccattttcttctatatcttgctatgaattcatgtgacgtgatctagcctccatggtttaggggaagggaagaaaggtatcacagtaatcatttgtgagaagattatttcactagggcatttgaatagatatttcttttgaatccattgatcaatgctatcatgtcttttcttctttttatcttgattaaatataaaatattttcagagaaaaaccggtggtttggtgatttggaggtctgg

SEQ ID NO: 48280 - DNA, 546 bp, Manihot esculenta
  Intron number 1 from transcript cassava4.1_002978m (locus cassava4.1_002978m.g) derived from phytozome v7.0 (chr-ID scaffold04043; pos 1210296 to 1210841)
gacccgtatttgagaacgctgaattatccaaaacagtacttctaacaatctcccttttgtttaatgcatttggattttgttgctggtttggtgggttttcaattttttttttcttctggctgcttgtgggaaaaaacttttgattttagcttttttatgaagcagtgagattccactcataggaatgttggtgttggcctagtctttgggctttcatgggttttgcatggatctgaagttattcaatgaaacccagatgaatttacatgtttattttcttgaattagttaaattaatgtgttcgtctctctctctctctctctgtcttctttttttttctttagtttggatctgtttttgaattttggcaataattttgattactcttatttccatttacgtgctcaacttttttgctggctacagtaatgcgtggaccatgtgctttccgaattgcagaactgtgtccttgtgttcgtagtctatttatgggaattaatagttttgcccttaatctgtggtgcagagtccattgtacagaagact

SEQ ID NO: 48281 - DNA, 232 bp, Manihot esculenta
  Intron number 1 from transcript cassava4.1_029545m (locus cassava4.1_029545m.g) derived from phytozome v7.0 (chr-ID scaffold02895; pos 85992 to 86223 reverse strand)
cctttcacagcgatctcatttctaaaacttataaggtgacttctcataatttacatacttcttaattatcattttctatcttaattacaattttctatgcatataaacagtttcaaataaaatcaaaactttgtttttttttgcttgggattgtaaatcgaagatttagttgacaaatttcctctcaatttctatcttcaaattgaattaggcaaaatcagggcaggcatat

SEQ ID NO: 48282 - DNA, 967 bp, Manihot esculenta
  Intron number 1 from transcript cassava4.1_009823m (locus cassava4.1_009823m.g) derived from phytozome v7.0 (chr-ID scaffold03802; pos 627627 to 628593)
aaaagtttcaaaaacagaattttgaggcttcacaggtaaaattctcaactgggttttgctcttctgttcattcactcttgggatttgtacaccttttctctttcttggtttcttgtttcctttttatgtgttttagggttagggatggaacatggactttgctttcacgtctgtggatcctctgtttatggagattccttagttttttttttaaatgattttctccataaacatgcattagttttttcgttggcgatatgaatgtaaaatcttacccttcatacacattttctctatttttttagttttggagctaaatcttgtgttattgataaaattgatgaccatggttgtttcttgttgtttctttgttttatgcatttttattgataatttttgggagtgttttctttttttattttcagagataacaccctttattgcttacccttttccttttcacttggttaaagtggttttataattttcgtttatattcacatacttcttcatggattaggattgtttggctagaattgcttccttctcttgcagtaggtcttgtattgagctctctgcattttctgtaaattttctccttagtagattctacagacttccacagcggcctattgatgggttgtggtttagaagcttgaaattaaattgtaaaaaaagtaaaaacggctatccgttgcatgagattttcacattcctttgtaattatcatatcagcagttatgtcggctagtgttttacttagttttttcttttgaggaatcaatgacagctgcatgaattaagggcataatgttcttttaattggtatttatttgtttaggatctcatgttgtgaatgcttagttcaaaattctttgattctctgttaaaacattaacacagcggtgatattatatgcttcatcttggattttatattttaaatatttgcctgatacagtatcagt

SEQ ID NO: 48283 - DNA, 350 bp, Manihot esculenta
  Intron number 1 from transcript cassava4.1_028015m (locus cassava4.1_028015m.g) derived from phytozome v7.0 (chr-ID scaffold04043; pos 162777 to 163126 reverse strand)
ctggttctggtaatcatttctctaaaataacgttgattccttttctttatttattgtatatcttttcttcaactggtccttcatgtttcttcttgagttattcttgttggtttgctttgattcttgatatcattaaatgatagattttcctttcatgtccttgaggctcttgttttcttctcttttcctgttcattactgggttttaattggaattcaaacccattaatcaaagctcgttggtccaaggttgttgctctgtgtggcaaatgaatgacgtaatgcctaagatacgttacttggaaattttgttaatattaattaaggattttggcatgtagctctgaatcc

SEQ ID NO: 48284 - DNA, 688 bp, Manihot esculenta
  Intron number 1 from transcript cassava4.1_001641m (locus cassava4.1_001641m.g) derived from phytozome v7.0 (chr-ID scaffold12487; pos 6263 to 6950)
tcttccaagaccaagtaagtacacaggaccgtaaacactttgtcctctctctgcttagatctgataatcttttttagtttttatgggttttgtaaaatttgaaatttgattgctgttgtggaatttctttcctaattttctgatcggtggattggatctatcttcctgaagcgttttgtttatttctttggtttttccccttaactcctttatttgaattcaacgtctccctttctctccatttccttgcagttctagttctttatatacaaacccctttctcaatttttctttttcatttaaaatttgatacgggttcacttcattgttgacgttcatcgtccctgcgcgactttcttgtgatattctggtttcgtaattggatttattaggcacaatttcttcggggaatttgaattttgatgtatagaattgtatgcaaatggtaatacgtgagtttgattttgttatggaatgaaagtcactaatacaaagttcccattttttttggcatagatccgttgttaatttgaacttaaatatttaggacatgggttgtctttggatgtgttgcattctgtttgtaatagattttcacctgcaacgaattttcatctgatgatgtaataatgatagctttaaaatttgtacagatctagtttatctgaaactcctagcaaagcaacag

SEQ ID NO: 48285 - DNA, 846 bp, Manihot esculenta
  Intron number 1 from transcript cassava4.1_015767m (locus cassava4.1_015767m.g) derived from phytozome v7.0 (chr-ID scaffold04043; pos 293434 to 294279)
gggattgtaattgtcaaggtgattagttttttttctttttttttttttcctagttttttcaacattcctctcttcccatctatgtctctgcgtttttaaagctaaccgcagtcgtctatctgatttgggtcatttttttcccatctttattgctggtcttcattttgatgcatctgtattaatatgggtttcaattatttcctctgtctaacgtctatgcatgcacaagtattgtttgtattgtgcgttcaattttgatgtgcattgttatattttttgttctttttgttcatttgtgccttttgctttctgggttttcttctttgaaagtaaatctatcatatctttccatttgtcgataaaggtgtagctatttcctctttatctctttgttgtttggctttgtatgtataatttatcttttgctatcatgtggttatttggctttgatgctgttgagaattatacttttgactagtgaccataactcctttttctgaggtctccattgtgtttcattgttagcatgtgacatagttttctagtctaggttaggtgcttttcacatttcatattcctacactgttcaattactcataaaacaagagaaaggcacagtaaatattgttctgaaatgtttgtttgtatacctatgattttctttcagaaactaaggcaaatgctagaaatgggttgcagattatttttttttgaacagttatagatatttcatcaattttctttctttgattattatgttgttttactgtttataactttaaagcttacgtggattttaactgcaatgcagggatttttccagtaattattttcttggtctttggt

SEQ ID NO: 48286 - DNA, 1003 bp, Manihot esculenta
  Intron number 1 from transcript cassava4.1_016561m (locus cassava4.1_016561m.g) derived from phytozome v7.0 (chr-ID scaffold06598; pos 251459 to 252461)
ggtaatcattagttttatgctgtgcttatgttttgtgaagtttgtgaattttgtggtcttactgtgaaagttcggattagaaagcggttgactttgctgtgtttggaatacaaaatgtgatggaattgggtgtgaaaaatcttgatcttctcagatttatcaccgatgatattactgttccattcgtcatatgatgttctagactcatttgtttgtttcttgcatgatggagcatgttatagatccattttcttcctcatgtgaaattggttttgtttattgctaaacttttactgtaatggataagttttttgtgcattcacaataaataatggtgaggtgttagatagggaagggagcttggacaagctctgttgggttagatggctctttttaaaaaattcaaaaaggagaaagttattattattttggtttttttctccatccgtattccattatcttgaaagatcataaagttttgacctcaggtatctttcaagttctcagcgtttgaatagaattgcatgtagattgttgttgatctgaagcaaatagagtctcaatgttatgtggtccctcaaatcacggcaaagacattggaagagtctgattgcatctttctttatttgcagttctaagttttctttcccctgttatttttgctctttgttattgtttggattcttttgagtataacattcttactgttaacatttgttaaaatgtttgtgatatttttatttttgtctttctttctcattctcggtaacaatttcctggactatgaaaaaacatcagatctctgcttctggagagttgttgtttttccgtaatctgttgaacttcttgttcctatgggcctctgagatgttatttggagttttatggctaaagctacctgttttcatttcaagttccctgttttctgttgatcttattggccgttggacttgtataaatctggagtttacaatctgcaggatcctctcttttcctggcacta

SEQ ID NO: 48287 - DNA, 901 bp, Manihot esculenta
  Intron number 4 from transcript cassava4.1_017551m (locus cassava4.1_017551m.g) derived from phytozome v7.0 (chr-ID scaffold02915; pos 124720 to 125620 reverse strand)
ttacagctggtcatatccttttttgtgatttctctaatatagagttttagatgttcataatcgacaaaaagtgtgtttcacagtttccccagaaaaaaatgtatagtagcgggtaaaattatttctataactatgagatgtgaatatacgtctctggatgctaatgtgcttttgggttcaagataagtaaatggttggtggtgaaatatgctgaagttctggatcgtgaccatcaattgtggctgtgagatattgttagctgcacttgacattgtacatagattccttttgtttgaaatggcatgttgcattacttggcatatttgcttcatttggaatggttcattttgtgaggaaagaattcaaattaatacttacaaaatcatgcgtgatttcaatatctcttaaaatgaaaccttttcaaattgaaaaaattgaattcttttattctaaataagataaatgataaaaaagaaatcaattgaattgaatttttgtgaatttttttttattccagattatgaattatctaggctggtacatcattcgtttgcattctatcatgctcattggcatagttttgtagcttcttgttttttgtgtattttgctgaggtgaaactgtgtggaatatccaatatagtagtttaagttgtgttcttccagattaattattttaagatagaaatttcaactgtagcatgattgaattgtctcactggtgtggtagtgccactgtcagcataaagtaaaagagtcatcagatagctcgatagtgcagtcatgtgatttctcataatatcagttttatcttgtccttggctcttggcatggcttttttttatctgattttttgttgaaatatttgatattttctttgacatctcatacatacacgattt

SEQ ID NO: 48288 - DNA, 689 bp, Manihot esculenta
  Intron number 2 from transcript cassava4.1_018089m (locus cassava4.1_018089m.g) derived from phytozome v7.0 (chr-ID scaffold06611; pos 57729 to 58417 reverse strand)
caggtacctcaactcgtccgcgtacttttaaacaggtatttgcttttctgggctgctatttttgacattcataaatagtcgaccttctgatttaatggattcacttcaacttttagttttgcagtttaaaacttatattattattatggtttcttttatgtttcttcaatattttctttgaaatatttttgcggtgtttcaagagttccattggcattattgactagtgacaacttcctctttcactagacaaatgcaattgcatgtctataattgcttgagatgagaatccctgccctatatcattctcctgaattttgactattgctggatttcaactattgcagatgattaccctggtttccacctttaattactattttcaatatgaaaattagaatttgatcaatttcctgtctcctccctcccccttgatcttggatccttgaaagaatacaagtccgatgcatgttgatactttggttcctgaatacatgtattgccacttgagaaaaaactaatgaagcaccaagcagttatatatgcgtttgtgaccaattgtattggttatgcactgagcaacaactgtaatttaagtgtgtgtttgtatgtgatgaaagctcttttacatgaaaagcaaccttcttctatgtattaggaacaggaagaagttggaaaggaggtagaag

SEQ ID NO: 48289 - DNA, 662 bp, Manihot esculenta
  Intron number 1 from transcript cassava4.1_018089m (locus cassava4.1_018089m.g) derived from phytozome v7.0 (chr-ID scaffold06611; pos 58386 to 59047 reverse strand)
cggccatcgccacttctccacccctgaagaactcagtattaaactcctccctccacaaatcgtaacgcttttgttttttgggatcatctcagatctgtatctgttttcgccatttcagtttatttttatttttttttaaagatgttattgccattttgtttgctggagtcgtcttgaaatatggattttgttaaactcccaattttccccagattacgtgaatcatcaatttttatggctattgataatttgatagaatgttttttcttgatatgtttatttttcatgaaatttagcgtgcaactgcagcgacttattcagtttccctgtgaattttaaatttgggatgatacgtattttgctttttattttagtaattaggaaccttgttcccttgatgtgctggtgggagatatttatcatatggtttcgtctgaagaatttgattgggtttttagtgggctgttgagaaaatttgccttccaagttagataaactataatcagatagtgttttgactaaaaaaaaaaatcagatagtgttgttttatttgattgaatacttaaaacttttcatgagatattaactaattttgtgtgcaattctctcaactttgaacaatctcagttgcaggtacctcaactcgtccgcgtacttttaaa

SEQ ID NO: 48290 - DNA, 637 bp, Manihot esculenta
  Intron number 4 from transcript cassava4.1_004730m (locus cassava4.1_004730m.g) derived from phytozome v7.0 (chr-ID scaffold08542; pos 707782 to 708418 reverse strand)
tgtatctcttgggagttgaccctctataggaagtaagaattgagtctatctttgagtatcgcttaactttttaattgtcatgttcacagggataatttttatgaattcatgtggtaacatatgtatttttgccggtttaatctttttctttatgtggtgaaaattttcttgcagcatccacaagttgattgaaaacatttttcttttcttcttgatatgttctttgttaaccatatctttctcatttattaaagaatgaatgttgcttatatggatagttacatctactgcttaccaatcagtggcagtgcattagtgaggaagttaaggactaggagaaaaagaatcttcatgggcaatccattcccaccttaaaataggatgggatgcatgatcttcaggaccatatgtttgtttaattttctttgaatttctttatttatttttatgcctttaaattttcttggggtttggagatgacagcatcatgacactatatgtcaagagttacatggcctgagaagaggattaatattttgcaagaacttatttgaagttcactgtagtttggtgatatcttcttgtttattgttttttctcaggtggccacagattattttcccaccttttaaaatca

SEQ ID NO: 48291 - DNA, 713 bp, Manihot esculenta
  Intron number 1 from transcript cassava4.1_028899m (locus cassava4.1_028899m.g) derived from phytozome v7.0 (chr-ID scaffold05979; pos 387236 to 387948)
ctgggaaaaaggtaaggctctgcacttccccttgtatataagatatgtttctgcttttgaagcctaaactaaaataatatatttctgtggactagaggaaatattaaaggagggaggggggaagaaagtgtatataaccatacaggacattcaattgttatatccttatgcatgtagctacataatcaaagtctgacacgtataccagaaattattttcaattgttgagccaacaagaatcattttatttggtatatgtttgtttatagagggtcaatgggtgatatcacagagttgattcaccacagttttgaataaaatcaatatacatgaatccatccctaaacataacagaaagataatagcaggtgatatttcaaagtagctcctctcagagaaagctatttcatgcaagccctttgtagaggaatccaattgtcaaacttataatctctaaactacacgctttgatttcctctggatcttttttgtggatgtttgaagaagttcatatataaggtaacctgcagttactaatactctaattaaacagcttgctttgctattagatttgagataggaaaatagaattaaaaagaaaaatccacaaacttcgataacaatatgtgtaatttatatatatatttttttttcaagtattctaaaactctactgcagagcttcaagttagagaaatcatctggcaaaatatc

SEQ ID NO: 48292 - DNA, 652 bp, Manihot esculenta
  Intron number 2 from transcript cassava4.1_028613m (locus cassava4.1_028613m.g) derived from phytozome v7.0 (chr-ID scaffold10563; pos 497382 to 498033)
gatatcgaaacccaggtaatacatctctccatttgtgatcttttgccccacataattgcctctttcagtctttttcattcagtatctattcagttgaaaactccaatcagcttttaatttttgataaataattatattttgaattgttatatatgttttatattttacaattttgatagaatgaacctttaatttaagcatttgattttcaaaatatgaaaacatatccatatttatagtaaaattgagtagctaaatattatttaatcagtaaattctaaatagaattatttgacaaaaaaaaaaggaagaaaattagtgatggaatttcaaaaagttaattttctgttgctaaaacttttggagacgaatttccaaacctaacaccctatttttataataaattcaataaagcaaacataataagtgaatccattgcttaagaccctagtttgttttttttctttagataatagttttgactttgaagtagtatgtttagttcgtaatgagttattaattaagattttaatattaaaattaaactgatcactgcataaatgtagaaaaaagcacgtgcaggcacttgtatatatgcacgtttttattttaatattctaattgcgtttgaaaatggtttggaagatttcag

SEQ ID NO: 48293 - DNA, 1031 bp, Manihot esculenta
  Intron number 2 from transcript cassava4.1_016070m (locus cassava4.1_016070m.g) derived from phytozome v7.0 (chr-ID scaffold08542; pos 369945 to 370975)
aactcttcaaccgctggacctttgaggaagttcaggttaaatgttgttccttttcactttcaatcattttaatgttatttgattatagtaagtgtattttgttcatgattgatgtttgaacttggtcttgtttaatattatttgcaattgcatgtatatgtagatatgtgttattatgtaatttgtttttatcgcttgatctgtttttcttggttttgagtaatatttagttgttaattttgtgttaaccagttattgtgttctctttctctatggtatagaattatgtttagctttttgtcatttgttcctgtaaaatgtaaatattatcagtcggtgtgcttaatatataataaatgttgctgtcgcaactcagcaataataaataatgtaagtctggaatttttttgctttatgtgcctcgcagtaagtcgtaattgagtgaagagaataaagaattgtctacaaattatatagctgtggcatttaatatgtctttgtaggttgctttctcatgttacgttgagggctcaatttgctgggcttcattttaatttgtatctgatgtctgcatacttggacacagtaaggtgctcacttcatctaactggttttgcatcttttactgaaattgtggtcaataaagtttgctttactgtgcctgtcttgaaaactacacttttttgagatattgtattctgttgctcttttaatgtttatgtttatataattgcaatacttgtcccttcatagattcaataattaagtgcttgcttaaaccattgttgttgccacatggagttagatatgctggtgcctgttccatgactttgcaaactgattaccctgtaaatatttagtttgttagttagatcttactacacctttggatcttgtatctttaattggactgcattgtttatatccgtgagttgggggcattttcatgtgatattcaaaattgatatgataagctcaattttgtttcaattggctgccttattggataaatttttttgtacattaggtca

SEQ ID NO: 48294 - DNA, 497 bp, Manihot esculenta
  Intron number 2 from transcript cassava4.1_003272m (locus cassava4.1_003272m.g) derived from phytozome v7.0 (chr-ID scaffold06871; pos 995949 to 996445 reverse strand)
tccacccctgcatacttggttatagacttttgcaggtttgtaactttgcttttttaaattgaaaaaagcattgctcatttcaatgattcagcagccatcacataaactgtacacttatttatttattgaaattgaattttcaatcgtccaattttgtgatatctaaaacttggcagaagagtatgtgagtttcttgaatgtacatcttttaaacttttttgcttctgttgtgtcttttagtaacctattcaatatttctgatgactatattacctttaaaatagccaagaattagcagatggcatcttcaatgtagcagtttcactgagtctctcgttttttttgccgcaagccttccaatgtgataattatagaagcaattagagtttcacttttctttatgatggttgtcttcagcgtaccattttgccacatttattgctggcatttgagatcagtgtctgcatgagagaaaaggctctctgctatcaccatct

SEQ ID NO: 48295 - DNA, 957 bp, Manihot esculenta
  Intron number 1 from transcript cassava4.1_003272m (locus cassava4.1_003272m.g) derived from phytozome v7.0 (chr-ID scaffold06871; pos 996483 to 997439 reverse strand)
ttcctctcgtctccgccgtccgattactatatccggtgaggtcctgctcgtatttgattcgaatttgctagcttttccgttcgtttcctggaaaaataatgtggaattataaatgagcactcagcatgttcattaccgctttgttttaacctatcggaattactttaaaacatttattgcggagaaattcacaagtgattcaattttgcgaaattagttaacgaatttgtattctttttgttattgcgagtaactttattttgggagcattgatttccattatttattgtagaaacacttgggttttctcaatagtgcaagccaaaatctaaaaatcttcgtggattgttgtgggtgattaattcatgtaaagggcgatttatttgggttacctgaattcagacatgcatttctgttttccttagccgattttgttttagttcaaattttttgtttgctcgtttggtgttttctggttggaattcttgtacgtgactgataggaatagtaattaatattgtttgacggttgatatgcatatatatggttttcctttctagaatctttgtttagagcgagtaaagtgcttcttttggcaatctaagtttttttttcttctttttaatccttaattagtttaagggcttcaaattattctttaatggggtcatgacatcatgtgttgagttagatagcaccctcagttcttttataaagcatgcacactaggatctatatcgccaatatgtaattgttatttttcctcctttgccacgagtatactttttcattcaatgattattcagattagattagattgggtgcctatgtggagatgaatgtatgttagaataaattattttggctctgcattttctttgcttttgtttattgattttttgaatattaatattcttttcagaaaattaagatcataaaacttggtggacgtggttg

SEQ ID NO: 48296 - DNA, 594 bp, Manihot esculenta
  Intron number 2 from transcript cassava4.1_003496m (locus cassava4.1_003496m.g) derived from phytozome v7.0 (chr-ID scaffold11008; pos 116594 to 117187)
caatccagctgatctcttactagatcttgcaagtaatttcgaaatctatctctgattttctttctttttcatcatatagagactttcagtcacatttttaagaaaaatgacttaaaaatgtgacatgggtgaagtctatggagggaggtaaagcttccttctgctcttcctgttccttgtgtaaattgaaatttttaaaaggagggtcctagagatggagtctttgacttcctgcaaagttaaggcaaactctcatccatcctcttatttgatttatttgtataagagtgggatgtcagttggtccactgaagtttgtgctgaaacttgtagctttcataaaatggagcaaaccaaaccccactacctacaccccaccattgcacccatcccctagaaaagaaaaaaaaaatgatcagttgctttagaaattttctagtcttttttaaaataaacattcaaactatttatccacactaaaaatatttattctgtataattggagttcataattaagaacagagaatacaacttatccattgtcctgacagctgtttgaaacttaaaattctaggcattgctcctgattctaaac

SEQ ID NO: 48297 - DNA, 901 bp, Manihot esculenta
  Intron number 1 from transcript cassava4.1_032450m (locus cassava4.1_032450m.g) derived from phytozome v7.0 (chr-ID scaffold08937; pos 4968 to 5868 reverse strand)
aacccatttcgagctttttccatttgggtaagttttctgttttctctctcttttttatgcgtttttgatttattttctgttgatttgatcttgtttttagctcctaatctgactagggttgtgtttttgatgagttttgttgatatgggttcatgaaaactgctagttaatttttgttgttctgttgctgtccctatatacatgtcgttgggttattttatttgctttattttacaaattttcttctatttgtttttgcaaaattatgatgcaaatcaaacccaggtttattctgattttttttatattggttatgggtatggtgcaatgatggatgtttagcggttatgagagttattatgcttattggttggctcttatgttctttataggctgagtttttgtggcaatgttacttatagttagctttttgtttttgtgcttgtttgttctagatcattgcctctttagcagttgtccttttaaaaaatgggtggaaaacattcagcccgtagacatccttactttagaggtcaatccagtagacagtctgaggctcctaggtccccctccccagaccctcctgcctctcctccctttgagttccctatagttagagaggaggatctagcttttcagccttttttctctcaggtttgttcatcctgggagaacagttcatgctaatagtattcagctctttcgctctcagggattcctttagcccttcagagtccagggttgggagcatcttctaatcactccctcagacacccatcctaggattgttagggagttctatgcaaacctacacacctttacccgtcacactcccccccaacctgattagttttgtaaatggtcagagagtttacctcactcctgacatcattgctcggca

SEQ ID NO: 48298 - DNA, 865 bp, Manihot esculenta
  Intron number 1 from transcript cassava4.1_003490m (locus cassava4.1_003490m.g) derived from phytozome v7.0 (chr-ID scaffold03683; pos 31932 to 32796)
tccacataccattcctcctctggatccttatctcggtatcaactttctttctctgcatatgtgttcttacaattgacatagaagtacatgtatgatttttgttgaagaacatgataatactagtgatctgtgattgactttttcttttttggaggaaagaagattttgagaggtatggattggtgggttttgctcaaaatcacatgatatatgaaattggctttcaaaatgaggatgtaagaaacaagaattaagtggaaatgagtatttgcgagagtgtgtgtttgaattggtatagttgtatcgaggttaggtcctcagttatggaacgatgagcctttcagttcccttcttaacttgaaaattatgtttcacttgattttcattttggagttaccttccagttagtgtatctgattaacaatctttttggaagttggacagtggatttgactgcttaagcatacacttttaaattataccaattcaagcgaacttgcatccctattcttcttcaacctttaaaatattgcccccatttactatttcatttacagctcatttgcctaataaaaaacatgtggtaactcttccaaatccattcaagcttttgctggttggtccttaccgagagaactttgtaggatcccagtgactggagaatttcacatgccacctatatcatctgctaaatgtgttgacatgctacctatattatctgctaaatgtgtttccaaccgataatcttttgcgggtactggatgatattctattaattgtagtttcagttatccatatattttcatgtccttattgtcgacttctttttgatgcagctgttctagtgggaaaaactcttttgtgg

SEQ ID NO: 48299 - DNA, 1041 bp, Manihot esculenta
  Intron number 2 from transcript cassava4.1_005642m (locus cassava4.1_005642m.g) derived from phytozome v7.0 (chr-ID scaffold03264; pos 416715 to 417755 reverse strand)
ggcaccgtttgcttcttggttaactggctggtaatatattggtaccggaaaattccatcgcgtccttatgctgctttagttttatagttttacattttgtttgcagttatcatttggtttctgacagtctgattctttcactcctgatcttcctgttctcttcccccattaagttaggcttggaatttgaaggttataagcatacttcatttttaactagaattcataggatttcttcaaaagcttccttcggccatggcctagcctgttatgtgtttgatgtgttcgcttcctttttccattagctcacagctgctatttgcgccttatcgactgttagaagattcagatctttttgtgtgtttcaagtgtttcatttattctttggattgatttagtcaatcacagtaatggcagagaataatgatttgatatgtctctgctaatcacatcactgcattatcttctgaatgcaattcatttggaccatttaaagctgggtctttcatatagtcacgtaaattccatcctcattttcttttcagaaaacaacaatgtttcctcataattttaaatcagttttgtcattttttatggattgattaggtttatgcattgtatacttcaaatatattcatacatgtgtggcaaaaaaatgatttgggcctgacattattgccgattgttatctgtatgatgctcggcaaacttttctaacacaggaagatcagggtatgctttactttttctgtttaaattttgagtgttaaagtaggaaactacaaaatcttgggaccaaattacttgtttatgtatgaccattataatcagactatctcctcaaatttaacaaaaaggaggtgaaatagtgatcataacttgaacatttttatctcagataatactaagtgtacaccaaaaatgatgctttccaaacttaatgtgattgaagtaccaggaaataatgcacgtcctgatgccaagtgaattgtttattttcttgcaggttcaacattgttggtcaggtacaccagagagtcc

SEQ ID NO: 48300 - DNA, 709 bp, Manihot esculenta
  Intron number 2 from transcript cassava4.1_025685m (locus cassava4.1_025685m.g) derived from phytozome v7.0 (chr-ID scaffold03668; pos 189861 to 190569)
gtgaaaaccctccaagaaggtttcgaattacacaggttatttgtatttttattttctttcaaagttgcacatattttgttcatgctctgatggttctaatactcgtgtattcaattatgtttctctgctagggatgactcaattctaaactctttctagtttcttgcattagaactttcacatcagaaaatggttatttcttcccgcatgttatagaaaattaatgaaatattttatgggttttacattaattcggcttataatcagtttgtacagtttaggtgcatgtaagaaatttctgcttagaacaaattgtatcaaatgaaacgcgtcaatagaaaatagagtaatagacatacatcgggagattatgcacaactctcttgttacatgcttccttagtggtaatgcatgtgtcccatctctaatatatgaagagaaattataaatttatatctcggggagcagttaaaagtagtgcttccagtgtattgattaattagccgatatatatgtatagtttgatctcacaaaatcacatacatataaaaatcttttagtaactagaaatattcacatgtctagttttcattaatttaacattttatataggaattcacaataaaattctcataaactatcagtttctttattatattcatttagttttcttttgtgagtacacaggcaaccttggtggagcgatcag

SEQ ID NO: 48301 - DNA, 624 bp, Manihot esculenta
  Intron number 1 from transcript cassava4.1_010870m (locus cassava4.1_010870m.g) derived from phytozome v7.0 (chr-ID scaffold08265; pos 117968 to 118591)
ccgaacctgaatacttcgaggataagcgaaacttggtaatttttcgctttgcataactttttctttgattttttttgccgagtttttgtttgattattttgcgttttgtttaggtttgtgttttatgtattctgagaagattgaggacaagcttatggcgtgttattcttttgggtttctgtttggttgcggagaaaaaatatgattctagtagcattcttttttattctgtttaattgcattggtagtattatatggaaagttttcctagtttaaggaaaatagctggagttgcttgagttcaataggcggtttttgctcgataaggtcttcaagtaagttttgaattcgatgatcgtgaatcattgtggtgtaaagctctaagcaagttttgtttgtaatttgatgtcttgctttgcagttttagtgaaaaaatgtttgtttaaggattcgtggtagtattcatttatttttggactgggactacctgtctagtaaggccattatttttttatggttctataatttaagtggctgttgttgtaatttggaaaaaaaaaacgtgttgttgttctgtgactgtgactaacagaagttctcaaattgtgttttgcaggaagatct

SEQ ID NO: 48302 - DNA, 352 bp, Manihot esculenta
  Intron number 2 from transcript cassava4.1_028109m (locus cassava4.1_028109m.g) derived from phytozome v7.0 (chr-ID scaffold06355; pos 616 to 967 reverse strand)
tcattgttggtgttgcaattgctcttgctttcaaggtattgttgatttgttctatttaattttatattgctttcttttcttcttttttgtttgctttgctagctcttacgttttgttttttattccttttgttttaatagctgtcgtctgagcaagagaatcaacatatttccatgcatatgaagccatactctagcaataaaataatttagctatgtcacttttaaaagaaacgagttatatatatctcagcttaattgaagactagttggttgctatatgtaaaaatttaaatatcataaccataaaaaaattttgatcttaatgctgcagagaattccaaagaagaggg

SEQ ID NO: 48303 - DNA, 605 bp, Manihot esculenta
  Intron number 1 from transcript cassava4.1_025102m (locus cassava4.1_025102m.g) derived from phytozome v7.0 (chr-ID scaffold08265; pos 2979660 to 2980264)
gatttgcttgatcttgcctgctattgaggccagattgccttttaaaaggctttatttctttcatttctttgagctttaggttttcttgatgagctttaacgaatcttgctatggggaagaaaaataatacccaattggataaaccatattctttcccccacctcggtggatgctcaaaaatagatcgaaacaaagatttctctgctgttgaacaacacgcagaacattaacttgggaaaaaattaattctagcaaataaaagtaaattcgctttctggagtatgtcctcaaaaaaacaggtatactaacttgaaaggaggcttaacatcatgtaatatatgtgttattttctggtgatcgacacaatttatacaagttactctacaacccgatatctcaaaaatttcgaattgacaaagtcttcatcaagtaatcatgaatgagtggaatctgatcagcgatgacacgtctgttactctgcaacagtttattctttcgtcctccatcttctatattcgccaaccttcatcgtccacttaactaaatggcctgcttaaataacctccatagttggttaaggaaaagccggttgtgattttaagcaa

SEQ ID NO: 48304 - DNA, 592 bp, Manihot esculenta
  Intron number 1 from transcript cassava4.1_014743m (locus cassava4.1_014743m.g) derived from phytozome v7.0 (chr-ID scaffold07070; pos 74804 to 75395 reverse strand)
tgacggttgaagatcttgtaaccattgctcaggaggtgattttactgtatgtcaatttcttcttatttgtgtttggattaattgaatttcattagaattcatttataaagtcaatcaatttgatatatgaaatgaacctgggtttcagttctaaatttttttttatatatggaattcatttgaaccaaacaatcccttatgtttcgtttgcaaattgtgtgaaatttgatatggatttggtcaatattaccagtcgtatagaatgaatgatttcgaagtgcaactgaatgttttggcaaagcaaacatgaaacacttcacttgcatattgtatgaaagttaataagatttggctcaactatgaccaattctaaagaattaatgatatgtacttgtagaattttttgctaaagaaaacgaatttaagaagctgaaatattgtcaaaaattcaattataaaaaacaaaatttaacatctaaatatatttgtcgtaatctcttttccttgagaaatcaatgttcaaaattttaacactgacagtacatgtatgtatgcagtacgtcaaggtcaatcagtattcagagtcgaaacg

SEQ ID NO: 48305 - DNA, 865 bp, Manihot esculenta
  Intron number 1 from transcript cassava4.1_022214m (locus cassava4.1_022214m.g) derived from phytozome v7.0 (chr-ID scaffold02939; pos 110125 to 110989)
gaagttgtattgctgttgacactgtggataactttttgcaagatacacagagatttggacaacttttaaaggaaaatttggagttggctcagaatagaatgaagcagtaggcatattccaaaaggactaaaagagaatctgctgtaggtgattgggtttatttaaagcttcagccttatagacagatttcattagccctcaggcagtctctaaagctgtgtgttaaatattatgggccttattagatcttggctagggtaggaaaggtagcatacaaattggagttacccttgaatcttcccttcatcctgttttccatgtctcctttttcaagaagaaagtgggagactgtcaacatttcttcagaactgccagaactctagcattataggctattatagttagtagtgaagattgttacagctacgagtgtacaactatcaagttagttactgagaaatagtataatatttcagcatagtgcacatgtaaaggcatttcaatacatcaatacaaatatagcctgcttccctctgaaactctcttctatatccaaacactttcttctcttcttctttcttcttcacttctctatttccccgttctattcctatttcagtctcgttggtgccaccgctctaacaattgtcaatacctatatcatctaggtattttagtaaagaacttgtaatgattatttttgacaattaattttgagtagtttactcctttcccctttgtttgctttattgttttattccttcctaattaggttgactatgtagattactagcttctgtagatgactgtttttaacttctatttatcctgaactcttatatctaggaaattactgcttcaaatc

SEQ ID NO: 48306 - DNA, 423 bp, Manihot esculenta
  Intron number 4 from transcript cassava4.1_000032m (locus cassava4.1_000032m.g) derived from phytozome v7.0 (chr-ID scaffold07330; pos 170956 to 171378 reverse strand)
tctactggaaatactggtatggtccagtaccatttattttccttgtggaaatatgttaaagttttaatttaagcaaaggttatataattcataatatgattatgtaccatactttgacttgcaatttgtggatggatgcgaataatcagagtaatattgactattgatttctcttattttttaaaaccatggatggttgtcaagtcttctttatcttctgagcttcattggaatatttttggtttgggtactgacctttttactaacctttttaatatgcttagcttgtttagagcttgtgaagattttattgtgaaattgattattgcgttaagaaacatctgaaaaaatgtcctttttttcttttaattattaccatttatttatttttcttgcaggatcctgtcagctttctctttggcg

SEQ ID NO: 48307 - DNA, 394 bp, Manihot esculenta
  Intron number 3 from transcript cassava4.1_000032m (locus cassava4.1_000032m.g) derived from phytozome v7.0 (chr-ID scaffold07330; pos 171561 to 171954 reverse strand)
cacacggctcttgtttgtaagtgccatccctctctgtctatacattctttgggtaaggtcaagtgagaacattaactacatatttgataatatctatgagaattattttctcaatttataaagaaatctatctctgaagctggtcttcaagtgttatccatgcttgtacttttgcatgcgttataacttctttgagtgagttgatgtggggacatggactgcatgtttaatgtcatctaagagtagtttctcaatttattaagaaattcatcttgtagcaagtcttcaattttgttttgtgtttttgtgcatgtgcctttggaagttgcagaattttggcctttaaataaatttggaaaattttttaggtgtagcttcctcattctcgcatcaa

SEQ ID NO: 48308 - DNA, 1004 bp, Manihot esculenta
  Intron number 2 from transcript cassava4.1_000032m (locus cassava4.1_000032m.g) derived from phytozome v7.0 (chr-ID scaffold07330; pos 172117 to 173120 reverse strand)
actaccgggagccctttggcacttttaccggtaagatttacttgccaatttaataaagctatgttatcaatatttgcagcaaaagtttttgataacatctttcttggaaatacctagtcattaaaatgcaacatgctagttataatttttcttcatatttgtcttaataagagttaatagtgttagcaatgaaatagctgcttgatggtcaatttcatatggaatggaaaaatgaagaactcatgggagagagatcttatgcccagttctgagtgaaggcatataacttactgaaggacttgtatcacagatgaagaccttaggcctagttcagcaatatggtcaatttcacgcaggggtgggggtgggggaggggaaggagagagagagagagagagagagagagagagaaggcaccaatcctttcagattaaatcttagtagttctattgtcaaaactgaagagaactgctcatgtgtgtatttgcagacttaatgactaatcctactctttttgggattagggatgaggaatcccagttagaagaattcaaaaataatattaataggaactaaacagtcttaaacgtcaagtatgctagttccctgggatcttattcagctgtaacatagctgcttcggccattctagtgttgaaatcaactcttgcatgcatgttacttgtagcagcctgcctgtagttgaagaaacaagcgtaccaaaataatgagcaaggaaagactcaattgctgtcttacgaggaagattacaatttcttttgttgtgatatatcctagcgatctgaatgcatagtgaataatagtcaaccaatacgaataattttcctgaaagtatagtgaactaataaatgtgctttaagaatctagagagtttcttctgctagttttctaatgtatgctatttattgcattttgtcctttctatttgaagctgtgtccaacatctgttccttgaaccaggtagtggccctggtatattttccc

SEQ ID NO: 48309 - DNA, 703 bp, Manihot esculenta
  Intron number 2 from transcript cassava4.1_004319m (locus cassava4.1_004319m.g) derived from phytozome v7.0 (chr-ID scaffold01543; pos 77291 to 77993 reverse strand)
cttctttttttaacattttaacacaaagccaagtaagtgtctttctttttcttttttttttctttttttttttctaaaaaagggttcatcctactttcctgagtactagaaattagaaaaaaatgtgtaaatattcttgatttattgaattgttaatagtaaacgttggcaataaaaatgccatctttgaattagtagttattgtaccgttgactttatgataaattcttctttaaggaaatgatgttttgattcatgcttagtacactaggtcctgggaagtcttctaataccatccataaaaatttcaaattttctagtttatcagctttttttttccctttgaggtagaaagagggggcatggcagtcttcttggttatgcactgaactaatgaagttctgtttatagaagtactttgcattgtagtcgttttgcatatatacagtcaacttaagctgataatcagttgagtagattgattcttttatgaatgaatactgtgcatcctatgaaagaattgaaacatgattttgtggcatatttctggccttatccagatggttgctgaagcaagcttatgttggaatgttcaggcaatcttgaatatattcttcaatggtggtgttggcgcaaatttttgtggggttaaatgactgatcagttaatcaaacaggtggacttctgcttttgatttgtttcc

SEQ ID NO: 48310 - DNA, 666 bp, Manihot esculenta
  Intron number 1 from transcript cassava4.1_002103m (locus cassava4.1_002103m.g) derived from phytozome v7.0 (chr-ID scaffold02264; pos 540856 to 541521)
tctcctgctcctctgttcctgatctggaaccaaaggtaacaactttccttctgtattcgccgtatggtgttgatatttgttcctcttctactctctagggtttctgtattattggttttgttaatttagttttttccttttaattttggatgctcttggtggaaatttttgcatcatacttattgggcgtggatgtggtggtcattaattattagaggattagcacgttgaatataaaccggaatttttgctaggtataagcatttgaatatgagagacgtttaattagttctatgtatatttaaagctgagaaaaattattttcttctttagcccgttattgtttttgcattttgaaatttgacaggttttcttaaattacgtaatacgggttggctgaatttacttttagctcgatgacttcagtttttcttcttgtgcttgagcatagtgaaatttttaagtagaaatttgttattatcctgatatgattgtggatatcgtgacaatttatgtgtgattatttgcttgttaagattctagggctgcttatggtagatgagattgaggacttctgcgaattttattggcaatgtgcaggcacacttggttttgctctcaatgatctcaaccaacttccttatcatgtatttgatttggcaggtc

SEQ ID NO: 48311 - DNA, 460 bp, Manihot esculenta
  Intron number 2 from transcript cassava4.1_027849m (locus cassava4.1_027849m.g) derived from phytozome v7.0 (chr-ID scaffold08265; pos 1451045 to 1451504 reverse strand)
ctttgatatacaagaaacacaaattcaagatttctgtaagcaccttcaacttagctggtgtggaatcttattgtggttgtcgttgttaataatggaatatttcttcaattttataagctcagtttcctctagtccagtcattttttgattatctcaaaatcttttatgtctcagttctgcccttgtatatccttagcatacttaacaaatatgcttaatatgtatatactgcaatgtcaaatctttcattttggctgttttgtgctgtataaataacttcattgcatgattttaggagataaaaaaacagacaagggaaaaaaattaacaaaaggaggaagaagaacccatatctcaaatatcatgcattttatttagggatttatagaattctagactcactgtcttccatgtctttaactgtctttatttcggcaggaaaggttcaagtatcctacta

SEQ ID NO: 48312 - DNA, 657 bp, Manihot esculenta
  Intron number 1 from transcript cassava4.1_010385m (locus cassava4.1_010385m.g) derived from phytozome v7.0 (chr-ID scaffold05432; pos 387096 to 387752)
acattggtcaatctcattggtatattatgcttcctcctcccctgttcaatctctttctcactctatttttgtcaaattgcgttgcttttttgttgttattttttttttttggcttctgtaaacacatgggtcttcattgtttttgaagcatgcaaattggttctatgtttatttgtataattggttctttccagcatttgatttggttactacttttaaccttctgttatttttgtcatttttcatcctttttgtcctctccaatttgtttctcttaatcatattaggcatcctcctcctatttgattgtcccagttctatattttctttccatgttcagtcttggtattgattctgcccagctcttaacctttaaattggtgaaatcaccttgctagggtgatgacattagcaacttgttttatcccatggtaagttatgcaggcaatgagcttcatccttccttttttggaagggagaaataaaatcttacctgggaattctaagaacttttatttttttttgtgttgctgctgatcatgacttagtgtacccttctgggctagtttttccgtcttgtaaaatccctcgattgaccttgagcttttttcacattctgtagaacttagttctgaccgtgctgaatttctaaagctc

SEQ ID NO: 48313 - DNA, 769 bp, Manihot esculenta
  Intron number 1 from transcript cassava4.1_025677m (locus cassava4.1_025677m.g) derived from phytozome v7.0 (chr-ID scaffold07301; pos 95900 to 96668)
ttactcctgttgttcctgctctgtacttggccgaggtaattcgcagtaaatggctatccttaggactaaggtgtttgttaatagaagctaaaaagttcagtatagaaattgatagtttgcttgaaggcttaagagattcatgaatatccaaatttcgctgcatctacatgcactattaaatttgggacaattatagagggctattgcttggtccgatgttatttcctcgggtcaatcaagggtaatatgtgagctaaatatagcttggcttaataaactagaatcaatagaagtggagctctgcccaaatttattttatatgctaccaaaaaggaacggtcactcaaaatccataatatccattctcgttttatctgctgaagttctagttcaatatctatgatggaaaaaagaagataatgttctttgaattgctggataaagatctcatgaactacgctggatagtcaaatttatcttacaaatcagctttggtggtgacttgttctaatattcatgttataaaacttcagattcgcaaaaaactcaaatttccattgcatttacttggcagtcccagggaactttttctgttgtcaatcattcagttttggtctacaggcaaggttacggggtcagagaactggtgaagctgatagacagccatttttttgtcttggggatctatgggaatcattcaaagagtggagtgtgtacggagcaggagtgcctctcctattaaataggaatgacgttgttaaacagtact

SEQ ID NO: 48314 - DNA, 759 bp, Manihot esculenta
  Intron number 1 from transcript cassava4.1_014360m (locus cassava4.1_014360m.g) derived from phytozome v7.0 (chr-ID scaffold08265; pos 2337087 to 2337845 reverse strand)
ctgcacctcttgctcgccttaccatactctttcaggttttcttttttacttttatcaatttatggtttaattttctgtgaaatcttcttttttatataatttttctaaggaagtatgggagtggggataatttttatgggaagattttcttgttaatgttcttaacttgccatgtttgaggtgtaaagttgccttctttgtttccttagtggtatgagcttatctgaacaccaccatatttttaatgatttaaacaataagaatacgtgttaagtgtaatggaattcttcgatggataaactggaggagcatgccatcgatggagttttgagaaccaactcaaattaaagagtaaaggatgttgtatgatagtctgatttgcgtgaataagcagttaattacttgatttggcaacttttgttacaagttgtgatgagcagttattagctattagtttgttggtaaacagctattctttattaaaaaatgttgatatataataaagcaggttctataggttgagattttcagttatttgcgatatccagagttcatgtttcttctagcttgatgcttggatttggggaattttaagacatgggttgaaatagtcctccaatcgtcacaagggatcatcacaggtggaaatagtgaatgctagttttggttgatttaacattaggatgatcaatgtggttttaggaacgctttgtattgagaaccattttcttcatgaccttatctttgcaggtgcaaggt

SEQ ID NO: 48315 - DNA, 575 bp, Manihot esculenta
  Intron number 1 from transcript cassava4.1_000758m (locus cassava4.1_000758m.g) derived from phytozome v7.0 (chr-ID scaffold10563; pos 1056279 to 1056853 reverse strand)
aggactctggttggccaagtacgtaaagctgtgtgtattttatagtcagttaaaaatgaagactttatggagaatctgagattaaagaggactcgaattaaaaattctaaattattttcatatagaaaacttttcattacgagcattttttgaaaaaattttgattactgaggattttggttttaatttattgttaaattaaataaaatctcatttttatcatttcaccttatcactaaactgcaattaaattcaaaaagtgcaaattgtatcgattatttttgttaaaggaatggttgaatacttgttggatttattggttttgttcattttgatttttcaattttaaagggtaatttaaaaaattatttgatggtatttttctctgttaattttcagctgaatttttctgtttctactttttaattttaatttccctgcaggatatgtcatgagatcatatcttatgaattggttaatgattaaccatccattttgcaattaatggattttcaagattacaatctgttctttggcaatttgaaaccattgatgacttggttaagctttggcag

SEQ ID NO: 48316 - DNA, 741 bp, Manihot esculenta
  Intron number 1 from transcript cassava4.1_008426m (locus cassava4.1_008426m.g) derived from phytozome v7.0 (chr-ID scaffold03648; pos 55448 to 56188 reverse strand)
ttgaagtacgtttctattttttctttccaatggccattgcttcctttttcatttatgtttctaaatgggtttttattatttatggtttagatctttaaatcccttttgattttattagaatgtatgatctgcaagtccctgttgcatttaattgtcttttggctgctcatacttcattttctctttctttatcacataattcattttgtgtttcatttacttgtatatggttctgtaagattgttcaaaatcagttttacgattgttcaaaatcaattttactgttacattgatctctatttttatcagattatgtcagtatcgtttgttgattaggtactctgctgctgtattttgttttaatggcttcctttagaacaattcattttgtaagaaaaggtatgatgaattttttacacaattatgcatagtttctattaaattgattattttaagttgaaaaagaattgaatcgtcattccaaacatgagaattgacaaaaagaaagcaattaaattgcgttcttgcaaaattttttattccaaacagaaggaattggttcttactttttccatgtgtgataattcttttctgtagtcgtctaggctcaactatgctatgtcttttgtccttgttcacaatattgtttatctttactccaggagcagaatataagcttaagttctattgttatttattgatgcttttgaattgcaaaggaaaaatttcctggagctgtgg

SEQ ID NO: 48317 - DNA, 324 bp, Manihot esculenta
  Intron number 4 from transcript cassava4.1_030589m (locus cassava4.1_030589m.g) derived from phytozome v7.0 (chr-ID scaffold03481; pos 109939 to 110262)
atattgaggtatttctaattcacaagctctgcagtttctgtttcctcttaaacttctctttttttgggggggtattgcttattttgtgagaaattcgcttctgcattttgttttcttattaggtttctaattaatcacctattctatgcacttactagttgattctttcttgagctcttaacttttttgctcttcgttgtttattgacttattgatgttgggacaaatggggtgttcacttcaagtgtgaaataatttgtgtcaaagttgatatgtatggttaactgcaaattcgtttttgtaggtctggaatctggagagcag

SEQ ID NO: 48318 - DNA, 315 bp, Manihot esculenta
  Intron number 1 from transcript cassava4.1_031883m (locus cassava4.1_031883m.g) derived from phytozome v7.0 (chr-ID scaffold02943; pos 530739 to 531053 reverse strand)
ggtactaagtttatgtaagactgctttattcctctcttatttcctttttttttttcacccttgtgtttttttaatcgatttatttggtgggttttccttgtttgattaaaatattacatggcatgtgtgaaaaaatgttttttttttctttttatttgtacatgggtcatatggcacctaagaacaaccagtaaaggtttgatctttttgaaacatgtgtttcgatatctatagttcttctggctaatccttctgggactctatttggttctattttaaggattcctgtgattggaggacgggagctggatttgc

SEQ ID NO: 48319 - DNA, 848 bp, Manihot esculenta
  Intron number 3 from transcript cassava4.1_027897m (locus cassava4.1_027897m.g) derived from phytozome v7.0 (chr-ID scaffold03283; pos 114608 to 115455)
atccctaaggtatccagaattcatgctatgtttatcttatacatgtatatatgtcttttatactttgttactggctgactcttttttctcttttgaagaactttctgaactatcttttcatcgtcattaagtttgttgcttactgctatattaggaactaaagttctttacttaattacatcttctgattctgaatttgccttggctatccacaaatatgtaatagtaaactttgccaagtgttcctagtgcacaaagtttcctgctttgcaagggtatgtagcccaagtaaagaacatgttaacggaacactggattcatggcataggttcttgcataatcctatctctattgttagtcgccctctcaagatacatttattttcctgtcttcaatttgaatttcaaacatttgctctgtgaaagggcaagctttttaatggttgtattgaacaacacaacaacaatttagcataatgctagaaacaatgttgactaagaagagaataatggggcctttgttagagctgtggaagtgacatttcaatctctctctcttgattggaactcattgaaaactactggagatgttgagatttgttgcttaaaatatttttgatgtaatttttttagttgaaaagaaatggttgccatgtatattcactagtgtaaattttgctgaataaattaaattattgatttggaatcaggataggactgttgatgcaagttatttcattgtaagggtagcatgattgtgatcgattaaaaattataagtgattacatttgctatctgaggtttctattccattaaagtggtagtgattattctgtgttctcccagttc

SEQ ID NO: 48320 - DNA, 972 bp, Manihot esculenta
  Intron number 2 from transcript cassava4.1_008021m (locus cassava4.1_008021m.g) derived from phytozome v7.0 (chr-ID scaffold03802; pos 509219 to 510190 reverse strand)
attgatctgggctgtctgcctgcggagaaactgaggttagtcttgtccaaatcattgttgagtttcacacccgcatgctcaaaaggcacattcttttatggttataaagtggcactcatttaaacttcttcgtaaagcacaagtttttatatattcctaaaagaagttggctccagggatctatttaggactgaactgatttttggagtttgttgctagaccatgagagaagttacttattgtttgatcagatgcaataactgcacatttaagatcattaagcttcaacagtggcccaagcaggtggtattatttgtttctttgcagcctttcaatttaaaattttatatttaaaaaaaagatctcttgaatcctaggatttcctccttttcctttttaacccttcacttgtgttctaattgctaactgctgagcacaattaagcggtgctatttttcttagctgtagatcacagtgcgtctatttatcacactagttcattctaccattatattccatcgatgtgagctgctgttaatgccaatttacctaatatgcaaacatggtatgatatcttaccatctatgcaaagccaccgagactgcatgagatattgttaatgtttttggggaagtcttaaaaccacctttgcagtgctagatgctattacttcgtcaaatctaaattattaagtcctgtagtggcctttcatccaactttgagttggtttggtatatttttttaagtatgttaggctaactgcagagtgttcattctctatttgcattttcttttctttattacttgtatgtttgtttgcctcacatcacaaaaataaaaaagatatgacacatgtttggaacttttttcatctttaacagaaaatatgttctcaacttcttaattttgttttagtatttgctcacttttttgtgtctatatcttgtttttttatgcaggccagaccataat

SEQ ID NO: 48321 - DNA, 1031 bp, Manihot esculenta
  Intron number 1 from transcript cassava4.1_003890m (locus cassava4.1_003890m.g) derived from phytozome v7.0 (chr-ID scaffold04043; pos 1319230 to 1320260)
acaataagaacaaagtgtttttcaacaaagcccaggtttcaaaatcttttttcccttcaatattcttttgatggttaatagagaatgcgaatatgtgttttgttttgtttattctgtgattgagcttggtcttgagtccaattatattacattatgttgcaatgtgaatgtgtactcgatacttcatcgcaatagtggagaacagagccccctctgcgctcggtatgaaaggagtataattgtgctacattgatgggctcaccattttcgccctccttttacttctctattttaaattgttttatatggtccagaaagaagtaacttgtaaattcaacatgtcagcatcttcttttgccaactactagaaggcaggcatgtattttgtatctctggttttctgattgaagtaataagctcgttgaattatggtagagaacaaacaagaatgtaattaacatttttttttgaaagaaagaacaaaacatggtattgttaaactataacagtgaaaaccatattatgttcctcttcctaaggagtaaggttataaggaagctgtcatattctaaactgtctcttctcctcttactgacccttccagccataattaccaagatcaggagtcaaaatctcaaatttttattatgttgggatgataattccatttataggaattgttacttaagaaattcaagatgcagaatggaacttttccttgcttcacttacatagacttctgaaatcaatttactgcagaaaacatctctagttgagtatccatctctgttacaaagtatattgtgtgttttactgtgtctttttattgactaatttaccaatactacatccctttcacggcagtgtattcttttaaattctccatacatgtgtgcagaaactatattcctggacgctttttgatatgcatacatgctaggattatggtttgcttgtgttttagaagcactgaaatttgagcttcgaaatgctcaggttcacaacagagacttatccattgctgtcctaag

SEQ ID NO: 48322 - DNA, 703 bp, Manihot esculenta
  Intron number 2 from transcript cassava4.1_014876m (locus cassava4.1_014876m.g) derived from phytozome v7.0 (chr-ID scaffold08542; pos 18328 to 19030 reverse strand)
agtggtaattttcctctgatatacttatagcatcttctttgaagtcattatctactttacttttttgaagtttgaatttactggttgtcattctcttgtcgcggtacctgggatatgattacatattagcaaacatttttactagcaatttttataaaaggaggcttcagtgatatttactttgccgttgttgccttgaattggaaagctccggctcacttattcagcttttgtttgacccatatatggagtttatccttgtgaagttgacaacctaagtggttttagttctacgctagctcataaaagcttaggcatgcacagaacctgatgaaagcaaaattggcagaaatgctaatttctatgagtaaataacgatcctaatgcagtgaaaatcattattataacaacatcatgaaacctatgtaatggctttcaacagtccctcctcaaatgtacttgaaaagcaaggacactgattttaacttgtcttttactgtaaaaccatgttgataagtgataactatctggtacgcttaaaatgtaaatacttgctctagatgaaaagaggcaaaaactcagaggtaagaagtatgattgtcagaaagcttgcataaggcattctgtctttatcctactttctttcctcattttgagcttaattacagggttggataccattcagcagcgtcgaagtcagaaa

SEQ ID NO: 48323 - DNA, 889 bp, Manihot esculenta
  Intron number 3 from transcript cassava4.1_001060m (locus cassava4.1_001060m.g) derived from phytozome v7.0 (chr-ID scaffold02264; pos 79037 to 79925 reverse strand)
ccacgcctgatctctattgtcagtgtttttctcccttgaggctatgcatgagattatccatcttttgtttttagattttcctctttggtccatgaacttctaatcgtatttaatgcaaattgaatagttttcatgaatttattgggaatttcaattttattattctctttttattcaagtattcaaccaattagaacttgttttagctggggctgcctccttcctagatttttacattcatgttgacaatgttgtatttttagaagattggatatcttccaattttctgttgcttttagcctgcttaccagtcattcaaaggttgaccacatgacacacgctaagaatgtacttaaaatcaatgcatagaataagtgatctacagatatctggaacccaagaaaggaggccaacagcgttaatgaggtccataagatgagatgtatcatctttaatgccagttttaataatataaatatcaatttatctaccaactaccatcatctgaagcacaatagctatgattaattcatgactctgtaataggcataaacattaacagcttttgtcttttaataattgttatcaatgagacctaagtggaaatataattaccgatttttctggaagcatgtattcattaagcgagagtgtgaactgtgaattgtagaaaaaagaagatgcaggaggaatgcaacttgttgctatgcctttgtctgtggttttagatggaagccttttttttaattattttgtttaattatataaaatgttttaagtgggattttttttctggccagaactaatattttgttaatataaagcatttctgcatttgtgtggtaaaattgacatgattacttgaacagccactgggaaatcaccacct

SEQ ID NO: 48324 - DNA, 764 bp, Manihot esculenta
  Intron number 3 from transcript cassava4.1_005261m (locus cassava4.1_005261m.g) derived from phytozome v7.0 (chr-ID scaffold06871; pos 628867 to 629630)
aaacagtctgaacgatacattggttagattaaatccttagtagctttcagccatgtcattggtcactttacattcctgatttatatcccttaagttcctttcatcattcatattattattattattatttcacaattatttgctactttccactaacttttatcttttacacttgctcacttgatgattaatattgggaaccataaaggaagaaataattgtgtgagaacaacagcaacaacttatcattaatctcaaactaatcggggttggctatatctccattcagctttgattgaaatcaattatccatcaagatccagaaattataattctttgatactacctttatctgcgtcactttaatctcttcctttttccttcttacaccttccatccatgcttctgaactttgtcatgtgatgctctatgtcggagcgttggacatgacactgttgaacaaatcaaaaattaagttggtattttccaataattgtgtgtgcatgtatacacaaatattgcacacttaatccttttagaatttatctacaaggtatctcttctttctgtcaactcccttcattcttccttataaagaacttattattgcgatttctggtttctgttaaattttttgaaatgggaatacaagacgggcattatgagatttgatgtgaaagaacattttagggagtgttcacgttcacagttatagttacgttagtggtaacctttgtgcatgaaacattttgtgcattttaggt

SEQ ID NO: 48325 - DNA, 789 bp, Manihot esculenta
  Intron number 2 from transcript cassava4.1_010981m (locus cassava4.1_010981m.g) derived from phytozome v7.0 (chr-ID scaffold00297; pos 99879 to 100667)
gcagaggattgcctttgtccatcttcaagttcttggtacggttacttcttctgcatttagtttatcaatagtgctgtattggtagctaatatattataggttctatagctggcatgcattttgattttgtttgtcgttttgtgtataattaattataagttaaaggaatccaactcatgtctttttttctcataataatggagagaggaaaattcggggaacaaataattttattttgttttatttaattttttacttagttgagaagaaaatggtgaagaaagaaaaacatgaaatagttgaaaaaaattatatttactgttatttttcttaaaaaaatttctcttgaaattgggaaagtgaaaaaaatgtttaaaattgcaaagaatgtcttttatatttttaggttttttatatttaagaataaagtaaaattgtaatttcagtacttgaataataattttcttttcaataatttcctccctataccgtcatgtgataataaaatagtatttcctcttctcatccttattttcttacttttcatctaaatatactattcgaaaacattaaacctaatataaattcaatttatatagtaacaaattttgtaattactaaattaagtatttatattaaattatatgaatttgaaggatatttaattaaagaattattcagtttgtttttacttaaggtggataatacttttaactttatatttctcggttaaaaaaataaaatataaagaaactgcaaagcaaaagtgatgtgatattgtgtaggact

SEQ ID NO: 48326 - DNA, 913 bp, Manihot esculenta
  Intron number 2 from transcript cassava4.1_017845m (locus cassava4.1_017845m.g) derived from phytozome v7.0 (chr-ID scaffold07238; pos 190726 to 191638)
ctggagtccggtaatctttcaaattttcctttgttaattttttttagatgacatttttggattattgttttgtttatatgtagtttgattgaatataatgtggataaattagttcctatttgcctctctgtggatcatcaaaggagtaaacttttaaaattgattgctgaaggagtttgaccatatgtgttgtttagggtagatgcaaatttaccctcattgtcaccctttggagctttgactagaacttgatgtgttttcatcgtttctgaagagggatccattttgatcctgtattgtgttcatagtctgatccgttgagactgatgatctctggggatctacattttcatttaaattgtgaacatagttttggatttgaagtttcttctggagaactcagtttcatatggttccttgccagtattgggatcaaattttagcttgcctttgcatccatccacctgttaacagtgaagtaagaaagattgatattatgttagcaatagagtctatttcggttttctgacttttgtatttggattttggatttaatgggaacagctttgttggccatgatagcatactggatagaagtttaaatagtaatcttgacatcccttgagcctattgtgttcacctttggttcaaaagtttcaggttaccaaatgcctatcatgaaagttttcttctggatatattttgattgaaatccctgttgttccacttgtttttcatatgctgcaactctccattaattcaatatatgctgtatatgtggattgccttgagcatttgaattgattggtatgactatgagctgtttggattctgcttttgattaaatgatattatctgttaaatgatacaaaaattttcctcctccttcttgtccatacattttatagggcta

SEQ ID NO: 48327 - DNA, 986 bp, Manihot esculenta; identical to SEQ ID NO: 47356
  Intron number 1 from transcript cassava4.1_001864m (locus cassava4.1_001867m.g) derived from phytozome v7.0 (chr-ID scaffold10114; pos 126434 to 127419)

SEQ ID NO: 48328 - DNA, 812 bp, Manihot esculenta
  Intron number 2 from transcript cassava4.1_001856m (locus cassava4.1_001856m.g) derived from phytozome v7.0 (chr-ID scaffold08542; pos 547320 to 548131)
aactttcttagctgcagcaacaagaaaagaaaaaggtatgatctgatcatcatcctcttcaaatgatcacctgataattttttcttttctaaaaaaatttctttctctgtccctgatccatctcattgcttcaatgaacctttcccattagcgttatttaaattttgcagtatctgaaaagctttttttttttctttttttctttctttctcttgctatctctgccaagaaggtacagaaagatagataatgggtttctctcaacagccattcgtgtttctgtttaattttctctccattttccttttgtttcttgttaatttgaagcccttctgctattactaattatttattgtatttttatatttttttccttttttgtctttcttttaaagattaagaaaaaagatatatttttaaaaaaaaatataattactagttcatgcatgcttcaagagggtatggtgtggcaacctccaaaaccattcatttcatatctccatacttcctatcaaaagcaacttagtgctttttgtctacctttatttgaaatcaaaattttttcataaaaattcatttcttttttatcaaatattttgtttgaaaatgaaataatttacttttttaacatataatttttttaaaaaaagttaaaatttatttaaaattttcaaaaaaaaaaggattaattatatcaaaaaaattcaagaattgagattctagctagctagctaggttgcgtcctcttttttgaataaatgaaaatgaaaaataatttgtacttgcattattgaattgttgaagattgtagg

SEQ ID NO: 48329 - DNA, 580 bp, Manihot esculenta
  Intron number 1 from transcript cassava4.1_030932m (locus cassava4.1_030932m.g) derived from phytozome v7.0 (chr-ID scaffold03241; pos 449626 to 450205 reverse strand)
ttacagttttgactgtgtgcagtgtccttcttcgggtattctttcttttctttcttcccactaattctctataattatacttcattattgttttgtctcttaaccctgatatcttccttccttttcgcaaatcaaattcactctctcattatatattttttcgatttatttaataacattaaattactcacttataattatcatggtactcgattaagatttatatttaaaaagtaattaaaatattcgaattttaattatatttattcacgtattatatttattataaaaaataactataaattatcattatattcaaaaaatataccgctacacactacgattacatatatattctagttattattttgtttttagtaattaagaaaatctgataatccaaaactttatgcatattgttactaattagatttaggaaattgatgtgattcacactgtaatcacttcatttacgttgttaattatgtattatttcatggtcatttgaactcaaaatttgatgcggtggtgtagctttttccccaaggagaaggaccaattagtttgcaatctccactaa

SEQ ID NO: 48330 - DNA, 506 bp, Manihot esculenta
  Intron number 1 from transcript cassava4.1_001696m (locus cassava4.1_001696m.g) derived from phytozome v7.0 (chr-ID scaffold06650; pos 6183 to 6688)
tcttaactgaaaattcagtaagtagaccttttatgatgtatttgacgagtctgatactccgactcttcattttgccatgtgtccgatacatactcgtgcattcggacacttgagtgatatattcatggatagttaataaaatattatttttctctcaaaatgaaaataatgtatttagacaaaaatagttatttagttatattttggatgatatttttgatattatttaatcttctatccatactataattattactatataactttataattttttttaatctagtttattttatactacataacgtattcaaacactatatattttgacttagatccatattccggtattttttattttgaaagttgacgagtcagatatagagatatacactcatttctaacacctcaagtaacatagtttgatcacatgattaaaccaaggaatatatttatgtgttaactcatccttagcttttgtttgtcagggaacagaagcagttgaa

SEQ ID NO: 48331 - DNA, 988 bp, Manihot esculenta
  Intron number 1 from transcript cassava4.1_012580m (locus cassava4.1_012580m.g) derived from phytozome v7.0 (chr-ID scaffold06705; pos 206243 to 207230)
tctccgatctccaccatctcgccgacaagatttcggtaattgaattttgaactttttattatcacttctgttgaatcttagatggaacatagggatttcaaatgacgatatgtcttcatttttcattttaattttattgtttaattttctgggtgggaattgtatccagaattttcatgccatggaaattttatttttattttttttacgttttctctattacatatatacaagtgtatacaatcctctcaaaaaatttattaaattccttgaaaatttcttggagaaatgagacctcttcctgctttccaattgcagaaatgaaactttttttttaaattcattttggatttactttatttaatttcggattcataaacgaagaaatgagttttgaaaattttatttctaacctgattaattaatatgcgtttgattatttcaaaccccttatctgcaatctgttactagtttctacaagatcattggataattttttttgaacaaaaaaaaaaagatctgaattgtctcagatgctatttggtggttttccttttattctttatagtcagctgtcaaagttaagctgataaatcatttactcatgctgatgcatcttttagattttctcttagattcttttgtactctttaattgttaatacattagatgttaccaattctttcctcatcaagatacgaggaagtaacctatccttattctagtcaattaacaattatttagtgagatttttttcataatacaatatcaacaaggcttgttaaagatttttgtgaaattttcatagttctcattttggcgatactgatgccttgtttagaattagtatgttagatcatgcggatgtgcttcacttattatttatttatttgtttttttttttttgttggatttttcaattaaactgaatctcatgtcatcaaaattctggcattattgcagttctatagacactcagtagcgcagt

SEQ ID NO: 48332 - DNA, 377 bp, Manihot esculenta
  Intron number 1 from transcript cassava4.1_018200m (locus cassava4.1_018200m.g) derived from phytozome v7.0 (chr-ID scaffold06700; pos 224577 to 224953)
atcaattttcccaaggaactggcttctttttataggtatgatttgcattcaactttcttcttgtggaagttaatttgaatttacaaaatttcctttcagttttcctgcgaagcaagcacagtagtttaattatgagaatgaacaaattttctctcgaaacaaacagaaaatgggcctttctagttgcaagcgaacgaaattcttgctagttctttagcttttttgtcttttgtttttttttttaagtttttacttttgccagagcttttgtaagatttcaatattattcatctagtaaatgactcaggtattaaatgcatctgtttacgatcatttggttgtgacagagtcgttgagctagttgataatttaagaat

SEQ ID NO: 48333 - DNA, 531 bp, Manihot esculenta
  Intron number 1 from transcript cassava4.1_009348m (locus cassava4.1_009348m.g) derived from phytozome v7.0 (chr-ID scaffold06140; pos 112398 to 112928 reverse strand)
gtattcgacaagctcgggtgggtttcctattattagtcttttcctccttcatgcttcataagtattttgtttttcctttgctttgctttagttcaatcaaattcttgaaagaactcagtttaatgatgaccgttttgagcaattcattccataatggaagaaatccgtttattgacacgaaccagtagttgggtgtgaaattccctctgattcgcatggatgattaaaccttggtaagattaatgcattcgagttagtgcatttgacagaggcctttagttcttgttttcacaaggacgaattttttcctgtcatttgagaaaagcccagaaaacttatgtgcctttctagattggcttagttaaattcagtttcttttttcctattcattgatgaaattgcattactacctctagtttttatctgctttatttattgttgaacttgaatatgcttaacaataatgatctaacaaactttttctgcaaagaagtagaggtccgctgattggaaggcggcaagggcttatat

SEQ ID NO: 48334 - DNA, 575 bp, Manihot esculenta
  Intron number 1 from transcript cassava4.1_000648m (locus cassava4.1_000648m.g) derived from phytozome v7.0 (chr-ID scaffold02943; pos 122024 to 122598)
cagataaggtatattaattatatctttacaatttctgccatgcttacttgcatctgattttgttctacataattctgtataaatcatttctccattgttggttggttatcactggtgcgttaccaactataacgagtattgattggaaataactcttttgagcatttcaatgatttgaatttgttcctatttactctctgcaagttggtaaatctgcatatttctctgccattttttaaagcttaccaagatatatcgaggacttttgtactgcttagtgttaacaactggtactttgttgaagtttggtattataaacttttcttcagggaaaaagagagagagagaggagcttctattatgttttcttacttgataaaagaaaaactgaatctactttcaaaccctttttgctttactgccaccttggaataagctggaaaagttatccaagtcccttggtctgcatttaggatgggggcttttaagtgggtactgtgtgccagctagttgtcctgatttttctttttctgattttcttctatgcaaacaggataactacaaaaagcccaatt

SEQ ID NO: 48335 - DNA, 601 bp, Manihot esculenta
  Intron number 2 from transcript cassava4.1_014998m (locus cassava4.1_014998m.g) derived from phytozome v7.0 (chr-ID scaffold02936; pos 23950 to 24550 reverse strand)
gattcttttctatcttcattctatttcacaggcaggtttctttttctttttctttttccttccttttcttctttctttatttatttctttctgctttttttttttaagaaaagaaaagttattggcattctctaacattccatatcatcagaccagcttctagctagttaatttttcacactcaaagattctcaatccacagagtcgcagaaagaattcaataatagctatttgtttattagaggctaatgcccctactttgtctcataatgatgatagcccaatttgctgttaatctcgtgatttcttcaaaagtaagcaaagacgaggatcatgacagatttatagttgatgggcagtccatatttagctttacgagcttaaataatataattaagcacaattatgaagttaggtgtttgcactggcgctaatcacaactgcagtaaaggctatatatctaacccacatgtgaaaaagccaagataatattcttgatcagcagatatgattatttacgtattactacaatgatttttaacgtaattaagttcttgattagcagatgctttccgtacttttggctacagcaggagcagtg

SEQ ID NO: 48336 - DNA, 561 bp, Manihot esculenta
  Intron number 1 from transcript cassava4.1_027083m (locus cassava4.1_027083m.g) derived from phytozome v7.0 (chr-ID scaffold11495; pos 302089 to 302649)
gttcacgtctctttttaccgcaactgtgagttgtactatgttttttttcttgatttaccaaagcatgttttggttgcatactttgtgttctgctttggctctggcttgctttgtttggctactctgtgatattacttatcttattcatattgctgtgttgtagttatatattgttatcagttgtgcgtaatttttgtttttttctggagttgatttatgaactcatctgtttgttcgattagcaattactgaagttgcaaaaaaaaatgaaggaaaggaaacccattggagagagagagagagagagagagagatcaatattagctcatactcccagtaatcgaccatatatgctgcagtgcacaaccaagtttgaggtcgttaagttattttcagtgatttggtaatacattttaacagaaaaaaaaaatctaataggtgtgtgaatggtgaaaaaagaaaagaaagattatcctctattagtgataaaatcattgtagtttatatgctggtacttttgagttgattgtatcaattgaacgactccttgtttctcaatag

SEQ ID NO: 48337 - DNA, 989 bp, Manihot esculenta
  Intron number 2 from transcript cassava4.1_009236m (locus cassava4.1_009236m.g) derived from phytozome v7.0 (chr-ID scaffold04209; pos 494367 to 495355)
cccctttaattgagaagtactctctaacctttgaggtaatatagttctaaagctgcagaaaatgttgtgttagctgaaaatgaacttgtatgctttagtttcttgcttatcttttagaatttaagatatcctctgtgccatataacatgccattttctttccttatttttaacataatacataattatattttcaagtctagtatctcagtgcttaaactgggtacttgtgtgctgaaagtagtgtgtaagaacctggttagattcttctgcaggtttagaatttgagatgagagagaaagtagatctaggtgggaagagaagagaaaagagaatttagatgagaagagaattaagagaataggaaggaggattctgttattgataattcttgaatgatccatacagatagttgtttcttatttatatcagaacccccaactaattctgttacaaaaccaattttccttccaaaaccacagctcacacacacccagctgtcactaaggtcctcttcttttcctcctaaaatacgtaacatagtgccatggaatgtcttttgatttgcaattcatatgatgctatagttgagaggttactaaatttggtaacttaagtggacatgttatgtacactttcagcgagtttaagaacatatttttaaaacaaaatattaatgcttgtagaaagatgaaaggaaatttcaaacaagaatcaagcacttactgtttgtatattcatcaatgaatgcgttgtgtccactttagtttacttatgtttaagagttaattaaatagatctccattcagggtttcagctccaacttctcattacttgtcaaagcttattacgtgatcttatttgtcacaatttcacatttacacttgctatattttatttttgttcagagaatcatttgtatcagaattgataataatcacacttcaatgttctgtagtatctagtcacaccaggatttcttgcagggac

SEQ ID NO: 48338 - DNA, 506 bp, Manihot esculenta
  Intron number 1 from transcript cassava4.1_011078m (locus cassava4.1_011078m.g) derived from phytozome v7.0 (chr-ID scaffold03241; pos 404332 to 404837 reverse strand)
attcccaggtacggctactaaaatctcacacccatgctccattcattgttacttcgtgttgaattttgttttgttttgtttttccccgattccatttattgttttgcttgcttttatgaactgggcttatctttctttcttcttcttttttttttttaaattttttatttgtagatatgagtttgtgggttgtactttcacgagaatttctttggctactcatcatcaattctggggtttggttaattatgcttgttttgttgcttagaaagcgtgagaaaataatgagcaactgggtgtggctggattactctgacaatgatattcagtcatcatactactcctttctggaacaaaattgttactagaatattgcatctctcaaaatgacaaagcacttggagatcttgtaaagttagaatgcattggtttgcatatttataatttgtaatttgtaatttttcccttttcttttataggaaagcacctggaaagattgtctcaaa

SEQ ID NO: 48339 - DNA, 497 bp, Manihot esculenta
  Intron number 1 from transcript cassava4.1_004957m (locus cassava4.1_004957m.g) derived from phytozome v7.0 (chr-ID scaffold10563; pos 1388047 to 1388543 reverse strand)
tggtgctcatagaataccttatatcctcattgggggtcagtttcacatctcctttctcttttttacttgacgtggttcctgtttattgcacatacatttatagttgttttactttaccacgttggttgttttttttattgttaatattaatttattttagacgttctgtgagttttcaagtcttattttctatttttcatttattgttgcatcctctgttttggcttggtctggattatttcctgcgtgttataaggattaattcataatttcagattattcatatttggatttacacgaaattcatatttctttgaaaattgccccctgtattttcatttgattcttggatcaatattctgctgtccttttcttcttgtgtgtttcaagttgacttgataatcttatggttagtgaaggcttcatcatagctgatcaatcaaactaatgaaggttctcatagaaatcaatttctcagtcttgttgcaggtcctatc

SEQ ID NO: 48340 - DNA, 399 bp, Manihot esculenta
  Intron number 2 from transcript cassava4.1_000562m (locus cassava4.1_000562m.g) derived from phytozome v7.0 (chr-ID scaffold07933; pos 14797 to 15195)
gtgaaggtatgaattttcaaataattatctgttgctgtgtaattatagatgtattacggtttaagtgactgattttttttgctctttaaagttatgcatgtaattggaatgttgtattacttgttctgttaaagaatcagagttgtctgttgttcacaacaaattaaaatttcagaaataatgataacattggttttttatgctttgggaaaagcaattatcaactgcattttaaacttcacctgtttcatccccttttgatgtatttgataaactttgtgctacttttgttacttctaattttatttcttttcttgcattactctacatggtcctgatacttgtactcttcttggacatttagactccagaaattctagtgctacttgccaagagaat

SEQ ID NO: 48341 - DNA, 941 bp, Manihot esculenta
  Intron number 1 from transcript cassava4.1_027359m (locus cassava4.1_027359m.g) derived from phytozome v7.0 (chr-ID scaffold12607; pos 433 to 1373)
ccagaagctcattatcgatactgaccctgggatcggtgagcttttcttctctctcttttcaattttaatttttagggattctattttaaggttaattatgataatgcggggatgaaaaattaaaattctccttggaacttctccttagaacttctcatgttttgatttttcttttcctaaaaaaaatctctattggttactttggtccctttcgatggaggttagtattgtaagctcgagtttgatcgtttcgtgaaacagtttttctttcctcttcttattttttccattcttccttttatcatcttcggcattttctggttcttgttctttgtctcctttggcttggaacgacttgtagaggagagtataattgagttgatctctgttgggttgctggaaaaattcggctgataatttgaaatcggatagttttctattcttaaatacttgaagttgaatgttggatataataaaggtaaaaagggttgacgttttgccaaattttggaaaaggggatttgaaagttctaattttttctcttcttttccttcgctgctttttatgtgtatggttgggacaatcaattgaaaattaatgctaaagtgggggcatctgattccaaattcaaggtatattctctgagggtgaggtgtagcaactgtttagaaactaccaaaatcaaaaggatggaaaaagtggattacagatagaaacatgttatatgggtgcctctagattgatggatacgtttaagttgcaggagtatctggggttttaaaaagttgatattatcctttaaacagagaaattacatttgtttattttctttactcttctgttggttgaaatgcatgagaaagtattcttgttctgtaatttgtgctacagataatctaggtactgaattggttttattatgtgaacttatggatcatcag

SEQ ID NO: 48342 - DNA, 575 bp, Manihot esculenta
  Intron number 2 from transcript cassava4.1_024562m (locus cassava4.1_024562m.g) derived from phytozome v7.0 (chr-ID scaffold04043; pos 259498 to 260072 reverse strand)
aaaggttcttctgtgaagctctccatctctctctctttgtctgtgcttcttgcttcacttgagatgaattttgtctttccgaatcataatactcgcagtgacatgtcagagaagcaatcacccaattaaaggaaaatttaaaaatgattaaaaaaaaagaataaaaagcaccatttctaagaaaaaaatataagctcttttttctttgatctctacaaaatatcgtaaccggaaacaactgatctgctgtgacccttagaaaagatgagaaacacaatatactacctgtaagaatattatcttttcgtcaatatgacaactgacaagttaaccgtgtaagagctcttagatagatggagcttgctagaatcttttgttgttacgcctccacgtatctgcatactccaatatttccatcatgtttattaaatcccatatatctagattccttatcttattttcatctattttccttttatttatactaaaaaaatcactaggtataacaaaacacccatatccatgcatgtgtatatgcaggtgtaaagacggtggaagtgaacagaaaacaaagc

SEQ ID NO: 48343 - DNA, 459 bp, Manihot esculenta
  Intron number 1 from transcript cassava4.1_001692m (locus cassava4.1_001692m.g) derived from phytozome v7.0 (chr-ID scaffold06089; pos 446476 to 446934)
aaggtcacttttgacgagtttccttattatctcaggtagttatgcttcacctctttaaaattagaaattcgttttttttttcttgggttatgtttatctgcgcatttaaatgatattgaggttcacagtgatcttgtcttgttatgtttttattctctgttaaggcatgaagttttcatacttcctaaattttcagcaatgatttttgttttgttagattttagaattctttttctcttcaacatttaatcttcatgaattgttggagatgaaaaaagttgggtaatggtgagatacaaagataataatataatatttctaacaagtacttccatgacattatttcagatgatggttctgaactgcaatttttaggttgattttcattctctcatgttttgattttgatgatgggaatatgcagtgatataactcgggtttcattgacgagtgctgcat

SEQ ID NO: 48344 - DNA, 266 bp, Manihot esculenta
  Intron number 3 from transcript cassava4.1_006440m (locus cassava4.1_006440m.g) derived from phytozome v7.0 (chr-ID scaffold03150; pos 534520 to 534785 reverse strand)
agacgctctctaaacatcttttccattgtaagccttacttttctgctaatattttttgtctgatatgttgggtgacaagatgtgggttatgctcactgtttgtttttcttcgaaatttcttaagccatcgttttcagaaaggatcaaaaactaatttcagatttttgttttatattatccccctgatggggttctggtacttgactagtgatgctgaagtgctatcaatttttcaaaatttatttggttcaggggagaaccagccc

SEQ ID NO: 48345 - DNA, 463 bp, Manihot esculenta
  Intron number 1 from transcript cassava4.1_013130m (locus cassava4.1_013130m.g) derived from phytozome v7.0 (chr-ID scaffold03773; pos 145526 to 145988 reverse strand)
ctcttcccaaatttaggtctctctctgcccacgttattttcttctatgtttcacactgaagaaccaggaaaattaaattattattatgtctgacattctgttttgttaatttaatagttattaatcatcttctgttgaatttttttattggctttctttttaatgttttcgctttctttctcttttttcttttctgggatttttgttatcttgtttctaagttgaaaaagttttgagcttttgaattctgggacactttaaagattgttcattgttcatgctggtgtaagattttaatctctttgtttttgggtttttttccttcttggtttttttttttcgggggcagttttagcacttcttgtttttttttggatccttttgtaccattttattattgctgttagtgtaatgaaaaatgcccagttcaaatatacaaccatcaatgtatcctccagaacca

SEQ ID NO: 48346 - DNA, 895 bp, Manihot esculenta
  Intron number 1 from transcript cassava4.1_017106m (locus cassava4.1_017106m.g) derived from phytozome v7.0 (chr-ID scaffold10563; pos 692526 to 693420)
gtgagttgtagtagtcacgtgggcacccattactcctccttgataagctagacgaatggcttccagccttcttccaccaacactctaacggtaacggagaacgtacacgtatatttattttttcaaaaacaaatggtgatttatggagccaccagttttggctcagaagaagagcagccttaattgaataaataagtaatatttatgggatccaatgggaacatcgacatgtaactttcgattccttgatgaacttcacttgatcgtgtttccaattttattagcaaatgctttttatttgcattctgcacttctgaaagtttaatttctttataattgtttagatctgtgattctccatcgtccttcctacagttagcaggtgccgattctttgccaaaactttttctttcaagccaacagaatttatttttaaattaatttctacgtaactcttcacaacctgacgcgttcctaaagttcacattgtcacattatcaaaacaaaagtttttttaaataatatttaattattatttttattaaaaaataaaattgtacagtgcgaaaaaaatacgggtctaacacgataatcaatcaaaaagaaagacccttttgaaattcaaatacaaaacttgcgtgttcctttcaccgttggtcatcagatctaacaatctgaatgggccgtccacgtgtagcgtctgaaacatactcgcatgattatgcaagctatgggacattttttaaaaaaaatttcactccttccggctcttcttttctagctggtaattttaaaagcgccgttcctcgattttcagcttttatacctcgccagtgtctccgtttataaaaatttttgcagataaggtttgaaattcgctgccaaggattctttga

SEQ ID NO: 48347 - DNA, 698 bp, Manihot esculenta
  Intron number 1 from transcript cassava4.1_023285m (locus cassava4.1_023285m.g) derived from phytozome v7.0 (chr-ID scaffold11232; pos 7450 to 8147)
cgcccgttggcactcctgaccgagtagtatgttgcttaatgttttagttgttttcttctttgtttttctctgttgttgctttgtgttcttttgggtttatggttttctatagtaagtgcagaacgtactatgtgaatttcgtcccctttctttttttttcctcattctttttcgagggttatctcattgaactagttgcttggaaaaagaaaatgtttgcttctgttgatatttgggttcctttttttgggggtggggggtggggctagggtttccattctattcatattagaaacgcatgttttgatacattgttttgtcaagaagataatgaaactctgaagataaagaagcaaggctcataattcttgatgcaaacaaaaaaaaaaaaaagaatgggagctcactttttcaaccatgtttcttatgtacaataaactgatagaagatggggttcgtgattcaattgaatgcgttacttttgatagaattagacaagagaaccgaagtttctctcactgtcctatgttttgaattttgttttctctgaatgtcagtcctttattccttcaaatagtttttccagcatgctttaattagattttgtgtataactgtaccattataggattttcccaacaagtcttttttattggattttcaggtgttgatatctggaaaggaagagccagaggcacc

SEQ ID NO: 48348 - DNA, 623 bp, Manihot esculenta
  Intron number 2 from transcript cassava4.1_011383m (locus cassava4.1_011378m.g) derived from phytozome v7.0 (chr-ID scaffold03264; pos 194319 to 194941)
agcttcgagggaggtgtttcttgtttttacataaggtaagaaagttgaatcaaattaattcctacttgttattcataatatgcttgttattcatatgatgctgtgtttcttaatatcagtaatatgctaaattgctaatagcacgctatcatgcgtttatatgctttagccttttaacaacaattagattttcactttatggttgcttttgaaacatttatcagtcagcctccccttttctatatattttcatacaattgacctacatctgatgtcataaaataggttttttttccctgtataactatgacaattatacttcttcccataattccttcaccctcatctcaatggaatttgccactagatccaatgcatttatttcttagctctgttggggtactgttattcctcaacagtgctttaccaattatctctaattctttggtgttaatcatatgtctgctttatgcagaagatgtcatatgcacttcttactcatccagtatttgtataatgaaacatgaaaactgaaactctgttctctttattgtttatgcttcttttattttgtggattttttaatgatggaagaactaacattgttttttctcttctgtgag

SEQ ID NO: 48349 - DNA, 209 bp, Manihot esculenta
  Intron number 1 from transcript cassava4.1_016663m (locus cassava4.1_016663m.g) derived from phytozome v7.0 (chr-ID scaffold02264; pos 716497 to 716705 reverse strand)
ctcccattatcgatctcttctcgcattttcccaaggtacttctctatgtttcttttctctgaattattgattctcccgggaattttaaagatgattcgagaatttgagttgttttatagctttattctcttctgcaagtatcaatttgttttgcttactgtttcaggcaaaaaaccaagaagcttagtatattcaagagaattatatta

SEQ ID NO: 48350 - DNA, 722 bp, Manihot esculenta
  Intron number 1 from transcript cassava4.1_006985m (locus cassava4.1_006985m.g) derived from phytozome v7.0 (chr-ID scaffold07238; pos 213408 to 214129)
aattcacacacatttgaatttcaaaagcttggtgaaaacgacccaagaaattgtcgcatcaggattttagtggtataaactggcactctacccttctttttcttttttttcttaaaaaaatatttaataaaatggaaaaaagaaaccaatacttttttattgatttgatatttttttatatgaaaaagatacaaaaattgatacaatgatggaaatatatttttttactgtaaaaataagtattttaagacagataaataagaagattcaaattcaatattttcttacaagtttgattgtctattcacattttgttagatttaattaaattagtaacaatgaataatgaagaaaaaaaatcgatggagaagagagaagaaaagagggagagagtcaatccgtcccattcaaaacggatcctgaaggtggcggaccccctcggttgcgattcgacgcccaaaatcaatttttaaataaaatttacatctcacgtccatttattctcccaggcgctgtatttcgtctatctttatccccacgtgctctaattctccgccttcattactccctcaccgtctccttcttctcttactcctcttttctctctctgtctccctatcttcttctctgtcaagatgatttctcattcgtatctcttatttctgatattctcgcttgttttttcagataatttcattttattatcatcctcttgttcttct

SEQ ID NO: 48351 - DNA, 504 bp, Manihot esculenta
  Intron number 1 from transcript cassava4.1_020736m (locus cassava4.1_020736m.g) derived from phytozome v7.0 (chr-ID scaffold02969; pos 38055 to 38558 reverse strand)
catgtatttttctctcttttttttagatatattaaatttgattttggtctgttagaacttcgaaaactgatgtcaatttaagcgtttgatgatattaaattattttctgtttaagatagattcgccgttgagttgcgggctctttagggtttcagatgggtattttattttatttctttttaattcttagggatttctttatattttaaagttttaccatttttgatcgttggctatgttgatagtctgtttggctcttgggaaattttacaattgttgatagtcggctatgttgattttctgcttggctaggggaaaatattgggtattctgtggagtcggaaattggaatctcatatgtagacatcaactttcagagtttgttttggcatttcgatttaattcttttgtgatacgtacaggagttgttccctcttctaattgttatgtttttgggttattttcattagtagtgtacatgtttgaatacagcggttggagatt

SEQ ID NO: 48352 - DNA, 438 bp, Manihot esculenta
  Intron number 1 from transcript cassava4.1_016083m (locus cassava4.1_016083m.g) derived from phytozome v7.0 (chr-ID scaffold07290; pos 317886 to 318323)
acattcgcggcattttctgccccagattttggttggtgtgtctctttgttttgatttcttttcctattttatgtttcaagttagttttttttttgctattttttatttttttctttttcgtaatttctttccatctctattgattcctttttttattattatttttaatgctttcttttaattgactagctggtttgtggtggatttctttgatttgttgtttgtttttaaatcttttccgatatgtttctgagtaattgaaagaaaatggaagagctttttacggataatagaagtaacattaaattttgttttttccccctttatttgcttgatatttaattgtcatttttttccttccaattatatccggatcttttttttttctttgttggcattggtaatagtaattgggtttttgcaatctgctaggttaag

SEQ ID NO: 48353 - DNA, 963 bp, Manihot esculenta
  Intron number 4 from transcript cassava4.1_016083m (locus cassava4.1_016083m.g) derived from phytozome v7.0 (chr-ID scaffold07290; pos 319239 to 320201)
agaacagaaagaaagagagtctctttgctaatagagtattactcctacctcttgattttctttgtaataaaagataaatagtatgagggaaagaggactaattttgtcataacctgctcaatttcatgtgtttgtactgaccttggagcttctgactgaaggccgaagccctttagcaggctgaaagcccagcatgcgttcctaattccacttcttgctagcacctctataggcaaaagtcactagcccagattcagaacttgccaatcaaccacaatcctgtcttgatgagcttggaaatagtggaagctgttaccagaatctttccagaccaacacacagaatattgaccattcatcgttctatttttaacatcaacacccgcttaatcctgctcctcacttttctatccgtcctctcattctcttcccctcttcccctgccaccttggcccctttgtttttgtgttttctttagctacagtactggaatggttactgggtttgtttctgattggtttttatttttccaataacttctcaacatgctgtctaaagagaggaaaacaaaattgatgttagtggtgaagactacattcattttgtgtattttcctagtggttagatggaagtttagattgatgctttgaagataatatgattgttattgctgttttgttattatattttttttgcacttgatatcatttaggcacgtgcctgtgtgactgtgcactgtgattaagttccaacttcaaagatcccttttctctttaataaactattataaaataacatggttggctattgagtggtcaaaagttgaaatgtcttgtaaaatgtcttgtaaaattgttatgtgcttaatgaccaacaatataaatattgttcttatttccttttcattcagctgtattattttgagaatttgaattgtttttcatgcagatctttgacctctttg

SEQ ID NO: 48354 - DNA, 554 bp, Manihot esculenta
  Intron number 1 from transcript cassava4.1_019514m (locus cassava4.1_019514m.g) derived from phytozome v7.0 (chr-ID scaffold04002; pos 492819 to 493372)
actcaggtgcttcaggaaccttgtacgaatctggtgtaacttctgttagccacaatcctggaaaaactgactgcaaataaccaaacacaatataaatcagacactcttaacgcaaattaaaaaaaatacgcaaataaaaaactacaagagtaaaacagaaatagaagtataaatgaagatcatcagatcactaatttcgctcagtagctcagaaaacatgaaaaagcaaaaatatttaaatactttgggccgtttaattttccctctcagccccgaaaagtgaattaaactaatcagtccccaaatagaaaaactttcaattatcaaaattcaaaactctacttttcccgcattttccaagcaaatatatcaagaaaacaccagaaatataaaaataaaaaacccagaaatgcctacatccaaatacttctgcacaattcgaggcctcttcttgggtcttctgggtggcctaatcctacaaatctccatgaaatcctgctcaatctcctcctttgaaaggggaaccgaaaacttgactctctccttctcgggct

SEQ ID NO: 48355 - DNA, 625 bp, Manihot esculenta
  Intron number 1 from transcript cassava4.1_000177m (locus cassava4.1_000177m.g) derived from phytozome v7.0 (chr-ID scaffold05133; pos 81333 to 81957)
ctcatcgaaggccgacgatatataacaattcttaggtgcttacttatatatctataacaatttagctccttaagttttctgaattcgttatcatattcttcttcttcgaggtctttcccttttcgttttgatttttgattttgtccttcgtcttattcttatatgtatgcatgtgtatgtgtgagcaaaagggattttttttttttggatacatatgtcatgggtttttatggacggaagttgagtttatttatctgtttctgtttctttagttggaatttcttcttcgatgattttaactttttaaagttttaatgcgtaaggatgagtaattgggttctaagttttgtggtgattactggattctgggtcgatggattcatcaacgatggtaatggttattccaatagaagttttgaccttgcaactctaaatttccatgtaaaaccctgtttggattattttcattgagcttctgtcgatgcgatcattagtgttcgatttgatccttggggacctgtggttgtgaatttctgagaatgagaatggcatttatatgcaatctgatattttctgatggaatgtccttatgctgtagggctgaatagttttgaacggcttctag

SEQ ID NO: 48356 - DNA, 417 bp, Manihot esculenta
  Intron number 2 from transcript cassava4.1_021224m (locus cassava4.1_021224m.g) derived from phytozome v7.0 (chr-ID scaffold05134; pos 47010 to 47426 reverse strand)
gactggggattctatcagttacagatgtatgaaatgtctttctcagaatttgattgtttaatctgtataatgccattaaatgtcttgtttttctttttcttttcttaacttttgtttttatccattatgatgaaaacactattttggcgttgcaaagtagagagttcatgctttttgtataccttttcacctcaatagaagtgcaccaattccctgaaaaaaaaaacgtattttacttctttagaccttgttaattgaatgatgattgtagtggagatttgttgtgtttggtgaagcctcaatcttgtaatataataatgattgctataagtacacaagtgcttttattggttgtttgagtttgagcttgtatcaactataggtgcctggtttttcttcactgcgtcaaaatcttct

SEQ ID NO: 48357 - DNA, 896 bp, Manihot esculenta
  Intron number 1 from transcript cassava4.1_026024m (locus cassava4.1_026024m.g) derived from phytozome v7.0 (chr-ID scaffold03428; pos 63849 to 64744 reverse strand)
gggagcgccatttttttttcagaaggttcttaatttctctctcttcattttatttccatctctggctttcatttattgtatgctttctgcgtatcaatctatatctttgattagtagttgacaagctttctagttattcttgtacccttttctttttatttgcatgatgaaagccattggtggagtaagccaaatactctgtatattagattataaaatcctcctctggtcataacagtagcagcaatagacagcatcagaacaaataaaaacacgaaataacagaatagggcaaggcctccaggaataaaatccttagcagaaagaacaattcttctagtcccaatttgtaaactagattgttcacatcttgcatgcaacattattcttttatttatacatggccttcccaccattgcccttccatgggtgtcccacgtcctcaaacaatgccttttaggttctgtcattaactgtttgttggttctttcttctttgctgctgatattgattcttccccttctagaataatgatcttggtccaggcctgctacctccttccctatcagccacagtcatgtcccatgtttaaattcatcgcattgtggggatgacacatatctttgcagttactaaacttaattgggcaggcaataactgatgtctttaaacctaaatgttgatttaataactataaatttgctagctttcctgagaatgtttgaaagctgtagtttttaggctgccatatgcaagcatgcaaatatctggaatatttaatcttaaattgcttaagctcacagttacaaacacaaaagaacatgcacaaatccacatttttcagatgatacttccctaaagcttatcctagtttattgtaggttctcttgccattc

SEQ ID NO: 48358 - DNA, 383 bp, Manihot esculenta
  Intron number 1 from transcript cassava4.1_032865m (locus cassava4.1_032865m.g) derived from phytozome v7.0 (chr-ID scaffold10980; pos 149614 to 149996)
ctacggcaggctcaagccacgcaaaggtaatactttgtttttgcttcatgtcaatgaattacttcaaaattttatataatttcttttataatttataaatactaaatcaatctcatttgcatcttcaacttccaatttctgaattttcctctaaacatcaacttgcagccaaaattcataaagttaaaacatgagaatctaacgttgccgtgatgtttttgcagggcaatcaaccaaatttatagaaacaggtgacctgtcttccctcttatcttcacttctaacatggttcattagtaatttaggacatgggttttcttgattatgaatgtttttatacatcggcaggtggaatcctaggttcacttcttcttgtagtagca

SEQ ID NO: 48359 - DNA, 781 bp, Manihot esculenta
  Intron number 1 from transcript cassava4.1_015454m (locus cassava4.1_015454m.g) derived from phytozome v7.0 (chr-ID scaffold04439; pos 60931 to 61711 reverse strand)
agctttgattgcttgtcactggtaggttctctcacccacttttgcctcatgatttcttcatctagggtttctttcaaggtcttcttcttctgttactgttgatgttggttacagattcttattttattttatttttttaattatttttagtcttatgttcagattctaagcttgatttggcaaaaacaattctttatgctcctttcagttgtttcttattaaatacccatattttcactttcaggatttttcctttatcactgatagttttctataaatttccatttaaaggaacattttctaacttgggattggtctacttttgctattatcctctttatcttcaattttctaagtttcttttgacctttaaatacagtagttgaaggaaaaaagcaaaaaattttcccctcttctgcaatttccatttaggtataattttctttagtttctttgattgatcttcttgaatatcctatgatttttttctctttttcttagtgagttaggtagctggataacttgttgtaaagcaagatctgtgatttgtttcttgtaatagataattataactcttaattttttaaaaaatggtttttttcaaacttttaggtaagcaaatgcagtgttttttataaaaaatcatcaccaatttcttctgttttctctcaaacttttctctcttaggtattatggtttttagtttagcatatgtaaataatatttttttgtgattttgcataaaggattcttatcagttggaaattttcttgtataggaa

SEQ ID NO: 48360 - DNA, 814 bp, Manihot esculenta
  Intron number 1 from transcript cassava4.1_014251m (locus cassava4.1_014251m.g) derived from phytozome v7.0 (chr-ID scaffold08673; pos 83638 to 84451 reverse strand)
cgtataaagcttcccaggtttgtattgatttggagaatttacagatgtgtttgtgcaaaataatacttgaaatattgaatttagttggatctgcttatgttggttatttgatgggtctcattcgtttgagccaatattgggtgagatctgtacatgtttgttaagatgatttggggattgtcttgtttgtttaactctttgttttgttgatttgatagcgatactttcaagtgatgatatggttgttggatcttgcaaatgttatggttttggtttcttttgcatagatccatttctgatagtcaatattcgaactctgcctaaggatccattctcctggtctatagatgtcaaatgcgataaattacattactattgcgtaattgattagcctatttttattaattattatgggcatatctattgtctgattcgttgccaagaattattctatgtaaaccattggacaattgagcttcacttactctgtatgaacaatcataaatggtgtttttgcatctgttcttaactgtttgatttggtcaatttttttgttggagtttgaggttcgttttttccccctattttctctagtaattattgtgggcattactggtatggttttgcagcctagtgaacccagacttttattagttccatccaatatttgggaagtgtttttccttcacatggtgtttaaaattaagtatttaattgctcggtgttctttacaaagtgttctggtgcaacagtattagttgtaatgcggagttactaagaatttgtggtgatgtatatttacaggatattgcaa

SEQ ID NO: 48361 - DNA, 878 bp, Manihot esculenta
  Intron number 2 from transcript cassava4.1_025153m (locus cassava4.1_025153m.g) derived from phytozome v7.0 (chr-ID scaffold03852; pos 239425 to 240302)
ggccattcttgcgattgcggtcgtgttttctcaaggttaattcattttctttatccatccatagctttttgagaatcttcttcctcatggtgtttacaatagatcttatcttagctttttatattctaaattttcccatttttacatcaaattccgaatcaaagatcattgctttttctttgttttttaacgggtaaaaaaatgagagaaaataaagaaatgctttggttgtcgactgatggaatcttaatccagttaaattaactactgtttattacagtttttgaacacggttcccaaaaaatcagttgcagtagttttttttttttcttctgtttgtttcaaattctctctactgctcaaaacccaaagcagttcacggctgaaaacccaaaacagttcctcatagttggtttttttttttcttatatatatatatataattaaggaaaaaagcaatcccatctctttgttttttctctaaatgattgcttcagctgtcattaccatgatgtttttgtttcctttgtagttaattaaaattatatatcttattgtcaccaaaaaaacaaataatatatgctatttcaatctcattcggtcgcatttcagaataataataatattaatatatgaatatatttttattttttctatttaatgtgcttatgatttgatcctccttaattactttgtttttatatatccaacttcattaatggggacacccagataataccttttaagtaaatctccttacactacttccccgttaacctagtatcatgatttttggataattgaatccttggttcatgctaatattgtttttttttcttgtagagttgagagttttattgagcatcaagacacttgca

SEQ ID NO: 48362 - DNA, 943 bp, Manihot esculenta
  Intron number 1 from transcript cassava4.1_005518m (locus cassava4.1_005518m.g) derived from phytozome v7.0 (chr-ID scaffold05214; pos 1181023 to 1181965 reverse strand)
attcgcaaacttgtcttgaccctgacgctagtcgagtgagttttcttccttcatttctttttgttttaagtttcatttcttttgttcaaaatttgctttcagtgtgatgtttggatcccagttttcacggtgtaatcaacatggattttgtttatttatgcctttggtgtgcttggattggaacgtattcattctcgatgtaacattgctttcctctagatttgactttactgtatgaggatccaacaggaaaactccagaccatgagttactgggattcaacatcagtaatcagcgaatagattattagtttttgtcttaatagctggaacttatcagatgtcttactctattttatatatgcttatacagcttaattttcaatgttacacttacaccgtgccgtatgccactttcagtattgtacttctgatgttgacttgtatttgtttgtgcttgttaacaatatctgctcaacctcgctgggttccataaggaaataattggacattgatcaactcttgattgtgaagagatgaaggacaaagaaagaaatggattaaaaataaaatgaatctaatagtccagataattggaattacctgattgttcgaatttcgaggttaaccgttgtcatttttgtgatcattgcaattattttttgtaacttcttgacagtaattgtttatcttatagattgattttgtagaatgatatgcattattccttagctccttctttaatcaacttaattactggaactaaggccttataaactataggataatggttatttttatttacaacgatgctacaatctctacctaatattcagctctttatgtttttttgtttcattcgtaaattgaaggattatactaacatttgctatctatgagtcctaacagagtgtcttgggaattattcttggaggcggtgctgg

SEQ ID NO: 48363 - DNA, 349 bp, Manihot esculenta
  Intron number 1 from transcript cassava4.1_030852m (locus cassava4.1_030852m.g) derived from phytozome v7.0 (chr-ID scaffold06871; pos 287019 to 287367 reverse strand)
ttccgagtcatctccatcaaatcgtatctggatcagtgagtttgattttcctttctcttcgttacaaccgcactgcatctccacgtgaactgtgtctttctgtttcttttccactcaatcctgttcttgctattgacccttaaatttgctaccgtaccataatataactgtatataactttatatacttccggttttgatttatagaggcacacaattgcaattttcttatcacaaaatatagcaacgccaaaactttgtggaatcttccatcagtacccttaatcaagaagggttttgttacaatgcattcaggtgcagcagcgagtgtgcgtgccaagaggagtaaa

SEQ ID NO: 48364 - DNA, 655 bp, Manihot esculenta
  Intron number 1 from transcript cassava4.1_011955m (locus cassava4.1_011955m.g) derived from phytozome v7.0 (chr-ID scaffold07238; pos 39703 to 40357 reverse strand)
gttacacgaaggatcagctgcttgctcgtttgaaggtttgcctcttcgaatccttttccctccctctcccaattgaattgatcggttaaatcattgtagttgtgtttgcattcactgaaatttgatctgggttgtttcacattcactgaactttgatcggttttttaatcgtttttgttgagccaaatttagttttcctgatcgtttagtagattaataggctatggatgtcggatactagactaagtttttcattatttgttctaaagggtttaaatggtgggcgtcggttggatttagttctgttgaattcttcttttttttttttccctctcacgtttcctgtaggtgccaagtgtaaaacaatgtaatttcttggagaagctgaaattgagccaggatatgccttattagaagatatcggtacctaatagaaagctgagcttgggtttgtgcaaattaaccctggaaaaagttgctaacttgtgctagttaactagctactattattcctcttcaaacttgagccttacattattgtttatggcgttgctttcctcgagaattgcttgctttcatgtgcgtcttccgaattcattcaactaaaatctagatattggtttcttttaggagcttcaaattgattttgctcagt

SEQ ID NO: 48365 - DNA, 772 bp, Manihot esculenta
  Intron number 4 from transcript cassava4.1_024189m (locus cassava4.1_024189m.g) derived from phytozome v7.0 (chr-ID scaffold06212; pos 41993 to 42764)
acgggttgaaatcagtaacttcggaggttgagaaggtccattctcttaaacccattcttaatgatataactctttgcttcatatagtaatttcaatgaatgaaagagtaaaagcaagaaaaccctttgcatcatgtggtagttgatccaacccctcttgtaatctcactcacgtgaggcaaaagtgtatgattgcattatttggtgaaaacaataatttatgaatcaagctcgagtttaagctctctcgaatttctcaaaccttttattggagactagagaataagtgtatcaacatttttttaattgaaaatttagttcttattctcaatggagctcaaacattttgaatttttcaataaagaaaattttgaacgtgaaaaatgaaactgaattgcacttgactcaagtttcaagcattgaatttttggatcaaattgagtttgagcagtgttctatattgacttgtctctacttgattatacctccacttaaaaaattgagtgtaaggagaaggaaaaagtcttgtggaattattcaaacaatagaagatcaatatgttttggggaaattttatttaaagaaaagaagatgatccatatgtttttgggtattttcctctttttttttcaatttgcagtgtgggattggtatttgtcatgtattttatgacattatacattcatgtacttgggaaacacccctaagaataattgtttgctattgcaagttttcagactttagttatggatatttcatttgtttgctttcag

SEQ ID NO: 48366 - DNA, 633 bp, Manihot esculenta
  Intron number 1 from transcript cassava4.1_012495m (locus cassava4.1_012495m.g) derived from phytozome v7.0 (chr-ID scaffold02264; pos 424951 to 425583)
gcgataatcctatcctcattgacgacggcaggaaggtaatccttttattcttctgttttcctaaaaatttatatttgtttttggaatgtcaatatctgtttcctttttttttttttaactatcaacgagtgtaattccacttttggctccaacaatggtcttaaagattgaattcattttgtgcctgcaattcacccacccccccccccccaaaaaaaaaaaaaaaaaaagacggtttgtgagaaatttgtggtagatcacatcttatgccgttgcaataagttagaattttacaggaatcacttgcatgttttgattgcaaatttgtgctggttgcccttgcttttgaaaggcaatacgcatggatatttgaattgtatgcctatccttttgaactaaccggagcttttcactcaaattgaggccttgttcgactttactattgatgttgccttgctaatttccacaagtatgaaattattggaacaaaattttcaaatgtattttgctttgcttttggtcaagtttcgtcaaatttacattacctgattgacggttgtacctttattaagtatattcatttttttttcttcttacaaaaaaaaaaaaatctcagagcttttcactggacaa

SEQ ID NO: 48367 - DNA, 888 bp, Manihot esculenta
  Intron number 3 from transcript cassava4.1_015451m (locus cassava4.1_015451m.g) derived from phytozome v7.0 (chr-ID scaffold03428; pos 158160 to 159047 reverse strand)
atatcgttttaaagcagctggggaacaagcaagtatttctttttctatagttttgctgttatttttatgctaatcaactgtagactaaattgtatgaataatatgatgtggttttagttgggagtttttctttggctttcatttgatttgagtgtccttgtgcttttttcttgtgcatttttcatgtggtatagaaagataatatataaagatttggtacgttaaagtcactttatgtttttagttttctttcccctgagtttctactcattatttattttattttattttattcttttaattcttactgtttctgcttcaattttgggtttagctggaagtaaggtcgtcaaattccctcatagtttcaacaaggaatgaatgatgtgttggcactttgatctcttctttccattcttaacgggtcaattatttctttgtcatccttcattttttttttttaaatttctaaatagttatcatacctttgtcaatattagcacagtgaattaacttcagcatccatatataatttgttgctaatatcaagtgcaagaagcattagttcaatatctttaatcatgaacacatttgcttttattttttttccccagctgcatttgttcccattgttctgatatatatggaacaagattggttttatttttagttatttgggtatttccctgtgtgtttcatgcatgcgctgctttcctcattttatgcttttaagttgttcatcctctttttggtatgttatactacatcagttgtggcaagttaattgctatgaagttcaaagggttattggtttaatttatggacttcataaatggtgtattagttaggattgatttcatttttctctggcaggaaacgtagaattac

SEQ ID NO: 48368 - DNA, 462 bp, Manihot esculenta
  Intron number 1 from transcript cassava4.1_015451m (locus cassava4.1_015451m.g) derived from phytozome v7.0 (chr-ID scaffold03428; pos 159240 to 159701 reverse strand)
aaaacgcctctattgaacgtcttcgccgttggagggtaatataattttctctctctctcactgtgtttttatttcgagtataacttagttgttgtaatttgtgaatatatttctattggattgtgcttagattatgtgtttgggtgcttgaattggtggtggatgcaactaaatctctgataggttctctagactgaattaataaacattggccaatgcaattacagaagaacatttgctccttgttatttgatttgatgtattaatttcatcccagataagttggtgcaacaggtgtctgccgattaggttgtctcctatgttaatagttgtttttatctcatctctaatgttttccttgaaggtagcaatagtttttctatttccctttttttttttttttttttttttttcttggctaatcggaagatgcttttctttagcaagctgcacttgtgctta

SEQ ID NO: 48369 - DNA, 768 bp, Manihot esculenta
  Intron number 1 from transcript cassava4.1_030530m (locus cassava4.1_030530m.g) derived from phytozome v7.0 (chr-ID scaffold05937; pos 122717 to 123484 reverse strand)
tctgttaaagcttggtcacaaggttagaagtttttaatcggtcttaaatttggtaactttacctttctagcttcctgtatttttagtcattaataaaatgtagggataaaggatgaagatttggaaatgcttatatttggtttggaaatgaaataatggggaatcaattagacataaattatttttaaattagccagtttttaaatttggcaactttgccttgtagcttcctatgtttttggtcataagtataatgcaggggcaaaggatgaagatttgaaaatgcttgtatttggtttgaaaatgaatagggaatcagttagacataaattattttcaaatatttttccttatgaattggtaaaacatagagtaatttgttacttgaaaaaggttcttcccatctttcctttctctcttttttgtttgcatttactcccacgcaagtagaacttcattacaaattgctcccctttatttgtttcattatttgcataacttttctattctattttttcttatgactttgcttcgaatgtattgtatgttgagcctttttttttgctaaaagcagcatcaaatttagtatctttattaatgtttatatattatggattttataaattatttgatatatgagcttttaggtggtggttatgattcatgcctatggtagtcactctgaggtcaaatacatgactggtggcatgaaagtttattatgtaccgtggtgaccatttcttatgtagaacactttacaaacctttt

SEQ ID NO: 48370 - DNA, 746 bp, Manihot esculenta
  Intron number 1 from transcript cassava4.1_012208m (locus cassava4.1_012119m.g) derived from phytozome v7.0 (chr-ID scaffold11689; pos 61601 to 62346)
gattttaactccagttgcaaggtaaccaccataccaactctgcaacagcaaactatttttagttcttgttctttgccctgtgcttttgctgttctctttcgattttagtccaagttggggtccttatcatttgcttgtacataatgttcattaattttcattaatacccacttcaaaactggagaattggctcaaaactttggtcttaaaaaggaaaatcttcgtgtcattgtaggttttcttttatgaacaccctctactctcttggtagaaagctcctgtgcaatcaactcatttgagggtttttttttttcatattatatcaaattggaataaatttttacatttttctccatttcttgtccccgaggtgccttgtctttgttttcttgtgcgagtgatcaatcaaacaatttaagtttttttttgtgagctgttaattgggaagtagttgaagctatcgcctttataagcaaccaaaaaaaccttagatcataatgtatcttccacttacgtgtccgttgatcttgttttggaagaaccatgatcgaatggaaggataagaaaatttcagcatataaattggttggtccacgaaaatgttagtgggtccagctgccctcatcattaggccatattttaagaaaatccaaactaaaataaatgccaaatagctaatttttccccccctttttctttgtcacattcttggatcacaatagaacaagaaaactgcaaatcagtcc

SEQ ID NO: 48371 - DNA, 828 bp, Manihot esculenta
  Intron number 2 from transcript cassava4.1_029646m (locus cassava4.1_029646m.g) derived from phytozome v7.0 (chr-ID scaffold03150; pos 605913 to 606740)
actaagttgttgattttgtgtgcaaaatccggtgagtaaaaggctgcatacatgttgtttgatttggcgatgggaaaaagcttcattttttagaatgcaattgttggtggatgtgtttaaaagggacatgaagaaatggggttatattttattatgaaataagacaaaatggtctgacaccaggccagtatacatctgcataagcttttagagcagtgcatttggagcatggtaagcaagtccatggtgtcatgctgaagtgatatctaagaaaaaaaaatgctgtagtcaacagtgctctcgtagatatttactccttcctgataaactactagatatttattccaaatgtgctgaccacataaactactagatctttctttaataaaaaaaaaaaaaaaaaattcttgccatgttaagtaattaccttattgtatggttgtatatgattaacaatacaggtatgattcagtatattgctattgtaacttttctccttggcagagatctaagtcaggatttcttgtttgacattgcgattttcctaggcactatgagatattccattctaatattgttctaaccgtgaggctaattttctgcatggaaatcttgtatgatttttaatttgatttgagcaaattcagtgagagatggtgttgatttaaagcattatttgttgtagaatttgaaatatgttaaatcttcagtgaaaatattattttaagattcttttgttttttctttctatacatttgttatgcagaaaagtagcagttataaaatcaaacagggatacaagatacggtttggattcaatagtgacac

SEQ ID NO: 48372 - DNA, 1012 bp, Manihot esculenta; identical to SEQ ID NO: 47455
  Intron number 1 from transcript cassava4.1_014979m (locus cassava4.1_014565m.g) derived from phytozome v7.0 (chr-ID scaffold04043; pos 1285639 to 1286650 reverse strand)

SEQ ID NO: 48373 - DNA, 551 bp, Manihot esculenta
  Intron number 4 from transcript cassava4.1_015135m (locus cassava4.1_015135m.g) derived from phytozome v7.0 (chr-ID scaffold08265; pos 243632 to 244182 reverse strand)
tgttgggtgttgacaatctgcatataagggacttcgtatgttccatattatttctgttgctacctcttgtttttcgaaagaacaatggggggtacttgtaaattctaagatttatttgaggccttgaagttacataatttaatgggtgctttttggattctttattcaattattgcttctttaactgccattggtttgtgaagatctttttgagaaaaaaaatgtttattgtaaagtgtttgctgattgaagatgaaaaaaaatctatagcagatatcttgggtagtcaaggagctgttggccctaaaaggattttcatgtttattgtattttctcccttctgttttagttttgatctggaagaagaaaaatacattctctttttgaggttttagctaattgtatttcacatttaccattcatggatcaaacattgaaaattgtgctttttttttttgtcatgagaacaccctttttattcaagatttacaaatttcagtctttattgaatgcaaattttgatattgtatttcatagggtttggaggggcc

SEQ ID NO: 48374 - DNA, 854 bp, Manihot esculenta
  Intron number 1 from transcript cassava4.1_002512m (locus cassava4.1_002512m.g) derived from phytozome v7.0 (chr-ID scaffold06871; pos 761847 to 762700 reverse strand)
ccttccccattttcctcctcccagaattcaggtaaggaaaagacattgcttgttaacacttcataaagccattatttattgattccttagaattttcatagactctatctcgttgtgagaggctctattagttcaaaattgcttgatggataaggataggagtcatggttactagagtcaaactctgaacttttgtcttgaattaaaattttacctgtcagtcaatttaaattgttaatctatttgtctttcttaagttctcatcttgtctatttcagatagatgatcttataacttttacatttaggtatatagaaagaaatatgatgcgtaatggatgataagttataagggtattcggttgatttgatctacactagcaatctgatatggctatgcaaatcaattgaatttagcaaaaatctacatgaaaaatccatctgagagctgtttgccttagcgtgatcgtgttctgccactccattctgtttggggccatattcaattttaattcttgaattgtaaccgcctctgttgtgtggaccccttacattgagacggttgagactactgatctatcttctgcctttcatctttcaaaaattttagtttgcggaacataaatttgtatgcagatttcctttttggcaattttattttttttatgtcaggttctgtcaaatatcttctcatgttgtttctactctgattttgaagtatcagctttccttttgttgaatgacagtcttaaccttctagttagctggcaagtataatcaattgtgcaactgcaaagcaaactaatgaaacttaaatttgctgtgtagaatcattttttctaaggcccctttctc

SEQ ID NO: 48375 - DNA, 764 bp, Manihot esculenta
  Intron number 1 from transcript cassava4.1_011120m (locus cassava4.1_011120m.g) derived from phytozome v7.0 (chr-ID scaffold00985; pos 67027 to 67790 reverse strand)
ggttgagcgggtacttccactgtgtgtgtgtgtgtgtttgtgcatttccttttcaagactcattgtttattggacccctttgtgctccaatgtttcgattttcttgtttttttttatttgttttctgggttgtgatttcttgtttgagatgggaaatgttgtttctcttgacctttcggtgtgtcatttaatatgaaggagaagaatctagagagatatagaagcccaaagagctgaaacaatgaattataaatgttaactgagctataaacatgaaaattgagctggttagctgttgaaatttgagataaatgtgtaggaccggttgttagattaataattatagactctggaatcctgaggataatgcttggtttatttacaatttgcttggtttatgtaatattatcagaacaacttgttttctttgaatttctcggtgtttacagtggctttaagactgtgcctttgttgtatatagaatgaggatttgctggttttaaaatatagtagttgaaagaactgaaagcaacggtaatctttcctgctaatactactcaagtatggttttgaattagcataaggtattatgtccgatgcaaagtcattcctttttgttcttaagaacttctaactcatgactaatccttctataatttgatatgaatttcaattgtctattaagttcactgtgcttccattaatgaaatttatcgagctttattttggttttctaagtgtggcatatgctctatttgttgcag

SEQ ID NO: 48376 - DNA, 798 bp, Manihot esculenta
  Intron number 1 from transcript cassava4.1_014766m (locus cassava4.1_014694m.g) derived from phytozome v7.0 (chr-ID scaffold11960; pos 76219 to 77016)
ggaaattctgatttgtgacaagtaaattcctcttccagataagaatcatgctaatttttgccaatttttagttcttgctcttgtttaaattctttattaactgcttcttctctgttttccccgctgctattaatctgctcacttgctctgccttcttctttcgtttcctctccattttgggtatggctctgtaccttttctttttggtgggtgtttacttgcataattcgtgcttctatctccatgaattttatgtttctttacttgatttgttgcttgttgatcttggttactctctgatgattttattatataggaagtagaagtctttagagaacgatttagggctttatagttttgttttgttttttttttggcttagcttggtctcttgatgaattgcttatttgggggaacttctgcttcagctaaaagcaatggtttttaaggttccaaaataggtttttttaattaaaatctgaagaagattttggtatagtagggatattcttctttcgttcttagatggaagccgaaataataaaccacttaagactgtattctgctattaatgaagctttgaagttgacttttgagttcgaaggagatgccaaagtaatgaattagagtagaaaacgtgtacacaaggaaatatagttcaataatgatatctgattttagaagtaaaaacatcattcctggtggaaatgattttttttttttggatgagatgcagcaaaatcagttctaagttctacttatgacaataatattcagttctttttagagactacaact

SEQ ID NO: 48377 - DNA, 836 bp, Manihot esculenta
  Intron number 2 from transcript cassava4.1_007429m (locus cassava4.1_007429m.g) derived from phytozome v7.0 (chr-ID scaffold00823; pos 167490 to 168325 reverse strand)
ttctcttgttccacattggaaatcccatttaaaaggtaacattcctttagttctatcattttaataggttgaatttaagttaacttacctctttgctggacttgttgttctgggttttgtttagtttttactttgttgttctttttacattctttactactctgattgtctgatttagcagttagtgttaaagctacttgttttttcatagttaaatttgggatttttctgttgatttttatgtgtgattttgctttcctgttcatgggttaatatctctagaggaaattgtgaattgtttagggttttggcatttctacgttatttgggtttggctacattttttttgagaatatggaagattctacattcttggatttcgaatttaagctttcaatgtgaaggtccagtgttttgagttcacatacttttgttaacagtttgacttttactctcaaattgttggctttggtaagttgctagttggttacattcttcagatggatattttcccctttgcaaatgccaagatataaggtgctgaagtttgagtattgacaaagatttaatcatgaatttgttttatgaagtcatgatatgtttgttatgttgaataggaaattacagtgatatgcttcttcttgacttctttgtctttttcttttttgatttttgtgttcttttttgtcttcttttctggacattttatcaatagatcatacagactttgactaaggtaattaaatagttttacattctatggtgtagttttgaaattatataccagcttcttttttacagtttgtacagttttgggattggaagaagagaaggaa

SEQ ID NO: 48378 - DNA, 833 bp, Manihot esculenta
  Intron number 2 from transcript cassava4.1_011206m (locus cassava4.1_011206m.g) derived from phytozome v7.0 (chr-ID scaffold08542; pos 833391 to 834223)
gatcagtaaggccctgtttggatgatgttttcgcatgatttcattaatagatggtttttcatgttattatacccattatctggttctataatatattgtgttataatgtttgaaaagattgtatagtttatcatggttctatatctattctttgtttattttgattctatagtattgttctaaatattaattaaattatttaaataaactcattcagttttatatgtaatttgatcactaatttctcatttttaatagtttaacacaatttctatattttttcccattcacaaagagctgtctaaattttgttttaaacgagggcgagggtgaaggttgatgatatattacaattctataaccatggaattcaatcaccaaaaatcatataatgtaagggtatgctaacagagtacttgatgtccaaacacgagaattggagaaaccaaattccttttcttttctcttctcttcatttccctcaatccaaacaaaacaaagcattaatgtaatttgtcacatagttcctaggtatacttcagcatataatgctggttggttaatcagcttacagtaacaataaagtcctggaaactttataccaataggaagactgattgttctcactagatttttcgctagctagaaattgttactgctatattttgtgagaaattctgaactgtaaattctcatgcccttgtattctcattgccatggagttactttgtgcaagtgttgtcctgatgctttagatgaaaatggtaaacattgtactgatattgatggtgtcaacagcaaattggtggcagaactgtgagggtgaacttccc

SEQ ID NO: 48379 - DNA, 726 bp, Manihot esculenta
  Intron number 2 from transcript cassava4.1_000103m (locus cassava4.1_000103m.g) derived from phytozome v7.0 (chr-ID scaffold02871; pos 490719 to 491444)
acgaatcaagtagcatcattagctgaagctgagaggtgcatatcttaatattgtgggtttaatagccaaataaatgaaataatttagcagaagttttaattgtatcctattcttttatttgaatcattataaaaaccaattctgaattttgtttcaattgtggccagatctggaaaaacccaaaggtgaacatattaattgccagcaaaaaccctccaaatttattttgaattccctgcacaagttacacaatatttccctgcatttccatctacctgtacctcctctatgcttacttctctttcaccttctcagatgaattttactagctgtgccatttccacttcttgtatcacttgcaccaactgtattttagatgtactccaatcgcgctttaaattatgcatctgcaaaaccacaacttatttggatgtgtttggtcatacatttggatatatgtgtatgttactaccaaattcagtcttgaatgtttataaatttatttatttttatttttatatattgtagatgtttaggttcatagcatttcctaatatgtcatcctttaagcaattatggactctttgcagttgttttttgaaaatttgagttgtttcaggtaatacaacaaagctaggaaatttcaattatgatcatgattggtatttggattgtctaggtgtattgtaatatcagtttcttaatcattctttcttcacagttcac

SEQ ID NO: 48380 - DNA, 802 bp, Manihot esculenta
  Intron number 2 from transcript cassava4.1_010872m (locus cassava4.1_010872m.g) derived from phytozome v7.0 (chr-ID scaffold06089; pos 171723 to 172524)
ttagtggggggtggaaaaggtgattacagagctttttttcttaaaaaaaaaattttgatatatgcattactggtgaagttttagaaatggttattataaacatatccactttgatgttgttttacttttctctttatagaatgcaaatatatggttgtttagaatcgtaattgcataggactaatctactagcaactatgtggttgtatatgaactgtggttgcgctaattgcaaattgcaaatttctttgtgttgtttggtgcagtgatgtatttgccagtttacctttttacatgatattttgtgccacatgtttgactaaaagcatatctgtttgagatagctcgagatgagtttggtttgtgtgattctaattaactgataagatacacgatgtgcatgatgtcaactataatcttctgctaccttgaaactcacagcggctcaagtttatatatatatatatatatatatatatatatagcaacaataagagtaggctttgaaaatgattttgtttccatttttttttttggaaaggaaaaattttcggtcaccattaaatattgttattctagcccctggccctgtttaaagactttagcatttcatcaggaacattactgtttatgcttctcatgaattggttcaatgccttcaaaatccttcatgtttctgctctctgaatttgtctttcactactcgtatgattagaactgaagaactaggaatcctagctgtaatcagaaaactagttcttaacaagctttgagttggtttcttttcttgttgacagtgaag

SEQ ID NO: 48381 - DNA, 723 bp, Manihot esculenta
  Intron number 1 from transcript cassava4.1_014031m (locus cassava4.1_013351m.g) derived from phytozome v7.0 (chr-ID scaffold06257; pos 131512 to 132234 reverse strand)
tccctccttccacttcctcttctcacaaattccctgtatatcttctctgccttttttttttctctcttttttataatacccatttcccatttttttatcatattttgtttcccaagttttaattttcaatatttgctgcctctatttttttatattatgcgattttgtagtccaaatttttgaatgattaattgtaccagtgagatgggattctctttaaatccatcttttgctgaggggttattagcggaatgcacccaagagaaatatgatcgtctttgtgtgtgagtgaggtagttgggttagtgtgtggttggtgagaaatggtgaaatcaaattactatttttttttaaagaaaaatatcaatcagctaactcatgattgtctgtccaaaatttaatccaagttaatggtgatcttattgctcatttgctacatactctttgagtcccttgattactgaatttaatcatttcacttgtaaacatgcagtttcttagtgttaagactagacaaaaatataatcccatcattaatccttatgaatagtttaccattaatttgctttatttgtgattatgattgttgctgcaacataatatgtatacatccaaatgatattgctttcatggttgagcagatcctttattggctctcaggccttacctgcactgatgagaactttataatgaagtcaggagctcaacgtgctgcctcagcta

SEQ ID NO: 48382 - DNA, 520 bp, Manihot esculenta
  Intron number 2 from transcript cassava4.1_004464m (locus cassava4.1_004464m.g) derived from phytozome v7.0 (chr-ID scaffold03104; pos 75004 to 75523 reverse strand)
aaaggtccagtgaagtctgataaagtaagctagtttatcagaataatccattttaaacagtgatgtttgatcttttaatgttcttttctgttttgaaagaacagtttttttaactctgcattctctatccaattcatgaattcaattacgaggattccgaagctgaaagtcgctggaatcccgataaagtggccgtatgaggaaaatacgaacggcgttttcagttaaatctgtaaaattactagaaaagaaatgctaatctcccttgatttttaatgtagatttcttttggacattccgatctcctgcagtcaccaaattttctctgcataattatgatttttatgaaaaacatttcttttgatttctgttttttcctctattcttcactcttctttggacaggatttttaatttaattgattcagtaagcaaattgttcttctcattattgctttgcacttatcaatctctgttgccgtgaaggggaaggtcgaaaagctacagaagagcaagcagag

SEQ ID NO: 48383 - DNA, 932 bp, Manihot esculenta
  Intron number 1 from transcript cassava4.1_009904m (locus cassava4.1_009904m.g) derived from phytozome v7.0 (chr-ID scaffold03264; pos 348136 to 349067)
tcgttcgctactctcccgagggtgaacgcactcgtgtatgcatcaatttagtatcttgatttgcgccgctattcttgtgcgtttacttgtgcattatctatacgtatacatttgtgtgttaaagctgtactgtaatttgtggaatagagagcaattggatgcaagagaaatgaaaattttgacagcatggtgcttgagagagatttaagttttgcagcttgagtagggagtacatgaaaattgagaatttcccccttgaagatagggctaagttggaatattgattcaaaaagttattagtgataacttatattctgctttaatgatttgcaatatggttcaccattttctgtttggtgtacaagaccaagttctgcattttagttaaattctactctagctataccaggaataaatgcagtgttattttagagctctggcttggaattattatttatttcttgaaagtagtttccgataaacacttttactattttatgaggatatcctctacatgttgtgtctgatggataattccatcacctattatggtgaacttggtatttgaatgggctttatttatttattttttcctaattttgaaatttcttatctgtactccgactcatattttcttctaattccttgcaatttccattatgaatttttatcaattgacgcattgattctataagaaataaatctcttctcaagttaattgcaaataatggtgtcaacgtaacttccgcacattctaaatgtcttggaagtcgataagtttcatgtaaattcacgccatttttgcttgttaattattttatttatcattttttcatgttgctgtatttcttgcccgtcaaaatctgttgctcattgcttctttctgtaaactggcagattcaaaaacatagagaatacaggcaaaagattat

SEQ ID NO: 48384 - DNA, 862 bp, Manihot esculenta
  Intron number 3 from transcript cassava4.1_006372m (locus cassava4.1_006372m.g) derived from phytozome v7.0 (chr-ID scaffold09000; pos 435397 to 436258 reverse strand)
gcatccttgttgaggttagttggctatgagcagtttatgcataaactctattctgttttgttgtgaaaacgatcattttggaccaaagatttttagatcatatttgattgaacatttctcattaaaattaacattgagattgtcctcgttcatttcggcttttcaatttaagtggtagattttccatttcatacacctgtggtggcaagttggttgaagtctcctgattgatgcacaatctagattctccagaaaacagattgctttaaatgtgaattcactcttgatattataagtccactcagaatgatttgtaccacaattgaaaaggaattgcaaccatattgcatcagcagaacagtttgcttgtatgtggtcatgtagagattaatgtgtttgctccaccttgatgcttggatacttaacaattaaggaacaagataactatttaatcagattgtaacaattaccatattggtttgtcttcagtgcaggtaggtaaactgagacctaagtttgtcctaatgcctgaatatttgttatattgaacagtagagataactttctggtgaataattgcatctttttgtacatctctatttggattgtgttattagcatttcttgcaagcttctttagaaaagctatggttcatttattcttgtgctttcgcatcatagtgtttgtttttgcatgattatcatttcttgtaagctttgatgcaaaagctaggtttcctttgttcttgtgcttttctgtcatacctgtttcatgcatttcttgtgctgttaaagtagggcctcctagtgatctctgttcctttcacctctttattagcggtgtactttttagtaggtggtga

SEQ ID NO: 48385 - DNA, 739 bp, Manihot esculenta
  Intron number 2 from transcript cassava4.1_001989m (locus cassava4.1_001989m.g) derived from phytozome v7.0 (chr-ID scaffold03150; pos 23139 to 23877)
gctgtttccgctacagagctttcttcgagaaagtaaaacagctttgccccattcttttttttttttttgtgctattatgttatgggacttaaattgcagtctaatctttctgagtggcctttgcttcctcctttatgtttcttggactttggttttgtattcatgccagaatattcatcccttagctttttttgctgcttcaaatgttcctcataccgtatatcctgtttgagggagttaagagctccttcacttcttcctcattttttctttgcactctttgtttatttccttggaaaacgaaactgttgagggtggtaatctccttcacttagaaatgaggccaaactaacattttgcctcagaattctaactggcgctttcatttatggagcattgttgcggcaactgcattccacttccgaacaaaaactcaccttttgatcaattcttctaaccctgaagcgtcttattaaactttctatgtccactgatgctgggccactattaagatacctcccctgcactttcccttctctgagagctgttcaattatattggaaacttcttcttttaattaatatttattctcaatactttcttcactataaagccaagggggttggggttttacatgaattgaaagtgatagaatctttgcagtatttatctttatcgttgggcaactttttatggcattacagggccaaaagatttcccataaaagtagaaagcaagg

SEQ ID NO: 48386 - DNA, 966 bp, Manihot esculenta
  Intron number 1 from transcript cassava4.1_017746m (locus cassava4.1_017746m.g) derived from phytozome v7.0 (chr-ID scaffold04065; pos 173657 to 174622 reverse strand)
acgatattagtcaagctctgagtaaaaatttgtcggtgagtttcaacgactctcatctacccagaaatacttgcgcgaccgcttgctctctggctttgctaatttggtggttttcgatttcatattctacagatttagcatccatttagattctctctgtgtgtgtgtactgcattttgtttccttgatttctcctttgattactcacaaattaaaatggaagaaagcgactcatattgtttcattctcgtgttgtagtatttgcgagaattgtgcttttctgcacagtgtttactgatataattttgttattctaattctcagttctcagtgatgtttatgatattctctgcttggtttcgtttcattgctaatttcaatttctcatgtttggcttcaattacaaacgactgcaaaaccctaacccttcgtttgggacagagttttctaaggtaatgggaggacctatgtttgggagggagtagaatttttaaagcaggtttttggaggttttaaattattaaggtttacaaactataaaaaaactttccttaagaaaccatactttagaaaaacttattttactctacctcctcccaaacagagtgtaaaatggtaatagctgttctctttcactaattcttgaaccattacttcacggacctgtttattttattcacttgatcgcttccgagcagaaaaacaaaaacgtaacttgaaatgctacttagataattcttgtggtttcaatttatctatcaactaggtgatttcagaatcagtgattactgattagttcttggcataaagcacagacttaaaaacttcatgtatttttatttatcaaataataacagttgacacctggattttggttctggtttctgatgtccccaactatttcaagcttatattttggatgctctctcataactcccttttacagcttcgttgccaaagggtcca

SEQ ID NO: 48387 - DNA, 904 bp, Manihot esculenta
  Intron number 1 from transcript cassava4.1_013007m (locus cassava4.1_013007m.g) derived from phytozome v7.0 (chr-ID scaffold02631; pos 19335 to 20238)
atttcctccctttcacttgcgaccgctgccttcaggtgcccttctattctctctcacgtctgatttatcatatgggtttcggttaatttcttcgttgaagttgaatttattcttttcttgggattgggtctgatttggaagaaatgaagttgaaccatttggggtagttgagatctttgattttatgagacccaggatgaagaaattcaggttatgaatgacattttttttcccaattgtagatagatggatatctggatgttatttgtatctttcaaagacgctgagccctatcacatgattaaacaagaaagaggctctttctgaaacttggtttagtaattaatggattataccattgtatcttatactagcaaatgtttgttcttttgatggaatctatttgaagctgaaacttgcgaaggtattttggtgcaattaaagcaattctgtgggaaaaagaaatttgtagtgattatccaacttgattttcctataagctctttctgttgatgctaatgattgaagaaaggtgaatgattagttttgcacatatacttctggaatttttaggattgccaaatcccttgcgcttccaaaattactgatcatgtttatgatgtcattaaattagtatgatgatactatttagttgattattaaagtataagaggataaattattggcagatttggtttgttcttgtcttatgaacatctccaagcatgtagttgtaaatatattcatgtttatatcatatatcttggattgtatttatatcatatatcttggattgttaatcttctgctgtttgtaatgttctatacaacttgttggcttgtgcttctgctaactatatacgtgccacacttttactaggtattttgtttggagcaccgaagct

SEQ ID NO: 48388 - DNA, 959 bp, Manihot esculenta
  Intron number 1 from transcript cassava4.1_014381m (locus cassava4.1_014381m.g) derived from phytozome v7.0 (chr-ID scaffold06814; pos 727260 to 728218 reverse strand)
ccgatctcctctcccaagtcgatcaggcactccaggtgtttttacattttttctactttttttttgtttttgtatatttgaagtttcgccttttttctgattttgtttggggcttggtttttctttggttaagttgtgctagttgtttgtaaggttgattggttgcggatttggtttcggtgcctttttttgttagggtttggtacatgtatgtttggctactgagaaagaggaggaaaatgggatgaagctagggtttcttttctcagaattttatctaccttgtgaaaatattgaaagttataatacttatgtgatgaagtgagaaaattgggtgcttttagcataatttgagtatttcaatgtataagaacttaattgaactaaaaatacgggaagtaggtttatttgaccttatgcatccttaacattaacaaaatatataataaatttgaaattggacttctcctgctatgtttttgacttgtaaacagtagatatgtatgtgtcaccatgtccaccctcaaaactgaagtggtaggttcacttcttgggcattattgaggacaaaaatattcgttttttactacatgtcagttttgaaactctagtttgtgttatatttcagatttatccattcttttggcatgtatgatttagtttatgtcctgggatagctttctttttttccttttttccttttttttcctattaaatgaatacaaagtagttgccttcaatctgaaagatatgttacatggattagtttgttctttctattatctatgtggaaaaataaattacaatatttaagtatgtcttggttttgaatgggcaaacaacatacacggcaacttcaattcaatgtgaacagaaattgtgtcctgcttttaaaatgtttttgtataatgtcaaagatatccttttaagttgtaaattcctttgagcaagcaggtgtt

SEQ ID NO: 48389 - DNA, 541 bp, Manihot esculenta
  Intron number 2 from transcript cassava4.1_012143m (locus cassava4.1_012143m.g) derived from phytozome v7.0 (chr-ID scaffold02895; pos 257713 to 258253 reverse strand)
gccggtgctaccgtacaatccagtaccctgattcagtattcttccttctaccaaatttaatttgatttcagatatttttcttgtgttatatatatgaattatgttttcctttccattttcttggtggcattggttttccataatgagccaaattgaattctagtgaatagctaaacttattttatcaagtttgttttttattagattgttattcagttaaaggacatgcttgagatgacttttggttgcagggatttgttattcatggtctagttttagctatcatgactgagaaataaagtgataaatatttatcttttgtgtgtctgaatggattttatttttaggcaatgaagtacaattacaagcactctgcattaactttcatagaacccaactcctagactttggaattttaaatatcaatgattatcagccatatcgactctaatgttttacttttctattttttttttggtttttggtttgttatatgatgggtacagcaagttaatcgacttgaaataaaccccgataaacg

SEQ ID NO: 48390 - DNA, 912 bp, Manihot esculenta
  Intron number 1 from transcript cassava4.1_011301m (locus cassava4.1_011301m.g) derived from phytozome v7.0 (chr-ID scaffold08265; pos 2652965 to 2653876)
tctgttccagggtgcgtacttgataaaatcattcagtaagataattaagttgttgccttttttggtgtatcttttctttaacttttattagattttgtttgattcagatttggtatagtccattggcctttatttatttaatgaaaaggaatcttcctttgcttttgtcttactcaaaattagtaatgaagttatcaatgaatgattaccttgatttagttttagttgaaaatttcccgctttggaaattgaagctggaaagtggaatttgaagaattttgagctcaagttatagcaacatacacatcacttagaaggagaggaaaaaaatatggactactttaatttgttgaataatgctttttaccggttcaatatgtaacttttgagcagcatttggatttcgaaacctggaattcaaactggtgtacaacttgatagctatggaaataggaattgtccatgaaaaaactgaattcgtggcaaaagagttcactttaaacgtctaatgtagacaatcagaggagttttgtattggtgattgttctattagtatattaattcattgatctgatttctactggccaaacaatggacgcaatatttctgcatttatgtgtttgtgtttgtgcatatcttgagattatttatgtatgtctcatggattattaaagcattaagtgaatatgcaagtcatcctgtgcttcttatgcacagttgcctagcattttatggattaagcaatggtgaatagaattccttttgcccttaattagtttgagattgtaagcttgaaggatgctggtgaatatatgtttgaatatcaacaatcttaatgccttgtgtacatgttagagcatgttgatccttatgttattgttttggatttgtaattcttttgcaggaaaggat

SEQ ID NO: 48391 - DNA, 651 bp, Manihot esculenta
  Intron number 1 from transcript cassava4.1_013240m (locus cassava4.1_013240m.g) derived from phytozome v7.0 (chr-ID scaffold02943; pos 155973 to 156623)
acagctgttatattatacaatcatcaatctagtaggtccaactcttatgcaccattcagaaattgtgttcatctcttacccactgcctacaattttttttttcaattcaattaaatttcagatgttatttgaatttacgtttaatttaaatgatgacttatgttggactaattaattttaaatgataataaaattctcgtttaatatatagatcaataattagttaatttctctagatttttatattaaactaaattatatattatttaataataataactaattatattacaaaagcatgtcttactaattaggtaagagccctcacatcccattaggattttgagtcaaaactcagaattataattattttttaactgatagcttaagaatcttaaagcctaatagatccatcacattaattatgaataataattttcatttgtttattttgtaggaatctggtgatataattaaattaaactaaaaggaaaagggaaagaaaatcaggatataaaagaaaaggagaagagccagcaatgattttgatataaataaagggaccaatcagccctcttatcattcccatacttttggcctagttttcaactcacagactactctctctactgcccaacactttctcctctt

SEQ ID NO: 48392 - DNA, 405 bp, Manihot esculenta
  Intron number 2 from transcript cassava4.1_013240m (locus cassava4.1_013240m.g) derived from phytozome v7.0 (chr-ID scaffold02943; pos 156763 to 157167)
accagcttgctgctattcaacttggccaccaactggtatatagctattatatatttgcttctccttctcctcaccctccatagagattatgcttttccctcttttttagacaagggttggctgattcttaacattaagcttcatctttttatgttaaaacttcaagtgttcttcatctgaagattatggtacagcaaaacagagatcacctcatgcctctgttctgaaacatcatatctctttctctccttgtttatcagttgcttcttatctggaattggagtacaaattagtaattgcgtgcagagttgagggttagctaagtttttgattcagacacgtctcttagtagaaaataataatattaataataattgcaggtcgaaaggaacattgatttggttt

SEQ ID NO: 48393 - DNA, 757 bp, Manihot esculenta
  Intron number 1 from transcript cassava4.1_024421m (locus cassava4.1_024421m.g) derived from phytozome v7.0 (chr-ID scaffold06089; pos 121921 to 122677)
gtccacagttgtttgctataatcctactatacgcggtaacttgcttatactccctaatagtttcaggattcaaaattacacttgttttgcttgacaatttttttgaaaattgattattgaccaactacaatgtataactaaatttgcacattcattcttagagatttaattatgtttgagatcttgattacggaacttctcttgttgttataaaaaaaatatagtcatgctgatggcataacgcaatataattttaattacaatttgacatcaaaataaaaagaaaatgtggaaaaagttgtgatcaagagacacattgaatgttcatatccgttttttcatagcgactttaataatgttatgatggtttttttttcaaaagtttactttaataattgtgttggctagtgatgggaagataagcattgactaaatgagtcatatatgtatatttgcatatatcaatgtcttcatataatggatcagcaataacaaattaattttgactaactcctcagagtgcgcccaaactcttttcaacttgtaatcatagcttcttgttgggttgactttgacattcctccacctctggacgtggagtgaacagtgaaccacggttgacatttcagtggccttaattgttgataaatcaaggattatcaaattacatgtattaaataaaaatatggcagcaactaaaatggtgtttgtaattgtgccaggaattccaagaagcgcgcgttacgttctgattatc

SEQ ID NO: 48394 - DNA, 369 bp, Manihot esculenta
  Intron number 1 from transcript cassava4.1_000607m (locus cassava4.1_000607m.g) derived from phytozome v7.0 (chr-ID scaffold03802; pos 881125 to 881493 reverse strand)
caaacccagcaagtaagtttcgcatggattgaaattatgttctgtaacctgtttgaagctagtttgatattttattgttttctacttgcttgaatgtttgaataaaaggtttcttttgggatatggtagattgaaatcaatgcatggaatgagagtgtgatcttttatggagattatattaattcagatgcaacataaggctgctctttgctttggaccaatagtagaaaagttgttaatctcatatgaatatttctaaataattcttgcatgatatgtatttcttctctttccaaatgaagattctagattctaaaattttggattcctttaggtggccccacctccaattcctggttctgcacaatc

SEQ ID NO: 48395 - DNA, 466 bp, Manihot esculenta
  Intron number 1 from transcript cassava4.1_029988m (locus cassava4.1_029988m.g) derived from phytozome v7.0 (chr-ID scaffold03572; pos 168947 to 169412)
agtaagttattgcatcatttgattaaacccagaaaggattcttaaatctagagtagatttggctaaaaagttcggatctttcatcaattatcttaagaaatttgttgggcttttgagtatgaagttgcttatttttctgtgtttaaaattatgcttacctttatagatgaactttcatggggaatgatgaatcaggttctatctttaatctttccttttacagtgagtaagcctatattatgagcctgtgattccttgagtcattgtttcaacttcttattcaatgatagatcacagagcagattcagtttcttcgtgggatgttcaataccaaaatcccatataagatcagaaacaaaacacgaatatattattaggaaaattcgggagttgtaaggaaacaagatgttaagtttgacataacttgttattttgattttcatcttgaattgcaggtgttacaaca

SEQ ID NO: 48396 - DNA, 527 bp, Manihot esculenta
  Intron number 1 from transcript cassava4.1_002150m (locus cassava4.1_002150m.g) derived from phytozome v7.0 (chr-ID scaffold10563; pos 639177 to 639703)
tggaagtgagtttgctttctacctgggttttgcaggtaagggttttctcttattggcctgcatttcttatttgtctgggtttcttttaagaccagaaagttggttgcttttccagttccactcctgatttacttgtttcctggcgaatactaattttcttttctttttttattcattaaaaggagcggtcttttggcttgtgggcttgttatctttttgaatttgcttttttgtttttaggtttatattttctttttcattgaagatgtcgtgttctacgctactgtatcatttaataaaaaaaattaataatatgtatacagatatctgtgaatgaaaaggaagaaacgaagaagaagaatgtgtgcgctaaaagtttttaggtacagttaattgacaatatttgcgcacttttgtgcaggatccccaaattagtgctaattaatttcttaaaagatttaatgggattttaatttttttgagctatttcatttttcacttcctccttacaggtgattggagtggag

SEQ ID NO: 48397 - DNA, 699 bp, Manihot esculenta
  Intron number 1 from transcript cassava4.1_013205m (locus cassava4.1_013205m.g) derived from phytozome v7.0 (chr-ID scaffold03818; pos 85799 to 86497)
cttcaggtgtgttatttatcattgatcatgttgttaattaattctaatcaacagattaagctaatgaagtgctttgcgttttttgagcatttaaaatgttatagaacttgaatgctctacaggaataacattgtttatttatttgtttgccaatgccaataatcatttgcttcatagtggtattgttcctaaagataggatatgaatatgctactaggaaattcttcaactgtgcttattaagtcaatatttttattgatctttgaggtgttggttaaatttgtgcattttaaaagcatctcaagtataatttttagcaataggttgcaatgatgaggaaaatttgtctttaggaacttcaaaagtgggagattgttcagtacttgaatggacagtattttatgtatttgcatgcacaaatttatatgaatatggtttttctttgtgtggtcgtgaggtctagctgaatttacacctgaagtatgtaatactcgtccatcctggattagtatttggatttggaggtaggtaaggcagacttgttcattttttttttgctatagtttgatgaagacgagttttatgtactgaaggtaattgaattagaatctatatgctgcaaagggaatatgattcatccttctattctttagtagatgagcttactattattgtatttgacaggatatttttgagtcc

SEQ ID NO: 48398 - DNA, 453 bp, Manihot esculenta
  Intron number 1 from transcript cassava4.1_006004m (locus cassava4.1_006004m.g) derived from phytozome v7.0 (chr-ID scaffold02264; pos 532656 to 533108 reverse strand)
actgttctctttgcttctgttatatcccatctcaggttgttcttccaaagctcaggtttttcttgtgttagagcttttttcagtacatgtttcttttcacgatagaaaggttgtaataataacactcatctttaactcttcaaaaactatgattgatactgtttaatgttactttagtcacaagatatttttaggctctcagtttctgcttctgataaaagcctctggtcttttcttgttgaattcccatggatgctcatgtaatcatcaatgattgagaagctggaatttggttcactgattttaccaccgtgatagtgggaggctactgataccctgaattaaacctgttcctttctgaactttaattcatttattcacctgtgatttctttgtgattatctaaaactcctatggctgatttgatttctccttgcaggagtttacctaatt

SEQ ID NO: 48399 - DNA, 576 bp, Manihot esculenta
  Intron number 1 from transcript cassava4.1_031948m (locus cassava4.1_031948m.g) derived from phytozome v7.0 (chr-ID scaffold08265; pos 106684 to 107259)
gttattgcccttctggtgttttttgcaagaatcaggttaatataatctctgacatctttgactgttttcgtgtacttttattcatatgaactagggcttatgatgattacttttaatttgaattactctttctgagcatgcgagttaaaatacttttatcatattgttcctccttgttatggatcctttttgtgttttacgaagttgtaggccaaataatgcatattgttggtgggctttcttactgtttcatatgatttttgtgtggctcagtactgtctttttgaatttttgtgttcaaaattttttacaccaatttctttatgcaaatcttaaaaaaggaaactatttgtgttttgcatatacaaaccacttcattctttttttggtgcacttcttctcatgcaaaaacatttttagcttttgtttgacaagtttttgttgtcttttccttacatgctatatcagcataactttaggagttcaaagttgtatgaacctttgaggtttcttgttgaagtgctgctgaaccatgtctgttatgttcaatgtcttctgttaacagaaatttcagaa

SEQ ID NO: 48400 - DNA, 284 bp, Manihot esculenta
  Intron number 2 from transcript cassava4.1_018323m (locus cassava4.1_018323m.g) derived from phytozome v7.0 (chr-ID scaffold08265; pos 4623734 to 4624017 reverse strand)
ctcctccaagttggctcaagatttctcctcaggatgtgaggaaccctaaccctaatgaatttttacctatttatttgattttttccttttctaagcagtttattgtttatttcctttactgtttgaattcaaacgggctctctgtctttgttttaatttcaagttgtaatgcttgtaaactgttgttcactactagttgtattctattatttagtactgattttcttttttaatttcttcctatttcaggtcgaggataacatctgcaagttcgctaaaaaagg

SEQ ID NO: 48401 - DNA, 623 bp, Manihot esculenta
  Intron number 4 from transcript cassava4.1_000623m (locus cassava4.1_000623m.g) derived from phytozome v7.0 (chr-ID scaffold05806; pos 245782 to 246404 reverse strand)
agcgactctgtaatcaaggtgagcaatatttttgctttaccatgcacaatcccagcataatgacctaatgagagtgaatttatgacttgcttgagatccttgcatttactaatttacttgttagttgtttcagcagtatggaagaccatatgctttaatctgattcacatataaatttgagaaaatttaatcacttatcagcatgtccacgcctacctcgaaacttgaccattatctgctccttacgtacacctttatatgttccatgcgcaggaagtattgtgcaatgtttggatttatcattaagtatgcttaaaacctcttaaatgttgctgtttttgtgagagggatgctatgtgtaactgtggtctggtctccttatatttcttcttttattcttttttgtttctgaatttctgttcacagcatctgaaagctgttatctccatagacacatgaatttgatgactattgtgtgtttgcttatttcattgccatagtgatgctgtatacagcgcttgcatcataagatgcacagtgtggatattcttttaacgctttgatgttcgtatgtgatatggttatgatgcatgtagtcgttttatctgtcacaccacaggtat

SEQ ID NO: 48402 - DNA, 824 bp, Manihot esculenta
  Intron number 3 from transcript cassava4.1_000623m (locus cassava4.1_000623m.g) derived from phytozome v7.0 (chr-ID scaffold05806; pos 246472 to 247295 reverse strand)
gggcgaccgtacctttgctttggagtcgagtccaggttttcaaagtttgaattattattattatttcttctgtgttctttttctctatattttggcagcttgctttcaagaggaagcaaatagggcatggaaattttgcaaattttgctgttaagatttgactaaaaagccgatggtatctcttgaagctacgtgaattgacaaatttgtgtttgcttccaagaggttgaaattagagaataaaaaggaagttgaaaaatggaagaggggcaaaatctgggatgtagggtatacatattagtaggcattctgagaaatacttttgctagtggacatatctatgtcataaatacatagaaggaccaaaaaagttaaaattaaggagatgtcgtaggatgtatatgaaatgacttgctgcatcttgttgatttgcttccacaagcatggctgtcatactttttgcctttctggggtttgttttcatacatgcctcttttctgaagatgaccttattgagtattgaaatcttcttgctttagcatctattgaagctctaggtaatgtgttttgaactctcatattttgaggctctctctttactcttttccattagaaggtttgagacggtgagttcattcagtggttatttagtgggaagatttttcttgtacattttgctctgttctttagttttggccagaatctctctcattatggtttttaatattgctaagtgtttgttgttatgaatataattgcatgctgatataatcttgactccaaatctaggtccaaggacagataagtctattgtgtggcggagt

SEQ ID NO: 48403 - DNA, 641 bp, Manihot esculenta
  Intron number 1 from transcript cassava4.1_008777m (locus cassava4.1_008777m.g) derived from phytozome v7.0 (chr-ID scaffold06705; pos 163216 to 163856 reverse strand)
tgtaagaattaaagctgagagtcctcttcacagtatgtttgttttttctttccccacatttcttgatgctaatttgagctttgtgattgacaaaatattacatttttttcctttccgtttttgggatctttcctttgatgtaaagttgtttagttttgattagtgaaacaggaaaggttgcagttgcacctaccttttctttgaagaacatagttatgttggattcttttgtctatatcgttggtgttagattttgtttggttcctgggaaagttaagcaatcattttggttcttgaaactctgggcttcagttactaagaactgattgagctttacagtatatctattgatttcacttgagaaccttattgcattactatttcttcaaattaggacttctgtctcaccatcagagaattttgccaattctcttgattctgttcaaagttttgccttctgttatttgattttccccaaattgattggcaacttttcggtatttggatatttattttcttagcatctatatgttggatgttgaataagactgcctttttctgatttggcgttgtagatgctttgatggtttttcaagatttatgatttttaattgtcaattttatatgggtagatccaaaat

SEQ ID NO: 48404 - DNA, 547 bp, Manihot esculenta
  Intron number 1 from transcript cassava4.1_007576m (locus cassava4.1_007576m.g) derived from phytozome v7.0 (chr-ID scaffold06089; pos 232551 to 233097 reverse strand)
cacatcaacgcttttgcgttctctgaatccctcaggtattggagttcttttcgaactttcttctgattttgccctaacttgcaacattcacgcgatataagttgagacattcatagtctcttgtattctttttcttttaattgaaacactctcattatatacctgtgcataatctgggcgtttgttgttgtttaaattattttaggcttgttttatgtattgggtattgattcggtttggctagctaagtaaattctttatgtttcgctagctaagtaaattcttcatgtttggctagctaagtaaattctttatgttttatgtttgttctttaaattatcggagagatgttgtactcattggagacaatgtaatttttgatgttttgaatatttttcattgggttctattgcttccatattttattgttaataacattattattattatttgcttgagctggttaatgttttaaaacagtctgtattactatgaaaaatgtggtgttgcagtagtttgagggactgcataatttgtcctgtagatt

SEQ ID NO: 48405 - DNA, 566 bp, Manihot esculenta
  Intron number 1 from transcript cassava4.1_014280m (locus cassava4.1_014280m.g) derived from phytozome v7.0 (chr-ID scaffold02895; pos 92564 to 93129 reverse strand)
gatactgctcagtggacacaggtgattaaagacattttttaagaaaatattttctgcatacaatcatgttttttctcctttgggctggaattttcaaagctaaatagattttttttttttttttaattacctgctacaagtttccttttccttttcattttcttcttttctgcctttattaaagatgaagttgctcagctcaccccccactaatattttgaaatttatgctgctgtcatttgaaaaaaaacctttcaaattgttcttgaaagtactgcacttttttctctttctttcttttctctccacaatctgctgaagaggacttggaaaaagttgctataatttgtttgtattgctgtggcaatcctcaaaaaagcgtaataaaagcactactctttgtttccttgctttgtttctttgctatcacaatttcttttctccatctttaatccctatacttttgtttttgatcatgaaatcctggcttttcttctcttacctttttttccttttacttatattaattttatctttaatttcaggggactggattggctaaaccc

SEQ ID NO: 48406 - DNA, 884 bp, Manihot esculenta; identical to SEQ ID NO: 47652
  Intron number 1 from transcript cassava4.1_014846m (locus cassava4.1_014837m.g) derived from phytozome v7.0 (chr-ID scaffold01441; pos 40526 to 41409 reverse strand)

SEQ ID NO: 48407 - DNA, 513 bp, Manihot esculenta
  Intron number 1 from transcript cassava4.1_023092m (locus cassava4.1_023092m.g) derived from phytozome v7.0 (chr-ID scaffold06659; pos 300670 to 301182 reverse strand)
gtgtgtgtgcttctgaagtcattgtgtctgagctcattgcttatgcaaaagttcaatcagagctcattgctgaatcaagcctgcaaattgtgtttccatatatatagaatagaacctacacacaaacacccacaggcaccactaatccttaaaattttcaactcaaagcaagaatcattcttataattaagttcctcagagagagagagagagaaagagaagtggtgtgtgtaacaggaggttcaggttatatagcttcatggctggtcaagcttttgctccatacggttaaagctactgttcgtgacccaggtgaccatctatcccttgtgtcacagacactcgaccaccgaattctataacctttgtttccctttctgtttgctaatttttttccttacttgtcttagatgatcctaagaaaacagaacacttacgttgtcttaaaattttctactaactttattcttcatggattaatctgattaactttttgttctttccagcgttggt

SEQ ID NO: 48408 - DNA, 904 bp, Manihot esculenta
  Intron number 2 from transcript cassava4.1_017479m (locus cassava4.1_017479m.g) derived from phytozome v7.0 (chr-ID scaffold00085; pos 190306 to 191209)
gcatgtgagatttaattatcatgattttttcttatttcttttctttgtctttttttttttttgaatcctaactttgattttaaaataggaattgcaagtcttaacactgcttgctcaggtgaattatgtgatcgtaatttcttgtttggtcggccttactctttgaaattcaggccccaaatatcaagatatgattttgaatagaatattctgtacttggctcttaccatggtccatgcatgctaaattaagttccttgttttattttgaggctaggagtggattccaaggttcctttgtatttgcctcttgtatgatacaattctttgtgttgttgcagatgtgttgatgatgtgttgatgttttttggtaggatgcagtataactaaaaacaaatggaatgagaatctagtatatggcaattctaatccgatgtttggttgcaaaagtagaagttaatatatgtaacaccaaaattttttcccctatattcagtagtttatttgttgttgttggtggcaacaatgggaacaatttgaagtaaaaatcagtaataaactaaaaaaggaaaaggtaatcatgattacgtaaattgttgtctgtatgagcattaatttatttaaagcagtactaattacattatgtaattggtattacattacaagaaaataatatttgtgctaccaaacccgagaataagttatgtaatgtataagcattacattggccgtgtagcaattatgcattcaagtgcttaggaaatcttgtttggggaatgatcatgttacccgcatgtgttggttgaatgtaagcatgtttatgcatgtgcatctaggcatgaaattatttggtatcgatttaattcactcgttcactttgtcacctacttttctttggagtcagc

SEQ ID NO: 48409 - DNA, 888 bp, Manihot esculenta
  Intron number 1 from transcript cassava4.1_009780m (locus cassava4.1_009780m.g) derived from phytozome v7.0 (chr-ID scaffold07683; pos 247566 to 248453)
tttcttctttgcttcgatctcttctctaatataaggtaagcttcgatccttttggtctcgttaatttcgtttctcgttcatggtgtttgagtagatcggtttgtgctctgttgtagtgtctttgagaaatcggttgctttggtcggttgttctattgtttttgtgttgctgatctatggatttggcacctgtgtttgtctatatttttgttgctagtggagagatctggagctaggcattgtgttcgtttgatcaagtgtatgttatgctgtgatcgcttacttagtttcctgatctgggtttctcatttctggatctgtgattgtacaatttgatctgcttctctattttgcgtttgatttcactttccgttttttataagttgttctgttccatttgttctttccgatctaggtatgaactgatgctcttgttttgctattgatctgacagtgtgaaattgatgagtcgtgaaaaaaagtaaaagtgaaagctaataacgttactgggagcatgaaggaaaataaacgacttataatgactacctctttcaattttgattttctcgaatgggaattataaggatttcaactctcaataattgttaagcccctgtagcaaggttttgtttatctacttaattattgaaaattaatgttggatatagaaggtgaagatatttgttcatccctgatgctgctatgaggtgtataattcagaacaattcgatataagactgtacaagtactacttttacaatatatctttcattcatgaagatggcattggaaaacaagttcgaaatgcttgtgtgtctctctgtatgtttataattcttctttctgtccctcatttatttttttacatgcttatgcagctttttaaaaa

SEQ ID NO: 48410 - DNA, 1026 bp, Manihot esculenta
  Intron number 3 from transcript cassava4.1_007234m (locus cassava4.1_007234m.g) derived from phytozome v7.0 (chr-ID scaffold01543; pos 69516 to 70541)
tggccaagcttcaagctggatacctttttccagaggtctgcatttggtactatctctaaagttttctgctgctaaaacgttctttgaataacatgtttgtccttaccatttgggtttcaaaccaaatcagtttattagatgtgatccaattctacgtggcctcccattattcttctttttagttgtcccatagtcctctactatatttgctgaagttgaatgttttaagttataaacagaattgtaattttggatgtctttgaacagtagtttttttacctgttagtgaaaaacgcccgcatcaatctcattccaagcaacaattgaggaaaataagcacaaaaaaggaaacttatgtataatctttgtaaaggtattattttttcctcctgtgtgcctgtgtactcgatgatagatggtgcaaattcctggttaactaggaataaccgtagctgcgaaacaaacctgcgaaatagagaggaagcataaaggaaggtgccaggacatgccatctttgatgcttaaagttagtagccaatagagaataatatagatttagagaggagagaaagattccttcatgttgatctgtttatctatttataggggcagacttacttttcatattccatccttgtccttgtctctcatttgcttattcagttaaaattactgatggtatcactagtcacctcccagtcccacgcctcagatattgagcacactcctaaggaggcgggatttgggctgtgggagccatgagtaattcaaggttactgcctgatatttaatatgtatatccaatctcagttaattgattgagtccatgaaggctgaaatgttattactttctagactgtttattgcttatatgtctaaatggctgtaagaaattgatggtttcaaaacagttattattttcttctactagtattatcttttctgggatttttggctttggtcattcacttttctcctttgcctcttctttttggtccatctttgtgaagattgctcgtaggagga

SEQ ID NO: 48411 - DNA, 579 bp, Manihot esculenta
  Intron number 2 from transcript cassava4.1_006746m (locus cassava4.1_006746m.g) derived from phytozome v7.0 (chr-ID scaffold08265; pos 330742 to 331320 reverse strand)
tggtctcccgattggtaagtcaattcatgatttatttagggccagctgattaaaaaattgggatgcatccattttttaatcgaaatttgtttttatttttcacaaccattggagtttatagcattgtaattgtggatttacagcatcatatttattctcttctattcagtctaacattttgagcttaacctgttttgagttaggctcttatcataaaatacatcatttaatttttaactggatgactagtccaggaagaatttagtgatggttcagttgagttcttaacattttttttttccctttgttgtggctgacaaatcaggttttctattacaccataaagtacaccacccaaacaggaaaaaaataactttttatttctgtgcagttagcttttaataaaaaggaaacaagatgctaataagaggatacctttttttttccttaaatgttgtaatatctttaaaaattgtggaatgagatggttctttttgtctaagtagtctttttatttttgctatgtgaatctatgggaaagttgtcaaactagtcttcttatttttattaggtaaacat

SEQ ID NO: 48412 - DNA, 401 bp, Manihot esculenta
  Intron number 1 from transcript cassava4.1_011620m (locus cassava4.1_011620m.g) derived from phytozome v7.0 (chr-ID scaffold08542; pos 811610 to 812010)
ttatcagaatcttttagttcttgactgtggccaaggttcttatttgtcactatctttgtactctatttctctaggtttcttcccttgtcttttgcccctcttgttttgtttttcatttgtcagtagtcttttttttttttttttttttttttttggtaatgatctgcttctttttgtagattctgatatttggttatatctattttctgctttttttttcaatttactatagttatccagccaagatcaatggaaaaaatggttgggttttcattcaacaatatcgtgtttttttatgtcttcttaaagtagaatattgcaaaatatatattggtgggaattttgattgtattctgaaaattgcaggatttaatttgaaccatcgagattagcccataaaa

SEQ ID NO: 48413 - DNA, 955 bp, Manihot esculenta
  Intron number 4 from transcript cassava4.1_022941m (locus cassava4.1_022941m.g) derived from phytozome v7.0 (chr-ID scaffold08673; pos 67903 to 68857 reverse strand)
caagcacgagtaggttattgttaatttctttggcatgaatccattgagttttattaatttaattttcctggttcagctccacagttatggcaggattgaagtaaaggatctgccttgttgagtttgtttattatttggttttagtggaggaagcagactatgaatgagtagcatgtgcagtgtgtagtagttttagtcttcatgtataactaattggtggataatgctgtctaacaaggttgagtttagcaaccattatgctaattatgtctgggaaagcttaatattggattttaactccatttaagttcaatcaagcagagattgactacctgaatgctgggaatgaatcttttgtgtccagaatgccctttttcccccttccagttctcatttctgggcctggaagttgaagcattagcacattggctcacatcacagtgatagttataatccaatacgtgtcattacctttcaataagtaccattttctcatctcttatgagaattatattatatataatttaggatcatggagtcaatttccttggcttaagctttccctggaaccagctatagcataagtaggaaagacatgcatgggatatagccttttaaaacttaactgcagtttgatcagcgtcctggatgctcaaatggaaccctgacttaaaaattcaggcttcaggctactgtcttggaattggatgatttttatttggttcaatgccattattttccaaatcactcattgcagacttgaactatgatctgtaattgcattgttattattgttatttctatttgcaagtggttattagatgcagtactatttacagcatcaactgctatattacatttcacatgttagcagtgctaatttcatatgccaattgttgtgctgaaaatgttctgtgcaggttccctgtttatcctgagcttgagagtagaaact

SEQ ID NO: 48414 - DNA, 999 bp, Manihot esculenta
  Intron number 3 from transcript cassava4.1_002840m (locus cassava4.1_002840m.g) derived from phytozome v7.0 (chr-ID scaffold08265; pos 2999031 to 3000029)
ttgacaaggtaagcctgcataacttttgccatctatagaacaattcatgaacttttttttttttttgtagaaatcaattacaagttagttgcctacttatggtgtttattaatagattatgtgttgtaaattgttggatcattgtcttatatgcttgcgtatataagaagattcaatattatggtatgcatttaaatgagtgcaagaatgatatgatgacagtatggtacttgaaagttggcgagttatttactttcttattacttgggctaattttactagtgatcattgaagtgttgttcaaattttacaacgttcatgaaaaaagaaatgccatgaaaatgattttagcaacacaaaatatcaattgaagcactattacaggtggcaatttatgtgaatgcttgtgctgacgtattgagaaatatttgttaaagggtaaagctgatgttgggtctcacagcatccccaaaattccttggtgtggtctccctatagccactaagttccagttttccttatgttatgccattttctccaccccttatcactcataccaactggtgctgtcctgaatctatccagattctcaggggagtggcaatgttagtctgctttgacatatacctcgacctctacatgcataatatttttactggttatattagtggacgatggttccttttagaacactctttatctttcagatgctcaggggcagtgccaaagtgattggaggcggagaaaatatgttgaccaacatagagttcctaattaggaggattcaaatctttgggatcctaattaggtttgatttaagagatcttaatcttattataaatatttcttatataccttatgtaaaataagtgaaataaactgcattactttgagtttacttgtgattcaatattctgcaatattatttgcagtccccccccccccctgcccttttctctcaaattatgctgagcaggtgtatcacctttgtaggtttat

SEQ ID NO: 48415 - DNA, 446 bp, Manihot esculenta
  Intron number 1 from transcript cassava4.1_019665m (locus cassava4.1_019665m.g) derived from phytozome v7.0 (chr-ID scaffold07330; pos 201735 to 202180)
cagttagtaggtatacaatcacagatacaactgttcccacaacctggaagaagcccacatgcttagcttttgaacattattcttaggcaagttcagattgagagaaaatatcaaacacctaacctgcgccatgaacatggacctaggtggaatcttcatgtagtggccaagcttgaagtcctgtacgaaggttagagcttgagtcatgctgatatatccatagaccttgaagcacatattagcaactggacgctctgggaaaatgtaccctatgatgtattctgtgatgatgtttaaacctggtgcctgtgatgattgcagcagagcaagattcaaagttaaaatcccattggatcacttgaatataaacacagatgttggcttttttttacctggtttgtggtggcatagataatcccaattgggagggtgaagaagagagcaat

SEQ ID NO: 48416 - DNA, 681 bp, Manihot esculenta
  Intron number 3 from transcript cassava4.1_032501m (locus cassava4.1_032501m.g) derived from phytozome v7.0 (chr-ID scaffold02943; pos 496944 to 497624)
tggtaaaacctatcttctttctaattgtgattcttacgtttgtttttgggatagagctacatggcatcacttgattggaccaccacttttctttttttaagaaaaaattcttccaaagctttcaaattgatactccagtcgatcctaattcagtttataaactaaatttgcccctggctctttaattatgtttcctttcctttgtaacggaaaaatgaagagcttttaaaaattagtattgattaactaattttaaaaaatcaattaatagagcttaactttttttaataaaatatatttttaaaaaaagtaattatttgaatgcaatattatcatgtttgttactatttgaaatttaattaaagcatataattattatgtttgattaagttaaacgaaagtaaaaataatgtgaaattaattgctataatattttattataaataaataataaatgtcccgatgcatattgttggcctcgtagaggcccgattgggaaatccaagcccagcccataagtttggagggaagccgtagacctcgattctaaatccaggctttcaaatccgatgtcacaacttgattttctgtattctctccaaaccaaactgaagaaaatgttttcattcgttgagactattttcaggcagacggtgttcctgaagggcgacgggcatcggc

SEQ ID NO: 48417 - DNA, 652 bp, Manihot esculenta
  Intron number 1 from transcript cassava4.1_008631m (locus cassava4.1_008641m.g) derived from phytozome v7.0 (chr-ID scaffold10493; pos 952890 to 953541)
ttcttcaagcccatcctctcatcgccgatcatcaggtcttttcctttccccgccgtcgttatcttcgatctagcggtcacttttgatccaaatcctgttatcttccttttatggttgctgcagttgatgagcttttttcgttatgatttgtaggcttctttttccctttagctaacctattggttgctttgggaggtaattgctgcgaggtttcgaattgctgttaacaggattttgtgtggatgtagtgctttcaactgaatttattattctcgattaggaacaattcatttttgttttgattttcttctaatctatgttgcgaaaaaaatggttatgcaattaagccttttaggggaaggctgggttttttcactatgatgattgtatttactctactttagttgtggtactattggtttctgttatttgattagtaaattgttatataacggtgtggattagtcgttgaatttggtgtgaataattgctctggatttttttttagtccttagagtttaggaactcttctaaattaaattggtaaattgaggcatatgtaaaaataaaattttacaatttttttttctgtttgaaagttatgactggattttcccctcaatatgagttaattgctgttgttcttgcagtc

SEQ ID NO: 48418 - DNA, 586 bp, Manihot esculenta
  Intron number 1 from transcript cassava4.1_006326m (locus cassava4.1_006326m.g) derived from phytozome v7.0 (chr-ID scaffold11960; pos 89390 to 89975)
tggattcaggagtaatcgccagcaattgcgtagaggtttgtcgatttcgttttattcttttcgaaattgattactattattggttaattaattttatttgtcggtgggtcattattgtttttgtttactctttttatatatgtattagctagtgtgcttgagctgtatacaggattagcgagctttttatcctaatgcgtgctgatggatcactgtgaacatgttggtaaacttttcaaatgttagagctaagtgggattatttgccttattctttttccccctgggtactctttatttgtcttattttttttttctaaaagaaaattatgttatttggtttgagtcatggatgaaactaagataaagagaatcttataagtgaatgatgtcgtgatgcatactcagcaaagagaataagttgacggttgatagtgccaatttattatggatatgcgactttgcaaatatcgattataaatgaaataaactattgtttaaaatttgatttattagatagcaatagtttgtcgtctgatgattgaaattttagttgcgaatttatggtgcagctctttgttattcga

SEQ ID NO: 48419 - DNA, 745 bp, Manihot esculenta
  Intron number 1 from transcript cassava4.1_008051m (locus cassava4.1_008051m.g) derived from phytozome v7.0 (chr-ID scaffold08265; pos 760317 to 761061)
gtctcaaggtgcttgctattaatattcgtatagtacttcaattgcttttcttcattttatttcttttagatatatcttcaaatattgcgcgtttgtgaatgcgttggataattgtatgcaaagcaacccgttcaattatgatgttctgaaatgagtattttgttacgatttctctggttaaaatcgttggatagcatgttaagaacttaagatcacaaaaagtgaatagtttcctaatgatttttggggttgaaacgttggatagtatgtaaagatcctttccgtttttctgagctttattaagtgtccaagtttattgtttaattttttttcctaaaattgtcaatcaagagttttcctgtatatcattcattctcctcgtgtttggaattaagaaatttacaaaagtttaattcaattgatttattcttttaccaattctcatgttctgaaagaattcaattctttgtaccttaggaaaaaaattttcatttcaaaaaaagaaaagaatttatgcataattgtctaataattattttcttgcaaatgatttatttcaaagaaaacggaatgattttgagttgatgttaatgattataaatagctttcgtgtctttactggctgataatcacaaatattaagttagcttatttggtagttattgatgatttttcctccattgccctaaattttgttgatgttgaaacagaacttttatagcacctctggagagactgaagcttc

SEQ ID NO: 48420 - DNA, 494 bp, Manihot esculenta
  Intron number 1 from transcript cassava4.1_014690m (locus cassava4.1_014690m.g) derived from phytozome v7.0 (chr-ID scaffold06611; pos 61584 to 62077)
tagttcaatctcggaagcccaaaaatctatattaggtaatatttgtcattggacggtaattgaagaagtttttgttctctccaaagatttttgtcaagcaacaatgagtctcttttgctgtatattatgattttacttggttggattttcaaattagagggttttgtgcctctcttgctagttggttgtaatcatgggactggattttttttttttttattcacaagtgcagtattttaccttcagaagctaattgatgaccatccttaattttgttcattattttttgagtattaggttggcttttgattcttgattttaagttcattagattactgctttagaaatctccacaagtttggctttcaacagaaagggaagagagagagaaaacactttgagtttgtaagatgactgattaatcaccttaacttctaacattacttgacttgacatttgactttcttttgcagggaagcgaaaagagagaccca

SEQ ID NO: 48421 - DNA, 820 bp, Manihot esculenta
  Intron number 1 from transcript cassava4.1_018824m (locus cassava4.1_018824m.g) derived from phytozome v7.0 (chr-ID scaffold03802; pos 863138 to 863957)
actaaccggctcctttccagaaagcaattcgtaagctcgctctctctgtttttctttttctcatacgtttttttagtttaagttccttcactttcttagtggccaaacgtcctgtttgcaaaactaatcagttttatggttctgttgttatacggattctaaactaataatgaatggagaaaatgtttgtatatttttgtattttatgaatattaatttattgcatattttgctgttgtttttgcatttgctctttttcttgatagtgaaagattgcttattggtgttaaagctcagctgtgtgtcacatcttaggtgggacttcaaacgatgataatgtacaatagtgatacattcattttctctgcaaatacactatttctgatatggtgattttagtggggctcagttctgtattttgtttgtttctgtttgtggcattagatgttcttttttgatgtgagaaaatatttgctacacttgatgggttttatggaacccgcatgatgattcctatccaccaagatctctgaggcaaccttttaatttttattccataattagttaatcagtgactttgtttaacttttattcttggtgttcattctatgcacactgttagatataaatattgacttttgatcaattgagctttagagccctggcagtggcattatgttattttttggatgatgatagttcagtttatgagaactccgatgcttgtgagttttcagatagaggattctgatgacatcatcttctttttttttttatatataaatctttttttttttcaattgatttatgcagattattg

SEQ ID NO: 48422 - DNA, 744 bp, Manihot esculenta
  Intron number 1 from transcript cassava4.1_029694m (locus cassava4.1_029694m.g) derived from phytozome v7.0 (chr-ID scaffold00506; pos 43995 to 44738 reverse strand)
ttttatcaaaggaagcttagtcctattcaggtatgtattttctttcctcttcctcccccttcttaattttatgaaggatcgattagcttggaaaatattttaaaaaagagtttttcttaaaaatggttaatttttttaattaagaaaaatttttcatataaattttttgaagtattgcataggttagaggatgcgaatattcgtcctataaaaaatgtttcatgaaatctgtcgagttttgttttgtttttcttaaagcttagttttctcttgcttaagagaaatttcttttctagtaattatttatgaacaaactttgagaatggaaaaatctgatcttaaagtgatgatttctaggattttttttttctagtactaataatgattgcttacccttatcaccaaagtgatactttcaaaaaggggttttcaaaatatatttatgaataattatttggtggccatgtgagaagggaagatgagcctcccccgtccatggcggtttctctggcatgaccattgctgctggttggctttttcctttttttataattgcccctatcccaccatttcatgaaaattgtaaaagcccttaactttattaattatattattattattattacaatatatgagtcttaactaactatattaattttttcttaaaaaaaactgatcatattaattttcttcctgtgatcttctatatattaaacataattccattgtttttttttttagtaa

SEQ ID NO: 48423 - DNA, 678 bp, Manihot esculenta
  Intron number 1 from transcript cassava4.1_018652m (locus cassava4.1_018652m.g) derived from phytozome v7.0 (chr-ID scaffold09000; pos 50768 to 51445)
cactcacaaatacgcagctctcactcagattccatgtttgtgactttttctctgcctacttatctttcttttttcttttcaaaatctttcatttccagctactttccctctgtttttcttgttaattatctgtacttgcatattcaatctctggttttctatttttatgggttatttttttttaatttattcatttgtttttctgatatatatatgttttgggtgggagaagcggggcaattgattttgcatgtggatcatattgttcatttctggtaatcaatgaattgtgataccctttgttttggttttttatgccctaaaattttgatttaattatgtatctgtggagcagacattgccttgagaaaataaggaatgaaaaaagataataatatacgagtcattcatgtgtttgattatttgctttgaagaacaaacaagcagtcctccttttgatgcagaccctttgattacctgattttattaggaaatgggtatttaatatgttccttatgtttgtaaccttgatgagtttttagaagtgtgtggtgacatgcctactgagaacgtgggatggtctttgatattgttagtcctatatctcaattggcaatatcagttatctgtctaagcaatggcggggatttttgcagggagagtattttgcaagaaagg

SEQ ID NO: 48424 - DNA, 512 bp, Manihot esculenta
  Intron number 2 from transcript cassava4.1_018652m (locus cassava4.1_018652m.g) derived from phytozome v7.0 (chr-ID scaffold09000; pos 51460 to 51971)
gagaaacgtgggaagaatgtgagtgttttcctgctctattcccatttttgtccacagagattgtagatgtaaaattgtgctttcttgctcaggacttatagattatagtttgagctttgtgttttatgtggtggactcgaatattgttgaagttttatgcttctttcttttcaaactgcgtgcacatgaagattactttttgaaagtggttcctcaatagacttagacttctggacattgtttctattggaaaattggaatttgaattctcattaatttcaatttatgtagtacaggagtggactttggctagaattagcttatgctttggacaataatgtgttcagtttaactggctctataaccagattgaaagccagcatcagaagaactcactagtttgaaaagttaacctaccataatctaaaggaagttcataccaaagcatagtgttagagctacttgagttttaactctgatgcccttgaaccccccaggtttggaagagtgca

SEQ ID NO: 48425 - DNA, 956 bp, Manihot esculenta
  Intron number 1 from transcript cassava4.1_008314m (locus cassava4.1_008314m.g) derived from phytozome v7.0 (chr-ID scaffold11495; pos 320405 to 321360 reverse strand)
atacctaccaagtcctttctcttcttatccaattcgtaagtcccttcccttgtgttagtgttcgcttctcttgttctttctctgttttaccttttttattttttcttgctttatttttatttctttctctcttcgtttcctatcttgtatttgtcactaatgaaccatgagcagatctaattcaatactcttatgttctcttaagaaatgttcacttgtttgatattttaacattttttttttgctgcgtttcatttgctttgcaatggagcttttgagatctgggcgcttttgtatggaagtagttcaatcccaattgtcttttttcaagtggggatgttcttttttagattcttaattacagtgaaatttgaccatttccaaattcaaaatttgatttggaagctttgtttcttacgcttttactggatcgttaattcattggattgagatcattttaacgtttctaatttttagctaaagaaagcataggctctttctatgtgcgtattctccatttggcgtttctgggtttcatttctgtcattgaaaccaaacaccggcacataatatttctacatttcatttctatttctgcagagaaataacctttttctttaccctcttgattgatacatccataacttcacaatttgttttgctcttcctgggtatcatttggtccgtggaatcagtcataaacacaccagaattttagagtcctttgctttttcttgttgggggatgggggtcgagggaagagcacataacaattaatcctatttgagtacaactctcttttaattctctcggaatatgtctgattctgtatattgactgctacttttggggcttcagttgcttggatttctccattttgattcttttactgtgaatgctaaagaagtttgtggattgattaattttattgcttcaactggccgaattacagagac

SEQ ID NO: 48426 - DNA, 725 bp, Manihot esculenta
  Intron number 2 from transcript cassava4.1_009024m (locus cassava4.1_009024m.g) derived from phytozome v7.0 (chr-ID scaffold02915; pos 66031 to 66755)
gtggtacagtgtacgccctctataccaatgtaagatctctgcaacttttaaatagtttcttacttggtttttatgaattctttatgaggttttgatctatgatggcttgctgggcctgccatgattgcccaatgctgtgccataagcacagagtctttgaaataataacatgaactgaatcattgataagaaaaattagaagaaaaatcgattagaaatacaatgaatccttatgggtatttcaatgatatactttataagtagccaattattttatacatgaatgcgttcagtttagactgtccatttttcttttatactctgagtcattctcccattatttggtatggttaattttgtaaggtgataattcaaatgaattcttggaaaatttcaatttttttaaatgaatattttttaatttaaaaagaattgaattctttaatttcaaacaataaaattgttaaaaaaaatcaattgaattgaattcttgccaaattattgattccaaatgaagggtctatgtcatttgataaactgtttttctgtacataattgacatcctttgatttcaagtttgatgtttttatgattttgtttgagtggaagtggtgctttctgttggaagataactaaaatattaatgaattctagctgttaagattgatttttcatgtttgaaaattacaggaaggacagggacgacaggatcggaaactagctat

SEQ ID NO: 48427 - DNA, 775 bp, Manihot esculenta
  Intron number 1 from transcript cassava4.1_014323m (locus cassava4.1_014323m.g) derived from phytozome v7.0 (chr-ID scaffold04043; pos 1259610 to 1260384 reverse strand)
agttagggttttccgggcaccacttctcccacgtaccttattcactttgtttgttgaatatccatgtcataatgctgtttaattaactgactggtattaatgattcaactttgtttccaatcttgcaactctattttggatttctgatgctttttattgatgatgaatctttggatttttctgatattggaaactggatcatttttactcatttgggtagttttgttctgttaagtggataggatttgtggagccgatttttaaaaagtaagacgggatccttctactcatttgggtagttttgttctgtcatattgaagcgattttaaagatagcagatatttcatgatggtttctgctgctcgttgtaccatattgagttatattgccatcttatttataattatatggtttcaaacctgcttggggagctgaaatgctgtgtttctatcatatattttagtaaggggtagaagaattatattattttacgggaatcataattacatctcaattttctgttgagatctttcagtgtttattgtgcattttgataagttgaaaattttgttctcatgataaattagttggatgcacaaacactggaaatattagagttatgctggaagtcgcttcacacaatgcacttttgagttgtaggactatagaagttccatttagtttttgtcctttcttctatccttctgtttttttctctcaaagtttcatattcgttacaggctcccaaaagaggtgttaaggccccagtattggc

SEQ ID NO: 48428 - DNA, 657 bp, Manihot esculenta
  Intron number 1 from transcript cassava4.1_002148m (locus cassava4.1_002148m.g) derived from phytozome v7.0 (chr-ID scaffold02892; pos 1085371 to 1086027 reverse strand)
ttcatccttgggagatcgctttcacagttctcaatgtgggtttgcttctccttctctttctgttatttttattaaaaattgtgcctttcttcttattcttcttttttttttttccctttttctggtgggtgttgggagaattccgactggtgaattcatggatgaatacaaatattttgggctgtttcttttttttggcttcaaaatctttttgttggtgtggattgccatctatgaaggtggaactgggttgtgattgaagattagtgtctatttcatcagctattgaattttatttttgttttggctgattatatttcttagtcaatttgagtggatgatggattctgaatttatctttgcagattaaaagttggatttagttatatttctttactgttgcattcatttgatttagaattttagattgatggagaatttatcttcttggtcacagttcacgatttgtgtttgattggattctttgaaaccattttctatgtgatctttctgaaaaacgatcatttgattttgctgtttttggtttctgctatcttggattagtcatttgtttgcaattcttacatgatttctgtaattcatttctctgtctttgctttctggggagaattaagctgctgctttctgattcagggt

SEQ ID NO: 48429 - DNA, 194 bp, Manihot esculenta
  Intron number 1 from transcript cassava4.1_001744m (locus cassava4.1_001744m.g) derived from phytozome v7.0 (chr-ID scaffold12574; pos 20379 to 20572)
tagctctgcatattcttgttctgaaacttgttcatgtgggtaatttatttatttaattatttgtttttgtagtatatgtgatgattcttttccaagtatgtcgttgattaaggtatgattcgtgggttttgattgtttttttctcttggattttgttttgttgatttgggtttgtgcagaacaagctcgtattc

SEQ ID NO: 48430 - DNA, 903 bp, Manihot esculenta
  Intron number 2 from transcript cassava4.1_001744m (locus cassava4.1_001744m.g) derived from phytozome v7.0 (chr-ID scaffold12574; pos 20723 to 21625)
gatctccgtagagtcactgccgattctcgaaggaggtaactatcttctatttagcttttaccgttgttctttttgttgttgttattattattagttttcttttctgggtaaaaaaatgattcaagtttttcatttctgcgtgttagatagttttagttaattatggcaaaaaatcctttttatattttttaattggcaacttcccaggaatagtagttttttgagtttatctaaattcaaattgattgctgttccatttttttttttttcatacttcctcgttttcttaagaaaaataatttttggatgattagttaaactgatttttcatgatcgttttccagggctcaattaataggatctctcgagattttcactataataagtgctttaaggaaataaaattatttttttgtagagggtagttgttttgcatttgctaatgaagtgtgtttgcctgtgggtgcatattgggggcttttactaatcaaaattaagggatcgttaaggttggtgcctttggatctccatcaaggaagactcttttggtggtagcttacttttgccatcgcacttgtataaaagtttcatcaactcgtacaggttgatctgagttttgattttgtttgaattcccagttaaatgaagttttggaatcttaactaacatgttcatttttcatataatctgtgatatgattgttgtgtaaattgatctttaactgttttaagtgttgatacatgacattatatattttgatattgcccttttaattgggattggattactaattaattggaaagctgaaatctaggtcctgtgttttgtaaaatgtatatattacaaaatgtgatatacttgtgttcttgatgttattataactcatttattgttttgacaggt

SEQ ID NO: 48431 - DNA, 472 bp, Manihot esculenta
  Intron number 2 from transcript cassava4.1_027034m (locus cassava4.1_027034m.g) derived from phytozome v7.0 (chr-ID scaffold06814; pos 359947 to 360418 reverse strand)
caggtggaccctctttctcttttcctttgcttttacttttaggagtattatgtcatttggataccagtggtgtattcacatacatttacatgcttttcctttttgtcagagcaaataaacatatcgtgttggccacaccaaagcacggaggacatctagcgttctttgaaggattaaccgcatctggcttgtggtacttaaaatttctataatcgtaggatgctaggatccgtcttactgacattgacttgaacagccattagacattgtaaactataattgcctcaagtagtttattgttggagatttattcagtaataatgtgcagccactaaattgtgattctcgaggaagaaaagaggggccaaccttttacttttgacatgagtcgtgtttcttttctctcaccttcgccttgtttaatttcttctctcttatctcccattcttttgcaggtgggtgagggcagttg

SEQ ID NO: 48432 - DNA, 998 bp, Manihot esculenta
  Intron number 2 from transcript cassava4.1_015632m (locus cassava4.1_015632m.g) derived from phytozome v7.0 (chr-ID scaffold06871; pos 232297 to 233294 reverse strand)
ctggtgaaatgtaaacactccttcatccatgtattttttctgttcaacaagtaaatttcttcagtttactggacactgcaacagagcatgagtttcatcacttaacagaatggagccgtaaaaattccccagaatatgctttgtctctttggcatctttctggctatgttcagttttagcttttaaccttagtgtttgacagaatctaagattaaaagatttggctccatctctttgaaggatatgcattgctattgttgaaaggaaatttatcatagtcatccagagttataatctatctcagaaaaataataatttgaatgctaaatgcttcttcattctttttctggctcactagttagaagattttggtattagtaagtcatgatgcaatttgtgacccttcccctatttcatttgcttactggagtatcaagctaatgggctctgatccaacacgctcttggagtatggcatactatcaattgtatctttctcaaagtatgaacttttttttatgtgattcatattagtgtttcctgtaggagtgcttttatttgttttatttatgaagatgttataagaataacatgagctcttgatcagataaagagagtttcataatagtaataataagacagagagaaaaagtcatttgtgcttttttaagcatttatttgaagttttaactctcacccaaggggtagacccattgcacattctttttggttacttgacccatataacaagggcatttggatgcttctgtatggctttccttgccgccaaaaggtcatattgaaaaaatttatggtgctgctcaggcacttgtctttttgaagatccatttgtacgatatgcacccatattatagcatctattgttgaatttaattggcaaggcattcgaaattcaaagatattgtgatttttgctgttatgctgtccaaaacccatttatttttttatctttcatattttttcataggtttgggtctg

SEQ ID NO: 48433 - DNA, 650 bp, Manihot esculenta
  Intron number 1 from transcript cassava4.1_015632m (locus cassava4.1_015632m.g) derived from phytozome v7.0 (chr-ID scaffold06871; pos 233391 to 234040 reverse strand)
tgctctgctaacttccgcgccgcttctgattacaagtaactttcacctctacttcttttagttagtgctttttcattcctttttgcccctttttccgctgaagatttgggaaaggtatgaattaattggatatttgtgttctacgttgggaatcggaaatggtgttgtagataattggatttgttggctaggattagggattttacgtgttgcttcgtaggtcaggatttgcataaaagttcagttcgaaatgcttaattaactcaattatttggttggatttttattgttcttggataatatgacaagttgaaacatagtagtttcactttccagatttattattacttttgttttagaaattctagtaaaatttgaaaactttgactgactgcattttgtattagtaagattcatggcttcgtgttctaatgattatgtaccttttttcctgaatctgagcatttcaatggcggttgaccagtttaatgaagtttttaaagtgctggaaaaggagctaactaacgatgattaatatgttttttctgctcaccttggaaaattcttggttggtttgggtacttgtttgatgttcacctttgtgcaaatggggtatatttgtgtacacagttctgacaaagacgaggcag

SEQ ID NO: 48434 - DNA, 654 bp, Manihot esculenta
  Intron number 1 from transcript cassava4.1_009619m (locus cassava4.1_005541m.g) derived from phytozome v7.0 (chr-ID scaffold06871; pos 542273 to 542926 reverse strand)
caggatcccgacgatcctcactccatccacaactggtactgctctttctctctctgctttctcttgccttatatctttaagctccccttttagcgattgctctgtttccattgagaactgcatggaatcctgaatcaaaatacaaaatgttatggggagatttatgaaacgtaagttagatgttaaccagcaatatttagatgtttgaaaaagatcaagtttacaagttttaatattcgctagatattgtctctggtagtgtaatttcgaagagtcagaatttagtttttagaaatgttatagattaagcattaacagttgaacaattgtggtctatagattttagctgttggctgaatcgagactttccatcgaaaccctagattgcacagcctttcctaagttgttttgcagaggtttgttgagttggtgcgtcttttcctttagacttttgcttacttgtggttattgattgattggggtatttgtttcctttttttccctcttttttctctatgaagctttgcttagtggtggatttagattgctccggttatttggttctctttgtgaatcctgtttttcagactgctgatggtgattatttttggttatgttcatggtaaccaggcgagactagagagagaaatataa

SEQ ID NO: 48435 - DNA, 603 bp, Manihot esculenta
  Intron number 2 from transcript cassava4.1_016181m (locus cassava4.1_016181m.g) derived from phytozome v7.0 (chr-ID scaffold06710; pos 704 to 1306)
gagctgaactaaatcgtgcaccgccttattattatgtcagtacaacctctgcccttctttagatgcttttttattcagtagcccacaccagaaaatttgtgttaaatacgtatattgcacgtctattgttgcaaaggtaatattggtctttttctttttttcttcctttttctgtttcgcttggatcgtgtgttatttatttgttggctggggagcaactctgaagcaattcaaaatttcaaatgttgggtgctgtttgtttttggtatgctgagtatccaggcgtctgttttatcctattctatctaaagactggttaatttcagttcttcctggaagattaggcttgctggtcatttgtacccttacataagcaccctgaaagacccgataatatttagtggctccttattgttttgtgcttctttaaatttttgttgttaatctattgtctttcaaaatgcttaacatgatggattcagttgcttggcttaacatatcggagtaagtgggtagagaaactgaattaattgctatattgattgtatcttaactgtcttttttgcagtaccccagggcatcagaagagcgtgtcccactatc

SEQ ID NO: 48436 - DNA, 917 bp, Manihot esculenta
  Intron number 1 from transcript cassava4.1_025980m (locus cassava4.1_025980m.g) derived from phytozome v7.0 (chr-ID scaffold10563; pos 1001965 to 1002881 reverse strand)
tcttccgctccgattccaaaactgagatcattcaggtaaaccacacacttccactcatctctatttgggtttctttaatatatttataaacttgggtttctttgacaccgagatggtttgtttcgtattatgccgcgttatgtaccattttgggccaatagcaagggagcaaagtggcattattttcaggcgaaaactataagtggaactgtcggagttgttaaaaataaaccttaaaaatacatatatatgaggattttccgacaggtgaatgtatccgccgataaccctggctgtttcccttttcatgtcctcaagtttcggcgtctctactcttacgtgccaccttaccttcttttttccctttacaaaacttttgaggtgctcgtttatagtttctatcttccatgttctactttacttacacccaagaattaaatttccaccattgattaaacgggtcccacatattttgttcaatctatcaccctacgttccttctaagtgactcccaatgttagaacataatctcatttccttctctgtcatgtacatattatggtttttgtattaaaaacaccatgtgaattgatattcgaattcaataacttacagtattccagcaagcttagtgcttgtgttgatttcttattaattaagtggtcaaatcaagtgaagaatattataatttgggtttgaaaatctatacgaaatcaaggaaacggttatgtaaggatgcccaaaatcacgaaagtatcgtgaatctaacaaaggagaaaaacaaaggaagcatgccctaaaaagatccatggaaaagacaagagagaaatagaatgaaagagtttgtgaacctgtttcatatatagagcaagcatccattttttatatctacttggttgcaggtgagaagaaaaacc

SEQ ID NO: 48437 - DNA, 775 bp, Manihot esculenta
  Intron number 1 from transcript cassava4.1_001627m (locus cassava4.1_001627m.g) derived from phytozome v7.0 (chr-ID scaffold03569; pos 341705 to 342479 reverse strand)
tgccgttttgatcgtcggctttgatcccgtttcaggtaactttcaattttcagcttttcttctgtttttgttatttacgataaagaaaaataatgaaaatcagctcaggcacaagacatggtattagaacaggttgcttcttgcttgatttgacgatgtaacaagcttggctggtttggtttcaactttgatataacggcatattttgtaatgttgttattgaaagttttattttttaacatcatttctgaaacctcagagatccagaaaccttttcccttttgtcaattggtctttcaacttgctttattatggccaatgagggtagagataaggagaaaaaaaaagatattacgttgttggctatcttgtattcatcgttaaaggttgcaaaagagttctgaataattctgttgtatgattgctgattgatagaatttgaaaaatgtttagttttgtagttatctaagtgtccagttgatatacacagttgagcatttttttttaaataatgaatattgtcttgaaaaaacgttaagccttttctcttgcagtaaagaagttagtaaattttcattctttctcttaatggggattcactttcacagcttatcggaaaacaacttccagtgtcatgtttaacttgcaaattctaactgaatttcgcttgggtaataagcgttattcataatgcccttttatggtgttatggatgagtaattttctctatcttgcttgtgtttaaccaacgcatgttgattgtggcaggagttga

SEQ ID NO: 48438 - DNA, 795 bp, Manihot esculenta
  Intron number 1 from transcript cassava4.1_003081m (locus cassava4.1_003081m.g) derived from phytozome v7.0 (chr-ID scaffold10493; pos 1233240 to 1234034 reverse strand)
taatctactggtggtcatccctgctcactcctcaagtaatcttccattgatttcttcttcttctttttctaatagaatgctgaattctcagttgaaattttgatatgccattgactgtcagggatttgcttgccctgttttaatgcctctgcttctgtaatacttcatggaaactttgctataatgctcttcttgtacttctattatttcgcttgaatttgatgagtacatgtcaggttcagggcttttttttttggttaatgatattggtagactctgcacaaagttactctgtaatagtcccatcacttgctgcaaaaatcccttcttcaacgcgagaaacaaaaaaacagatcggttcttcagatatatttagttctactgcgttctcaatttgataaaccctttgaatcgctaattttaggacattaaacagatgaattgctgactatggactctaacaatagggaaattttcacatctagtgtaaatgctttctttcattttaaggtctctattgtagcatgccagcatcttaagcaaatataaagaattttagcaaatatgcaatgctgtagcatagctcataaacaattcattgtcaaagttaaatgcacaaacaataattggaacgttgagttttatgaccctgaaatttttaattttttcccttttgtccctgtccagttattatgactcaaggaggtccataaatgatattttgatattgatgaccaaagtggattaaattatctttcaggtaaaagagtttggggtttctcaagattcaccagt

SEQ ID NO: 48439 - DNA, 869 bp, Manihot esculenta
  Intron number 1 from transcript cassava4.1_005446m (locus cassava4.1_005446m.g) derived from phytozome v7.0 (chr-ID scaffold03805; pos 46993 to 47861)
attcacaaacttgtcttgaccctgacgctagtaaagtgagttttcttcctttgtgcgtgtgtgtgtgtgtgtgagtgtttgttctcttttgatcaaagtttcaatcattctgttctaatttcagctcaatctaatgcttggttcccagtttttacgctgtaatcaggttataattagatgccttttctgttctttggatgttacattgctttcttcaatatttgatcgtagtatataacgatcaactagccgttatgatatgactgtagatagttggattcaatttcagtaattttaaccacacagatcgtcaaattttccccttttacaagaactttaatttcactatttcataatgtacttgctaatagtcattatttgatatttgattgtacatctactaatatcaagtcaactgtgctgaccattagaaattagttggcttgaggctgatattgatctgacttttcttgtatattttgatttcctatatgcaccaacacttgattggaaatgaaggacagagagacgagattgaaatttaaaagaaaattttagtgtacataattagaattgacctgattgctcaaattttccaggtttctttaattgagttattatctgtaatttattgacaagaattgtgtatcctatattgtagaatgatatccagcagcattcatatctaataaactaattattggaaagtcagggccttagaaactacaggacatttcatcaattctagctctcatatggagctctttttgttttcaattcccttcgtaaaatgaagggttatgctaacattttgctatctatgattcctaacagagtgtcttgggaattattcttggaggtggtgctgg

SEQ ID NO: 48440 - DNA, 951 bp, Manihot esculenta
  Intron number 2 from transcript cassava4.1_013557m (locus cassava4.1_013557m.g) derived from phytozome v7.0 (chr-ID scaffold05703; pos 114694 to 115644 reverse strand)
ctgctcttattcaaaacgtcacaacacaaatataggtaagatttttttttttttttttatcattaactaattttatttttatttggcaccctgaagagtctaaagagattaattgcttttgtcttttgttttgaaatcatatatatattattcatatgcgaacccaaacactttcaacttgtcgttgctacaaaactacaatacattttaatgcccagttttgttttctttcttccatttctctatagacgtttgcaataattcatttcgaactcttaaatttaatttgagatcttttagatttatttagatatatcagtctaaatctttaaatatattttataattatttttatatatataaaaaatttaatttagtgataaatatttttttttaattttttagacttagtttattttgaaaaatattaaatttatctatggaagaaaaatatttaaaaaaaaaagtcgtttatttttttattattatagttaaaaaatgaaaataagaaaagaaagattaaagttggcacaagcgagtggaaaatagataagattggtccatcctaattatttaaaggacaaagcttgaaagaccattgtttaggattccaattatacaatcatggcttcttgctttgggcggaagcactgttgtatgtcaactcttatagtgggagacacaattactgctttgtttgtgagtaagaccatacactttcttttccacactttttatttatttatttatataaattaacaatatatttcaatatatacatatatatatataattcattttaaaaattttgcttaaaaaggttttgaatttattaacaaatttaatttaattaacttttaaaatgtaaatttgcctttttttttattaagatttcttgaataaatatatttatatgcatgtgcattgtggtacaggaagagcgccacaacc

SEQ ID NO: 48441 - DNA, 565 bp, Manihot esculenta
  Intron number 2 from transcript cassava4.1_011278m (locus cassava4.1_011278m.g) derived from phytozome v7.0 (chr-ID scaffold03237; pos 127467 to 128031 reverse strand)
acacataccattttctccgcatttgggaagataaggtaattgccattgtcaatgatgttcttgtatgatgatttgcgctaagcttaatcttgtttctggcgtgtttgatatgttttggtgtgtagtagtatcgagtccattgagtctggtttagtgaatttcctttcagacactgcattgctagcactcccagcactggtgaatttactctgtgaagtttcagcaaatgggcaatgttacatgtaattttataatttgcaataggaaatgcaagagttgggtgctagtaatccaatttggaaaagctttgatgagtatggctttgaattctcttctgcatgtggtcaagttgctaatagggctggtccatttggtgttgaacatcttatgacaagcactgcttgtgatattcaaatttcagcaaagtttcctttgctgattataaagttacatgtaaccattgctcatttgctatgaattatgtttgcttaattagttctacaatgtaagacaaaaatgattaacgctacttattattacttctactcactcgatagaaatctta

SEQ ID NO: 48442 - DNA, 312 bp, Manihot esculenta
  Intron number 2 from transcript cassava4.1_025709m (locus cassava4.1_025709m.g) derived from phytozome v7.0 (chr-ID scaffold02264; pos 527189 to 527500)
agcagggtatgtttggaatctggatgttccctgacatatttgtatgctatgtcatgtgactttctggtaaatgattttgatatgtgaattgtatgcaaaatcttattactggttctgcaaactatttttctctttttcccccctggattaacttcaggaagaatgggttttcttttttaatgatatcggaggcctttcaacaaatgacttctatggaattaatgcttgacttaccttattctgaatttcattatctttttggtttttttttgttcaggaatagttgagccgataaaatctgggattagagat

SEQ ID NO: 48443 - DNA, 881 bp, Manihot esculenta
  Intron number 4 from transcript cassava4.1_004316m (locus cassava4.1_004316m.g) derived from phytozome v7.0 (chr-ID scaffold06494; pos 55846 to 56726 reverse strand)
atcccttgtttgacacatatagcatccaagggaaggtagacaagccttttgtatgttgatttatattggtttttaatgaatttggtgcaaattggttgacaattatgaagtgattgctttagttggtgcaacgttgaatttgatcattactattaataaatgctattttatgtaagtttgcattggttgaaatggctgtagccaattgtgcccatgtagattgttgcagctcaaattgaatagttgtggggtatgactggatgttatagactaatgtggcttgttgctccatgaatttttgcattaactggttaatgcctaggaacttcctctaatgcaaagccatattatgtttgttttaatgctgaattcaccagcctagtggcattacgagctttagagtcgattgatctggagaagtaaccggttatgattatgattaaactgttcttttcacttttctttgctaggcgagatcaggttttgttggatatttagagaacagtatttctgaaaatttttctatgttaggtgtgaaacattctttagtgattcttttgagtttgcatatacacggtgtagtttttcttgaagtaatatactaaatacaatttattttgtaggatgtgtgtatttttatgtttaactttggttggtactgcatgattggcaatagctataaacttataatgctattttttttattttgccatataacttctcaacttttcaggaaatgttgtaagttgttcaccacttcacctgaatgtatatgtttcacctgagtgtatatgtcatgctgaaattcaatggtcatatattttctgttccctcctttctcctctcatttttgatcattgttctctgtagcactttccagg

SEQ ID NO: 48444 - DNA, 185 bp, Manihot esculenta
  Intron number 2 from transcript cassava4.1_004316m (locus cassava4.1_004316m.g) derived from phytozome v7.0 (chr-ID scaffold06494; pos 57049 to 57233 reverse strand)
atattctcattcccatcattcaacatgtattcctcatttcaattttttttcctttgattatttggtgcaaaaagcttaattcttctgatgcaactgtttcatttattctgtttttaatgtaattattattctttttttttggtatactagtctttgaggagcaaagactctaagcaggttgtgca

SEQ ID NO: 48445 - DNA, 431 bp, Manihot esculenta
  Intron number 1 from transcript cassava4.1_007854m (locus cassava4.1_007854m.g) derived from phytozome v7.0 (chr-ID scaffold02441; pos 20528 to 20958)
cttctgataaggtagccctgaaaattatgatggtgtatgttcttctgctggttaggttacatttaggtttttttgataaaattatgtggtcaaggcatttcgaaagcagcatttcattatcttattgtaagaatcgaaggcattgacaagtttgaattttatgatttctcttgtttcggtttctagacgaaggaaattgaactgatgtacctgtatagggtagattttttgttttcgaaaaaaaaaaagtgaatgggtgttgatttgtggaaagtgattgagagtatacattttttccctacttatatttatatgccgtgtgtattttcattgtaagctagtgatgaaacattgaggttcatgtgtttctgtgaattattttggttgtgctcgcaggatcagaataagcgacatcattcattggatttgaa

SEQ ID NO: 48446 - DNA, 892 bp, Manihot esculenta
  Intron number 1 from transcript cassava4.1_018440m (locus cassava4.1_018440m.g) derived from phytozome v7.0 (chr-ID scaffold01441; pos 190999 to 191890 reverse strand)
ccaactaaggcctgccttcgaaccctaatccacaggtaatcaaatttgaatcccatgtcctccttttaaaattttttttggttgatcataattctgtacagatttatatttgaggtttacgtttatgattgttgatttgggtgtttatattctttgttttgcatgccctggattctttttttttttaatattttttcgcccaatctttaaggtatatgataacatccgggattatgcttaagagccttgtgtgttccaagaaggaatttatttatattgatgaatagtaattggattttttgtatgtatatataaaatattaactatgtcattgaagtgattgtgttaatattttattgacttcccagtatagatcaccaagttgtctgcttttgtcagtatttcttttttttttttctactttttattctttttcccttcttttgacatatgtgattattagctctctgtttggttgctgtgaaaattaaggaatttttttgaggtttttgttttccgagattttggtatctcatggccaaaattctaaattggatcaaatgcttccacctaaagctttgacttagaacccaatgctcagatgtggtgatatttctattttattatagtcaaccaatgaatattagaacattttgagaaacatacatgctgatttgctttatttctgtcttcgtgatttataatacgtttaccctttggtagaactgaattacagaatttcagtccaggatgcagctcatcctatcaaaattcgtttatgttttgggttctttaatctagttaggtgacatgctattaatatctttcatgttattattatctttcatgtgtttgaaaaaaaaaaagtgtttgacattacagagaatttcta

SEQ ID NO: 48447 - DNA, 850 bp, Manihot esculenta
  Intron number 1 from transcript cassava4.1_006525m (locus cassava4.1_006525m.g) derived from phytozome v7.0 (chr-ID scaffold06814; pos 544074 to 544923)
tttttgttctcacaggtaatgcttttaatcgctttgttaagttgagtttcctttcttgaatttatttttagcattgatttgatcttcagcttgtttttttttttttaaatttccaattggatctttgttgcttaacgagtttgaagcaattgtagctgatgcttttagtttgttcaaatctaatacaatcatggccattgctgtaagattgcaattaactttatttagtgcttttagatctttaaaactatggtgattgtgggtgttatgatcattgtattgaatgaaacaggtttgcctgtttcatggtattttttgtgttcttaatttagtccattttggtgtttgatttttgtatgaataatatatctacatttagaagtgagcttgcaaggatcttcctgttaaaacttctacaaggatttctgatctatgggatatcataattgtatatgatagtgtctttttattgtataatttagcagtgagcttgctttctctttatgtttttctttttctactcaatgtaattgattagtgagattataaactaagcttgttaatttgtggattcagcattacaactggaaaagtggtctgaaatattgaaggtttgctacctaaaatgagcctcatatcaagcttggtgacgtttatggctttttttcccatgcctcacgtatgcctgtgctgtctgaattcgttaataacatattcactgatgctatcacttctttgttgataagcaacaaaagtaaaatgttctgcatactttagcagcttatgatttagcatctggattgtcaggttatcttaaaccttgaagcattctttggcagacccagttgca

SEQ ID NO: 48448 - DNA, 285 bp, Manihot esculenta
  Intron number 1 from transcript cassava4.1_008727m (locus cassava4.1_008727m.g) derived from phytozome v7.0 (chr-ID scaffold04083; pos 473543 to 473827)
gtcggtggacccactaaaggtatagctttgctcgaaattcttagctaaaatatgctattgttgtttagaaattctcggttctgcattcccgtttcggatcaaaagttgtttagcttcttcaactttgtttctgcgttttgaaattttttttctttctcgctcttttttttttaaattccaaatattgctatcccattttatgcaatttgtcaataattgtctaattcttttgagaactgcgatgggatacctttccagggactcgattccggccattgtctttga

SEQ ID NO: 48449 - DNA, 755 bp, Manihot esculenta
  Intron number 1 from transcript cassava4.1_004089m (locus cassava4.1_004089m.g) derived from phytozome v7.0 (chr-ID scaffold03798; pos 20786 to 21540 reverse strand)
ggaagaagtttccaggtgattaattgatggatttttcttctttaatttaatttcttctccattttcttattcattttaatctcttttgctgatagttcatgctgtttcattctactcatgcatggagatctaattcaattcacctttttctgtaatttttttttttgggttttttcttcttttctttttttggatctttaatacatgatgggacaatttacttttttctttgtctttggatctcttacagataattaattaatttgagaaatggggttgatgttgatcaatcaatatggacaccaaattaagtgaaattaaaagttaatttgtggtgtaataagattatttcaatttagatttcttcatcagctgtaatgataaaagaaaaaagaaatttctctatttttgattttatatatttttttttctttccttctttgcggtttaattcctagaagagagaaggaattagcttataaaatgtgtattgctctcaacatggttggtgtggtttcacatgtcatcatagtttgttaagtcttctataatcttttctttcccatttaaatcttcattttctatttgggtttctttattttctcgaatattttatctctcaatggtttttagatcttgttctacaattgaattattattattttctttttgccattgtaataaaaatcagaaatggagttcttgaaatgttgtgatcaggaaactagctgagcttggttatcatcgaagtgcca

SEQ ID NO: 48450 - DNA, 985 bp, Manihot esculenta
  Intron number 1 from transcript cassava4.1_002230m (locus cassava4.1_002230m.g) derived from phytozome v7.0 (chr-ID scaffold02264; pos 800083 to 801067)
ctatttctgttggtgagctctgtcttcctttctgcatatgtatcttagtttttgtgtgcttccttggtttgtttccaaatcagatgactggcttgtgactcattatcagtcgttattcatcttacacatcatttgaacggctattgcaggatgatgagaattattatgtcagccaaatttaatacaagtaaataattaataaaagaatccagtatatgcaaaatagaatatattctttttcttctttgattaggtgtatctgtttttgcataggggagtaatccgcttaatcagcaacttttcctatttgcgatcttcagattgaatgtcgaattctttctcagattaaatatccaatttctttgtgtgaaaattttgtatatttgattttccgttttcatggaactgaacctaagtccatatatatctattggtattagtcacactaaatatcttccttctcaagttttccatgaaaaccatgtgtaaataggcattttccttcaatggaaatttctgttttccagagggaagtaagattggaaatgagaaacttaaaataattgaaatttttatcacttaatggagtaggaagtatcagtttcgacatcatcacttccctttgagctatgcaattctaacacttaatttggaactaggaaaagttttctggcagttctgcatgcaataacataatcatagacattccctgttttgtggtacgtattatgttttcttcaatctggttagttttcattgcacaatctgatgtttctgttccaaatcatacagttctccttttgtttttgttgtatcactctaggaaataggagcttcacacataatactaaacctttaatcctttatgcatcatatttgtcaatgatatgtttctttaattagtgtcaaaattagatttcaatttgcaacttacaaattcattttcgcaggggcaacttcattcctctttactgagtacaggtac

SEQ ID NO: 48451 - DNA, 637 bp, Manihot esculenta
  Intron number 1 from transcript cassava4.1_015138m (locus cassava4.1_015138m.g) derived from phytozome v7.0 (chr-ID scaffold03818; pos 36808 to 37444 reverse strand)
cctcagtaaggtaattgcaagcatttcttttcttctagctccttaattgcccacattcatctctacaacgttagttggagctgtatttggtgtaatacaatgcttctgtgaaattttattgatattatttgatgggttgttggcaacttgatgcattattggttctagcaattgataccatgctttactctttctcacaatatttatttcaagactgtttttcctgtttatcgaattaaaattatatgatatttgaacacatcctgtatctagctattattagctttaccagtataatgtgggtcatcttttgagattgtggcaatagcattactttatctgattccacaatgtgagggaagtttgtagttttctttctaaagtgtatttagagacactccatttattggagcatttctgtcatgttatttaccagagaattaggatggttattaaatcatatgtcttatatctgtcgagttttttttttttttttttgcttctgtcctgtgtacatgactctttcaaaccatctaattcataatctggcatgtccatttggtgtagatgcatcaatcttgttgtttgacgtgctcattcctgtttattttcatttatatttttagcgtggagtttg

SEQ ID NO: 48452 - DNA, 899 bp, Manihot esculenta
  Intron number 1 from transcript cassava4.1_011952m (locus cassava4.1_011952m.g) derived from phytozome v7.0 (chr-ID scaffold04829; pos 76365 to 77263)
aattaattagtgcgtattaggtactggtgtgtttctgttctcttcactttctatcacttcataactagctgcaaatgattatatattgatctgtttatgtacccataaaatgttttgatgaagccgaatgcatgaatcagtagtttttctatagaaatggggaagccagtgaggagctttgtgttaattgtttgtttgttagtgtttctgttcatcttgttgtttttggtgttcaacttttctcattttcatccctcatttaatgaatatgaaaccaatcgtaaagtccacaattatttttcgaattccgatgttaaatttcactcccatctccagttgttccatcattttcgtcttcatctgaccagcagaagcaggtattctgttgcccaagttttttctccttctctctcttcccaacccctttctgtttttgacttgttccctcttttttgagttgttaactgattcatgtaggtaatagaccaagttgtaattgcatgtatatgtgtgtatttatgcatgtatctaatgttccttattcagtatatattgtgatgtaacaccagcattatatgatttagaacatgatcacatgaatccatatatagtgtaattgccataaattctaagtattaagatgatggattctactgtggatttaagacattaatgtagctgtccactttgaattagcgaaacacatatatttttacctttgaatcacagcaaaaaccttataaggtaaacccaagtgccaaaagttcgcctctttatgtgtctgttcagttatctgttactgttgttctctctgtcggttcttttcctggaagtgctttgaaaccactaagaagacctaaaagtgtgttgagatctctacaggaaggtagctgaaatac

SEQ ID NO: 48453 - DNA, 691 bp, Manihot esculenta
  Intron number 1 from transcript cassava4.1_002439m (locus cassava4.1_002439m.g) derived from phytozome v7.0 (chr-ID scaffold07301; pos 372783 to 373473 reverse strand)
tcggtgcttgcagtcgtaaataccattggtaaatttttgcctctcatttctgtttgctcttttttacttatttttcttctctgttttgatggtagatggactcgagcgtttatcaaatatgcttttggtaactgaggaaattgaaactcatattttatgggttttctaatttaggaagtgctgtaatggagatgttgggttgagtcgaggcattgttaatttttgctccttgatcatactaaccttgagaaatttcctgggccaataatgccgttacggttttctcgaggtgcaatttcttgccaaaaccgaggcaaaagaatttcgattagttatttttgtttttctccttaccaatatcagcaaccaaaattgatgtaaaactggaaattttcgaaatactcagcattatgaacggaagcgctgtattgattgactagtagatattgcagtcggtgttaactgtcggttaatgagagagatagatttctgtctgtatctatatgagtacaaatgtgtgtggggtcggttcaatatttgtatgattttcaggagccaattgaagtctgagtcatccaaactgaatttgctattacttcttctgtcttgatttcttgctcttgttagattgaaactgatttgaatatgaggtgcagaagtatcaagaaatatccgctgtctgttgctgcat

SEQ ID NO: 48454 - DNA, 696 bp, Manihot esculenta
  Intron number 2 from transcript cassava4.1_026864m (locus cassava4.1_026864m.g) derived from phytozome v7.0 (chr-ID scaffold04002; pos 166018 to 166713 reverse strand)
cctcaggtaattttgacattatcctttatttggatttattttcttattttggttttctgctcttgccatgcataaccatcttttgaattctcactggttttgaaggattaggacaagtttaccattgagaaattggggtaattgtactatgttttttcttatgcttagaagcatgtttgatttatggggaagttttattgctaattgccttgaagtggaagttgattcattttgtaaatagtttaaatttaatcctaaatttatgagcagatcaaaatttagggaaatttttttttttactattagcttcctccttttggtgcttgaattttggttctttgctttggagcttaacattatggagtagaaaatgcaaaattctgcatgtttcaaatctctctttatgcgtatttggttttaactattttctaaatattttattgcttgctttaagaagagcacaaggacaccatggctctttcttctaattgaatatgtgaaatttagaaggacatcagtaatgcatgtaggctgcattctggcagagcaaccatgtgaatcaaaccctgctattattacttgatttggttataaaacttgacatcccctttgagaatttttaattttagattttttcatttatttatacaagatgctgaaagtgtttcaaacaatctgtgaaacagggaggtatag

SEQ ID NO: 48455 - DNA, 1021 bp, Manihot esculenta
  Intron number 2 from transcript cassava4.1_017991m (locus cassava4.1_017991m.g) derived from phytozome v7.0 (chr-ID scaffold08265; pos 3248130 to 3249150)
ttgagaaggctagggaaatctgcaccagtaaatcggtgattttttcttgcttgctttagtaatctactatcttatgatgattactaaactctctccaacgatgattatttctgcaatgtttgttttgtataagtagtgacttccaagtatctatactaaaaaattttcaatcccaagatggataaagaagctttttccgaacctcaatctgtgtactgcatctgtagcctaaacatggagcattgttaattttccaataattaggaattgcggctgcttcttggtatgatcagattttgtttgttcgaacgagaatcatatacagaggaaactgtcctataaaacatcacttggaaaaaaaaaatagaagtctcaaaatttggcaacgactcaagaattttccgtgttaattaaaataaataattacatagaattgggcactctctccctcccagttaacgtgagtgtcgtggagcaaatactcgctaggatatttatacaaaaaaaaaaaaaagaaagaaagaaagaaaaaagaacttgaactgtggctttctttaaactacagtggcttgaagtcgagcttctaagttgaactagtttaaatggttacctcttcatagtatcatgggctatttggaatttttgacaggtttatattcagttattaccgaccataattagaaaaactgtatatgcctacttactgttgtgcgcctgacttcccttaaatccaataagctaaacatgggcaacattagcttgtgcctttatatataaatatttgtagatgcttcgagtccctacccattcaaatcacggtgtttgctgcctcctgtgtttgaaaaaaaatacatttacagttatgttttagccgctgaaaacaaggtggaagcagttgtctaattgtgctcttgtttcccttgatcttttgctgtgtagaatacgcagtaggaaatttgaattcatagttttctggtttgaatcagtagtttcttggttattttggtttctatgcaggtga

SEQ ID NO: 48456 - DNA, 646 bp, Manihot esculenta
  Intron number 1 from transcript cassava4.1_004565m (locus cassava4.1_004565m.g) derived from phytozome v7.0 (chr-ID scaffold03823; pos 46337 to 46982)
ttcaggtcagctgactcaccctctcttcgtttctttctttcttgttactgtctgtttgatgattgttttgtgtggaaaaagatatacttttagttccttcttgactttgttttaactgggtctctatctgtttcttgagattacttgtctgatgagtgttttattagtgtctttttttatgagaggtgattaactggtttctttataatgattttctgtgtaaatagtagcaatcgtttcggttgtttgctggtggattggtttaacggttagaaaaagaagagggggtggtggtggtggttgttgtagttaaagtaatcatacatcgttttgagatcaaattatgtcttaaactttgaagttataatatttgttgaatcattctatctattcaagcataaactagttttaatgggctctgtttcttaggattaaaccttgagtttttgtttattggctttatgtctgtcttgccttaattttaattgactagttattgcatatgttgcatttaagcaagaaaggagtctattaacaaagtaatcactgtagcttctgttcatgttgctgggatgaatgaggattcatttataaaatgccatattttacaggtcaagattgacagcttgaagggaaagaagctggc

SEQ ID NO: 48457 - DNA, 364 bp, Manihot esculenta
  Intron number 2 from transcript cassava4.1_017356m (locus cassava4.1_017356m.g) derived from phytozome v7.0 (chr-ID scaffold11495; pos 801478 to 801841 reverse strand)
ctgccgcagttcttcaattacccaccatacttcacgtattctccatttccaccgccgtggcacaacccattattttgatgttcttcattttgagacggttttgttggaagatataccacctgttataaacttgctttttttttgagtttctgtaaaattcaaatttacttcttaaataaaaatccttagtagtgttgttctctcttttctattcatgtgctgggcaccacatttttttttctgttactattaactcaatcttttgctcttcttttcttgattctaatttttcatataatagcattctgaatttttatcgttattcttagtttgcagcctgttagggacactcgagaaaagcaag

SEQ ID NO: 48458 - DNA, 816 bp, Manihot esculenta
  Intron number 1 from transcript cassava4.1_001720m (locus cassava4.1_001720m.g) derived from phytozome v7.0 (chr-ID scaffold06659; pos 101960 to 102775 reverse strand)
tccatcacctgattccacttcctgcgagatcacaagtaagtttccaaagatttcgttgacttagttatctgcggatccttactactgttattatttagatttatcgataagcatccgagaaaatttacctagttaatgtttggaattatgtttaattactgatataatgaagttttgttgttttataagtttccgatgttcgaggaattgaactttctggttactgataaaaaagtgaaggacttctttttatctaattaatttttcaaggtccagatatctttgaaagaattgtgaactgagttagctggctagcattaatggttgaatgctatgtatgatgaggtgcaacttctggtgaaccacttcccatttttccattatagagcccaatagtgaaccaatttgatctggttaataaaaggtggcaaatttgtgtattgatatgtcaactatttgtgatttatgattgtcaagcaagtgatgagtttatatcttctttccttcctcagagatatccaattgacatattagtgtacagtcttctaggagaagggggatggggggttaatgatttatcaccttcctatgatagttgcaaaaggaaaaatggagtgagaaacatatagaagtatagattctttatagcataatgctgttgaatcattcatgaatatagcctttctgcaatatgagagaattaccttttgattctttttattgctttctttaagctgaagggataatctcctttcttttgcttcactgtaaatgataaaaggatttcttgcaatgcagttacttttgcccaaaaac

SEQ ID NO: 48459 - DNA, 418 bp, Manihot esculenta
  Intron number 2 from transcript cassava4.1_031225m (locus cassava4.1_031225m.g) derived from phytozome v7.0 (chr-ID scaffold06871; pos 186478 to 186895 reverse strand)
aaaggtttgttcttttttatttttccttctttctttcatttaagtttacttttttttttttctttctaaatcatatattttcagtgatctgatgtcagagcagcaatcacccaattttaaaagtaaaaacaaaagcttatttttgtttgatataaacaaaatatccaaaatggaaacaaatgaatctgctgtgaccctttaaaacaaaaacatgatcttcacttcttttagctttaaaatatttatcttttttcagcatgacaactgaccattcaatcctggaaataaaccaagaatacattaaaaatcctttctttctcatattttgcttgcatcactaatcaaatccttcatgggttttgttcattgatacatataagcaggtgtaaagacagtggaagtgaacagaaaacaaagc

SEQ ID NO: 48460 - DNA, 681 bp, Ricinus communis
  Intron number 1 from transcript 27914.m000412 (locus 27914 .t000005) derived from phytozome v7.0 (chr-ID 27914; pos 5 3113 to 53793 reverse strand)
gtggtagccctctccgtgcacttctagtgatctccgtgagtatcgttaccttttcttttattgcgtgtttagtatatttacataagtgaccccaatataaggttttgtcttcagttacagcttctgttgctatgatcttctgtttttagctatgattatttagaagggttacgagtgtgttaagaacgcaagaattcaattctatttataaattctgtttttgaaaattcaacaaatcatttcagttgaattctatttactcattctcttgtttgggaagtccacagtagctaaaattttaattcttttaatgtaaaagaaaaggcattttgaaagcatgaattcagttggttattccacagaataccgatgtggttttgcaaaaattgaattcatttaaattcttactcgtgatttattcaaaacaaggcctctatgttagtggttgtttaagacggaaaccaatatgcaatgggtgggaatacaacacaaattcaagtaagaaatagttagttttttcttcttggattgttgtaattggtttgtatttaggttttgttgcactgtgttgaattaactatggaatccctatttctacctgccttcataatttttcgtaattgtttgttttgtataatttgtgcagcttgggagcattacttttgttaccttgactgggtt

SEQ ID NO: 48461 - DNA, 501 bp, Ricinus communis
  Intron number 1 from transcript 30138.m004031 (locus 30138 .t000205) derived from phytozome v7.0 (chr-ID 30138; pos 1 409934 to 1410434)
acggtcatatcgtcatcaagaatcgtccttgcaaggtttcttttccttttactttttgcggtttatgttcgtgtttttagttttggttggctttttgctctgttatattccgattttatttttatattagagtttgttttgccgttaggtggaggtttatatttgatagaacaatgctttctttgattcctagattttgcagtgtgtgatcagatgctgcctccatgttttttctttttatttatttttttattttgcttaaatcaatataggagattattttattaaagttgaatacgtaacatgacgtgtttgtttgtttatattgtcaagttttagtgttatttaatagttctaatcatgtttattgccattaaaaaatattaatggctagtagcatgtttgactgggagaagtgaagggatttgcaattataattgctgaaatatatgttgtttaatgataggttgtggaggtttcagtctcaaagactgggaagca

SEQ ID NO: 48462 - DNA, 586 bp, Ricinus communis
  Intron number 2 from transcript 29333.m001048 (locus 29333 .t000011) derived from phytozome v7.0 (chr-ID 29333; pos 8 9767 to 90352 reverse strand)
gcttcttcaacatctcaagttgtgccacttgttgggtatgatgctattataattgtttctgcgattttcagtgttttgtaaacacaataagtaattgtttacctagtttaaccttgtctggaaactcttaaaatgcaagaattcagttcattttaattgtgtttagtcaattctcatgtttcagaagcttatagttgctaaaatctattttttttttttttaatttcttaaaatttgcattttgaaagaaatcaaatcataccaaaattgacttgatgtttcaattgaattttttcaattgaattcttgcacatgatttattttaaacaacgccggtagtattgattcacttagttatagtgaattatgatgtctagctaagtaattgggttgtggcacttgctagttttaactatgggatgagtatagttttagcttctggatttggaaattggtgtcaattaatcaatagaaatgaacaaaagaagatgttacaattgtggtttaaccttggaataatattctaaattgctttaacttatgtcatacagggcaacctcgcctccttcatttgctcttgaggtat

SEQ ID NO: 48463 - DNA, 915 bp, Ricinus communis
  Intron number 1 from transcript 30005.m001260 (locus 30005 .t000026) derived from phytozome v7.0 (chr-ID 30005; pos 1 47258 to 148172)
caagatccaaagaaggcaaagaggtttttccactactcctacttctttatatatatatatatatatacacacactttcatcatatgctaaattattcattaatcttcccaccacattatcaatcaaataattcttgaggcttttgatcatcattgcttgtatttgattgattgttttgtgtttttgaaaagaaatgtgtacttttaaaattatttatgattcaagataaactaaattcatctagcttctaagtttccctttgcatatatctactttgcaggattttgggtgttaattaactataataatgtgcaaaaactatatatatattacgtttattttgtgagagatattctagtgttgttttagaatctcaaattctattgttggcttctaaatatagcaatcgcgattgaaatctgtcggcttctgtatatatttatataataatctcgatcaacattattattatatcttaaatgaagtttagaaaatgatatatattgcacgtgatttaattatttgagctttcataaataaatgaatctaataactccacgtaaaaggtcgatcttgcaattaataacatttagaccactttctaagttttacttattcttattttactattaaatttaatttgaatatataaacacatgctctttcaaatcttcagcatcagataattccttatgaaatgaattgttatttataatgatagggatttttgttttttatttatttatttaaattcatgtaaaaagatagatataaaatcttcttgtatgtatttgttgatagtgtatctaatggtttattgtttgtttcacttaataacttgtgcttttttttttcttctcttctttggaatttgttacagaattattgcaaaccgaacgtctgctgttaaggcta

SEQ ID NO: 48464 - DNA, 614 bp, Ricinus communis
  Intron number 1 from transcript 30170.m014385 (locus 30170 .t000797) derived from phytozome v7.0 (chr-ID 30170; pos 3 576936 to 3577549)
tgcttatttcttacactagcaacactttccctacggtactttctctctcttgtaatttttattctcgcgttctctagtcatttttttctttaatgatttattcttttgtttcatagaagatttcttttagaatcgtgttcttcgaagcttctttcaactcttttttcttttactgtcaacattatgtatactatagaactaggttactaatttaatttgaaatctaatgttagggtttttaatttgtatggtgcttagatcattgtctatgtttgttttgtaatttctggaccttaagaacccttaaattcttgctcctaaagttaatttggtacttgtcgaagcataatgttggcttttattaaatattcaagtaaagattgtgttgctaattgattatcactttatctgggtttttgatcctgtgccttttacttttaacactttttcaaattatttaaaagttactattctattaggtctatttgcattacttcatgcgttttgttctataatgtttctaattgttcttgtttgcttttgctttctttgggatatcaaacattggcttgagtgggtaactattttgttgtgttgtgattgaaaacaggact

SEQ ID NO: 48465 - DNA, 1017 bp, Ricinus communis
  Intron number 4 from transcript 30147.m013928 (locus 30147 .t000199) derived from phytozome v7.0 (chr-ID 30147; pos 3 407085 to 3408101 reverse strand)
aagcattgggggtagtaattgacctggacccagaggtaggtccattatgaatgaaagtcattaatacctgcagttgatactacttttattatagtgctttgctttgcaatgtcattgtatacttattcaaacagttttttttctggtgtgaggaactcatgttaaagtgattaaatggaggttcatgactctgcggtcctaaactgtggacacattgtgattatttactctaccgagctactaatccttgctgttatctagtaaaaaggtgaaaggttttccatcctcgtgccaaaacctagaaacacctatcaatttaaagcatattcttcagaccttaaggggttaatcacatgcatacaaattcttttagtgggaaagcttggtgttttcttccatgtgctagatcctatatgatagtatagggttaaaattttttggctgtctgaaactcttgaactatctctgagtatttagttacactttccaatacaatgtcaaaatttaacaatcatcacttgcttgaaccaataactggtccgtgtataagaactattattggtaatctaccattttttgctacagtttaagcatttttcttgcccatttcttataatttatgtttctgaactgtggataggattgtgttcttgatattgaatctcttaactaaaaggtaggtattggaaggttctagttaatttggtatacacttctcttggaattcaatctaaactagaggtaaaagaatgcattttttcctagacttttaatattagttcctcattccttaaaatttactaggtagtagaagtgttctttgactctagaagtggtaccattttggtttttcatttattgcggatctctaaatgaattaccgttttagatcataagttaggtgacagtcagactgcaggttcgcaaatccatttaaatgatattgtaaatatactgatctagtttgttgtctctctgtttttttgaaatgaaatcagggggtatcaaggtgtgtga

SEQ ID NO: 48466 - DNA, 789 bp, Ricinus communis
  Intron number 2 from transcript 27524.m000295 (locus 27524 .t000011) derived from phytozome v7.0 (chr-ID 27524; pos 7 8297 to 79085 reverse strand)
ctggtgcagatattttggttacctcttcttatcaggtttgtgcatttacaaataatctagatacaagttttaatatttgatgtagtaaatatctgtgtctcagtctgaattcaaaatattagcgtgtaattttaagaaacatgctcaggcttgaatcacgagtgattgggttttggttctttgaccaaatgagatgcaaaacgaaattatgagacgttgaagcataaaaggccaataatttaaactgatactactgtttaaaatggtgtcaattggcttttaaatggattggttttcttcagatttagtagtagttttaagagattaatgtagaagtggagcagctactctatagcagaaccatcagcactcaaaaaatctccttcactttggtcaatttgtatgcttttaaatctgaagttctatcaaatttgttatttttctggtagaagtaatgaataaagaaatctttcggggaaagtgcaggttgaaaatggttagcaatgtactaatttatcactttaatttgatatgttgaggatcttataatttactttttgatacatcgtatttcaaattgattatgggtagaatttctttgtagtcatttcatgcttaaaatgtactttttagaaagttagtgttgtcctttcacaacaatgggtgcaaggcatgagaaaattgtttgagtttgccaaatctgaatgcagcatatgcattttcagaaattgttggtcaaaatttgattttagttttatcctgaatttgcaggccactcttcctggattt

SEQ ID NO: 48467 - DNA, 711 bp, Ricinus communis
  Intron number 1 from transcript 30054.m000818 (locus 30054 .t000033) derived from phytozome v7.0 (chr-ID 30054; pos 2 03703 to 204413 reverse strand)
tagattttgggacaaattaacctcgaaaagtatagttaggggtcaaattgaccctttaccatttcctagagttatatacttatattactaactacatgttagtataatgtatattatattgtcgacttttttaataaaaaataaaaaaaaagctcagttttttaatgaatttttagaagtaaaataaataggattaaaagaaattgcaaaaaaaaaaaaaaaaaaagaggaatttgcggagctaaagctgctaataatcaaacaaaggtcctcaatcttctcatgaggacccgctcaatagacccatattttaccatggataaaaacaatcttccacctcatcttccttaattaaacaaaaactttatctactcacatatgcattcaagtacctaacttcttattaacttttcttcttcttaatatatactaagaaacaaattaaagaaaatgaaaaaagtctagtgaccattttcactttgtatcttcatttcttcttcatcatttcccctcatccatgcaaacacctaaggccggaagaagcccaatctccggccaccaaatttggcaacccactttttgttaaatgtcgccagatcctcccttacctccacagcatacaactctttcttctcctcccataactatagttctaactgttattcttcttgttttcttctttatagggtttttctcgatatacttttgtag

SEQ ID NO: 48468 - DNA, 636 bp, Ricinus communis
  Intron number 1 from transcript 29983.m003107 (locus 29983 .t000006) derived from phytozome v7.0 (chr-ID 29983; pos 4 6892 to 47527)
caattttacttaaggtatattacttaaatgtttgaatttttccttcagatttattcatgtttctgtctcataaatgggtcacaaaatgtttcttctttctttctttttcttctttaattagttttggatccaaaattatcagtttctattgaatcaactttaataattgctctcacaactttgttaaaattatttaggaagctttagcaatcaaagactctaaatcgtgaattacttagagcccaacttgataaaaatttatttgagtaattatttaaatacaatttaatattgaatatatatatatatataatttttatagttttacttcttatggatataaacatagctcttttagatttatttgctagagaattgaaatcgtaaattttagtagatttattataatttttgaaacaaatatttaattttagtgaattaatgattaactgaatctataagaatatgatgaattttcttgagagctgatttataatgatcaagtcaattttcttgagaaccgttgataaaaaacaatcaagtttcaaactaacatttacgattcacttgcgacgtaaaaatgcttatctaacatatataaaattgtgatgcctaatgacaaacagtggatattac

SEQ ID NO: 48469 - DNA, 1033 bp, Ricinus communis
  Intron number 1 from transcript 29080.m000174 (locus 29080 .t000006) derived from phytozome v7.0 (chr-ID 29080; pos 2 5208 to 26240 reverse strand)
ctttccatcaccttgataacccatttgttcctgaggtaatttacggtaaaagcgacttctatttagcttgtttattctccttttgtctcactaaaataatgcataaaactatgagatgatggctgaaactttaatgttatttggtaagaattaataccatttcatttcttgaaattcattcttttccaaaagcccagttgcataatctgattatttagctgttttcttgctgagaaattgctggaaccaataggatattgtctctgttttttaatggtattctagacaagtgttatgcatgcttgaaaaaagacaatccatttgttatagttcttttgaaatagtgttaactgtatgtttagttattcagatattggaggaaatgaatataaaattatcacatacggatatactttttgtttaattttccgatactgtgtggttatttttcttttaagaggaataacaaagtgtctttttcatgttagtcgctgtattttgattaatacttcctatagttgcttaaaaaatgcttgaaacaggaatatataatttatgcaaccttaaattaattttctttttctaattctaagagcctttgcatatgctattgttctatagatttttaggcaccctgtgatttttgtcataagtagattattaggagaaactaatatctggtttctgcctgttctggatatattggagtgaatggaaattctatgcctcttggcactaactgcagcaataaaagggttaggcaggagtggtttaggtctttgttacacatgtaacctttctatagaactatagaagaggagatttttgagaggtatgaaaaacagctgtatggaagaagttagcatttatgtcatttcctcagcttaagcggacatcaagcattttataaagaactgtgacttgtcttctatgttaaaatttttgaagcactaaagtaggagttctagttttgggagcttctatttgctttagatacactgtgtattgcatccattaagagctgaatcttgat

SEQ ID NO: 48470 - DNA, 832 bp, Ricinus communis
  Intron number 1 from transcript 30147.m013748 (locus 30147 .t000019) derived from phytozome v7.0 (chr-ID 30147; pos 1 04285 to 105116)
actccaaagctcttgttgctgttgaaagtaatatatccatataaacttctctctcttttacctttcgcttttaaacgtctctttgcttcacgagaaaacccttatttatttagttttaaactgcgtaagaaccaaagatatactatgtttattaagcgaattgggttttgcattagctttatttcttgttctcttttgcaaatctagacgctctctctatttgtctgtgatgaccccgcccccgaaaataatcgtaatgagaaagtagaaaaaaaaagataaaaggattcttttagtttctgtctcgattcttagttattttttgttgttgttttaattagtcagcttttttttttttttttctttccttatatgctcttttataattatctatttctttcactgtagattctcatttgatgaaactctacaaaagaataaatatcatatgccctttcttactatagttaattttggaacaattaaagtttttatgccaagtgaagaaaaaaaatattatgtaaattgtacatcttgaaatactaataaatttttattccctgcttgagaaattgttatcttcaattaaatgaagaacaatcttaatttcatttcaatccttttgtgcttgttttgttttggttcaagcagttgcattgcatagcatgggaaatgcagattacagtaattcattttattttacttaaaagggacttatagttttagaaatgaagccgagaaaagcttccatttgatctttatgtttgattttttttgcccggtggcagaggctccagaatctgttgaagagaaaagtacagagggttctgtg

SEQ ID NO: 48471 - DNA, 307 bp, Ricinus communis
  Intron number 2 from transcript 30131.m007105 (locus 30131 .t000256) derived from phytozome v7.0 (chr-ID 30131; pos 1 562612 to 1562918 reverse strand)
aatattacgcacatatcaagggaatcaaagaggaggtaatgtttcttcgtctcttttagtttttctcatgttaatcttgactttttgcaacagaaagccctttttttctttttgtttactattttaggaattgaatatactgcctcattttgctggttgatccaccaatagtagattaactagtatttgattattaaaagctatgctttgcaactatatatgttatgtattatgagctattgattgtaaaatggtgttacttgggtcaaataaaacaggaaaactttgatctgtgcagtcagtcaag

SEQ ID NO: 48472 - DNA, 491 bp, Ricinus communis
  Intron number 1 from transcript 30131.m007105 (locus 30131 .t000256) derived from phytozome v7.0 (chr-ID 30131; pos 1 562959 to 1563449 reverse strand)
cgcctattcttcttaccgcaagaacaaggtaattaattcacttcaaaacctaattcattgttcacatgtgtcttttaattatgcattatttttccttttttttcttctttgcactttgattttagagatttacatattcttgtcaagtctaaaaaaaatttcaagaatttaattggattcagtcaattctcatgtttggattgctagaatctaattcctttcaactgaaaaagaaggatttttaaaggtattctgaaaacaatgacatgattttgcaccaattgaattgaattcttgtgcatgatttattccaaacaatcctgctttctattttatgctaactgattatagtggctgtggctttaagttagtaactttgatttgttattgctactctcaattcatatgaattgtcttttgtttttttgagtggtgtgtttgtttcatatttaataggtctttccttgtgttataatacaaaattcgttgct

SEQ ID NO: 48473 - DNA, 647 bp, Ricinus communis
  Intron number 1 from transcript 29801.m003205 (locus 29801 .t000150) derived from phytozome v7.0 (chr-ID 29801; pos 8 17612 to 818258)
ccgctgcttcttcaggtaacttctctctttctattatcattatttttcattcttatttaattctttcaactatcaatgtcaaaagtttctttttttagttttccccattttgatattcaggttattaggtaatcatagatctcctgatgcttatattctcatatatgtatgcctttgtttcttattttttaaacctgttggatatgtgggcatgtcatggatggttaaaagtgttttatcttttcagaatctgaattgagttaaatattaatttgtcaaatgaaggcaataaaatgacaattggttgaatgggtttttaaatcttatagattcatgtcaaagattcattcttttttgaagaaattgcatctgaaaccaaaagaattggaaaattctgatagaacacaggtacatggttcgtgggtttaaggaggttaatgtgaggggagaaaaaaatgggacgggtttttgtgataggaagagggggtttaaagaggataatagaataaaagagttataggcaacctaaaattataacttgtttacttaaatctagattttggaaaattttcatccaactaattgattaaaaaattttgatctatactgcaggtggacaagaaagtgaagcacccaaattgggctct

SEQ ID NO: 48474 - DNA, 788 bp, Ricinus communis
  Intron number 2 from transcript 27613.m000619 (locus 27613 .t000012) derived from phytozome v7.0 (chr-ID 27613; pos 9 3281 to 94068)
gatcaacctctcctctaaacataaaatgtaagtgactctgctttattaatttataataatcaaaattactattattattattcttttattataatttataaaaattgagatatataactaatgtcaggcaaagtttaaatatttaaaatacatgtataagttaactagtcaatcccaagaggccactcctctaaatttctgactctgctattggctaggtgaatctaatatttctcaattttacgccattgatagctcatgatgaagattgttttagtatatagtgtcataattgatagtgattttggaattacatacattaaaatgcaaaaaagaaaagtaaagagtggtgcaaaaaaacttcaagcttactattattatgatttgtcattatgaatcctttttccaaaggtcatgctttagaatgaagcactaagttttctatctgattccagctttgatagagcctgctgtgctgacttctgccaacttatttacttttgtttgatagaatctttaatgatgcttttgccactttctccacatgtttttttcttttttcaaaaatcttgatcattttgtagcactagaattgatctctacatggtgggaatgttttaatgtttgtgtgtgtgtgtgtatgtgtatatatatatatatatatatatatatatatatatatatatatatatatatatatatatttttttttttttttgtattttattaatgattaattatggttaacaacaggattgagcctagatatcaagaaatatcaagcaagg

SEQ ID NO: 48475 - DNA, 921 bp, Ricinus communis
  Intron number 3 from transcript 29844.m003166 (locus 29844 .t000012) derived from phytozome v7.0 (chr-ID 29844; pos 7 4870 to 75790)
gctttgattaagaagctacgcaaggcggtaatgtttcttctttctttacttgatatctgcatttctaattatacggttaaagatttgattttggtgttaagtttctgtatatacgggtgcttgtttttgttactaatttgtcattagactggaatcctaatttatttaatgtcatttatttatgtaaagagttcaatttctgcaagatgccaacttgattatcactaacttaagttgttgtttatgtattatttgaaaatggattttccactttgattgatgtgttactctattttttctgtatagaatgttttagcatttggatatgttgtttctgatagctttactttggtttcatagataaaaattgtattactgagattttttttccataaatttagtgagaaagctttcttgtatagaacagggtttagttcaagttggaattattgtttgtttgggagtgttgaagtgctgtggatatgaaatgaaaaagctttattgtggagatgtgtttattttctggtcgctattttgttactaagtctcactacaaactttgctctattcatgttccctgcttcttggttgtttcaccaattctgtcttctacaccctaaaaaattgtaggctgtataatgcatagtagaaggcttaatagaggcggaagttttaataagggagtttaaagttgcatgcttctgtgtaatgtaagaaatcatatgtaccattttctggtgaaattagtttgtaggcatgagacacaggttcagtcatgaattcatttatagtggtgttgtactgaactatggttctctcaactttgtatttctgtttatggcttataccagttttagctaagtctttttcttatgttttggagcagaaaagggaggcccctcctggtgagaagccagaacc

SEQ ID NO: 48476 - DNA, 891 bp, Ricinus communis
  Intron number 1 from transcript 29989.m000413 (locus 29989 .t000006) derived from phytozome v7.0 (chr-ID 29989; pos 3 2578 to 33468)
tccacttggcttgcaaagattggggtttcttccaggtatgattaaatccttttttcttttacatcaatggaagaaatgatagaacccagaattattatcaatcctaattgcaatcgttctcaagaattgtattgtctttggattgattacggttgtgaacactttagttgattggttttgtgcctgtggtttgtcagaattagcttagtgaaaattagtccacacatgaaacttgtgatgcatgaattccaatggtagcacgagatatgaacactgtagttgattgtagcacgagatatgtaccacatgggatccactgtacacttgtggaagtggagcctactaatatgtgtctcgtggttcattgtattatggtccagcctaagaaatttcgaaagataagtaaaaaagaaatgctacaatctttggaaaatgaatggagaatcaaaattctcgaaatttcaagcttttgaaactttgtatctgtagttatagtgttgacaatcatgaagaaatggcttggaacttttggaaattgaaagtatccccaacctagagtcagaaagaaaattgtaagaaagctgaggagatgcccttaatatctgctaatgattgcttatttgacatttagttatggggttcaggggaagggagggagaaacagggtactatgtatagtgcatggaaaatctatgtatttcagcagaagtcaatggaactgtgatcattttacacattcaaattaaagtaccaataccttcatgttcagaagtggaattgttcaaagtccagagatctctaatcacctagtttaaaagacagatagtgcagctagccttagtttatatacttatattcttttatttgctaaaaattcacagctagtaaacc

SEQ ID NO: 48477 - DNA, 819 bp, Ricinus communis
  Intron number 1 from transcript 29864.m001464 (locus 29864 .t000040) derived from phytozome v7.0 (chr-ID 29864; pos 5 82893 to 583711 reverse strand)
gggttatactgtcaaagccactgttcgagacccaagtcagtttgtctttttctttctttctccttgtgttttcatttgattatgcatcagttatgccatcaggctgtgtttttggagattcgttttgctcttctttctttaattcttggttctttgcaatttgcttgttacttgtcatgattgtttgatatgcttatatataaagaagcagatatgatgtgattttattagcttaaatcttgcctaaagtttgaccaaattaggatgattttataaaattggtaatacatgagtaagttgttggtatgagagaattgcgttggagttaataagatttttgttgtagaatctagttagatcagattactctaatgtttattatgtttgtgtggatgtaatatggttttggtaaaaagccatgaaatcctagttttagggaaagttagtactgatggttagagattgtgtcaggtaaagtgctccgcttgtaaaagtattctctctatagatcagggctgctgtaacaaagaaatcaagtgtaaaaaatgaagaagaaaaagaggaagaaatattctgctttttgctgaggtttttgttctaagtttctgtcttatgagtttcatgtgttctgaagttttctttatggtttaaagctactattttttttgttctttgttttctactctcctctcaaaatctaaaaaattcaatattagaacttaatgaaactaatatggtaagacaatgtcattcatgtcaaatgttcttttcaaatatgtcacaggtgattcaaagaaaacagatcacttgcttgctctt

SEQ ID NO: 48478 - DNA, 525 bp, Ricinus communis
  Intron number 1 from transcript 29912.m005424 (locus 29912 .t000150) derived from phytozome v7.0 (chr-ID 29912; pos 9 43721 to 944245)
ttgcccttgaccatcctcacgtctggccattccaggtcaagaatttaattcctcactacaattcgtactcttttctttttttttcttactacggtttgggtaaaagcaaatttagctctgtttcacaggttttgttacttaaatttattttgttatgcattatttggaataagtagtatgctagaattcaattcagtgtcaaatttggcctgatttattatttctcaaaatgcatttctttaagtggaactgtgaacgttccaaaatgggaattgactaaattaagttcaaccgaactgaattcttccatttatttcgattttccaaatacactcttagggaattaatttatagttgtgtaaagttttctttttatttttgatacaaaaagagagctccaaacgaagctaagaaacaaaaatacgcctgctagttgcaactcctattgttgtgtaaagttttgacaagctattgtattcttatgttccagttttggcaagaaacagataaagcagcttatctatt

SEQ ID NO: 48479 - DNA, 594 bp, Ricinus communis
  Intron number 2 from transcript 29801.m003178 (locus 29801 .t000123) derived from phytozome v7.0 (chr-ID 29801; pos 6 78208 to 678801)
attcaattgaggctggtggtacgttcattgtcattattcctcttcaatatttctttaattttttcacataaatgataccataattatatcatttatatccaattgatatctcaactcaataattataaaaaatggtattttaagttaggatggtacctttatgtttttcggtcattttgtgttaatgtgatagtcaaattctttctttagcttccatatcatcaatgctcatctgtatataattaatctcaataaatctaaaaattctagcctctcaaatgcaattgcaagggtatgaattcaagataaaagagttgagaaaatctttaagatctaattagaattaattgtataaaaaaaaaaaggtgatgtggtagctagtgagagaatctggctgacacatcattatataataatcgaaaagtataatttgattcattgatggcgagttagggtactattttttataattattaagttgagataccaaatagatataatagccaaaattacagaacgatttatatattttacccttcttcagttgaagcctgtttaccatatatatgattccccacatgtattgtttcagga

SEQ ID NO: 48480 - DNA, 925 bp, Ricinus communis
  Intron number 2 from transcript 30170.m013882 (locus 30170 .t000294) derived from phytozome v7.0 (chr-ID 30170; pos 1 538615 to 1539539 reverse strand)
ttcttgcaagctttctctgcccttgtgggcacaaggtatggctcaaagaaaactacataaactattgtttgaagtgattgtccttttcttccactgccttgcctgattttatagtgttaagaagtatcaaaaaaaaaaaaaaaaagaaactgttgccattccgtaaaatgaaaacgcgccaggtaggggtcgaacctacgactttctgcttaggaaacagacgctctatccactgagctacaggcgcatttgtttatagctcttgcttatccatacttgtatcaaaacggaaaaactcaagcccaagaaatgaaataatagtgtgtagggaaagagaaagatagagcaactacttgagacagtaaatgaattagcaatgtggacttatcaacaacttggaagaaatcttgcttccttaatgatgaagctaattattaatcaaggatgtggtagttgtgcttttgatgtatcttttgctgtctttctagaattttgtggatacttttatatatatattgctatcaataggaatcatgatgccttaattatctgtagttagcaattggtggaatcaattaactagacaatggtagatggctgaccccataataatcacagatcattgaaagctgaagaactgtttttcaccaagagtagggtacttagttgtccagcaaattcagtgtcatgtttcaattatgacaggtaaatttatatgtgagtttacttaatattcaacaaactcgtgcgcaactcacacaaaaataaagagaaatgcaaacatatataagttctttttagtgaattattcttaattgtatcttgtaagttagtttctactgctatatatgtattaaaatgaataacaagatgaatatattgatttacaggtattaacaatatttttgatctctcaaagattgaa

SEQ ID NO: 48481 - DNA, 674 bp, Ricinus communis
  Intron number 2 from transcript 28401.m000077 (locus 28401 .t000005) derived from phytozome v7.0 (chr-ID 28401; pos 2 2638 to 23311)
tagagggacgcctttcaagttcactcttgggcaaggtaggtaaattatacttatataattcagtgagatgttgaaattatagaagaatatatcctatttaaattaagctgatatggtacttggtatattcattttgtggaaaactgagctgattttgtaattagtcattggtgtttgtgtccttctttgaatggcatttcactagcttacctatttttgaagctacgcttagcatcgttgccaagtcaagtctccttaaactgtggagtagcttaagattcaaagttgaacgctgagccatttggtgcggggcttgtaatagattcggtttaaaatggagtttgtggctcatatggttattttacctatttacgagcactgtgttcatcttttttttttcttatctgtaattaattgctctatttcggccatttggcatgaaaacgtgcataaatacgtctctatcttggatggcttaataactacaactgcatgtctacttagaggagacttagatttcccaaataaaatgatgtcccttttaatcatcatttccactttctatttcctggtttcagttggataatctttttttgacctgatcttgtcctcaaggtggatcatgatttcagttgttgttgttgttgttgttatgtaggccaagtgattaaagg

SEQ ID NO: 48482 - DNA, 997 bp, Ricinus communis
  Intron number 1 from transcript 29822.m003486 (locus 29822 .t000161) derived from phytozome v7.0 (chr-ID 29822; pos 9 24131 to 925127 reverse strand)
gtcagcctcagtacctcgataaattgcaggtatattatatatgaatgaaacagaagcagtagcttttttattggtttgattaataagcaaaagtgtaaacatataggtggtttttattttactaggtttctaataattcttttgagtttcatgtaggaaaagtgaattatttcaataatgttgatcaaaaagtgttccctaatcgaaaatatgcatttctgcaccctaatgaaaatgggaatgaaattatctaaactcatacatagtgcttggaaactccaagtcaatctgaggaagagtagtttctaaaattcaactctctgaacctaaataaacgaaactgttttggaagcaatgaaatatttccacacaaaggtgacatgatttgcaagaattcaattctcatattctattctaaacaagccattaaacaattgaagtgtgaggtcatgacattggaccttgagttgtacattattcaaattagtttgcgtagtgtgatattatttgaatatgggttggtcaagtacatgaaatgggaacgggaacactttattataagtgttcatagtgttcaaattgaattctttattggaaactactgattgcatgatctctaaggaacactacatttcagtgaaaggagctgtctttggtttcatttataagagggctttgatggggatagtattggtttgttacaaaagaggagattgatggctgtataataagatgaaatcattggaataagttagtaagtacatctagggcttattttaaatgtaagcaccagaaaactactgagttgtgagatctcatagataatgactccagttagtctcgtgcaatattatggttactcgtttgcattttaattgcttaactagaaaggttttgactttttccaattttctgatcttaattcgtataatatatatatgactaaatttggattgtcttaggtagagagagaaaggggaataactgttaaagctca

SEQ ID NO: 48483 - DNA, 805 bp, Ricinus communis
  Intron number 4 from transcript 30190.m011248 (locus 30190 .t000484) derived from phytozome v7.0 (chr-ID 30190; pos 2 798836 to 2799640 reverse strand)
gtgaccttgagaagtattttgggaaagaaggaaaggtatagtaatccctgcaaagttagttcctgtgtcatgataatgttgctatgcacattttgctgtttaagattcatctaaaaacgagtgagatgttttggagaaagcagtagcatctctgaattggaaggaggttcctaattctgaggtgttatggattttaatatgaatgcggccgttcgctttctgggtcacacttattactgaaaatacatttttgaagcctcatcaagtggtggattgggaatgactggttcagtcttcttcatgttctctagatcaatccacatatctaaacagctttaagaattgaaacgtgtcagttcaaattttttatatcaaataagaatagattaagtagtatttcagagctaatgggaactaatacgagaagtttcaacatgattaggctttatgggatactgtttcaggtatacagttgtgaattttgatatgcatgattaatcatgcgatcgtccatatgatacactcttataagttttagaccttatggattcggccttccctttccatgtattaggtttctgttttgactaatcaatgcctattccagctgtccttactaataccaacctttgtagtgtaagaaaacagtaacccataagttactagtttactttgattataaggaagtttttatctttcagtacttttaaatttttgtatgcaaaaggtaaaaagaaaaaaaggaacctttatttaagcatcggtttcaggtactggagtgccatctggtaacagatcctcgcac

SEQ ID NO: 48484 - DNA, 816 bp, Ricinus communis
  Intron number 1 from transcript 30190.m011248 (locus 30190 .t000484) derived from phytozome v7.0 (chr-ID 30190; pos 2 800088 to 2800903 reverse strand)
tatccgagttaactcatcggaatcggcatttgaaggtaaaccataattgtatacgtttctttattcccttaaaaaataattagatcccttagatattcctgctacaggaattggatctatgtgaacagtgtcatctttatcttaaaagtttatcttttgtgtcaaagtagggacaaattaggtctgtgaaattcatgcttaagctgtgaatttggatgtcgtttttgtatgatgtggaatggttgcgtgtattccttggtttggtagctttgttttgcgtaggttcttacaggcctcgtctggaatgaagcattgcaagaattgaatttattcattgtcaatcttgcaacatcttgacattttctgtatgtttgcatttcaatgccttgttttgttaagctgaaagaactgaattctagcaagtataacctttcgacacatgagtattgactaaatacaattcaattgtattggattctttgcttttctagactttccaaacacggatagagttaaagtctgcagttgttttgagctttatttctctcagaccagactttctctttttttctttttgtgcaatttgcattttctttttagctgtatgtgtttcatttgtatgtattaacacccaaactgaaccatacaagaaggaataattcttgtagcattttaactaaagatcacggctgcctttgaaaccaaaaattgattctgacatatgtgtgcgtgtatttatgcatttgattatattaagtggaatggtgaatggttactaaaatttggaattctttttccttttgggtctttatagct

SEQ ID NO: 48485 - DNA, 549 bp, Ricinus communis
  Intron number 1 from transcript 28320.m001081 (locus 28320 .t000008) derived from phytozome v7.0 (chr-ID 28320; pos 4 7699 to 48247 reverse strand)
gaaaagtactcttctatttaatttctacatcgttacacttgcgtttatgttatgtattacgtgtttatttgagagtttaactatggctctgttagttagcttgaagcttgtacaagacagaaacagaaattaaatagagagagattctaagatgttgaagcgattttttaatttttaaaactaagcgaagttgatgctcttttgattattcaaaatcaaaagcaaatgctcatggaatctctaagttcttatgattcaaaaggggaaagtttggtctcctaaagagctcacgaacaattaattgcagaatatgaacttgtaattggtttctgttgattaaattttagcgaagttcattttgttaaaaacattcattggtatctgtatgttgtttggtacaaataaattcatttgagatttttggaccaagtatagtcaagtcaccaaagtcaaaacttaaaaattcaaaatgagttttgtaaatgaattccatataatgtttttcatttataactaattttggtgaagctgtggtgcaggcagtgttgg

SEQ ID NO: 48486 - DNA, 272 bp, Ricinus communis
  Intron number 2 from transcript 29990.m000501 (locus 29990 .t000005) derived from phytozome v7.0 (chr-ID 29990; pos 4 4287 to 44558)
ctctttctcttcttcaggtttcttttttttttttttttgaatccatattcttactcaggcttttctttgaatactaatgcttatgtgtagttaagctgctttgttacattatttcaaaaatgtactttagatatttctaattttggtcatttaactttataaaatggtatttagttagttatttgaagtattaaccagtttatctttgctttgtttttggaagatatatatattttttaatttatttgtattgcagcaggagaaaggcactg

SEQ ID NO: 48487 - DNA, 756 bp, Ricinus communis
  Intron number 3 from transcript 30190.m010923 (locus 30190 .t000159) derived from phytozome v7.0 (chr-ID 30190; pos 7 05881 to 706636 reverse strand)
ggggttggtgagttttggcccgtttggcagtatattggtatactggggcaaagttttctatatatgcattatttgagctagtcgaaataatagcctagtattgaatagtctgcaaatttgtagtattaagttgggagaagaatcttctttactcctggtattcaccctaaatcctaagctgctccaagttctggtgccctataatcctattgtaatataatgtatttccctttgggttgagattgattcactgtcatgttacgctttgttcattatttttttccttctggttgagtgtgatgtttgtttttttgatctcatggatcactttgattatagcaattttgttgttaggtcttggaattttataatgctacggcagctttgcatgtttaaagtgtgtagaagaagtagaaactgttacttgtccatctagtttagcatatgcgtagagtttgctaggttggttaaaagcatgtacaatgccattgtggttttattattgctgaatcccttattttcttcctctatcataatcttgcatgttaagttatagatgccaaagtgattcattcttttagcttaatcgagagttctgagttatgagactacgaagttgtagttttaataccataattcttgacgattaaaagccattttctgttatttttgtttcatatgtgatctattgtaaggccattttcaaagcttaatttcgtattttctgactattgcagatccaagttttggtatttc

SEQ ID NO: 48488 - DNA, 898 bp, Ricinus communis
  Intron number 3 from transcript 30174.m008881 (locus 30174 .t000278) derived from phytozome v7.0 (chr-ID 30174; pos 7 80017 to 780914 reverse strand)
gggcattgaattataaatatttccttctatttttggtaagttgtgattttctgctgaagcctgcatgttttatgttcataacgtgctttctatgattatagctaaagtagggatatgtctcttaactgtacatttcactagaaatatatctatttgtataattttgattagtgatgaaacttttagattgctagagaagaactgtcaattggatttagctttggttaacagtagaatcattatggtcaacctatagatgattgattcggcaattatattttctcatgagtaggtggaatgatgccttcagttgagattgtggcatgtgggactgaaattatttagagttatatccttttcatgcatcacctttatttcaccgttctcattgcttccccattaatgtttatatgcaatgtatgagaagtttagaaaagttttacaaattatgagcttgctatacatgtgtctgataagctgtttagagtttgttcatttaatgcaattgttgatctagaccaatggcacgctagcctgttgtataacttgaaaaattagcagttgaccaagatctttcctcccgagaacaggcatcattttatggctattctttacaagtttttgtaattttagttttctgaaatgtgaagctggaaagcatattatactttaaacatccattcaatgataaatcctgggaaatatgtagcagtggtagaggtcttcataaaagaaatggtcacacttctgtactcagattcaatttatttgttggtgtaaatatgtgtttggtttcctggctcgggcattagcagatcttttaatttaaatttccttaactataatcttgaatgttaatgcagttctacacatttcttgagacaagtcttgtgacctt

SEQ ID NO: 48489 - DNA, 570 bp, Ricinus communis
  Intron number 2 from transcript 29813.m001520 (locus 29813 .t000072) derived from phytozome v7.0 (chr-ID 29813; pos 4 54725 to 455294)
actggttctcaacaggttggtgggacaagtttcttctttttgctttgttcatattttcctgctatacttctgcatcctgttattatacttctgcaaggaattgcatcatcaccttcaacttagacgaccattaccaaagattttttgacaccataatcctcattttgcttagctttctgttaatttgacttttatacgtgttatataatcagtctcctatttaatgaaatcatatgcattacatgcttacattgtgctcggacctttgataatttttatagctaatggaagatgaggattctgttattctatatttttgaagccttagaattataatttgggaaacatttgtgaatgatgccatccaaatatttattttcttgttcattgtgctcctggttttgttgctatacttttagacgatctgttctgatttagtttattctgttataagtctgaggactctcgatttaggtatttgatcagccactgttatagacttgtaaggctctatttggaatttggtgttgtgcaggcatccacaatcagcgccaaagggactggaccatc

SEQ ID NO: 48490 - DNA, 263 bp, Ricinus communis
  Intron number 1 from transcript 30205.m001602 (locus 30205 .t000032) derived from phytozome v7.0 (chr-ID 30205; pos 6 40710 to 640972 reverse strand)
ctgagagcactttgttggcttacaagtctgctcaggtgggtaatcaatgggatgctgacttctccttcatccttgtccttatccttcttcattgtctcctttttcaatgttcacattatttctgctcttgtttctgttggtcttcacctttatgcaccgagtacagttgcaacgtattttcttatttgattgttaaatgtgtgtatatgttgtctttttaaattgcaggatattgctcttgctgatcttgctcctactcatcc

SEQ ID NO: 48491 - DNA, 851 bp, Ricinus communis
  Intron number 1 from transcript 29603.m000525 (locus 29603 .t000017) derived from phytozome v7.0 (chr-ID 29603; pos 1 02368 to 103218 reverse strand)
ttcgcttctgtgttcattctctctgcttggcaagagtaagtagtacttctcttagatctgatttctacgattgcaatcttcttcttcttcttcttcttcttcttattattattattattattatgttttagatttaattgaggttatttggtttgcagtgaaaactgagatgcaattaaatttgttggtgaatgtaatgtttgtttagtcaatgtcttaggttgttgtttttccgttttaactgtttcccatttaatttggtgattgttttggtgtagtgatttttttgcttttaaacgtaaaataaaatttatagatttcactttctggtttcttcaaggttttggatctgatagtgcaagttagggtttttggatgtttagttattgatggttgtattatgttgttatggtctggtttaagccagaggtattcttttattgtttgattctttggttgataataaagctcatagattgcctctttgtattactaaaaagatgtgattttgcttttttatatatatatatataggatcaatagggatgtcgaattttaacgatatttacatatttgtaatgacttgtctttatttcatatggcatttatctctttgcaatttaaattaggtgatagatgtttatgttaggaactctcattgggaacaatcagttgaccgtttctgcttattttgcgttctttttttgttaaagaaatttcttaacccagttgctcatctcctccaaatgcttctcataagatgttcttagctcagtaacagttaggacatttgctttgctgcgaggtttgtttccgtttatcattgttaaatcttgctcactgcaggttca

SEQ ID NO: 48492 - DNA, 680 bp, Ricinus communis
  Intron number 3 from transcript 30075.m001173 (locus 30075 .t000040) derived from phytozome v7.0 (chr-ID 30075; pos 3 22241 to 322920 reverse strand)
tcttacgtaagatgagaagcctataatatccaatctatttatattgctgaatttcatagcttgtagttttattattatcatgtgaccgtcagacataatgggtgctagacctgtacataaaaaagaataaggatcttctgcttggtaattacaatattaatttgaggattgaagtggatgtattctacttcttttatcttgttgtgtgtaatgagtcttgtttttccatttgagtacaaaattgttttattgctaatatacttaccactgtaatatgttggtgctttcatgttctgcttgtttgataatccaagttgttttcccttctagggattggtttcctaaattgttcaggaggtttgaaattgcaaaattggtttcgcctatcaagtctttagagcatttgtgcttcttgtctgtacttattaggtggaactgtgcaattttgaatctttctatgaagaaaactttccttcaagaatcttacaagaatatttattacttttgctagctgttcaggaagctatagtcacatcagaagtttgttgaaaatctgttccttgagtacttgttcttaaatatgcatttgttttttgtggttttgtgtaccgtatgattcctgtcagttaacttatttctgtctgtatatgtaggtgcatttgaagatccagatatcattc

SEQ ID NO: 48493 - DNA, 767 bp, Ricinus communis
  Intron number 2 from transcript 30128.m008975 (locus 30128 .t000436) derived from phytozome v7.0 (chr-ID 30128; pos 1 955712 to 1956478)
ttccagctggttcgttactttacttttatgtggtgttggctgatctgtttgttgggtttttggattttgatgatttcttgtggttttgtggtggaaagattggatctttacttttttccgagttcctaaagtagaaactggatcgatttcattttgtaacgattgatttgctgcgcttatcgttttctccttttttttttttttttttttaaaaaaaacgaaagaccgaattcttttaccaaattatggaggactaggcagtggtctagttctgtgttaactgtaattgtattttttgtagtattacagttaatttgggtattctaaagactactcagtttctgaagtatgctactggttatgggtggacagcttccctttctcaaaatagaaatttatgacatttattaaaaaagggaaaggaaaagaaaatttcccatgccaccatatgtatataaatttacaagagattagagaaatgcattcaaagcaacttagaacagcataaaacaccaacatgtcaacatgacaataaattctttacaacatctcctatatctgctttacgcaactgtgtcagttagatgattagcatgtatctaaccatgtcatttattcagaaaatttatcttattctgccttatgagtcctactatcttatatttttttctctaatttggccatttgtttctctatttcgtaaaggacctgatgccttgattttattatctcattggttatattttgcttgttaacaggtgttaaag

SEQ ID NO: 48494 - DNA, 612 bp, Ricinus communis
  Intron number 2 from transcript 29791.m000542 (locus 29791 .t000017) derived from phytozome v7.0 (chr-ID 29791; pos 1 51118 to 151729 reverse strand)
aacagctgattttttcataactggaagtcttggtaattgcataatggttttgaattatattttagagattttatcattatgaggttttctgtttcttccttttctttgaagatattattgtggttgtgggcatatttacgagctgtgaaaaaaaaaaaactgaagctagaaattttattgatttttttctctctttattttgctacataatttccattgggtggttttatgaattcacactatcacatcaagtgaaaatgaggttgctttctatgctataaattggtgttggaacaccctatgatgataatgatatgagaaataaaaagtctttgtattaattcgttttaactcattttaacagttaagttttgtgaatcaacttgatatggatgtgtagtttggagtgctactgtactattgatttccttatccactagtttagacaaaatgcttaatgtaaacttattgctaataattgggctatgcaagttgttttcgcatattatgcgaatgtttcaggtaatatgtttgtcgattgctattaacgtttatgtttttcatcaatcttaatcagggcatttgaaattttggaagaaaaaagctgcggga

SEQ ID NO: 48495 - DNA, 303 bp, Ricinus communis
  Intron number 1 from transcript 29974.m000232 (locus 29974 .t000003) derived from phytozome v7.0 (chr-ID 29974; pos 1 8737 to 19039)
caggtcttttagtctttcaaaccctttctctaattctctacatagctaaaagaatttgataaacacaattataatcataataatcttcaaaatcttttagaaaatattaggaaacaaaatcttctcgatcagattcaaaagaaaaggaaaagagaaaccagttcatcgtaatattagggtctgtctgtcatttatcttctatcctaattaacctaattagctaaagactggaattctttaagaaaataaatacattagcttaatgatattaaccagtttgaatgtggtactgtgaatgtaggt

SEQ ID NO: 48496 - DNA, 903 bp, Ricinus communis
  Intron number 1 from transcript 30078.m002333 (locus 30078 .t000126) derived from phytozome v7.0 (chr-ID 30078; pos 8 16519 to 817421 reverse strand)
acgctgagttgataaggtctttccctttctgtatgttgtttcttgtctctgattcttgtacctgttcacttttctccattgatcactggagttgtttaattttcttggttgttgagtgtagtttaggtaattgcattcatgggttttcttccttcttattgaatgtgaaaactgtatgttaaaagattcataatttgctaatgttcgtatccattttcccctttttcttgaagtacatttaaatgtggttaatatgctgattgcgagtgacacgaatactaacgaatactatgttacatagaaatgatcctgcacatggctgaaaggattctttatttctggaatgccatccttcataatgagagattcaatgagagagttttagaaatttgtatagagtttataggttattcatatatgtcactgttagactatattgcatcacaagtgtctttgtgacacaaataagatggtttcttggtcaaaattaacaagaatgtaatataatctggtggaatggagaagcatttgatttagatccgaattgtgagtctattatgagattcagctcaatgtaggtttacctaattagtttattcacagtgtttacctaattttttccaattatctctgttgttataattcagttttggtgggacgttgataagattctgagattttcctccttgagaatcaaatgcctgttgtatctatgtttatgtgctggattaaatttgtcttatcacattagttgatgcaaatagctatacttctgtgtcattcattttaatgattaaggtgctgtttttcttttcttttttccccttttcatcaccttttaactctgtgatgtctctctgttggaattgcagaagacagtttgatctcgcgaaccgggaagca

SEQ ID NO: 48497 - DNA, 611 bp, Ricinus communis
  Intron number 3 from transcript 29701.m000596 (locus 29701 .t000017) derived from phytozome v7.0 (chr-ID 29701; pos 1 26549 to 127159)
tcacaggcaaattgcttacttcactggtcccacaggtataattttgaatctcttcattgttttagttcttttccatctctactttggtggtggagatgaaatgcatgcatagttttgatggaatttcacagacgaccaaccaacgtttgtttggcaatggcaatggcaatatgaacagtgtttataaatactcctagaaatgaagaccttttctcgtgacaaacacaaaaacaaaaagccaaaaaaaaaaaaaaaaccttagcaagcgagtgcaagattgattcaaatatgtcacgtggggacaacctaaaaaccgataattgtttctgactttatgtacaaatgtccattaaacagcttgtttcaatgtcattttatgagaagaatggtcagtggccagttgaagatatataaatgaaattgtccgcattactaaaaaatgaattatacaactgtttctctttatctaattaactaaaatattagcagaattttagaaacaagatcatttatgaattgttaaatgaagaagcaaacattctaagaaaccaccgtaatgatgatgatgattgatcaattcttgtttgtttctgcagttggagggctgctaa

SEQ ID NO: 48498 - DNA, 1007 bp, Ricinus communis
  Intron number 1 from transcript 29666.m001491 (locus 29666 .t000067) derived from phytozome v7.0 (chr-ID 29666; pos 5 35970 to 536976)
acctggactttcaggtgcttgttttgcttttgtatttgcaattttttttttcaattttttaaatgtgggtttatcttgtatgttgattgaattgatgtttaatttatcaaattctgttgcttcttttgattctattaatatttattgctttctagaatcttttgtattgtggaatttggttttgggttctattattaagttttattggtttttgatttctattggctatttcctgttctcattttatgttgattgaaatgtttttgattttatcaaagctgattgctttcttctttgattctcttaaattttattgctcttttgaagctttatatcctgcaattttgttaaccttttttttatggtttttgagatttttgttcccgtctgggaatcactgttttgattgttgctatcaaagtttgttgcgttgagaagcttttaacaggagaccaagacaatattgctctgcttcgccattgctgctatgttttatattgtgcagtttggttttggtttatgggcttttgaatgttggttccatctgggtatctttttttttgcttctatcatagattgaggcgtgtgattgaatttgacttactacatctgcgtttgattttccctgttgtcttgtgaaagtttattggtttttaggagcatttcaaatgagagcaggatggggcttctttgcttcatagatagataattaattgctgctattctgttttgtacattttggttttgttggttattgaatgtgtattatatctggttgctttatttaaccactgtatgattcacattttgcctgaacacaactaaaggaatagcttctgtaatcagaatgtttccttttctcttatctccctgatagatatttagtgcagagttggaattttaaatttttcttggcgaatttattatgatttattgatcggaagttctctgataggttattgttgtttcctatctgaaataaatatttttcttgcagaaagaattag

SEQ ID NO: 48499 - DNA, 743 bp, Ricinus communis
  Intron number 1 from transcript 30147.m013850 (locus 30147 .t000121) derived from phytozome v7.0 (chr-ID 30147; pos 2 922598 to 2923340)
cgcgtttgggctgggacgtgcctctagtccctaaggtatacgcttttgttcttctaatttcttcatttgttcttaggttttgtagatctggtcaatttcgttagattctgtggtataatagactagttaaggtttgatcgctgtcttctgttcatatattcttttctcttcgagtagatgttaatcttctcttttttttatcgtcccgtttcttgaagtttagcctaaaggttaaagttttattgttttctgttgttttagcttctaggataacagatctggacttttattgctgtatatttgtctgatttttcttaggttttaattaaatactggattctggtttacgattgcaagaatttcttaatttagagtttatatgtatagatctttatgtataattcatacttgaaatgttataagttaacaaatttttgtgtggctagctcaaaagatttttctttcttctgtttaggtaaaagaacctgaataatgctttttattgatttgctaaaacatttatgttacacgcatgcatgtatggtataatccagtatatgtggtgtttctaatatgatcttgtagatttgtatctatgaaatctttttattttatctaatgagtatatggctattagtgaaggggatgatacccaagggtgtcaaggtttcaggtgaaaaaaattttgatttaatttattgagtggtgcataaatgagtggctgtgtgtaggctcaggtagga

SEQ ID NO: 48500 - DNA, 356 bp, Ricinus communis
  Intron number 1 from transcript 29680.m001710 (locus 29680 .t000053) derived from phytozome v7.0 (chr-ID 29680; pos 3 37728 to 338083)
tctacgtctcattagtgctgaacgtggcgaccctggtgagttctttcgcttcattatctctttgtgattttctttttctcttttaactcaaaggttaaaaggattttgctcagctttatacgcacctcgatctatccacctctataatgagtaattgcaggctcggtttgtgtattcaggatttacctcgtgtccgcacatcaaacctgatagatcaggagcaaatctatttttcagatgaactcttgtttcttaatatttagttttgaaccggactgtatttcatttgattttcttctgaatttgaaatctgatcatggctactgacattaatgagatttgtatttgtgcagaag

SEQ ID NO: 48501 - DNA, 679 bp, Ricinus communis
  Intron number 1 from transcript 29729.m002402 (locus 29729 .t000135) derived from phytozome v7.0 (chr-ID 29729; pos 7 37824 to 738502 reverse strand)
caactattcaggtttttccagctcaaaacaggtactctcttttatctacaaacatcacttgaggcttttcatctctataatgtatcttatcagattattcaaactgtttctttttttaaatattttagttgtatcaagtccgtaactaattagctctttcatgtacaaaacaatgcctgcatttatttggacttgcatttgcaagtgggaagtcgtctttcaagtttcaaccaaccctcaaaatcttgctttctctttgtttttgcatgcataaatactattacaagtccgtgcactgtgctcgggcatcaggctgtattgagagacttttgttgaaattttcaaaatatatgattgtcttcattattctaccttaaacacccaaaaagttgggccagctttgagtaatcaccttttaattatttcagagggctagattatttctattattcaggcatcaccatcatcatcgtattctctataactattttgcattcttaatggctaaatttgaatagctattgcctgcggaatggaatttataaatcttgatattaataacctctttatatgtgtccttttctgtatataaattcctgttctggctaatcttcattctttttccaattatatcttttttgctatgaactcctctaacatttctggtaatattacagat

SEQ ID NO: 48502 - DNA, 828 bp, Ricinus communis
  Intron number 1 from transcript 30078.m002313 (locus 30078 .t000106) derived from phytozome v7.0 (chr-ID 30078; pos 6 72289 to 673116)
ccaaagggtgagaaaatatacgttcttatccataattttctgacgttattgttactgattgcggaaaagttcttggaatgatgttataatgaatgctggtttattttatttgattaatttaataatgttattatttgcatgtttatgtttgctattttttaaagtttattcagaagatggtcgtgtacatctaaaagctgtactgatttttcttttataatgttattacgctgttcaacatttcaccaacagctactttcatcaaaagatgatgacttatgcagcatcgaaaaatctggatgcaaagagtaaatgggtacccacatttatcttacaccattaaagaatttagctttggcaagtggtgttatttttccatcacatgttcgacggtttttaagaatggtctatttacagttccttcctgttttagttctaatatgtttctttcagaatagggtcctggtcattgttgaatgaaccaatattcggatattattttaattttttttttttaggtcttaagagagtgcaggcaatattagttacattgcctgtaggtttatattgtagtgttgttatatgattatgatcacatgagcagaggcatgttgcataagcatttatttatgataccactccttgcatcttatattgcatattttcagaattggccttttggtacatggcctgagacacatgattttgctgatgttttgcaaatggcagtatttctgatcattttcttccctcagaacagtattcttatataagttggtgttcttcttttcagataaaaatagacgaaccttttgttccttcattgga

SEQ ID NO: 48503 - DNA, 655 bp, Ricinus communis
  Intron number 2 from transcript 29759.m000276 (locus 29759 .t000001) derived from phytozome v7.0 (chr-ID 29759; pos 2 2345 to 22999 reverse strand)
ccaagatcgaggtaagtaattgtatccaatttgtcaattatatgcagttttttcttttgtcggcatgtgcttatgaattgccattcaatttagctatgcttgtgatgtggttgtgtatatcttctagtgcaaaagatgatgtcaacataaaaaccatttaatttaattactgacatgcttataaggctgcaggctggatatgacttgatttagatgtgcgtgttttttgattatttactgcattctgcatcattcagtttctttctgatcaagttcaagttctttggttaatccagcagtattggaattctacattagtctttggtagaggtagatacccatcaattattttgttcaaggccaaatattttgttagttgtttcaccaaaattataaatgggcacttggggatgacaagcctaattacttccatacttatgttgagcttaagaataaatcatgcatgacacaatttaggttcagtgttctttgtatttaatcttgaatccattaatttattaacggtgtcagatccttttttcttttttgttggatatgctagtagtgttatgtaatggcaataagccatggacatttttgtttgcaatataaatgttttcaactctacattttgatgttgaacaggggttcagaa

SEQ ID NO: 48504 - DNA, 772 bp, Ricinus communis
  Intron number 1 from transcript 29685.m000484 (locus 29685 .t000006) derived from phytozome v7.0 (chr-ID 29685; pos 6 1095 to 61866)
aggacagagaaccttctgattctttgctggaaaaggtatgatctagtcactttttctgttttattgcacaatcaaattatatttctgattgaaggcagattttaaatttctcatgttgggatttgctattctatttgaagtgattggaaaattcttttaatgtaatttgtgttctcaatcagtcctttgattttctttatgattaaaagttccaatgtgtatagaaaaggatttgaaacttaattttgttgaggattttaagatcctaaggatggtggatgatgcagaagcacaagaataaagttcacttggcatatgacagcttattctttgtccgaaaccaagtcacagcttttgtggtggcaattatttcagcatcacatcggttggttgcttgttttatcttattaattcttattttatgtgtgttgattagagaactggagagtttactgaaatggtggtatatcttgttcttctttttgtttttctttcatttttggactctatgtttggattcgtgtatgtatcatgataatgaaaatgaaagcttcatcccataggttttgttgttacatatgtagtttttgatttatatctaagcaacttcaattgacatttccttcttgcgtattatgcttttgactagtttgttttctttggaagcgcatatcttcataaatcaatgctgcagatgctgtgtttgtttctaattttttttgtatgtctggattaaggttgaccctggaagtcctgcttcactgacctggca

SEQ ID NO: 48505 - DNA, 317 bp, Ricinus communis
  Intron number 1 from transcript 29648.m001924 (locus 29648 .t000011) derived from phytozome v7.0 (chr-ID 29648; pos 8 2460 to 82776 reverse strand)
tctcctttgttgctcgtagcccagtaaaatctctctttcgcttctcatatactttctcttccatacttaattcttatatctacttcaactgtttattttgtatttttttaatatcgaaaaggaagattttaacattattgggattccaattatgagtgcagtgttgctggtttttctgtcttttcgaaaaataaataaattttcttttctttttagcttttctgcttatgatgtttagaataaaaattagaaaaagtaacatttcattttgatctctggtaggtacatatagttaccaaggaaattgtgttccttgc

SEQ ID NO: 48506 - DNA, 958 bp, Ricinus communis
  Intron number 2 from transcript 28192.m000249 (locus 28192 .t000007) derived from phytozome v7.0 (chr-ID 28192; pos 6 3147 to 64104)
ttcctaaagtgttctgtgcaggagctgatttgaaggtaatgcattggttttaatttcttaaattgaattttggtaggaattctgactggttttcactacatcaccatttaagtgattttgcttgctgtagatggcttatttaagtgttatgtgatgtagactcgttaaatgtggtctcttggagacatttttgcacaaagtgatcactttagtcagaaaaagtttgcaatagggaggtggaggatgatagagggtaattttctatgtgtatttgtaccttagttaaaacgtttcattgggttgttagcttgttctctttagattacttcagcaagggaattagttagataacatgttctctgtattttagatcagaaggatgcattacgtgtgtgtgtgtgtatatatatatatatatatatatatacatgtttcttttttagtctagctgttttatcaatcctatacttttctgattctatcatcatgactgtgtccccaagctaagcttttaaatgtggtctagtcttgtgagtattcgagtttgctttggtcttcactttagagttataaggttttattccaagttgagatgttagcaattgttgatttcctgtaagtttcacttgattgctttagatttgatgaaactgagggtcaaaatacttatatttttaattgcgactactcaattttgcatccttgtgagctgaaggtgatgcattcaaaagtggggatgaggcaatcctcttcttctagggctacattaattttgagaaatttacttatttttctatgttgaggcttctcataaattcttttctgtcagagcttctatgttatgtttgtaaatcctgatggcatttatactcctccctctgggactgtacttttacacactgatttataatatgcttgacagctctacattttactggattggcaggagcgtaagata

SEQ ID NO: 48507 - DNA, 646 bp, Ricinus communis
  Intron number 2 from transcript 29686.m000891 (locus 29686 .t000038) derived from phytozome v7.0 (chr-ID 29686; pos 3 29584 to 330229 reverse strand)
ttaagagaattgctaagcactgtgaagaggaacaggtcaggctaatgaaatcatggctagactggcatttatttaattttcttctaaatcataatacaaattagctggaaagttagaagatcacaaagtttagtctaaaagtgcactgtcttaagagaaaaacagaataacttaatattcagactagagatgaattatttaggagaaccaacttgatcctgatgataaatctgactcacactctaccagcttttcttttaattgactttgcagtagatatcacccgtttggtgatgctaaatctcacattcaatagcctcataaggctgagaacacattttgagggcattttcctccccgaagaacctttaactagcaactaaggctgttgcaagatcaaggccttcaactctgtacaactctgttgtttattttatccaagagacattttcttttgaattggttaataagtaaagaggtgcatttgtagctgctatagatcatttcactagacttattattggtactcagacaatccaaggaagcttccaacacttaacctctatctgtcacatggctgatgggagtattttgtgcttgaaatatgtcagatcgagttcaatatagaggtgcgagcaggagctgc

SEQ ID NO: 48508 - DNA, 334 bp, Ricinus communis
  Intron number 2 from transcript 29739.m003702 (locus 29739 .t000138) derived from phytozome v7.0 (chr-ID 29739; pos 8 72742 to 873075)
agagggtaattccatctttcaagtgcttcctctctttgatgacattaacttcagcttatatttgatttcttggcacaaaacacgtgcaagaaatcaattccattgaattcttccaaaatcatgtcatctgtgtctggattttcatgttttccaaagtaccttataaaatgctttttttttttttttgaagctaagaaaaactgaattatatgagaattgactgaatagagttcaattgatttgaattcttgcatttagactttccaaacacactgatcatgttttccttcctgttataggttccatttccgttctccacgtttattgatttttg

SEQ ID NO: 48509 - DNA, 583 bp, Ricinus communis
  Intron number 1 from transcript 30055.m001565 (locus 30055 .t000035) derived from phytozome v7.0 (chr-ID 30055; pos 2 41861 to 242443)
cacttactgtttctcagacttgggaaaaactccaggtaatttcactcttttatgtttcaattttatatctttagtgttattcactcttctattttaattcttgtaaaagttgtgtcttttagcttgcaaaggtttgttttttatcagattgaatgttataatttagtatagttcaaagtagctttctggtagaacatgcattcaagacaaaatgcaatgaaaaaagagaatttcttcaagcgataatttaatgattgaaatgtgtagaagaagtaccttgcgattatcagctcaatttgctagctgagtattaaaggtggtaaagatacaaagtacttttggagcatcactcaaaagcctaaaattttggatataagagcttttatgattgaaaagtctagagttggagtcttagagccccatcttactaattaaatatctcaagcacaaggtaaattaggctgtgtttgctcacgcttcaagtacaacggtaattcgcttctaaaattttcactcaaaagccataaatttggcagtgtttttttcagcactctggtcattcacttcacccaaaggcttgggc

SEQ ID NO: 48510 - DNA, 777 bp, Ricinus communis
  Intron number 2 from transcript 30055.m001565 (locus 30055 .t000035) derived from phytozome v7.0 (chr-ID 30055; pos 2 42501 to 243277)
tgttagaagcacaaactgttttattaagcggacaggtagatggatttcattttcaagctttcttgtgttcattgatgatgcttggaaggatttcagattgcatgatggtaattcatttcattttctgatgatgccgtattctctttctgggtagattttcgtgaagcataaacctagtcgcacttattctacaactaattttattggtctattgtacgccgtggttgtttctgagtacttcttttgttgcctatgatattgcattagtatttagatgccataccagtacttaaatgtgctctcagctacaaacttatacagcaggctctgaggtataaatttttgttatcagagtataacaatcctttttgcattatacaaatgtcggaacttcccaatcctcactgacttgtatcatcctatgttgaaaacaacaaattcctttaactgtattttgatgtgaggctttaatgctaagtaacaccaatttaataagaagatgcccgtcaaagtaaacttaatctttcgacgaacaataattttaagattagcgattttgaataggaaggtaattacaattcctaagtatgacttaagtatttcttaacaggaaattaatatgagctaatttcaaatattgtttttctttgtccttttaaatttcaagttacctatagttgttcttctagtttgataatggagcgtgtatgatttgattgatctatgtttaaccaattttcaggaagttggcctgagaggattgacaggcaaaagcca

SEQ ID NO: 48511 - DNA, 759 bp, Ricinus communis
  Intron number 3 from transcript 28102.m000106 (locus 28102 .t000001) derived from phytozome v7.0 (chr-ID 28102; pos 8 231 to 8989)
ggcctccctctactaactgcagtacactaccagaggtctattcttttatcttcctttgtctttactttccctattggagtgcactaacacagtaaatactcctcttttcctacttctattatctataatatcctcaaaaagcccacataacatatgcaattaacctttgatataatcataattaccttatgattaaaattctttcttttttataaattttcttttgttcaagaaagagaaaaggaatattatcagaattgaaagttgaggtagagaagaagaagatatgtctatgcaatgatagaagcaacacaaactttgtatatgttgggaaatgaaaagggtttaaaagctgcattacttcctttctgtcggggctgctgttatgaaacaagctaggtttttttttttttggttttctttttggttttgtgcttattagggattcatggcatggcatggcatttaggctagtcatttgggaacccttttatattttttggattttaggggcacccatgatgctgaaaagacactgctaaccccaagaaacaatttggcttctactttctatgcactaattttacggcatttgtaagcttatataagattattatgaatatataataagttgaaagaatgtccaaaaactttgtgccatgagtaataaataaaatgaggagagggaatttgatgtgttgcatggtcatttattaattttcaggaatcaatttcaatacatagagcagctaaagcggc

SEQ ID NO: 48512 - DNA, 978 bp, Ricinus communis
  Intron number 1 from transcript 30131.m007168 (locus 30131 .t000319) derived from phytozome v7.0 (chr-ID 30131; pos 1 987506 to 1988483 reverse strand)
cagcggtacgagggcggctgtcgccttgtcgccgggtaaaattcccatatttttcctcaaattataaattcttaagttttaaattttatttttattttgtattttgggttttgggttttgtgtataatggtttatttgatttttaaatgtttgataatgtcgttttcagttaatgggttatctttcttttttttttggattggtgtaattatagtcttttttctttttacagattgttgtttaattagtgcgtttttgactttatgaggattaatgggttccatttttcttatatatttatattattgtaattaggaacatttttgtattggacattttgtatataatctgatggattggtggggcctgttttttttttaatattttcttgggaatgaatttggagggcttagttggtgatatatttggttgttggatgaatttagttgaggtttactggagaagtttgcagaaattttgatacttgttcaatggcatttgcctgtactaattttattgaagattctgaatttgatattgatgacttgaaggcgaaggaaacaatttttcttggtatcttaaatcattgcacttgaagaaactaaacttttatttatttgcaatttttgcttacggtaaattctcttctattctcttatgactttaattatcaaagtaaaatatgcagacacatgaagcttgcaggcaattgatgtttatttcttaatcaagagaattatgtgttaaggattccagttatcatttttaacaggtttccttatggttatatacagtgtgttgccctttctgcttttgcagtatgatggagctagttgattggtataggacaaattagtactgtgttcctagctaaactgaatctactgatgtatattgcaaatcgcaatgttatttggtcttgaatcactaattcggcaggttgtattgacaggtgcattccctttaggtatagagatt

SEQ ID NO: 48513 - DNA, 637 bp, Ricinus communis
  Intron number 2 from transcript 30146.m003551 (locus 30146 .t000128) derived from phytozome v7.0 (chr-ID 30146; pos 9 58796 to 959432)
atatcgctaggcagcgtggtatcctagtagtctgggtaatcttccactactttttttcttttttattaatcctcatttgatgcacccagttcctttttcttcttattaactttgtttctttcctgggaacgttagtttcttgagatattttgaattgtcataagaaaagggaggatttttataaagaatacattttggtgattgttgagcccgactgatatttgacttggaaatatatcccaagaaaattataaacaaaagtctgatctgtttatctgtataaatattttagagattaattaaatgggcttgtccaatgttaaaaggttgatttgtcttttgaagcagttttctgaagaaaatagtttgaggaacttcagtaaacaaataggaattagagagatatttgaactaatttcaattatgttaatggtcaaatttgtggaactatgagttagtgctttcttgagattaattttgtttttttgtgatgctctttgtttagttgtttaattttgcagaaagataaacgaaatcatcaaatgttactgatgaattttagttggaaaacttaacttcataatccttgtagaggataaacatgatgggactttgtgtgtttaggttgtccgcgagc

SEQ ID NO: 48514 - DNA, 253 bp, Ricinus communis
  Intron number 2 from transcript 28779.m000142 (locus 28779 .t000006) derived from phytozome v7.0 (chr-ID 28779; pos 5 8928 to 59180 reverse strand)
ctaggtggaatcgtatcagcttaaacgcttctaaggtcagctcacttttatttttatttttttgaaatttgtgttttaaaataaatatggatttttgtcactgtttttgttttaattttgttataggtttttttcttctttcttttttttttttttttttttttaaggatttgattggctttatttgtgtaaaaataattgaaattgtttttgggcaggtgggaaagggattatccaaagacgccaaagcaca

SEQ ID NO: 48515 - DNA, 557 bp, Ricinus communis
  Intron number 2 from transcript 30076.m004669 (locus 30076 .t000233) derived from phytozome v7.0 (chr-ID 30076; pos 1 503858 to 1504414 reverse strand)
agaaaggaaatacaacttgtgaaatttgtctccaggtttgaattttctgcgcagcaaagacaacatgaaattattttctcttttattttaattttcttgggtactttagttagctattttggttttctgggttttcagaaattcagatacttctgtctcttttctctctgtattctttctcttgttcctgttcgaattgggttgagttgtttttcattcagactctgtaaacatcaactttgtgttttcgctttgatttttctttttgggttctatgttgttgtctttatcaaaaagttgtacatctttctccgcgtctgttagatgatttctacggattcctctgctactgcagtttattgtattagagaaaagaaaagattttcaattcagtagaattctttccaggatttttcctcacatgtgggtacttttatttcttacgtgttgccagcagagtgttaatatagacatttggaattcaaagatgtcagatgataataatcataaatgattttcagagagcatgaaattttggaattttgtattgcagagct

SEQ ID NO: 48516 - DNA, 601 bp, Ricinus communis
  Intron number 1 from transcript 29917.m001990 (locus 29917 .t000059) derived from phytozome v7.0 (chr-ID 29917; pos 3 82840 to 383440 reverse strand)
ggtttggttccccggaaaatcacccgtttgttagagttagtgaagtcaattggattgcatttcaattagcataacatttttatgggaattgtttctgaaattgtatccgctaatatgctgtttcatttcttaggcattgtttggaatcaatcatatgcaacaatttgattcaattgaattattgcaaaatcatgccattttggtcatgatttcatttcttttaaaatatcattatttatttttttcttaagaaaattgaattgaattcttgcatttgtacactttccaagcactatgagaatgtggaagttaatgcattatttggaataaaccatttgcaagaattcaattcaattgatttctcacgaaatcaggtccgttttagcatgatttttctttttcttttagattctccttttttctttttccaagttgaaaggattggagaattgactgaatcaaattcatttaagtgaggtctcacatttttagactttccaaacactatgattaagttcatcattgaagaaattgaggtctgatgctaagatggtttttgattgcagatattattgtgcagaactgaggttcagactgaatt

SEQ ID NO: 48517 - DNA, 585 bp, Ricinus communis
  Intron number 2 from transcript 30152.m002394 (locus 30152 .t000015) derived from phytozome v7.0 (chr-ID 30152; pos 4 97390 to 497974)
gggtgttcaagtcaagctcactggtggtagacaaggtaactctcttttttccttgggattaatgtaatggtaaatgagttgttaattaatgaaatatctagctaaacaaacaaacaaacaaaacggaatttgggtcgaggtgtgatatgctctacttcattagaagtttcttttattggcataatatgtaccaaagtatctccatattgttcataatttgaatagagtttatccttttcaactactactagagcagataactaacttgagctgtgggtgaaattaggtgctggacatcccacttatattttagattttgattttggagtttgtcctttcaattgggtgctattactatatttgacataggttaaattttgaattacgagatttaagatgtgggttggagataaaagttaatatacaacagcataatgtctggttaaagtcacctgtgggagacagctgaaaactgtctactactttaggtcatagtgaatataacaaaaaaaagtataatcacagaggtagaactttaaaattatctgtctcttcttggttcagtcacagggactctgaagggat

SEQ ID NO: 48518 - DNA, 486 bp, Ricinus communis
  Intron number 1 from transcript 30190.m011271 (locus 30190 .t000507) derived from phytozome v7.0 (chr-ID 30190; pos 2 954753 to 2955238)
aaggtgagattcaatttccctctgtctcaagccaagcttaatttcctagcaaaagcatgtgtcaatttgttttttttttttttttgatgggttctttgatgggtttttgaaacttgatgtgcgtgtatatatatatatatataaatattcttttcttgaaattgaagcagcagtcttttctgggttttctttaatgctgttaaataatacttcatgttataatatcataatttttctgttcctgaagtgtgatttcttgataagtcacttgctagtcatttccttgaaagaaatgaagcttgtagttttatgcatggcatatgattcttgtatattgagaattttaataggaaatttccttttctattggtccttgtcattagcgaaagctaatatggatttcgtcatggactacacgaactttcttgattctaactttctgtttctgtttcctgttgcagaaagtggtactgaaattggacctac

SEQ ID NO: 48519 - DNA, 684 bp, Ricinus communis
  Intron number 1 from transcript 29669.m000840 (locus 29669 .t000049) derived from phytozome v7.0 (chr-ID 29669; pos 3 06471 to 307154)
ttgtagatccggtgctcgcactagtatctctcgttcgttcttctaatttcatttatccttttttaaatttaaaattttcgatttgtagattatttgttactttagcttatttgttgttttgttttttaaattttagtttaatttattattaagtgtgtattgagtatttgaattaaagccctgtttggaataaatcatgtaactgaattcttgcaaaatcatgtcagttgtggcttgatttcatttcttttattattattatgattatttaagttaagagagttgaccaaatagaattcagttgaatttgattcttacattttaagactttcaaaacgagcggtacaggccttgtttggattaagttacctgtaagaaatagaattcgattacattgaattcctgcaaaatcatgtcactcgtggaatgattccatctctttcaaaatgccttgtttttttattttaaattgaaagaattgaattctagcagtcaatgatctctcctgagatgggaattcattatctttcctgagataagtggaattcaattaaatgaaatttttgttcttgcatcttagatttttaaccacttattctgtttgtttgcttttctatctgcaatctctcaatcatgtcattatatgatttccatgatatttgtacttctctcttttgtaggttt

SEQ ID NO: 48520 - DNA, 339 bp, Ricinus communis
  Intron number 2 from transcript 29669.m000840 (locus 29669 .t000049) derived from phytozome v7.0 (chr-ID 29669; pos 3 07181 to 307519)
actatcaaggtgtgtatgatctgttaagatctgtttctctacatgctctgaatattcacacatttttacacatcaagaagaatatctgtgtcaatctctgctgcctcagcttctttggtatagtataatgttgcagaacatcatgagatatcattattagccaaacattgtggtgctaagattctttgataggttttcttttatctttcttttgctctacagccttacatagaggccattttgtcttattattttataaagttcatagtaatagtgccctttgattgattgacctgttttttaatatattgccccattgatagatcttcttgaccgtgg

SEQ ID NO: 48521 - DNA, 652 bp, Ricinus communis
  Intron number 1 from transcript 27798.m000582 (locus 27798 .t000003) derived from phytozome v7.0 (chr-ID 27798; pos 4 2580 to 43231 reverse strand)
attccttcgatttcatagtaaaaatgcgagctttgaactctttctcgatttcgtgcttcatttgatgcagccttttttttttttttaaattttgttaattttagtgtttaatttgagtgtttagggtttcagttttgttatttcttttttcctgcctggagaaaatgtgagaggaataatggtgaaataagcatttttccggccataagcattttcccttttttttgttttggtccctgtaactccagtttctcagtttgcctagttttattaggttttgtttggaatgacattatgcataggagttgaagtaaattgaattgaattcttgcaacatattttcagttggcattagttgatttctctcaaaatttgtttttttccttttgttttttttttttaggttggaagaattgaattctattaactatatgctttttcaaacatcagaatttactaatagaattcaattgatcgacgcttgtaattctggacttcttcaaacacacttttaattggtcaaatataaagctggatttcaggagttgttggaaaatgtgattccaagatttcattctcttctttttgtttactgtcaactcttaggttaaattgctgtatttcgtatgttggtgcaggtagcaagttatat

SEQ ID NO: 48522 - DNA, 474 bp, Ricinus communis
  Intron number 1 from transcript 30073.m002199 (locus 30073 .t000009) derived from phytozome v7.0 (chr-ID 30073; pos 4 8836 to 49309)
ctcaaggttctttttttgtttacttttattttctccttaaccctttttcttttcctgttcagatctgcattcttttccttaatttctgtatctatactagtaagttgtaaatttcttgtcttttttggattttatatactggggtttttgtaaagttcttgaattgaattctgagttgatttagatttaaagagaactgacctgaaaatgaaaaatttgttgtcttttctttttctttaagattttttgcattgggtttttgtagaggtctcgaactgaattccgggcttgatttggatttatagaaaactgactcataagtggcaaatttaatgtcgtttgtggagttagtgaattgggttttagttaaactgaatttctaggtttgatttggacttgaagatatttttccccttcatttatttgtttatgagtgtgaaattttggtgggcagttcaacagcagcttcaccac

SEQ ID NO: 48523 - DNA, 721 bp, Ricinus communis
  Intron number 1 from transcript 28333.m000587 (locus 28333 .t000033) derived from phytozome v7.0 (chr-ID 28333; pos 3 02315 to 303035 reverse strand)
attctgtttacaagcctgtcaaagattgttccattgtaaggaatttaacactccttttttttttttttctctcttcctttcggaattttttttctaaaatttatgtcaacagcactgagttctccgcatttcattcatttgatgaataatgaatatcataaaagctgcaattttctttcttctccttcttttattctttgtttttttttttggttgcatatgccaattcaatagcatatatctgtcctaactatggccatttcgatctgggattttattattgcaaataaaaagataaaaatattcgtattgaatttttcttaggtagtggtcattgggtgtgatttgattggtttatgcatacttacatgccaaatcttaaaatcataaaataaatggatattgtggaaagtccaatttgagagttattaattttcaggaaatatattgtaagattttctcaaattagtccatcattaatccacatcttaattaaatgttttaattccatagaaacaaataacaaattatgtttgagaaaatgatagaagtacttattttgtttatgtactttcaattttttatagagcttgtctcaagtcatttgacaggcagagggccttgtgttgcaacagaatttcaatttttttcccctcttaagttcattagttacatttttgtttcagcaagcttcaacagccaaatacatagtgcaacaata

SEQ ID NO: 48524 - DNA, 644 bp, Ricinus communis
  Intron number 2 from transcript 30076.m004622 (locus 30076 .t000186) derived from phytozome v7.0 (chr-ID 30076; pos 1 233436 to 1234079)
ttgcaccggttccaatacctacaaccatagaaaatgtaagttgttcctctttcaaatatcaatacctttgttaattgtttgcggaattagcaaaaatgagaaaatacaaattggccttaactgatgttttgcatgtgtctttgatcccatgagcacttgtaggctgtccataactccatttacccactgcagacaaactgtatatccatttcaattaagacttgtaatcaaagataagattcactatattgctggggacactaagccaccaggaatgcggctaatatgattgtgcagaaagtttgaatcttactaactaaaaaactttaataatactctgaagcccaccaggtggaaacctgtcaatgactgacagaagaaacactctttgttaaggcggaaattttccagtctgcaaaggctctagctccgttattaaactctttcctccttgagccagattttaaagcccttggtcatgcgggcatgttgttcttggccttaatttctctcttatttatgaacatcatcacacttctagtttcttgtacttgataattctactgcaactcagcttgcttattgtttttacataactattgatattgcttctttatgctagatctgccccttgtttgaagcac

SEQ ID NO: 48525 - DNA, 330 bp, Ricinus communis
  Intron number 1 from transcript 29794.m003424 (locus 29794 .t000123) derived from phytozome v7.0 (chr-ID 29794; pos 8 14765 to 815094)
aaagggtggattcagagtcctgcctttcatcgtaggtatatacatatccctgcaaaaaaggaggaaaagaaagaaggccagcatgcatatgctggtgatccttcatatgtcttccgactgttctcttttttctttttgattgaacttgggttgggtttgaaatttgaattcgcaacaaaacttggaaatgactctagtaatactgcagttccagttgctcttaatcctaacaaagctgaggtcattcgtttattttatttattttggtttcatggttaactcataatttttatttatttttttcaatttatttatgttcttacagtaaat

SEQ ID NO: 48526 - DNA, 653 bp, Ricinus communis
  Intron number 1 from transcript 30068.m002629 (locus 30068 .t000119) derived from phytozome v7.0 (chr-ID 30068; pos 7 31706 to 732358 reverse strand)
ctctgtccattgccaacacctggaattacgccaaggttctttctttctctctttttctcattttgatgttgccgtctactctatttacttttctttaatgtttctgatacgcatattttatcgaattcttcttaataaacctcgtttttcacttatgacttgtctgcacactttcttttcatattagttgcctccgacctactgctcttccttgatctgatctgaatttatagtgccttcgatgttgctacttactaaagctaagcttctctgctatccctgtatattcaaaccaattgttctttttctttgtttacctctgctcctattaccttacttgcattttggcttccactgtttttaaaactaagtaaatgccttattaatcaatttcaaatttctatgatctatagggtttttttttttaatccgttaaagataactttgtgtcttgtaaaaataacgcatagaaactgtttctcgggtacgtctgtgcttatctacagagggctgccattttctataagaaacagacaagcaaaagacactaattaagaaattgatatttttgctgcttctatttacatctgatctttttgttgtttactttaataacaggaggctaatattagtggattgaatagcaaaaccca

SEQ ID NO: 48527 - DNA, 417 bp, Ricinus communis
  Intron number 3 from transcript 29977.m000258 (locus 29977 .t000010) derived from phytozome v7.0 (chr-ID 29977; pos 6 9420 to 69836)
cagggagtttatctggtcgcagttttgagcatacagtaagcttttctaagctatctcgccgtagttttaggcaaatcccatgtgcaacaagtgtcttttctgctgatgttgcttaaacctaacatattttttgtttctcgttatttgatttgaagagttctaatgcatcttctttgattaaagaaacaaaaatctgtagtaaattctttaatctaggatgagaaaaccctatatattgccaactcgtttccttgatttatgattgatctgcttttttcctacccaccatttgtatttgctgttctttattatcttcgtaagtagaaattcttttatcagaatgttgcagtaatggtgaaaatgatacatgctttatgtacttgctaaaatgaagtactgtttttgcagctgaaaaag

SEQ ID NO: 48528 - DNA, 613 bp, Ricinus communis
  Intron number 1 from transcript 29929.m004555 (locus 29929 .t000058) derived from phytozome v7.0 (chr-ID 29929; pos 3 28065 to 328677)
agctcttccaactaacggtaaataaagattgtcctttctgttgttgttttcacatcaactctagtgcttcaatatcagaaatttgttgaaatttgtgcgtttggtttttaagtactttgagcaaaaatttgtgctcaattatttttttcgttatgtcttgttttcttttcttttccattttttttttcttttttgggcataagagctggtaaaagtttaatttctaagtgcagatttgaggttggaatcactcatatactgagccaaaaataaaactgagtggctcagttgaaaagcatatactcaactccgttagaaattatgcaactttatatacctagtttgtttgtgtttttacctggcttttatttgatgcgttattattttaaaattagttgagattttaagttgggggtagacgtattcacaatatctgttctggtgggagtgtgctgtaaggctcttaattaagtggatctgtggctcttcttggagtccattggcgtatgctgatgtttaacgttgttactgcaattttttagagttcttactattgttctgagctaatatgtttgtttaacgttgttattgtgttgttttttggttttagaaa

SEQ ID NO: 48529 - DNA, 535 bp, Ricinus communis
  Intron number 1 from transcript 30174.m009029 (locus 30174 .t000426) derived from phytozome v7.0 (chr-ID 30174; pos 1 642136 to 1642670)
gcaattttctggtcactgtcaactagtcaacaagggtatatgtaaatatagtatataacttctcttatctatttatacagctccttgtttcttctactctatgtctgggtgtctttagttcatgaataatatggttgctagaagattgtgggtttcttttctctctactgtagaaactgtgcaggacatcactagagtttgatggaaccagcagttgggctgattattgctaagaaagcaaattcctagtttcatgtagaaataagtgagcattttagcatcttattttgagtatgatatattcagtacttcgtttaaagatatgcttagtgggatttaaagtttaaactagaatttctctgtacattagtaatcaggtcgcgacttgcaggagaatttctcccttcaaaggattttgatggggttgtggaagtcttagttagcaccttatgcctagataattctagtgtaaagccttttccgttttcttgactttaatgtgattgataatttgcaagggttctggagtgggttg

SEQ ID NO: 48530 - DNA, 591 bp, Ricinus communis
  Intron number 1 from transcript 29864.m001446 (locus 29864 .t000022) derived from phytozome v7.0 (chr-ID 29864; pos 3 20785 to 321375 reverse strand)
aagggaaggctgcattgcccttgaagagagacagagtatgatttttgatgttctggttactgtttttgtgaagtttttatttttagagttttctgaattgtgggttttgattgttttgtttgagaattcttttattggtcatttatgtgtttcgattgttttgtttgggaatccttttattggtcatttctgtgtttagaatgattatttgatgagggatttgatatcaaattagaaggatatttaatattagtgccttagaaatgatgcttctattgatgccattgtcttttgtgcttcgttgatttcacttggttttaagtttgaagtcttccttttggaattttggtgtaagaaactatttattggagtaggtctagtctaaggtttcatttcttttagtgagaggtggaggatgcgggaaaatgtttgttgatcagtttcagttataatagtcaaacacaaactgtcttctccatttccccttttccgtttttgaagattatcacacagtttcaagcattcaattttgtaccctttttgttgaaaatggtaggcaaggtccaagagattcttggaaattcaaaagtt

SEQ ID NO: 48531 - DNA, 965 bp, Ricinus communis
  Intron number 1 from transcript 30152.m002412 (locus 30152 .t000033) derived from phytozome v7.0 (chr-ID 30152; pos 1 263171 to 1264135)
gtgctgttgaaaaagctgaggtacttgttggataaaatgctctgcttttgctttttaaactaaattcttgacaaaattagattatcctaatttggtgaattttatttaaaaatttgccactttacctctgaagtttgatgcttttcccttgttttcttttttgctggaaatattcaattgtcttaattttattggttttgaagcccaattagaagagaagctgtaattgtaagctctagcgttgttcgtttaaattacattttatttataaatttgttcaacaagtgataagttttaggatgttgatttatagttaatctgaaaaattggataccatattgtgtttaattcaatgttaacctaagcaagttaagttcattgtttatttttcaaggtgatgaacatttgatgctagtcatttcaatgtcaaattggagcagctttaaactccagttgtgaaataagctagtggaatatttatcattatatttcaagttcccacatagattggtgtttgacaactaatcttttgagattatatcataaaatcaagtggccatattattttccttatctcttcttccaagcaattcatgccttttgcaggtcaatcacatgacattcctatgcttgttttaatgttgttgatgcagtaacattttctttttggtctttggcatggtttgagatattattagtttcgggaattaggatgtcttcaataaggcttaatctatttctgttggtaatgttgctagatactgtgctggggtctatccatggacaacaagataggttgaactgttaaacaaacaatttgtatttcaatgaaaggattgaggatggaagaaatgtttgttcacttggctgtctgcatttctttgcatgtctcaattcataatcttgctttacaggtcagctgtataactggcaatgactttcttaatttgttttctttgtaggta

SEQ ID NO: 48532 - DNA, 595 bp, Ricinus communis
  Intron number 2 from transcript 29827.m002553 (locus 29827 .t000026) derived from phytozome v7.0 (chr-ID 29827; pos 1 54811 to 155405)
agccattttcattggagctgcagtttgtgttataggtaaagtccaatttcatgcaactgcagttttcatggaaaataagtgtatttgtgtagcaaaacactaaaagtagccctaattcacaaaattcagcagcggtcaatacagaaatttgataattttaaatcttatttgatgtgaaagacatttaagcatgtcaatcgaccataattttgttatggtgattagctttcataattgcatttttgatactagtcttaaatctcaaattgtgctttcatgtgcttagattctcttctcagggcacatccaaatgcctaacaacaattacatcttccattattgcattataaaaatctaaaagagtttctgtctgtctggttatgttatgagatatacttgtcatggtatactcttctttctaatttttatttttacaagttttagtttcttttagtacttttctttttgttttactttcttgggttttgtttttcaagatcaatgcacataactcagagttttttccccttaatatgcatctttcattttcaatttgacaggggctgcagctacatacatcagattcttcccttat

SEQ ID NO: 48533 - DNA, 554 bp, Ricinus communis
  Intron number 3 from transcript 29908.m006174 (locus 29908 .t000225) derived from phytozome v7.0 (chr-ID 29908; pos 3 73880 to 374433 reverse strand)
agggtaaggtaagaatgcacttctttttcccaattgtaaattgtaagtatatggggttcttgctactgaagaacttcaatagaatctattaacttatctagatttattattctttccataatatggtttcgttttttactttgatagttataatggtacacttatatgttcatttgagtattcttaatgacagaaatgccaaccattttgactgtttccgaaacatgtaattgttactctttgtattcttttgaattatattgctgtgtgcatattatggatacttgttgcaatataacctaaaacagttttgattaggctggtattaatgttactttacaagggaacggaaattataatggaatgcataatgttgctttttttttttttttttttttttttttttctcattccttttttatgctttccatttagttaagtttgttactgaattgttatagttattgttgatatttggataatcaacttttcaaatttaagacttgtatacacctgttaatttagcctgctgcaggtacctatagattcttgtt

SEQ ID NO: 48534 - DNA, 757 bp, Ricinus communis
  Intron number 1 from transcript 30169.m006324 (locus 30169 .t000101) derived from phytozome v7.0 (chr-ID 30169; pos 4 98385 to 499141)
ttcctagtggctgggaaaaaagactagacttgaaggtaccttttgattttcttgtctatccatgtctttttatttgtttactgagaaaatttttaatcaaaggaagtttcttggttgattcatttatgtacgatatcgtattgcatgtgttgagatttggaagatttgaaatttctttcctttatttctattgatatttgttcgttatagtatattaattgtattttaatttggtttgaaattcgtcccctctgttttgcttaatcctctgtttgtttcctatggaaacttgaagagaaaaaggaaatgaaaagagttggtttttgttgttatctgattggaatttggaataaagaaataggctttcttcattgtttactttctttcttttttcaatttatttgcttttcttttgtaccagccaaactgtttctttttttaatttctagaaattagttatctgaaacaaaagttcttcaagttgtataattcacattaattaagagaaattaatgactggaggattggtacatcccttttgttaaattctgttctttaagcatatctatataaattcattactcccactaattattacctttgaattctcttcccataacctgagtactctgttattactttattgttgcacaatacaaattccaaacttttgtaactttttctttttctgcatcaatgttatgggctaatttatatatttgtaatacttgcagtcagggaaggtttatttgcagag

SEQ ID NO: 48535 - DNA, 844 bp, Ricinus communis
  Intron number 1 from transcript 29648.m001936 (locus 29648 .t000023) derived from phytozome v7.0 (chr-ID 29648; pos 1 62419 to 163262)
agtggtggaagaatagatttgtggagaaagaggagagctatgagagtggtggatttagtagtaatagtggaagctctaaaagcagtggctgtagcagcagtagaagtagcagcaggaacagcagtggcaggtatgtattcatgtccaaaaggattgtaacatttcttgtttcagttatatgttttcttaagtgattgaggtcttaaaaatgttgtcttaatccataattaaagatccataattgatatgatcttagcttggtggatttatccatttaaattggatatcaagttcttggcaaagaagaagggactgggaactgttctgttgcaaaacagagcaaggaacggggaatcttggagttctttgttttcttttctctctttttctttaaacagaaaaattcttttttctttattaactgcaacaatgaaaattcttcaaacttgtagaatacaaaaagaaaactttcttttactaccatgtttcatctttgtttcatttagtaatggaatttttcttttcggtagatatgattttcatttaaaacttccttgtaccctctaatgcctttttgctactaaggaacaaaggtagtagcaagaagaaaaatgaagttccaagtattttccatgtattgtcctttccctctcttggcattcaagttcctcttctggagataccttcaatagattagtgaagtactttaaacataaaaagtagagaaaatattcatagaaagaaaaagatatatggtcagtcgcatgtggtttggtgatttttgacacgaactcttgattgtaatgcaggcaagtaagaggtggttgctggtctttcattttca

SEQ ID NO: 48536 - DNA, 598 bp, Ricinus communis
  Intron number 2 from transcript 28153.m000278 (locus 28153 .t000007) derived from phytozome v7.0 (chr-ID 28153; pos 3 1766 to 32363 reverse strand)
aggttcgaagaaagtgggggagagagagacgattggtacgctcagtgtcgttaattatgattgtattcttgatgcggttgtttgctttttagtgcagaacagtttgatggaataatagattgcaacacgtgtagaaaataaatttgagaacgacattgctgaagaagatttactgtatttatgattcggggaagaaaagagaagtgccactaattcaattagggtttttattttgggaattagtatgttgagatggaaaaagaaataggaataacggttttctgtatttatattttcttaggctcttaaaaatattttaaattgcctgttacatccaagtttaggggcaaatttgcccaactctggttctgtctctggctcaattactggctaaatcccaggtatgcttttcaaaacccacataatttcttcacatttacataataaccttaaaaaacccatatattattctctcgtaaacccaaaattcaccacccaaatccaacccttttcgaatctgaaagttgaatggcgaaaagacccaaaattagactttgctatagagaaagataagcgttacaaactttgttcacgcgtc

SEQ ID NO: 48537 - DNA, 549 bp, Ricinus communis
  Intron number 2 from transcript 30131.m006861 (locus 30131 .t000012) derived from phytozome v7.0 (chr-ID 30131; pos 8 86535 to 887083 reverse strand)
atttctatattcgtcgtttgtatctccgtattcaggttttttttactaaattagctatttttaatttttttttctagttcttttagatgatattgctgttgctgtttctgtttctgattcattgaaataattggatttgtttcatgattttataccattcagaatgccctgccttcttcttcttcttcttcttatttttaataattagaattgaattctatcaactacgcatggctatttcacacatgagaattcacgaactagaattcaattgaattggatttttgcaatttttagattttccaaacactgaaagtcgtgctctgtggtgttcaagatattgtctagcgagtattttattctttataattttgtaatcagaacacttgaaatgctggaataagatcaaacttttaatggccataatgacttctgcacgttaatatgaaagaaggagacttcctatgatttggcaaattgatttcttttttctccctaatgttccccttcctaggactgtttcgggagaccaatagctagtgctcctga

SEQ ID NO: 48538 - DNA, 749 bp, Ricinus communis
  Intron number 1 from transcript 29844.m003255 (locus 29844 .t000101) derived from phytozome v7.0 (chr-ID 29844; pos 6 58159 to 658907 reverse strand)
atcttggtgtttcaggttagatatcttttcttacttttatattactattacctctgtttcttgaaagttttgaccaggaaagttttagaagatatgttgtcgtataatctttgttatttttagtactaattgtggaaatagaactgaaaatagaagaaacttgtagcactattgcttcttagtccagtaatgagactgagaagagaaaacacagaagtgttttggattattttttgtgttagtgatgtctttggcgttcccgacaaagtcaaactgaaaaaggactttgtaataccacaaagaaaaaaaaaaaaaaggactctgtaatgctaaaatttggattcctgaaacttgataaaaaggaaaagaattctctactttcattgttttctctagagtaggccagatttttatcaccaagtgaaagttaatctgacagacaagaaaattaattttataaaagattatgtctgtaggaattcaacgaacatgcaatccagggagaaaaacttcataggaaccattaatggaaacgctttccttctcttccacttctgacatcttctcacttcatctttctgtctagctactttacaaacaaagcagcatgcataatggaaatggtttaaattttttaactattcaagtttatttactttgattctttcagataaatgaaaagaggagatgttttacaattgatttaagattacaccttgtcttggttatttttaggtggagttacttca

SEQ ID NO: 48539 - DNA, 416 bp, Ricinus communis
  Intron number 1 from transcript 29676.m001676 (locus 29676 .t000067) derived from phytozome v7.0 (chr-ID 29676; pos 3 98827 to 399242)
ggtgaatctaaattcttatagtccagagttcaaaggtatgaaacttccatcatattctgtctacctgtgttttttgtactatagcaagaagcttgtctcatttatacaccgagtatcttaaattacaaaaaaaaagaaaagaatactcttctctcttctctcttctctgttttagtattttcgatttctactctttgtttcatctatttcttctaaatatgcccgttacatgctctagatgtgtcaagaatgtccaatattaattattgaacaatttcatttcatatttgattataatcttcattgattttgcttcccttttgccgctctcttctctaaaataaaagatggttagaagttccttatttcctctctgactagttagaagggtagcagctccatctgcaaattcaagc

SEQ ID NO: 48540 - DNA, 598 bp, Ricinus communis
  Intron number 3 from transcript 29676.m001676 (locus 29676 .t000067) derived from phytozome v7.0 (chr-ID 29676; pos 3 99518 to 400115)
ccgagaagcaacctcagcaaatgtacttaagagagcccgaactttcaaatccaagaatccattttttgtgttccccgtgaaaccatcacatctcttctctggtgatggattggtaatctcaattgaaaccttcaaacaagaaaacgagaaaaaataaaatctttatttgactagtgggtgttagtttattatgtgcagagtttaccagcaagcttttccaagaaatatatgaatacgagtgaaagtcgccttatcctctgtgattcgtctatgaaaagttggtgtgtcaattacaatcaggtgaaaaaagcaagtaaaatacgcttgggaaagggctgggcagcttttgcacgagacaactgtttggtaagtggcgatgtatgtgtctttgaattggtcgatgagcctacattcagaacttctattttcagagtcgccgaagatggatgctgttcaggtggtgagtttgtgcatcagtttttctaatttcctttttttgttgcaaaaatattcactctgattttcttacaaggataaaatggattggtttgttttgtccatggtaattatcatacaggtaaagataagcaattgagcc

SEQ ID NO: 48541 - DNA, 400 bp, Ricinus communis
  Intron number 2 from transcript 29729.m002315 (locus 29729 .t000048) derived from phytozome v7.0 (chr-ID 29729; pos 2 65994 to 266393 reverse strand)
actcaaacgaccttttcaattttagcaacacaaatgttaaaacaatatctctctaggattttgtctctactctaaactcttattaaatattaatctcctccattacccacctaatccaaaaatcaacctttctaattcctttttaaactcaaaacaacctcacctttcctcctcttgccacgtctcccctcctcccatcgcgtcatctaaaattccaaaaagacccaatcagactcgaccatatacaatcctaacccgcctccatctccacgtctatataaacccctcctctccgcacaagacctccaccacccgtcgcttctggtttcttattcttttctctcttcctctttttttcttctaagtgtaaagttaaggcagccgattcgaggctttttca

SEQ ID NO: 48542 - DNA, 890 bp, Ricinus communis
  Intron number 3 from transcript 27749.m000338 (locus 27749 .t000010) derived from phytozome v7.0 (chr-ID 27749; pos 6 3517 to 64406 reverse strand)
attgaagtaccggaggagggaaaagaaagacttaggtgctgaactgtggggtggagttaagtagcaagtgggaaggggatagttaaaagtaaatgaggaaaggagaatgttgttgtgtaagtattaacaattggtgtggtgggtgagtggctgttataattttgtgaggaagtaggtaatattcttgttacggatgggtggtgttggaaatagtttccatgttctgtaagagtgatgattttaggtctctcaaggttcaagctctgtttcatgaatgtgcctgccatttacctgtctgaaaatatatacactgaacataactgggatttgtgacatttattttatctaaccaattctatgtactccatcctctgtgttgaattagctctattcttcaactattgcaccaccactagatgggcttagtcaaaagcaaactatcataattttcaggataatagcttctgaggctctttcataatttaggctttggctaaaactctcctcttataagagtttgacaatgaatttgcaacatttatcatatgagtgttggattttaagatgatcatttatattgggtctattatctacatgtgcagtactagtttagcatagaactactcacattctcatggccaaaaattaaagtcctgatttggaaacttgatgtttggcctaaagagaatttcaatacctgaatctggcaataggctcgattagcctgttcatcagttactaattttccattcctaaatttttgaaacctcctaaaagtttgacctctttgttactaaatgtctgtactatttgcatttgtatgtgcattgaccactaaattttcatcttttgtagttctggaaagtgtcaaataattcactggagacgag

SEQ ID NO: 48543 - DNA, 1034 bp, Ricinus communis
  Intron number 1 from transcript 29625.m000707 (locus 29625 .t000034) derived from phytozome v7.0 (chr-ID 29625; pos 1 85550 to 186583 reverse strand)
agcagtctccttcctcttgctcttttgattgcaaggtttcgtttctcacttgttattttcctagttttattttttcactgtatgcatgagtaaaagtgagaaaagaactcgatcaaatgataattagactgaatgaagttacttttctttttagaatcacacttggttgtgtaatgctatagaatttagatcatattttcttttttcttttttgtcttacaataataataagcatctatttatcaagtagtaagggaatatgctttaatttataaagggggtgtatgattgcatattatccatttgtaaccgctagagttctgatttgtgtagaattttttaaatgctagaggatgtactaggtttattttgtttcttgtattagaactttctaactaaatgaagcgataagctaataaatttacagatgctcgatcaataggagttccagagtttatatttctttgtttttctgtatgctttctgtgatattgtattggcattgtttggaattcatgcaaatcatgtaatttgtggaactactcattttgggaacaattcattttgttttcaaaatgctttttttattttattttatttttatacttgttttttgtatgtaagttgaaagaattgaattctagcaactatggcatttccaaatatgaaaattgactgaatggaattaaattgaattgaaatcttgcacttttagactttccaaaagctaagacaaacattcatcttgtttcttttcaaatataaaatagatgctgtctgttttaattaactagccagtttctctacagtctatccgttaaatcttgatatcaatgcttggacttttgttccttgctatttttcttttctttcattcagtttgaggcctggttttcaatattcactggcaatcaatgtgaaaatggaataatatgtgcgattgaagttggttggttggttttaatttgtaatttataatgagatgatgtgattatgcaggcagttttggaagaaacacacactagaacagttcg

SEQ ID NO: 48544 - DNA, 346 bp, Ricinus communis
  Intron number 1 from transcript 28707.m000042 (locus 28707 .t000001) derived from phytozome v7.0 (chr-ID 28707; pos 7 330 to 7675 reverse strand)
tgcagagcttttgcttgagggtgttggtagaggttagttatctagtccaacaaatattttgataattttcttacacatttctaagcaatatcaacaattgtaaaaaggtgttacacatggtttgatctgtgaaatcataatcttctgatgctccttttgtttctcttttacgaactaatgtgataaagaagttatcattcttgcataaactaaatcttttagtacatcatgttacattgtctcagcatttttctgacttttattgatttatgttggttatgaactatgagtacatatttcttctttgacaggctgggcttctaggagatacttttcagatattggg

SEQ ID NO: 48545 - DNA, 918 bp, Ricinus communis
  Intron number 1 from transcript 29898.m000064 (locus 29898 .t000002) derived from phytozome v7.0 (chr-ID 29898; pos 1 3646 to 14563)
ggaggagagcgattttagtgatctcgaggaggaaggtaatattttctttttgttcttagtttttatttttttgaattttttccatgcgtgtttgcttctttgattctatggttttgatgttactaaatgtatgttcttctattgagattttttttattcatttaatttttagggttttgagggaaatgcgtgttatataataattggattactgtaaaatgtgttttcttttgtgcccatcttttttattgtttctaaaaaataatggtggtgatcttttttttttttctcataacttgcaaggttagagctttgaggtcgtttaggttagagctctaaggttgtttgctttattttattgttctctgtttgtcggaaatggagttcgtttagagctttaaaagactggtagagttaaatgtgtttgtgatgcttttaggaatgcacgttgttttctgagtcaaattttaatgtcttttggggaggtgcttttgttgagcgttaaataagtttctttatgtatatgtttgttagagaaaaattaaaataatctgagcatacgtaattacctcaaacagaatcattctttttctacaatatactttgctgaatcctaaaataaaatctcttaattctgattatgcttagtgctcatgcctattctcttttgggaaatttctggttaaaactggggttaggttagtctttgattgaggataactttcaatttctgttttcattcttccttcctttgattcatcatccttctataagatggccacctcttatctgatattagacaatctagacactatgttgcattactgtttgtcttatcaacaaaacttgcttttgctgacaatggccttgcaattgtgtgaagaacctgacatcgagctgaaactcaagaaagaacca

SEQ ID NO: 48546 - DNA, 724 bp, Ricinus communis
  Intron number 1 from transcript 29835.m000654 (locus 29835 .t000030) derived from phytozome v7.0 (chr-ID 29835; pos 2 86218 to 286941)
acacagccaaagaacctcacgttcaaagcaggtatttaattttactattataatggtctaaacccatttgtcttttcatgagaactttgaattcttttgttttttttttaccctgaggatgttgtgagattttcagcgagtgtcatggttttgtcttcggttttaatttaatgggtatgagtttattgatgttgattagctctgaaaaaacactgcagcgttcaactgttatggagtctataatgggacctacacttgcgaattttggttaaaagaacttgtggtactcaaggctcatagctttaatgaatgcatgtaatttatgtagcaaacaaagtgattaaaaatacttctctgagattgctttttttttttttttttttttaatatgctgtggaagtgaaatgccatttgcaaatactttgatgaactatagcatgatcttgaagctgcaaatatgcttctttagtgcattcctatgcttcaacaaaagagatccttaaattggtttgaaactgattctaatgtagttgaaaacattgctcttagttgctgcctctatccttttaaattggataatgcagtacgttcaaaagataaatagaatatacttctggttatgcattatatggataatatgcgagacaagttgtgacggtatcggtttcataatgctgattttgcctctttttaattttaatgctcatattctctgttgcagtac

SEQ ID NO: 48547 - DNA, 601 bp, Ricinus communis
  Intron number 2 from transcript 28492.m000478 (locus 28492 .t000016) derived from phytozome v7.0 (chr-ID 28492; pos 1 08450 to 109050 reverse strand)
tgcaaacgggagaagaggttgctgttaagctggtatgtgatatgttttctattaaaatgattcatggattctgatttgaattttagaggaatgataatttgttaataagtaatcttttggctctttgcatgtttatgatatgatgggcagggtttgaagattctgcttttcatttattttttggttataatcacatttatccataattccttccttttgtggtggtgctccatcttttctttaaaagaaacgaacaaaataaaaaataattatgtttcattctaaggtttttgtgagtaattatgtaagtatcaaagtgcttaggctgtccactcttaatttctgttaatgagcattgatgaatttaaagccatgtctttttcttttgtccagaaagaagcatgtttacatttaagaatttcatggaatatgtgcagctcatcttctttgtggtgtttatatgtatatatatatacacacacacacacagagagggagagagcttgcatatttttatcccatgctcctgtatgcaaattcctgaccttttctgttccaaatctcaggaatctgtgaagactaagcacccacagcttcacta

SEQ ID NO: 48548 - DNA, 946 bp, Ricinus communis
  Intron number 2 from transcript 29942.m000747 (locus 29942 .t000020) derived from phytozome v7.0 (chr-ID 29942; pos 2 97934 to 298879 reverse strand)
gaaggtttgttgctttttagctttgctgttgcgatatggaaagttgtttgatagtttggttgattgataatacagtttatatagtggcagtataactgagccgttttggttacttttcgaaatgtgatggaatgctaaacatttttgttaggaagttcttaatcatcgattttagactgtttaagggctacaaagatgtcaaacatactgaggtactatctaggagtaaattttagtgttgagtttcttgggtcaccttttcatggtctgcgcttgcctacttagaggaacgctactttattagtaagatatttgagatgttaaacgtacataataaaaacaacttcttattaaatacacattgttaaagatgccactatttaagatacgatatcagggaaacctaatagaaattggaaatctaagatgtgttactaaagcaaccactgtttcagttgcttagagcctttactgggtggtcgatctgcttttagattttacagttggaacatgttacattcaagttcttagagagttgttgttttgtaatccttcagcattttccttatttgcttctgagctttaagtagcttttaagtggacttgcaatattaagagtgaaagaataagccgccaactctcatttgttgtttgcaagtcaccacctaaatgcttcttacctacttaatggccacaaacaacttagtcatttgatatttgtttttcttagatttaaccttaagttagcaaaagattacatctcatgtcttttaccagtattaacttcggttattgtttccccatattatcatagtttgcaaatattggttgatgtcagaagaaggttaaaaggcctttgcctgtaatacttgtatataaatgttataaggacttgatttagaccgactctgatgtgatcatgttgcagacaaagaaaagggtgtct

SEQ ID NO: 48549 - DNA, 729 bp, Ricinus communis
  Intron number 1 from transcript 29646.m001062 (locus 29646 .t000010) derived from phytozome v7.0 (chr-ID 29646; pos 6 0143 to 60871)
gtaccacttatcgcaaggtttgttttctgtttttttttttttttttttattgttaattttgatggatggttgtcttttattatttgtttgatttgtttcatagatctatatgcatagtttacagatcttggtcttttgtattcatttgggatttgtgttttgatttcttgtttctaggttcaattcatttcagtttatttgatgcttgatctgtgggatttctaccctttgatctagaagatcttgagacagataattggttctttcatgaattcttagtccttatttatttgcttattgaatccaagatcttatattcttttgcttggttaagtagagatatgatctctaactgtttcttgttttcctgattttgactgttgattatatctctgtttttagtattttttgagtttgtttttatcgttgatcttgtttatgttgctgggacttttcctatcaattataccattcattctctttctttcttattactatgatctgtaacaaacaactactttcttaacattcatggataatcgttagcattgtgtagaatgtgattgaaatgaattgaggtgaaagtacaagtgtttggaaatttatggtcatacagctccattattgtataacatatttgtagtgcaatttacctccaacaatgactaaaaactcttgtaatgttctctcacagggttgcaagccacccccaacagagttaacaggcac

SEQ ID NO: 48550 - DNA, 657 bp, Ricinus communis
  Intron number 1 from transcript 29912.m005382 (locus 29912 .t000108) derived from phytozome v7.0 (chr-ID 29912; pos 5 51392 to 552048)
ttgcttctgcaagggaaaagggtgctgttgaagaggtgaaattctcacttatcattcttttcttgaatttgctttctgggttttgttgggtttttggattttgttagtgaagtagggattaaggatattgaatgatttgtgttagttaagcttgtgattgctcctattttttagttcttcgataatgcgtagaagaaaaggtagagaaatagtgatcgagttgttgtagggcctgtttcctaattgactacttctaataagtaaaataacttgtctatttgattgattatagagaatttgatagattgtactcttatgtttggatggctatcattctttaaattatgatgaacataaagttattttgtcttgtaaaactgttctggcacacatgcattcctgaaactattagctgctaatggatagaacttgtttattaaacttgcttggtagcacaagcaggctaacttctttaccttttggtcggtcacatgtatctctttgcttttattaatttgccttcgagccattgtcatagcatgatcttttttgttacgtgtctcacttcttactcaaaattgtgcttattttcaagtctaattgtcacttccaattttcaatcgttcctttaattttataggtattgaagaacgtaga

SEQ ID NO: 48551 - DNA, 488 bp, Ricinus communis
  Intron number 4 from transcript 29634.m002148 (locus 29634 .t000094) derived from phytozome v7.0 (chr-ID 29634; pos 5 71418 to 571905 reverse strand)
gtttgaggtcatgtcattagtttacctttttctcatagttctcattgagattattttagttcattattttctctctttctttctctctctctctgtttactcttaaatacataatttgatcattgctaaatttctcaatttcaatttgtacggggcactgtagtaatcattgtagcaaggcaattattgaatctcgcactatcttctctctaatctattgagtaatttgattatgtaatgcttattatgttttaaatacaacttaaggctaaagctatttcatagccttttggaatctttttatattttcaaaagaggggcagatttttctgtcaagtcagttctgttatatatcatctaagcctgtagcaagttttttttttgcttaataattcggctagtgtttctgtaggtgtatttaattcaagtctagagaaagttttactcatgttgccttattgtttctctgctgttgaatttacagacag

SEQ ID NO: 48552 - DNA, 965 bp, Ricinus communis
  Intron number 1 from transcript 29637.m000732 (locus 29637 .t000010) derived from phytozome v7.0 (chr-ID 29637; pos 8 5051 to 86015 reverse strand)
ctcacattattcgcatcaaacacgttctttcccaggtatactccttttatatgtctacacatatatgtctaaatttaatcaagtgaccctttcatatagtttcacctacaaatttgggaaattttgatgttacttacatatgggctcttgtcattttgtcatctaatccataataacatatcaagatttctttttttcttttttcttttttctaaaaagaaaaggttttttattttagaaaaaagaaaattcaattagccaagttggttagtctaacgtttagagaatagtactggtaggagaatgtgtgttggtgcagagaatgagagctctgtgggattttgctaagaggagtattttaacaacgccactgactgtaaagtttctagcttttttatgcattgatgaaaatttgaggagtcgagtataccctgattggtgaatgtggatacaatatggaaaatttgacgttattttaggcatattggagaatttagcatccaagaattattataggtgataagtggggattagttattaacagagatgtagatgtcaagtgttgataaccatggagtttcttaaaggaataaggataaagagtcagtatcctttgtacaactttaaattttttgatggtgcgtctcaatccttttacatgtttgtggacacccacatacaaattgcttattcttgtccctgttgttggcaatgattaatgttcataaaactaacaggactgcagtttagctaaggcattcgttaattcacttatgtgcttataaatttagttcaccatgttttgttctggttcttgctaatgtcagtgacacattctgtattgagcaatatggttgctgcacctgtatgccattgatggcctatctaatctgctaactggaaacaaacgaaatctgtcttgttttataggctccttttgctgggctgtccatcgcattgcacga

SEQ ID NO: 48553 - DNA, 1004 bp, Ricinus communis
  Intron number 2 from transcript 29912.m005489 (locus 29912 .t000215) derived from phytozome v7.0 (chr-ID 29912; pos 1 407111 to 1408114)
ttacagcagagtttctgagattgaatatatagcaggtattctatatgctttctatctctgtttcgataatttatgttcattagctgtagtgtgtgaatatatcgaagaaagatgcttggcaaaagttgggttgctttctcaaatttatgtgtgtaatttagtgaaaatgatatctacttgcacttgcacaggttagcacctaaagcctttttttcttctttgaaatatgtgattttccagcccagaataatcgattttccaacagagtttctgccattttcatctctattacgattgaataaaagaaaatcctgttgcgttaagttttttgcagttgaacttttctgcgtactgagatgcttcaaattatatattctttatgttgaaaaggacatattatttttgtcaattaccaacttagatttgtattctttcccatgtttattgcaaagagaaggttacagtcttgaataaccattatttcattattattggcagcggtgaaaatattaattaattattagtagtgtgttgataatagtaccaacagtagaaaacttttataactataatgattaaatggttagtagtgatgtttcctgaattatagcagcagtgagaaatggtggcaccatgcgggattgtggtagctaagaagagttgggaattaaagagatttattggcaatggtggtgccgatgatgccaatggaagaacaatttaataaactgaaaatcaaacttccaaaacatatataatgttatacaagacataccgaagaataagattaaaatattttttgcatatgtaatgtgaaaaaaccaaaaccgtataatagttggaacatatataggcacaggcacttgatgctaaaccaaaatgattagcttctttgtaatctccaccctcttactctaaaatccaattccttgttcttgttctttcaatttatatatgtgcacagtcatagaataccatttcgttgcagggggaagaaagcaaca

SEQ ID NO: 48554 - DNA, 414 bp, Ricinus communis
  Intron number 1 from transcript 30170.m013718 (locus 30170 .t000130) derived from phytozome v7.0 (chr-ID 30170; pos 4 402229 to 4402642)
gaggtagtttttctttattcatttctgcacttccttttcccgccccttctatatggttctaatcatttagtgacaaaatagcccaccagtttctacttttaaaaccattaaaatgctaattcttgagtttacttgtggccaaagtgatgttaattcttgattgcaagacgctttattatagttttggaagcttatttatcttctaagactgcaactgccctttactcaaagtagcaagtctgtatttggattctagctgttaccattagtctcctcaaataaaaactccaaaaccttgcttggaatcaccctctaaaatttgattatttatttctatatagtgtttctttttgttccggcgtagcatctaatgcatgcaatggcattttgcagacagtggaattcaaggtggag

SEQ ID NO: 48555 - DNA, 611 bp, Ricinus communis
  Intron number 1 from transcript 29118.m000103 (locus 29118 .t000005) derived from phytozome v7.0 (chr-ID 29118; pos 2 9521 to 30131 reverse strand)
ctgaaaggagagtctctgaggtgcactatttctatggagaactagaatactccacatgatattcaatcagtttactggcaaccattcattagagatttcatttcctaaatttaagagaaatttaagcaaattgcagaatgagttaatttgggaggagagagaaaaattaggaataaaagttacatgtgcttaggtgtttgccacttcatgaaattaagtttatgtgccgattcataatttgagtcatagcgcgtgttttacaactcattttttatttttctccaggtgtttatgcgttagtaattgtcgagttgaggtgtatagatcaaactcaagatataggaggctttctgactaaatgttacaagtacaagtgtttgcatatgtattaagccgtatttccagtgcttgttaattattcttctgggtcattgacgccaacaccagcaacatgagcatcgaaccattcaagcggtaatgctcactttataccctcttaattcaacatagtttctccaaatcttgatttttattttccatttatcttatatatttaacaattggaggaaaaaacacaaccagactagtgaagcttgcggctcgagcttttt

SEQ ID NO: 48556 - DNA, 885 bp, Ricinus communis
  Intron number 4 from transcript 30064.m000504 (locus 30064 .t000026) derived from phytozome v7.0 (chr-ID 30064; pos 1 88674 to 189558 reverse strand)
actttggtattgatacatcagtttattctaaaagggtgattaaacctagttttatatttaagttacttcttttaactgagtttggttcttctgaaggtggaaatgctggaaagaaaaaagcctatgttagtgatgcatggtttatccttttaacgatgaacttcattattttatttttaaatgagaaagatttatgatgcaaaagataatgaaattaattttcttttttggagttgaagctgtttatcaaaaaacttggtttcattcacttcagtattatggtcatgctctttcttcatcagtgaggttttttttttcattttcttatttttttgtttataaattatgtatgttttgttaatatactaaatgtatactagatatatacttaatgtatactaaagactgtttttttctaacaacatattgatgtggttttctattatttgaagaagaagcagaacattattcgtggtgattttcaaggtgtactacaacatatactattttttatcaacaaatacatggtctataatctgatatcttgaaaagaaaaatgatttatctgttatttcaggtccatattatgttgcgaagattattcgaggtaaatttgtcttatgttatactctttgggttgatgttgatcatgcttttatttcctatcatgttggcaatgagtgacattaaattttaggtcgtttgagtttcatagattgttgtatccatgtttataactctttgaggtaaaaaaagaaagataattttgcatttctgttgcctcattttcttgttgctgttggtttctataatgagcaaaagaatatcaattttaactctggtccttatgcaaataagagtttgacttattcatttcgtgtgaaa

SEQ ID NO: 48557 - DNA, 405 bp, Ricinus communis
  Intron number 1 from transcript 29983.m003102 (locus 29983 .t000001) derived from phytozome v7.0 (chr-ID 29983; pos 4 457 to 4861 reverse strand)
caattttactcaaggtacattaaataactacaatttatatatctctttcttttttttttctaatttaaataaggatacatgtcattcagtttataataattaaaaaaattatacgaatttcaatttataaaattagacaaatttaatagttttgatatgttaactttttatgaataaagaatttgaaagtgaccttttactttaattactaaataaatatcatttatcttaaataaagaaaaattcatagatcaaatcggctaaacgagaactctactcttaaaattatcaatgagttgtggctttatattattgtagtacttcttttcaattagtgggctgtaagtttaaactccaattaacatactttgatttttatcattgatggaaagtagtggattatcc

SEQ ID NO: 48558 - DNA, 798 bp, Ricinus communis
  Intron number 1 from transcript 29848.m004559 (locus 29848 .t000115) derived from phytozome v7.0 (chr-ID 29848; pos 6 84821 to 685618 reverse strand)
ccaatatcgtttgttctttcaagttcatcttttttttttttttttggtattgtttcattgacttgttttgagttcttaaacatgggtttttggtttcttgctttgttgtcaatgtttcgctgtttatttggttaataagctaatttagctttagattttcatatgttggtttagttaataataagattttgttcttcatccggcaattatgtaattagcggtgctaatgaatatgaaatctgttgctaattaatgatttaattgaaatctcttgctattactaattacttcctttttgttctttaaaatgcatgtatgtttttgtgtaatctctgttccatttctttcttttgctagatgggcccttaaaatatgcctttactttaaaaagatttcattcctcattattgtgatttttacatttacgcttttgaatctttactgtctttctctagctttctatattcagtttacttgttttgtaattattgaaattgttggatccactgtgttgattgctcgtgcactgttgttgttgttttttctttttttgctttatggaattagattttcctttggtccttgttcgtaaagattttaataaattcctctcatcttaaatttccaatatctattgagcatgcctgattattggattttcttttcttaattatcatgtgtgaacatcgattttgaatggttcaattgataatggtgcttgtggaatttgacaagttggtgttattcaatatggattgtgcagttaccacgacaagtcaggcaatatcagcattgaag

SEQ ID NO: 48559 - DNA, 822 bp, Ricinus communis
  Intron number 1 from transcript 29706.m001295 (locus 29706 .t000025) derived from phytozome v7.0 (chr-ID 29706; pos 2 22381 to 223202)
agctcagtgatcccattgtatacaagcttgttcgggtaaaagttctcaaatccctatatccttgttaatgtttctgatcaatgtcgtattaagttggtatggaggacactttgactttgtttcaggcgtcaaatgattaaattgaggtctctgaagacattaattttgatttaaacttataaactggaatgagacattggatagagcactcatttattttatttgcaatcaaggggacttcattgtactgcttacgaatctgaggctttgtgtgtaatggaaagtagtgaagcaagatttattatgttattatccattctgcttagatacagcgataagtgtgttcttttaatgctttttctgtggtagtttaatacagttcaatgcaagtttacaattatgatcactagattggacaatttggtgctctttatctatcctcttgaaggatcttttttgaacctcctacaagtcttttagcgagttaaagactctgctttgtatatcctatatctgatttcagatttatctggaacttctttgagttatggaagattataaaattcaatttgacccttgttatttttgctagtattagggcagtgttttggtttgagaaacaatgtctgcattttgttgcacctgtcttatcttgaagcaaatagaagcagaacttaaattacttttttatttctcaagtttatctgatcatatgcattaattcggaagcctcctagttttatttactcctatctcttgatacttagtaggctatggagttgtgatgtactgatattctgttgaattcacaggtggaaggag

SEQ ID NO: 48560 - DNA, 616 bp, Ricinus communis
  Intron number 2 from transcript 30190.m010836 (locus 30190 .t000072) derived from phytozome v7.0 (chr-ID 30190; pos 3 652611 to 3653226)
aggtagtcttgctttggtttaattttattgtggtatacttcagttgttttagttgcaaggctgaataggaataatatattcaatgtcgaacgaaattgctagttcgttctcctgtgttcttagttataatacctttataattttacaagtagagctgagttggagatggaatctcataaaagagtacttgggttttcactgactttcatttgctcttgcaatattcactttttttacaaccagttattttaattcaaatcgtgagccaaactttctcaatttcttttttaggaattctagtcaagtaaaatcagggatggattttattcaagaaaaaatccaattgcagcataggatctttaactaattagttacttgggcatacttcaaattccatgtactttttgtttttgggatttcaatgatatttaatatgccttattgatgtatcaatcttagtcatgctttagtgctgtcattatcagcccagtgggtttgttttagtcaatgtttattgctgtatcttcttatggattgtatttatcttattatatttaaatttattcattcataattggtgattttcatggttgctacatgcaaagattgtggaatt

SEQ ID NO: 48561 - DNA, 698 bp, Ricinus communis
  Intron number 3 from transcript 29801.m003070 (locus 29801 .t000015) derived from phytozome v7.0 (chr-ID 29801; pos 1 12738 to 113435 reverse strand)
ttcccttcttagtgttgaagcatctattaaccgaggtttcaattgatgcattcctcaaagatgtagtaacgattgaggatcaaattccctttttgtgattcaacataatgcggaagagtatgatcaaatcgactatttcttttacatgagcatcgagctttgtgaaagaatttctccagtaaagttggaagggcattatgaaagagggtattttagatccgattttcatctattggatcttctctaccatttaattcggtttggaatttcgatagactcacctgttgcatttgcaggtatgtcaagtcgtaatatctggagtgacctgtggaatatcattaagactctaaatgttggtgtcttgtttatccctgtgaaaatcatagatttagttataaaagtctttcaaatccttggggtttctatctctttacaagcagtagaagagaagggtttgattcctacagtattgcaattgtccagtaggatgattcattcgggtagccaagtgcgaagcggataactgctgaaagcatctaagtagtaagcccaccccaagatgaatgctctcgtattctgacttccccagaaccttcggtagcacagcaggcccttggaaagttttagtatatgtcttctccacgatctgagggaaattaaaagaaattatcaaagactaagttctgcagcaccagatt

SEQ ID NO: 48562 - DNA, 616 bp, Ricinus communis
  Intron number 1 from transcript 28076.m000423 (locus 28076 .t000014) derived from phytozome v7.0 (chr-ID 28076; pos 1 30651 to 131266 reverse strand)
ctgttaaggaaactcagatacttattcgctcagaggtaataagaatttgtgttatttattcttttttgtgcatatttacttcactctttactttctcctgttattttgttgtttcaaaatcacttagaaactgcttgcatctcttagaacaaagtaatgtaggtccaattcccatacacatacctggaacccatatttgattcatgtacaatgatatctgataaccatgtatttcttgcacaggaggcttacatatgagttaataaatgatgcttgcaatagcgtatgtaaaaagtggtcatgtctcttttttttggcacatttgatccttctataatgcatggcatgtctgctcttgagctgtgatattagtcattccttctttttcctcatgggctggttctaatgttgaaacttcttattcttggttaattaatattatcaggttttacttgctgaagaaggtcatatttatgcataattgcatcaaatgttttaccttccagatgtctatgcatgcatatattcttggactctgactacttatgtgtatcgctgattggttggccattatctatcataacatgaaaatcattttactgagttcttttgtagg

SEQ ID NO: 48563 - DNA, 525 bp, Ricinus communis
  Intron number 3 from transcript 30170.m014080 (locus 30170 .t000492) derived from phytozome v7.0 (chr-ID 30170; pos 2 692128 to 2692652)
tctgatcattctgttttttctcgtggtaattctccattcttgttgtgctgttgtttcataaaattgttcaaaaagaaaaatggttctggcaagtcctttgtgctccatttacttagctatgaatatgattgtataggttcagtttcgaatgacctatatatagtccaaaggatggacaaacaagaacggaagcatattctattttatttgattcatcttgagtcttaatttgactgtcaccataacaaacactcttctcggttttgtttttctcttaaagcaattttagggcattaaatgcacgatacgtacctccttgctacagtgtgacctttttatctcgtgtgataaacatcgtctacagtactttatttggtagaacaaggaccggaacgtccattatataatgcattcattagatagcttagttgatttctccgtgtaaagtacattagtctggttattcattctgctcttctcttcatcttaggtgctcttaaagttgggtcctgcttatctgttgaa

SEQ ID NO: 48564 - DNA, 842 bp, Ricinus communis
  Intron number 4 from transcript 30005.m001271 (locus 30005 .t000037) derived from phytozome v7.0 (chr-ID 30005; pos 2 36678 to 237519 reverse strand)
tggtcaagacatcattatcggaaaccttgacactggtaggcagtctctttctcgtaattttgatttgatttatggaagttaattgtaaagtcaactttattcttaagagccactcaaccgggtttatgtagattggatctacattcttatcatttgaatattgccttaaacattcaacaaaaatataatatttaaacttttaacacttttcaatgataactaatgttaaaagagatgccataaatcacgatgagcattgaccagctgccaacaatcaatagaatgttgagcgccatagtctaaatgaaataattattagttggattcagttttattttttataaattaaattaattatatagtgacatataatattatttattatgcattatatttatattatttggtttttagacatgagtagttaattctaataaataattcaatcaatataaatataacagtgataaataattcaacatattattatgtaattgatttggtctacatataacataataaaccgaatctaattaagaatttctccaaaccaaattaattgcatagacttttaggagtagatgccaggattcaaatccctccaaactcaaaaaagaaaaaaagaagaaaagggtcactaggatgtgaggaccattggtaaagggaaaagaagattgaaataaaagcagaagtgatgcaagaagaatcaaaattgcaagctgtaaataatatgcattttgaacacttgggtatctttttattttctctgaatgttaggaggtttgacctttttcctgataaaatgataataggcgtctggccagaatcgaaaagctttagcg

SEQ ID NO: 48565 - DNA, 965 bp, Ricinus communis
  Intron number 2 from transcript 29739.m003663 (locus 29739 .t000099) derived from phytozome v7.0 (chr-ID 29739; pos 6 19054 to 620018 reverse strand)
ctgcagacggctctccttcaatttctgatcttgaggtacttattattgctgcatttttgttctacaattttttaatttttttttaactaggtttgatcatatgtagcaacatagagatgttgttatggaacttgtctaatcaagttaagtgaaccatttgctcttaagatcgtttgcacttgtaaattgaagctgctctattcgcatttgatgattgtgatttctgccatttgcttgcttctattttctagtattattacaaaagaaacgtacaagtttcatattatgtcctggttaaattaaacccttaattgaaaatataaatgagtataccatactatcattcaaccttcgatcttcttattgtcttttggataagaatccgggaaatgtttagtatcagttacatgatgatgcttgtaggccatgaaattagattagttgcactgcatgttgcatcaagttgagcaactgaagatttgtgatttttacttgtaaagaatcaaagtgaaactaagattgactaaattctgaattcgtactttgtggatcttgcatcattcttgactgccatggctttcgcaaccactttgttctctctggctttgctgaaacttgcaaatgctagtgatgaaattttacataaacaaagagaatcctagtcgttcataatatggccatccttgaacaggcccaagtgctctaaacataaattttaacagattgaatgggcgaaaaggttaacttttttccttcacctcttatgcgatctagagtttaacagattagctgctatgatgttactgagctgctccaccaccaacccactctttgtttttttttttttttttgtttaaatacttgggtctactttttttttttttttcatttcaaaagtaaaacagtaaatctgaattgcattgtcatcaggatactaaacccctggataaaagaagtggacaatt

SEQ ID NO: 48566 - DNA, 715 bp, Ricinus communis
  Intron number 2 from transcript 30174.m008703 (locus 30174 .t000100) derived from phytozome v7.0 (chr-ID 30174; pos 2 294985 to 2295699 reverse strand)
caccaaaagccgttttcccctccgttagtctcaatctcactcttctgtctcttgattgacctacattgtcaattttccttgcaattgttttttcttttggcacttgattaaccgatgattttaattttctaggtagttaaacctaactagggtttgcaagcttgaacttttactcactccaataatataacatgaattctttttatgcttatctctttactgctaaggttctaaagtttagaaggtagaattgcatgctaatgtcattaaaaaaaaaagactttctttttcttatttttctttcgattgagccattagttacgtgtgaattgaactaattcccatttttaccgtttgatatgtttggcaaaaatgagggtaatgtaaggtaaggtaaggttttataaagtaaatggaggtaaggttttaggaggtaagagtttttaattttactttctttgggaggtatggatggtaaatgaaggtttagaagataatataaagttttttaaattatagcctccccaacccaccgacttggtgggttgaaatttgaagaattagaggttccaaaactttataatccaaagaggcagtaaatgtaactggaatctcttttgttggattttgagttttataattaacaggagagtaattgaacttttgttttggtttatatgttatgtcttcacaggttgttggatcaattgatcaa

SEQ ID NO: 48567 - DNA, 775 bp, Ricinus communis
  Intron number 1 from transcript 28976.m000158 (locus 28976 .t000005) derived from phytozome v7.0 (chr-ID 28976; pos 3 4414 to 35188 reverse strand)
ctagaagaattggtatgtcaaacattcatgtatttaatagaccaagttttcttttgtttgtcaaaatattttttcagtgagttttgttgcacctttaatttgatgatcggaactgggatgaactatgagccagcatagttttcagcatttcgagaaacgaatgattctgaaactttgttttaatttttattctatagtctaaatatttgttaaatggatttgctctccatcgtattgatcagaattgaaactttatgattcgtctgtcttcaactaaactagagatgtaggcttaatgtaatgcacaaaagcttctttcagattgtcaaaataaaaaaaaaaaaaaaaaagaagaaaattcctttcaaatatatgtcagatctgttctacactttatgtacattttagtattttacgagaaaatttataatattagcttaaaaaagatgaattttttttttgtttagatatgtctctgccaatatatcaaaccgataaaaaatcgatgcataattattttaaataattgagtatgtatcaatcattcaattctaaaatataaaatatttatatatacgtgtcatttttctattcattgcggtgtatacatccggtataggtaagaattacccaaaaacataattataaacagttttcttatcattgtatgatcaatcagtttattttgtgaaaattggggggaaaagaagactatgatagtaattgtttgcatgaatataaagtggtaaaacttttgcatctaattttgcaggca

SEQ ID NO: 48568 - DNA, 757 bp, Ricinus communis
  Intron number 1 from transcript 29912.m005511 (locus 29912 .t000237) derived from phytozome v7.0 (chr-ID 29912; pos 1 529905 to 1530661 reverse strand)
ctctctttactattggcaactgcccaactgaaaaggtactgcccagataatttctttggcaactcccttttgtttctcttatagtagtaaattttaagtgaacatgaatattagcttccaaaggtcgaaacttttatcttatttctgttcttagtcattgatgctactctgtaatgtgtttgaaaatctgacatttgagaggtttgagtttggtctctcaattaatcggtataataaccagtttctgcgctgatatccgcatgaaaagattaatagtatctcgctttctgtaactgataaaatgggtgtaaagttagacattttgcatgacaatttacagcactatgggccaaaggtggatgttttggtatttcagatgcaatttattttattctccatgcttaaggtatggaagcgtggtaaattttttgcctgggtatggcttccttgaagttgagagtaatagaagtacaataaaatgatcaagagcatgcatgtatttacttcttctttttcttttttacttcaattttctattagtgtccaaaagaaacataaactaacacataaaggaacactgttgctccaaattgaatattaaggtgctagagaataaatctttatattcctgtaaatttaatgagcaaattgcaaaagtgcaactctatgcgcctatgcccctgatcatattgggtgaaatactgcttgaactgaatatttgtaattctagaattattaacttttcatttgctgctaa

SEQ ID NO: 48569 - DNA, 307 bp, Ricinus communis
  Intron number 2 from transcript 27446.m000488 (locus 27446 .t000018) derived from phytozome v7.0 (chr-ID 27446; pos 1 04323 to 104629 reverse strand)
aacttgtagaagatattggtgctaataagattagttgtattttttttattattttagtattttagtattttattatatttttaatttttattttattttataaaaatgatatgaaatgtgaaattagttttggatcttcttttgatgatattgatccataagctttaaaaaaaactcatgctaatcctatgaaggctgttaagataagctcattctaggtgtgtttattttttttattattttaagttgatttatggttgattttttgttttatttttttctattacttttttgcaggttgctgatt

SEQ ID NO: 48570 - DNA, 171 bp, Ricinus communis
  Intron number 3 from transcript 29827.m002651 (locus 29827 .t000124) derived from phytozome v7.0 (chr-ID 29827; pos 6 92188 to 692358 reverse strand)
gtttggttgaaggtatggtgttattatatgttctttttttaactgtttcttttggatcaaatgcattttcttcgcctgcataatgtttgcatgattatggttatttcgagtagtaaatggatttgattttcttggaacagaatccactcccatatcttgctcgttatcctg

SEQ ID NO: 48571 - DNA, 818 bp, Ricinus communis
  Intron number 3 from transcript 28320.m001109 (locus 28320 .t000036) derived from phytozome v7.0 (chr-ID 28320; pos 2 09043 to 209860 reverse strand)
tcattaatcgtgaacgagagttgcaggtaattttgcttaagctttccaattacttcttgctaattatgcattagaatgttttccattgctttatgtttataagctgtatgattaagcgagaatgataatcagtactaattcaaagaagattgaataatttgttgaattactatattaattgcggttgaaggtatcacctgtcaagttactaaatgaggaaatatatccaatctattactgaaggatctagtgaacttttctggaacattactataactgtatttcaaaagtctatataacaattcaacttaatcgaaactctatgtagtcagctatcctgtttggaaagctcatagttgttagaattttatttcaacctaaagaaaaattgcattctgaaaggaataaaatcatatcaaaatgactaatttgcaagaatttcattcaaatgaattcttgcccttgatttagtccaacaaagctacatgaattcacttgctttaagaaatctttgggctggtttttagtttccctcaggaggaactatcttatgtgatccaagcaatcagtaagttattgtttctaacattatattcccatgcacaatgtgcagtcacattcaggaactttaaaaaattgctaagcacatatgtgtagaatctcctttttgcattgaaattctttatctggagtgagctacaattagttcattttatattatatcttttttatactgtctcagtgtagatcattttgtggttgcttaccatttattgttgtcaggctatcaaatacctctcagctgcaggatttggtgc

SEQ ID NO: 48572 - DNA, 486 bp, Ricinus communis
  Intron number 1 from transcript 28842.m000911 (locus 28842 .t000006) derived from phytozome v7.0 (chr-ID 28842; pos 5 1423 to 51908 reverse strand)
agtatgctgttgagcccattgatcaacaggaaatttttgatatccttttcccaatttcttattcctttgctgaatttaaaattattaacattaatatgtctgtcttaaatttctttttcttcataagtgttccttaaaagatctatttatttatttctatcaaagcatctctattgcttaagtttcagcactcatgagctggtaaacggtcttttaaagcctgtagaaagattcaattttaggatttttgaatgtaagtacttaaatcctagatatatgagtctaatgtgatataagtttttgggtctatcaatgtgtgggtattattatgtatggggagaatctagttccaaatattgcagaaagagattaaggagttctgtagaaaactatgcaagtcagtcaatctttgtggaatacatattttcttaacattcttaaatcatattagagacataaaagaccctgagcatccttactctttgg

SEQ ID NO: 48573 - DNA, 336 bp, Ricinus communis
  Intron number 2 from transcript 30170.m013922 (locus 30170 .t000334) derived from phytozome v7.0 (chr-ID 30170; pos 1 772889 to 1773224)
ctctacctcgccttcctccatatctacctgcatctgtaagtgattcataatcccttcatttctacctcagattttcacttctttgctagtccataaacaaatacgaaaatcctttaggaagtaacagtaatttgtcaatcaaagctgaattagaagaagggaagaatcaaaagaagagacgtgaggagagaaacagagcaaatgacccaccaatttcagctgatatttctaatggtcaacatgaagattggccgattttgcttgaattgaaattttgattctggatttttagtttttgtagacgctagagcttctcgcagaagtggctgttctgga

SEQ ID NO: 48574 - DNA, 563 bp, Ricinus communis
  Intron number 1 from transcript 29826.m000735 (locus 29826 .t000008) derived from phytozome v7.0 (chr-ID 29826; pos 1 68904 to 169466)
ttcactccccaggtctgtttttcttttatttttcttttcagatatagtttttaggtctttgatatggatttactttaccatgcaattaattgatgcttatgttgtttaacatcatttacattgttgcttttagaaagggttgaaaattatacgaagaatcttgatttgcttgcttatttggtttttgaggatttgtagaggtgatggtgtgtctgtgaattattgtgtttgatgggctacacgtttcattggctaatttgtgtagaaatcatggcagagaaaattgtttaacctactttgaatgttggttgaaagcttctatctttggtattggattgctgagtggatatgatttgtggctactaaaacatttgatagctctttcgatgtgccatgaaatgctgagatttgatttctctgtacaataagaaaaactgttgatgttaatttcaacaggatcagatcttgttatatgcatataggattcagtcttgagagccattgttctttgtgattcattgcttcctttttccaggttcctgtggttccgctacaaagacctg

SEQ ID NO: 48575 - DNA, 487 bp, Ricinus communis
  Intron number 1 from transcript 27810.m000643 (locus 27810 .t000014) derived from phytozome v7.0 (chr-ID 27810; pos 1 44738 to 145224 reverse strand)
tagctcaacacttcgacatcgttgctcgttgccaggtattttcattttgttgcttttccccacactatgtaatcttttaaccaaatcgccaatacaaaaaaacaggtgctttttttaataatcaaatgagtttcttcttttctaggaccaaagtaaaaggtatattttttctaagacccaaatttttattttttaaaggaagttatgtgtcagagatgctagctttcagcgtaattgaattgtggaatagctaatgtctaggtatgctaggagacaaaaacggtaagcttttcttttgaagaccagatgagaaagaatgatttgtgaatgaagttatgggagtaaagatgctactttttaacgaatttgtgtggtaaaaagatgctaagttttagcataattgaattgtttgaatatgtgatacttgaaaaactgaaatctattgggttatatgattttttgttgattgcaaaacagggtggagcta

SEQ ID NO: 48576 - DNA, 447 bp, Ricinus communis
  Intron number 1 from transcript 29801.m003175 (locus 29801 .t000120) derived from phytozome v7.0 (chr-ID 29801; pos 6 58623 to 659069)
atacaagcactactatccctgtcacttcaaagaaggtatctttttccttagaaatgcttatagcaaaaggggtgatagcttggacacttatatttgatgtcatatttggtataagattatttgtaatgtttctttgtaatgtcacctccaagagagtttcttttccttaaaaacttatatctcatttctttggaatgcttataacaaaaagaaaaatgatagctttgacacctatatttgatgtaataattgttataagagaatccaaacttctcttctgaatattgggttttcgattttctggggatttaagattttttgtaatgttccgtaaattttaaatttttttagcattttttttgtaataatttttaaccaaggcttgattttattgtttgtgtggtctggccaggttctagttccaattgggtttggcactgaagaaat

SEQ ID NO: 48577 - DNA, 501 bp, Ricinus communis
  Intron number 2 from transcript 29801.m003175 (locus 29801 .t000120) derived from phytozome v7.0 (chr-ID 29801; pos 6 59210 to 659710)
aagtttttgatcttgtggctttgccggttagttgttctcctctcatatatcatggttattgaatttgctgtcgtaatttaaaatttcgagttttgtggaaataccagtgataattgatgccaattggctgtagcagttcaaacgcatatagaaaataacaagaagttgggaactttagttcaaggtgagtcaaggggggtaaaactttggctgttaaactccacaggcagactatgtgctccacatagcttttctggaaaaaaggaggaagaatggtttcttttgtgcatttagaaatataatgagaagttttcttttaaggcaatcggagtttgtcttaccaatatctttattggatgcagggatgtttcttttggtgttgtataaaacgtaatcctgctgactaacggttcttttgagactgtaatgatagtttctgtagtttgatttcgccataccatttctgtaaagctaaagttagtgcatgctctttagggagga

SEQ ID NO: 48578 - DNA, 572 bp, Ricinus communis
  Intron number 2 from transcript 29801.m003110 (locus 29801 .t000055) derived from phytozome v7.0 (chr-ID 29801; pos 3 29436 to 330007)
tgccaagagaaatcaacataaccggtatgcagttttagtcagctttgacagttcagaggagaatccagtaccactgaaccaaagatagttgtattttttagattattctgtggcatttgaaatcatttctattttctagcatttgctgctactatgatatgggttctttaaatcactttattgacaatttgacatagtagtatatagtccaactggaatgtttatgtgcattatatgttgttgattttgggtaaaaagtaaagaaaataacaaattgaaagggaatggatatagaaatttgagcgcaatcatgtaatttaagaagtaaattgaatgttctgctgttgaacatggaagagcaactagatagagatttaagatgaaaatgtaatggccaattcactataattcagattattatgccataagtccgactttgtttagttggattctgacttctaataattgggctcccttacaattcaaaactacaagacattctagaactgttggctcctttcttcgtttctctatgaacttatcaatgaaattattatcttacagctgaagtt

SEQ ID NO: 48579 - DNA, 944 bp, Ricinus communis
  Intron number 1 from transcript 29685.m000501 (locus 29685 .t000023) derived from phytozome v7.0 (chr-ID 29685; pos 2 01146 to 202089)
gaggccttttaaggatttgcgactacaagtaagttttttttattaccccattaaaagataacaaaggtaaagagacttgggttggtagcgcatgcccttttggcttttggtgctagcacgaccctacttgacctgtgcagagtccagaaatgatttttcttttaactacatcaaagagtttatcactgggatatttgtattgcttgaagggtcctttgctcagtgtccaagaccaagaacattatttatgaggcagtattttgttcagttgctagatgttgagaagtcccttttgttctcattttagggtcccaaattgttcctttttcatgactattattaattttttcatatgatggacgtgagatgcatgtgaatattaaatgccatatggagcactgtggtgtggaggctcgtggctttgaataatatggatcaagatcaagaaggctctttttggtggggtgtgcctaggactggatgtgtgaatatattagttcaagacactagtacttctagggaagcataaattatgcctgttttatatatgcagcaactggagcagatgaggctaacttgcatagttcacctttcttatttgaagaaacttgcaaaaataatcttcatagattctatttgaaacttctgttatataagattagtaagatatttcagtaggtaatttacatttacgccttattaaatatgtgaatatttattttaaaaagaatatttgttcctaattgaccaagtacttaatacagcatgcataggaggctaagagtaactgtttgtacttagataaatattgatctcattgattacttacatggctcatttgcttcccttatattagcttcaaatatatacatgttattacatttttatctcatagtctccttcattcaggggttgccttaaagcatttcatccccagtgtgtag

SEQ ID NO: 48580 - DNA, 858 bp, Ricinus communis
  Intron number 3 from transcript 29765.m000749 (locus 29765 .t000031) derived from phytozome v7.0 (chr-ID 29765; pos 2 94999 to 295856 reverse strand)
actctcctgtggatcctgttgctcagggaatacctgtaagtgttaattgataatttatgtattattaataacgtgttcagtacctgcattacttgtggcatattcaggttgatagtgtaatatgtatttcatgcatactttgtaggcataccgttaaagaaagcatcaggaacttgttatcatactctcttaggttactttgtgtgcgtattgattgtttgatttcgttgttgcatggggtaatttgtggagcatttgctgatatcatgttttgtggttcatttttggctttaaactggtaagaataagcaacagaaacacttaatttactgatgctttagatttgggtattcaactagtctgctacctaaatgtagacctgcttaacacatatacaagctattctatagataggataaaaagaaagaatggtacttgctgtctcctacctattgacttttccatttctcacaaatttggataagagactgtacaaaagattgcattctgtgacttgtgggtggatttaccctttgtttttgttccacgatctaacaggctgtttgtgtaccttatcttctctctgctctttgcccctacgctaaattacatggaaagcaagaggagttttagacaaatgacagatcatattgtctatctttcctctatggtgccaaatttcatgaagtaattattttctgatgtattgtgaatactttttctgtcattcatatcggattggactaatggcagctttatcactaataacatgaactgatctctctcttctctctccctctcatgttggctggctgggggtgcggcaagcaggattatttcactgtcatagatacacca

SEQ ID NO: 48581 - DNA, 518 bp, Ricinus communis
  Intron number 1 from transcript 33363.m000015 (locus 33363 .t000001) derived from phytozome v7.0 (chr-ID 33363; pos 2 25 to 742 reverse strand)
gcattcctttggtttcattcactgggagttcaaaggtatctcaaaattgtgcttcattagaaattacttttccgttcgtcctgtttgtaagagaatcttttgtgtttggccaacttatttatgcaacttgatttatatttatttatccatgaagttactgtgcaaatatgcaatgcactatcttgtttttttggcaatctatatgtactttcttggcatcatcaacaagtaaacctaatgtattctcactttatacttgtgttattattgcagttcaaatttatgaactataacttagaaatacttttctctgtttgcttaaaagtctgcttcttctgaatgtgcttagctgtttgttgtttgaaccttatttttcttcattctagatgcataattatggatacaatatgtgcagtcaacaaagtaacaagatttgatctgtcgatgaaaaggtaggagtttttattatcttatggcatatatttctcaaagttttgcatatgctataggtgggtctg

SEQ ID NO: 48582 - DNA, 633 bp, Ricinus communis
  Intron number 2 from transcript 30128.m008833 (locus 30128 .t000294) derived from phytozome v7.0 (chr-ID 30128; pos 1 266952 to 1267584 reverse strand)
gtgcaggttctgaaacaggttcaaacaacaataaggttaatgcggataaggaacacagcatatattgaaagatgaaccaagaaatattttttttctctttcgtacttttaggctgcatttagaaatctcatgcgattggcttagaatcatttattgtttttgaaattcaaaagtataatgatatatatagttacattggttgtgaatgctatctgtataatttacttctagataataaatgatgtgtttgtaatgtgcctttttgaaaatataatgcacttttttaactcatttatagctcaaataacttgatgttcttctgagatacaggtaaatccaacctgccgctacgtttcagaacaatgactgcagaaccaaaaacgaagagaggggaacaaaaataattgcaaatatagaagtcatcctttttatgtgaagaaactaatacaaattaaacatatttgagaggaaactatgcttatgtatatgaaactccataatttccagggtaaactattttacacattcattttcccgagaaacaaacaaccctttagcagattcagttcatcatgtgtaaatatcccaaacgttgtagacctcatcgcgaagcaacattggtcagagctcaaa

SEQ ID NO: 48583 - DNA, 498 bp, Ricinus communis
  Intron number 2 from transcript 30171.m000409 (locus 30171 .t000006) derived from phytozome v7.0 (chr-ID 30171; pos 1 50571 to 151068 reverse strand)
gcttgctgcttctatagtcagcaagtctggcaaaggttagttttcttttttcaaaaatccttttaatataattactcactactgttagttgtttctacactatcaattttataatcgaaattatggttctcattgttcaaaatacatttatgattttatgcataagatctgtaaaccaccgcatcatatttacttaactctatataataagctgatatgtagtatcttcacttgttaaatatatgtaacattaattttttatccgccccaaaacccagtttgtatttttaattttgtttttcccccttttcacatgtatgaatttgttcttttaaccttggtcctgcgtcttaggtgcactattttattttattttatttattttattttgtttgattgtaatgaaattggtgtaataaggaattttaaaaaggacgcgtttgcttgacatgctttttatgtttcaatgcagtgcttgtttctaggcagtttgtggac

SEQ ID NO: 48584 - DNA, 853 bp, Ricinus communis
  Intron number 2 from transcript 29868.m000353 (locus 29868 .t000017) derived from phytozome v7.0 (chr-ID 29868; pos 1 48967 to 149819 reverse strand)
gggtcattgttgctgtgaagcctaatctgaaggtctctttttttttttttctctattcttgttattgatcgagtctttgtatttctagattagtataactctaagtaagtgtaaacaattagagcagatggtcagtctaattcttagtttacggtatttccaaatccaactaacttcacctgatagtcttcagaactgtaaggtaaagatttctattaagagaaaataggcatgcttcatgtatttctgggtctaccgttagagatgaggttcttcatacgacatcattactgaaccaagatatcctttacttattgtaacttcccagtatatcttttgggtattgtttgcacttcatttctggatttccaattttcctatcccaataaggctgtaattgattttagtacaattgatctactccaacttatctaaaataacagtgagagtaactcctttccctcaaattccttaacataacttctactacaaactttccaaaaatggggaagtcaaatgaactgttcttatatagatatataattttatttgttaagagcaagtgttttactggttcaattatacctttatgaataaaatatttattcaccaaaatttctttgcctccccgcttttttggatgagattgtcaatagtctaaattttcattgatgctgcctcctaagcagaagaaggtccaggaaaatatttctgcctacaacatggctctcaagatttattagttggaaacctccaatttttttgcctggcaaatactcttgatgtttttctttcttgttgtaccctctatcatttgcatttgaattttttagtttctatttgcaggtcagtg

SEQ ID NO: 48585 - DNA, 970 bp, Ricinus communis
  Intron number 2 from transcript 29933.m001432 (locus 29933 .t000054) derived from phytozome v7.0 (chr-ID 29933; pos 3 08798 to 309767)
ttttgcttggttttggtattgggtttgccaatcaggtatgttatcctgtccttatggttctttgtcggctggtttttctgcttgttatgttttttatttatttgattggatctagaaattggtgtgttttgggattctatttcggggtttctttaagaagtattgtctagaaagaaaaagaaaagatgcaagtttgtgtctttattccttttgtttatgggttttgcctatttaatgattttctctttttttttttttttttaaaaaaaaaatctggttttaaagaatttaacttctcttttttttccctatattctggaattcagcatttttactccagatctgttctgcgtatagaccagagtgggtcttctcacaaaatgacaaaagatgaacttttgatacaaacttgtttctgatccagatattaggcttttcttactttatcccttttgatttttctgaacccagaaacatcaatgtgtttggttactgagaaaagccaggaaaaggaaaaaaaagatagctttagtagtcaaagttatttttaaaataatctgaaatcagacaaaagcataggtttgtttttctgtttttttttttccaaagtcttgattagcctttttttttctcctatgcgtgacgtctctggggctattttttcagcaaaagcttacttcttgatgctataggcattgaataaaaattaatttgcttggcagaatcttttaatgtaaatttattgcgaaagaaaactacttgcctttatgttttttcttgatttggtttttcttggattaattaaaaacaacaattgattttaacccaacaaacagaagcaactggacaagaacatgtggtcccccaagaaaagattgcttcatttgattccaattagttggtgattagtaaattttaattatctaaattttatttgtaattacagtctgtgccgctctacctctctgag

SEQ ID NO: 48586 - DNA, 438 bp, Ricinus communis
  Intron number 1 from transcript 29830.m001450 (locus 29830 .t000067) derived from phytozome v7.0 (chr-ID 29830; pos 4 96510 to 496947 reverse strand)
ttctggcctggttacgttgccatcacttacccgttgtgatccccttcttccggggctcataggagcacacattttctctctttttaattttttttattgtttcgtttcctttaaattgatttcttactttttattggttgtacgtatataaaaaagttatttcaaatgtataaacctttaataatttgattggtactttcacagtgtaaatctgcaaatggttcaagttttcttgcacaccattcatttggtggaatttatatgaagatttaaaaagagatttttgaataaataaggaaaaaaagagtatgaaaatggaaaatttatacaacttattactaaggaacagatttttgcatgtataattatttaactctgatttgtaagatttttttgcttgtagcctggaggtaatttggaacgtttgaaatctagcga

SEQ ID NO: 48587 - DNA, 538 bp, Ricinus communis
  Intron number 1 from transcript 30169.m006442 (locus 30169 .t000219) derived from phytozome v7.0 (chr-ID 30169; pos 1 212430 to 1212967 reverse strand)
cggacaattgtggaagttgttcaggttgggcttcatatctttttaatttttatattttggccaaaatagttttctttgtaaatgttgatgagttgctcttatatctgttattggtggtttgagtttttggataatttacactgctgatgctgttcatatgtattctaggtttagaagatgctaatcagtttctagtttgcctaaagtggggaatattcttgttagtcttttggaatcaaatgatggtagtaactttattcagtgtattgccctgtcaactttaggtatatcatagattcaggaatcaggatagttatcaggaaaagttttccatatctgcctcatacttataatactaatatagtttttgtttctgaatctttctcatattatttactcactttgcttttgtgattgctgcaagcaattgttataacgctgcacttgctgtacgatagtgctccatattacgggttcttgccttcttggtcttgtttaattatctgacttgctcttgtatgtactctttttgctgcag

SEQ ID NO: 48588 - DNA, 593 bp, Ricinus communis
  Intron number 1 from transcript 30138.m003914 (locus 30138 .t000088) derived from phytozome v7.0 (chr-ID 30138; pos 6 18451 to 619043 reverse strand)
gaataatcttcctgttagagttttgcctcctaagagtgagtcaattttgattttgcttctgttctttttaattgtttacgtttttgtatttttaggaatattttgatgtttgcatttttataagtaaggaaacaaagacattttctttttctttccaaaatttcctcttttggtgttttggatcaggtagaagatgcaatttgtttttccttgtttagttttcgagtgtttttagcaaagaaaaaaacacacacacacgcccacacacaatggatggttcccaacggagtttgaagcttatgaaattgctacaacgttttgcaatgtaatgaaatgctgctgctgcaagttatcccattacaataatatttacttaaaactagctaaaagtgctctgtttggtttatggtcgctacgtttcttcttttaactccatgagcatgccccgtttcatggattctaatatgtaattatatcctaattgactggttttagtactactagtagtagtaccctctctcttagtaagtgtgggcgattattgatgcaagtctcatgtttggttgttgccattttaggggtttacaagaaca

SEQ ID NO: 48589 - DNA, 869 bp, Ricinus communis
  Intron number 2 from transcript 27950.m000105 (locus 27950 .t000002) derived from phytozome v7.0 (chr-ID 27950; pos 2 1915 to 22783)
aatttgcttaccattatctatcacgtagctccaaggtagaaattgattcactcctagttaataaagtttctttagggtgctggtctcacctaatgatttcatgtccttaacattgtagttatcttttgtagtttagtgaacaaggactcgaataaactctatgtcgtaattgattggggttgattcagcagtgaagtgggggaaaaacaaattaggtattttagttgcatattgtgatgttggcatggatatatatatatatatatacacacacctttgtttccgacaagtaatatataagagtactgcggtgcttctttagccctgccatttctatagcattaggttgcaactaggttcttgagtagttatatggtaacaagattcagcccaattaatgatatgtccgtatgctgttttcatttaaatatggctgaaaaggcattctgttcttattatttttgttatgacattaccttgcagaaagtagtaaatttttgtattttaaatccctgcatttcagcgtcattattcctgcatccttccaggcttaattattattataattactactatcatcatcgtcatcatatgtgaagtgtatattataggaatcttcttgcattaaggttgtgcagcccaaccattttaaaaccctagttttgatcttcaattacagtcgtctttgcattactaaatgctgaatagtaatattagctgctgcatggttctcatgtagacttcacttcagatgggttttacattaatgaaaatgagcacaaatatctttcttaatgtataatgctacatttactgaccgactgttattactaggacgagtgggttatctcccgagtgtttcagaagag

SEQ ID NO: 48590 - DNA, 604 bp, Ricinus communis
  Intron number 1 from transcript 29822.m003348 (locus 29822 .t000023) derived from phytozome v7.0 (chr-ID 29822; pos 1 17905 to 118508 reverse strand)
ctcgtactatcgtcggcattgtcggtacgtcctcgtcatcgtcaccgttgtttttagattttgtttataaataaactctctgctgtttttgatgttgttaaagaaaattacgaatcaatctattccattacctctcttttctttttttatttttttgttttttttttaaaagagattaaatattagtatcattatcatgcatgcatgtattattattgttttcttatgacttcaatttgacggggagactgaacttgagttaatatttttttttgaagaaaaaaaaaaaacaatgaaagaccagtgtgatttctggtgtattttgatttactttttcattatatgtatatatcaaaactcagaaaatatatttaaaaattagcgattaattttattttatttttataataagctttctatacgagttcacttgtttttgtttttgatttatcttttgtggaataaaaactgaatatttatcagaaagtgatgtttcctagattattattattactattgatagaagagagatttacaattatttactaatcatatatatgcttatgcaggcaatatcatctccttttgtctttttctctcgccg

SEQ ID NO: 48591 - DNA, 497 bp, Ricinus communis
  Intron number 2 from transcript 28883.m000749 (locus 28883 .t000039) derived from phytozome v7.0 (chr-ID 28883; pos 2 19151 to 219647)
tctggtggatccacttctcgtgttcagcaggtcaaatttccatagctgaaatctgattcttctttcaagtatttgattggagctgacctctgttctacatattaactagtggttgttaaatttccagaaccaaatgactgataacttctcttcttgattttgatggatgaattcatacacaagtaattttcttgtcttttagtaatagtggtactggcgtaatcttagacattgaaatagtctatgtgaaggtaatatgcaagttggttgtgatggcaaatgcaattattggtgtgatttctcttccttttggctctcatttagtttataaagcagtttgcatgactaaagttacaatattgtccaaactaagtgatttgttttctacctagtaaccactttccacattctgccagtgtttagctggtattttctgatgtgatctttgtttatttgcctcaggaacgtctcagactggaacagtatctaccattact

SEQ ID NO: 48592 - DNA, 570 bp, Ricinus communis
  Intron number 1 from transcript 30078.m002245 (locus 30078 .t000038) derived from phytozome v7.0 (chr-ID 30078; pos 2 29354 to 229923)
ccttgtccttcgttaattactctctctctttcaaggtaagctagctgcatcatgtatttcttcttcttctttttaaacgcaacacgaagacgtttttttcgctctgtttttgcttacatgtccttagttactgcattcacttttggttttaatttgtgtagttgtggttgagtgtaattaataatattttttttttttatatggaatgatgaatttattatatgtcttttatcacttaattatcggtggaaaacttgtagtttttctttttattgtttataagttggattaggcaggtagtcttttatttaatcttgttatatttagcagttggtattacgtaagttatgtagtttttattttattttttgtacgatgatgtattgggtaataatcaagatcagtaagtgttttcctttgaatgatgttttgagcttgttatattagcaggttggtgttttaaaattaaatgattttttatcctttgctaataattaagatcaacaagtgttttctgattgtctgtgtttggtttattgaagaggaacttgagggaaattgccgaattat

SEQ ID NO: 48593 - DNA, 797 bp, Ricinus communis
  Intron number 2 from transcript 28359.m000275 (locus 28359 .t000003) derived from phytozome v7.0 (chr-ID 28359; pos 2 4084 to 24880)
gctcccctggattggtgagtcctgttatatgatactactatttttttgcccctatttcttttgtgtataaaaatttgctcttttttttagagaaaaagaaaatttaataattctcttggtaccttttctaaatggtttgggggtgtatgagttgggttctatgcttttggaactgaatattctacaatttcttgcttttgattttaacccattcattgtatagggtaacaaatgcactttcttttcccttaccctgaaacgcaagcaatcatgctggtatattctttattcataatgaaccagactagttgattggtggggggcttttaatcaccattattttcttaaaatcatacacctcagcaggcatatattccttcatgtcttgtttgtatatggcattcttgtttattctgtgctatatgtttctattttatcatgtgtctggttctgtactgccagttgctaacaatccaattccttgaagtttacggttacaattataggttctgctatagctagtaattctggtttaaagcagagttaaacgaagacatttgagttctttgtgctcaaaataggtagctatagactcaaattatggttctggtcctagcttgctagcattttaaagatattgacttttccagttttcattcttcaggaagataacactcgtatccaagaagtgttttactgttctttcttctctatccaaatgtttatatttctttcttctctatccaaatgtttatatttcgtttcatttgttcttttccaggttaactcaagccctt

SEQ ID NO: 48594 - DNA, 848 bp, Ricinus communis
  Intron number 1 from transcript 30174.m008650 (locus 30174 .t000047) derived from phytozome v7.0 (chr-ID 30174; pos 1 946569 to 1947416 reverse strand)
gaagctgtacttggtaagctcatcttatcaatacttgagaatttttttttttttgaatgcttttgtttttcttttcttataatgatctcttataatagagaacgcttcttgttactttaagttccgagtaaatcgattacactacgcattgttattggattagttttatatttttggacgcttgtaatgtctattctgggtttcttcatttcctatgtttattttgcaagctttttttttttttttttttttttttaataaaggtttgcatctattttctttcttgtgttgaatatagggtttgtttattgggaacaagtctctgtttggatgttttaaagaaatttagaggaagaatttacgtctgaaataagtctttttttttttttttggttgttgacctaaacaatttaaaacattctctctaagttatgcgttgcattatgcatctttttacatggatagttccttttacctctacttcttatctaagaaaattcaataaaaacaaaaagatatactttttcttttgtaaagctacctttctattcatcatattctcttatgaatgaagtcttaccttttataaaaacaataataaaacaataattatagagactaggttgtaaaagattacacccagtttgcaactagttaaataacacttgcttaaacttcaaaagtgtagattttattaatttctttccacattcgagtcagttgttattttactgctttttcttttttctccccttctctgaacttcttctgatttctggataatggttgacagtttccgagtaatagagcttgtaatctttgcttgttttcttcaattttcaggtttt

SEQ ID NO: 48595 - DNA, 756 bp, Ricinus communis
  Intron number 1 from transcript 30178.m000848 (locus 30178 .t000010) derived from phytozome v7.0 (chr-ID 30178; pos 6 2108 to 62863 reverse strand)
actctgcaccgtacgtactctctccacgcgctcgtacgatatatttacactactgtcgttcaactttgtttactaatagctttttatctgtattcagatcttgctgtgctttacgtttaatctttgatgttccacttctgcattttttaaagttctaaatcgttgttttagcatatattcaccctgttcttttagttatttgaatgatttaaaggcgtgaaactcttacatgctgttttctgttttttgattatacatatttgctgctacctttcctcgtacgcatttgcatatattctgtattcttagggttttttatttgcatgttgtatcagctttctattttctttttttggtacttaactttgagtgctcttatcatactgtaactgctcaaatacaagattttctttgggtcatgatttgttttaagccatgtttcaacaaaatataatgatcttgtctttatctgataaatctaactgtttgaccactctccatgatgccaatttttgtgtcttttttttttaaattctagcgatgaatctcgttgcatttactttatattgttatcttcgactattttatggcccacacttgatcatgcggtggtcctgctggttactatattgtatatccatctctttattacatttttgttttaaattttgtttgtttgaagagttcttcattgtgcgtttcgtgcgttttggttgagcagagagaagtctctggccagcggaatctcgctggtat

SEQ ID NO: 48596 - DNA, 527 bp, Ricinus communis
  Intron number 1 from transcript 29738.m001029 (locus 29738 .t000031) derived from phytozome v7.0 (chr-ID 29738; pos 2 40495 to 241021)
taacaccgaggagtccagtatcggtttgaaaaacggtaccgtttctgcttttcgccctaattttgggtttttttttttctctttttttttttaaagttttgatgcgtcgtcatgaaatattttacttgattttgttgcctgcggtttacttaatctaactttttttactatatatatatatatatatatatatatatatatattactttttatttgttattatatgcacagtttgatgtctttgtactgttagcataatttaagtcaatttttttctgttataactaatatgcacttgagttaatttagcttcgtgattagaggtcaaaaggtttttgaaactcaagtcttgtaagttttttttttcttttcataatgcaatgactttgaaactacaaaacaagcatgtttgtaaaaaataatgcacctgatattaccttgagctgtatggtgtaaagtagttataaagttatttctttcttatgttggcagtgcggtcatttggaacagaagggcggaagaaagat

SEQ ID NO: 48597 - DNA, 1030 bp, Ricinus communis
  Intron number 2 from transcript 29738.m001029 (locus 29738 .t000031) derived from phytozome v7.0 (chr-ID 29738; pos 2 41056 to 242085)
agtacatattgtttcgtggaagtgacatcaaggtatcatgttttttgttggatgttgattgttaattaagctgctgctattgctttccaactggagtttgagttgcactagctagtgtcttggtttttgttttctctttaaatagatgaccttttgattttcaattttccaactcatagctactatttttctccaaccgtaattgtggtatagaatggatccttattggatccattattcgatgcttaatatctctgtacaactgaaatttatttggaatgtcccccagttagtaaaaccctcgaccctcttgtttttttattattttttcgaagtttgttttctggatctgtgaagtatactacagtttaatttctcaacaaactttacaatgaaagcttaacatgcatatgaaaggtgactgttcattttataatctgcagacactagtaaattttttgtaaaaatgcagatttggatgtgctatgttgtttaccaataggcagttaaattaattaaaagtgagaattcagaattaagcgccatcttttagatggtgaatttcttaatgatccatgcgagttgagcatcttacagattgctccatccttgtgggaatatctgtagggttaacttactcttgcagtaagttggcacttcaagactttgaataaatttacatctaaccattcagaaccgggaatctatactttttaagatgtgatcaacaaaacgtttagatattaaattgctgtaataaatccagtgtgttttgcttagactaccatagaataattgatgacattaatatttatgaagactacttaagtcagatgtgttattctgatagtcatgccccaatatctctggcctaattaatttagcttatcagttttctgaacagtgtctttgattttacataaatatccagctgctgatttttattgtacttaatcagcccgagtcatgaatttctattttgcctccctttgcaggatttacaggttaagtcttctccccctgctcaacc

SEQ ID NO: 48598 - DNA, 162 bp, Ricinus communis
  Intron number 1 from transcript 29904.m002937 (locus 29904 .t000051) derived from phytozome v7.0 (chr-ID 29904; pos 3 40985 to 341146 reverse strand)
ttcgggcactgccactattgctaaaactgatcccagttactgtcttttcttttttgttttttcttttctttcatttctcaactctttgagcttaaataaatatcattagctttcttattatttttttgctaattttttgtctttgtttttgttatttaggct

SEQ ID NO: 48599 - DNA, 945 bp, Ricinus communis
  Intron number 3 from transcript 29751.m001808 (locus 29751 .t000023) derived from phytozome v7.0 (chr-ID 29751; pos 1 27154 to 128098 reverse strand)
aaatctccgtccaggttctatctttgtgaataagggtaagggagacgcccaccttttgaatctccatatgatcagtataagttcctgtaatttctgatttatgaaaacttttatttattctcttggtgtttaaattggtgttctagaatttggtttcttgataaaagcaccaatgttaagaactaaataattttatggcatttctcttttttgaaattagagatgtattttctgaactgtttaattcctgcaaggaattttgtcccttagtttttaagcacataaaagattagtcctctgcagctgtgatcaatatttatattttcaatgcatagcactaatttgcatgagtttttactaatgaagtatacatttttgccattgggagaaagaactttgtttcatacagaatttctagatatctttcagtctattgatgtgatgttggtgatccacaacattcttccagtgaaaatttgcttcttttttttttttaaattatttgaagagtggtgaattgccacaatacatacatatgcacatgcacatgcacgtgttatattatgtatgagtaaggctgtttttaggttcgacttccctgccattgatgtattgaccataagctgcttgtgtggcaagacaaaaggctttcatctggcacttttagaacaatgagaaatgataaccttcaatatttagagaatttggtgaattctacccagtgtaatatcttaattttattttcttaacaatagtgtttgaatctttaatcacttctccccatcattgcctctattattgtaccgtgtatcaatttttcatcttgacttcatgctttcccagataaaaattctgttatttcctttttgctgtttttttatgttttattctcccccttttcatagtcttataaaaggttctgttcattgacaggagagctattag

SEQ ID NO: 48600 - DNA, 419 bp, Ricinus communis
  Intron number 1 from transcript 29807.m000474 (locus 29807 .t000004) derived from phytozome v7.0 (chr-ID 29807; pos 3 8753 to 39171)
caacttctcaccgacggtattgaatcttcattcttctttcatgcattttgataggccacagaaactaaagcttaaacaagacaaacaaagcttgtggtgataattttagaagtaagaaaaaaaatattattatactagagaacagtggatattcatgtgatctgattttcttagttccagacctttttctttatcctttttcatttatagaagtttgagttagctttctatccgtgtggctttatttgttaagcctctttgctttggtttttaaagtagctagttattattcataaatttcgtctaaaagaattcaagtcatcatgatttaacaaaaggaaggttttgtatagtaacatttaatcactattttcttttcctcagctgtggaaacttcaagacagcaattacaagcctat

SEQ ID NO: 48601 - DNA, 775 bp, Ricinus communis
  Intron number 1 from transcript 29682.m000591 (locus 29682 .t000024) derived from phytozome v7.0 (chr-ID 29682; pos 1 62504 to 163278 reverse strand)
ctgatattccctctcttgagcccacttctgttcaggttcagttagtggatttttcttttgtttatttaaataaaaacttaaatgggtttcttttaagtctgttcaaatgtttgtccttaagctaatccttgtaatttgattgtgaaatttagatgtttgggtgcttagattatagatgaacaatagcagtatagataaaaaattgcaggtttcgttgtttttattggtgacctagataaagacgcttcgttttgatattgtattggatttttaattggtgaacttgactccgtagttaaatgttccagttagtaaaaattaattgatctcttattttatgattcactctgtgtggtttgtttcttctacattatttttgaatttaattggttggttggttgcaatagtttgcacagttctatgagcgatattgttagcaccattttgtttgatggctgctcagaagccaaatgttgataaatagagaaggaaaaagaatggaatgccttagattattcactttttttaaataaaggtttcagtttggtgttctatcattatatattgcagtgcatttttgtgccttgtttccttaagagctgaacatcagatgaaggaagattatctttattttcttttgactaaaacattgcattatggtaaaacgaaaatgaagtattgcctttatattttactttgttcaatctgattatgactttttctgtctttcatgtgaacaggaggagtcttctggatttctaagtttaaacagagt

SEQ ID NO: 48602 - DNA, 502 bp, Ricinus communis
  Intron number 2 from transcript 28035.m000364 (locus 28035 .t000009) derived from phytozome v7.0 (chr-ID 28035; pos 1 95412 to 195913 reverse strand)
attctatttccagttctattaacaccaaagctgtaatcacccaactccctttttgttttttcattacttcattattttttgttcaactgtttatagcatactgtttgttattaaatggtaatttgtgttcgaattatgcattttcagtgcatggcaatttgattatgaagatgatacaagataaaataaaacatagaacattgggtgttaagaaaataatagaaacttgaaagattgaggctttcagcttttactatcaattgctgatgttatcagctatataatttggtcatttggttcatgaggatgcatttgcaaccaaatgcgtttccaaaaacgagatgtatgttttcataagctggtaaatatgggttcatgatgatttttgagtatattctctcttgtgtcaagtatgatggattgaattatggactgaaattaattggtatgatgtgtgtggtgtgcagactgtagagggacagaagcgaaagttggaagatag

SEQ ID NO: 48603 - DNA, 975 bp, Ricinus communis
  Intron number 2 from transcript 29666.m001468 (locus 29666 .t000044) derived from phytozome v7.0 (chr-ID 29666; pos 3 30197 to 331171 reverse strand)
gccaaaagctctacaagaacttctacagcctgctggttggttaaacttctccattttatttttcatttctattatgctcatttggaagacaatctattagaaagtagtacaagtcatattaatttctacaactattttaagttgataatatttaggagttcatgggatatcttgtaattcttgactttattgctaagataatctcactgctgttatttatgcatgaagaaaaaaaagatataaaaatagttataataagtattaataagaaaacaatgatgagaagtattttagataattttcaaattattttttataataatctcaatttattttatttgtattaaatagggagaaacatattttaaagaaaaaatataaaaaagtaccatataatttgacgtttttgcacttcgagaaccgtagtttcttttgacaaaaaagtaccctatgagttagtttttaaaaattaataattttaaatttctataatttaatattagtataatactcattttcaattataataattttataggtgatttatcataaataagcgattctgttattaaaaatgagtattatagtaataataaatcataaaaatctaaaagataggttagtaaaaacataaaaaaattaaatcacaagatatttctttgtcacgactaggagaaacaccaaaccacaagttatgttattgtactattctctattttgaaatactatcttccccatagctaattgagttaccccatacacccaagcttagaaacctaggcatctcaatgaaataaaatttagcttcggacattttgagataccatcttcccatagcacaaatagataatttgcaaattagaagatataaaatttattatttatgtatcatttccaagtaattttcgtgtaacactctctcttcttgttgattttccagcaactgcagtaaacaaaaatagttttgaacgacta

SEQ ID NO: 48604 - DNA, 967 bp, Ricinus communis
  Intron number 1 from transcript 27446.m000500 (locus 27446 .t000030) derived from phytozome v7.0 (chr-ID 27446; pos 1 70016 to 170982 reverse strand)
ccttcacacagaaactccggggtgcttgctcctaggtataataaacagcctcaaacggctgtctgttggctgcaagaattactgccttcaaccttcacttttgtagtttcttccagtcctccattcctcattcccttagcacagtgatgcaaagatcaccatttacagctctcaagaatacaattgaatccccaacaagcaacttcttctggtttacaaatgcggcaccctgttgtcaaaacttgcctccttgtcttccctctataatttctcaccatgaacatccttagaaatcaagtttacactggagattttgacatggaatttatctgagaaaaacattgtctcggcaaagtgctttggcacagcgaaatctccactgttattaacatcagattgggctgtagcatctttgcaaaagaaaccagcttctctaagcaattggaatcgttattgtcgtaagtatctatttttgctacaaaatcaagctaattgcttggcaaagggaagaagctaatcttggcacagattttgtctgtttcagaatcagtgacgtacttgattccagtgatgcggagaagctgttcaagaaaaacaaacattgaaacggagaaactgtgaaaaagagaacgctacttctgtccctcctacttcagaaaaaaaaaaaacctgatcttaagagtttctttatggataaacgcttaacttcaaaaaaacaaacaccagacaaacattcagttatcttcaatcaatcatagagatgaaaattctcaatgtgttatcacgcaaagaaaataaaagagagagattagcaaccaaaaaaaaaaaaaatccaatctgccagccacagtattgctactcctagggatataggtggaagaacctgaagagaacttccccttaattatcctcagtcgcccgtggaatctcccaagggatctccttcttgtggtttttaagactggaa

SEQ ID NO: 48605 - DNA, 504 bp, Ricinus communis
  Intron number 1 from transcript 29727.m000477 (locus 29727 .t000016) derived from phytozome v7.0 (chr-ID 29727; pos 1 38306 to 138809 reverse strand)
aatcgtctcgttccgccggtcatcgcaacccacatgtaagtataatgttgtatcttgattaattatctagaattagatttgatttttatttctctccctgtcactaaaaactagtttagtttagctgtactaagtgatcgattttaaacccacaaaaaaaataaaagaaaagaaagcccctttagtttctgttttttcttttaatctttacttgaaaaaagtagtaatttaacattataattaatagttactaattttgaaacagaaattattttttcacatcgatgatgccacatccactgagggttaaaaggacttgagatgcttgagggctcttttcttagtatattatttgttttgttaattgcttaattggtggttgtcttagtagtttgatttttgataaatcagtgtcatgtttatggtcgtgaatgaggttagtatttgatggaaaagttccctaaccctaatgccttcattttgtcaaatagataactggtggag

SEQ ID NO: 48606 - DNA, 813 bp, Ricinus communis
  Intron number 1 from transcript 28226.m000845 (locus 28226 .t000015) derived from phytozome v7.0 (chr-ID 28226; pos 7 6882 to 77694 reverse strand)
gaaaaacaaacacaaaagccattccacaacaacaggttctttcttctccatatttcccgattttattttttttcttcattttgtttatgtctattgttcttttagcatatcaagtgcaatttatgaaactaaattacgaatggagcttactgtcgaagagtatatgtagtggaacctttagtttgacaaatcaatattgggaatcataagagtagttctgtgccggttgggtgcttctctcattagattcaacctcactcgctgaactatttaagccagctcgaatattaccttcaagagcttttcagtagcaattttgtctaggtaactgccggagaataattgttatcgttgggatgagatttctgaatcaacttttgtcctcaattgcgagcgggaagtaggttgtttgattgttataggatcctgttcaattgttctcctgtgtgattcacagcctgctatattatatctgtattcacctaagcagatgatgtattgaacattcactagtgactctgagtattgcaaactgagtgattaagatttgctgtttgttttctttaaatgatagatcatttacttgcgaggaatttgaggactacgtgggtgcattagtgtgtgagagagggagggagggactgtagaatcttcacatttttgtgcatatattatgctatgaattttgagatctcttctctaacatttgatgattaattttgatcaatctcgcatgcgtacatgaatgcgaattccccagattcttttgactaacatgttactcttcattttggatgctgtcaggtggaaata

SEQ ID NO: 48607 - DNA, 551 bp, Ricinus communis
  Intron number 1 from transcript 29333.m001059 (locus 29333 .t000022) derived from phytozome v7.0 (chr-ID 29333; pos 1 68442 to 168992 reverse strand)
tgggggtttttcttcatccctcaccttctgtttctgtaagacttgaagcttaatttgcttcctattctctgctattaactctactgttatgtgagtctttccttgtttccattaccagctttctcgtttattagattccattagttctttctttcttttacttaatatattgttttcttcacatggcctttggttcgtttgtcactatcttttgtatctaagacctgggtttcttttcttgttcttgttatcaagaaattgggttttgtttcttcgtgattatcttttctatatttgttgttgtgatttggcaatgatcatcatcttttggagaatctgataatctgctttatttgttttatttcttgtttttctttgactttaattttctatcttcacttcgttttgatctttggtgttgtaatttgctaagtatagttagctatacctatatatttttcgtatcttcttgaagaagaaaattgcaaaattttgattgtattctacaaattgcagaaattaacttgggagtatcaagattcaagaaatag

SEQ ID NO: 48608 - DNA, 397 bp, Ricinus communis
  Intron number 1 from transcript 29784.m000372 (locus 29784 .t000018) derived from phytozome v7.0 (chr-ID 29784; pos 1 56310 to 156706)
actttcttcaagcttctcttctcatttcaggtccctttcttttctataccttataaatttttgtatttagatgtgcgagtatgcttctgtttcttgttctttgtataaagttttgattttttttttttttgtataaagtttagatatttgggttcatggaatcttacttgctcgaggattaaattgatcgatcattttgtaatggcataatgtatcttggaaatatcttgtagcttgattcttttatattgtgttggatatgaaaaacttgagtggatgatatgtttttaccagtttctacgtatatacatctacatatctatgtttctacctaacggtattcatttctgaaccatttactggttcaactagtacagaaactgcgttgcactatcga

SEQ ID NO: 48609 - DNA, 675 bp, Ricinus communis
  Intron number 1 from transcript 29729.m002330 (locus 29729 .t000063) derived from phytozome v7.0 (chr-ID 29729; pos 3 43103 to 343777 reverse strand)
gcttcatcatcattgcaaagacctcgaagaaggtaagaaacttattcatttatgtcttcgaatatttttaattaatatataattgcactacagccgatgacttgtgttttacttcagaatcatctccgtagacctaaatagtctaacgtgggaatgcttttcaactttttccaagaaattctgtggtcgcatgcaaattgcggaaaggaaaatgttttgcatgtatatttacgtatcatagtaaatgtatattcttatgatagttgctgaaggaaaaaagaaaataataatcccaatctctgaaccaatcgagtaggaacgaatgccatttaatcaaatatcatgctatcacctaatgagacaatcaataaaagaattccaagtgctttctaattactagtttagtacaattaatcccatttatacactaattacgttatgttaatgcaatagatgtatgctcacggttataggtgggaaattttaacaacacgtccgatataaaaacaatgcaatttttacattcgatgttagtttcgtctaattggcatgtatagaaggatggaacacccaattttaatgtgcaaaaaaggtccagaatatgcaatgttgtttgtgatatattaatctttagtttgagattatgggtaaatgggatttggaattttaggaagg

SEQ ID NO: 48610 - DNA, 901 bp, Ricinus communis
  Intron number 2 from transcript 29634.m002161 (locus 29634 .t000107) derived from phytozome v7.0 (chr-ID 29634; pos 6 39834 to 640734 reverse strand)
aggtttcgtttgctttctctctctccatttttttaaaagttttatcgttgggtttttttttttttgtgtgtgaaatatgatgcgcgtatattcaatttgctttatttgcaaacttaacaatcatgtcttaattttagtactttactattcagcctttttttttataaagatttaacagtaatttcagtattgtttattaaaagattttgttatgaagctaatgccattttcgatggtatgctcataaattaataaagttttacttcaaatgagaaaagcaaataaatgttacaacaaagacttgcttcatactttatatatatatatatatatatatatatatatatatatatttaacgactctaatcctttaccaatcattgggcttttttaatatatgaaagaagttctctggtagcaaaaagcagaaaagcaagacgaaatgtttggtcaagatacaataaatactaatgcaccttttcctttccccatttgttgtagttttattatgatttgtggttctttatacgctctgtctccttcttcttttttttaaaactaaattgcaatgcttgttattttgagtatttgatggagaaaggacaaagtgcctacttttattgagatagtgtcacgaattatacaaaaaagtatcttatgtacgagcctatttctgaatacatatgtttattcaagtctttttatatgctttgatgtgtaatctgaggctaagccatgttaaatctgtgttggcagcctacaatttgtttttataccatcaagagttatacatccattttctttggtgacacatttgacgatttcatttttttttttttcatttctttgcggtttttaatttgcaggagaagtgcaaggaaaaaactgtgatcgacttaga

SEQ ID NO: 48611 - DNA, 827 bp, Ricinus communis
  Intron number 1 from transcript 28629.m000574 (locus 28629 .t000029) derived from phytozome v7.0 (chr-ID 28629; pos 1 64267 to 165093 reverse strand)
tccaatcttacatctcttatcgggtcattaccaaggtaaaaaaagaaaacgtatattctttgctataccctcttttgagctccattttatttaattaggattttagattttggtactctttgttttctaagaaattttatcgttatttgaattatagctaagctgcaaatggtgtatagtgatactacagataaattattccttaacatttagcttaaagttgtactgagctaatgaaatgttacatttcataataaactgtgaaattttccaccagttattgggttgtctttgataaaagcataattaggttaaggatttgttgttttgagttgttgaatttagcatcaaatgcagattaagctttaaaagtgcttaaagttcttttatgttggttctacatttgaatgagtgttgatttggtggagtgaaaagtgaaaaaacttagtctttaatctttaactatatagttatgtagtttttatgtcacggttgttgatgtttttaatattttagcttgactagatacatggtctctattaagatctacgcctctagcaatctttaaagcaagttgatttcattcctttattcagaataaaattgctgtggtacaatctttaattttatgcctattatcaatctttctatccatttttaggtttatctacataatcttttgctcttcaatatagaagatactagatagcttttgaatatagaagacattagatagagatattgcaatttctggtatgtaacactttgacttatatgaaattgctttagcagacaaattttcctgaataccaagggcctgaaaagat

SEQ ID NO: 48612 - DNA, 587 bp, Ricinus communis
  Intron number 1 from transcript 29589.m001242 (locus 29589 .t000021) derived from phytozome v7.0 (chr-ID 29589; pos 1 64048 to 164634)
tttctctgttctttcctctgagtgaaggtgtgttcttcaattactcttcttttttaactcttgttttagctaccgctctatgtgattttgggttttgccggttgcttttgttttctttttgggtttgtatttgccaattgatatgatatatgttcaaaaatcaaaactttagtgcaaagttttatcttttctagtgggttgttaattccggcatgcatgaatgattctctgcttttatccatggaaaaggaaagaaactgtgaggaagtgtctcaaactgcctcttttgttatatctcaattggaccatgatgacacttttgacaaagttccagtctttttaactcaaaagagattgttttccatgattttcacatattatgttgtatcttaggatgtttagttttttcttctttatgtgattgaaaggcttgctttttctatctcggtggatcagaattaaaggtttttgtgtgattaagaggttttgtaatttttattatttcggcgatgggaggaagaacattatgtttgtgatggttcatgtggatttctattaacatgtctatttgaatgcctaatgcagtg

SEQ ID NO: 48613 - DNA, 748 bp, Ricinus communis
  Intron number 2 from transcript 29693.m001968 (locus 29693 .t000006) derived from phytozome v7.0 (chr-ID 29693; pos 9 5343 to 96090)
ttgacacctgtaaacttacccaacacagtttaagtgtaagctaatccttaattatttattttttgctcttttgaaccatattcttttcttatttttgttggtaatcttgaaacactgttttaattaattatattttttcatttattgttcttgtttagtgtggtggtggaggtgaatgtggaggtggtggtgtagttagtgtctgccatttttagggtcaagctttaaatacattgaaaaaaaaagagaaagaaaaaaagaaaagggttttgcgcagatcagcaacccgtacatacttactgcttctttcgttagcttaattttgaagcagaaaattataagagcagatcaaaggtgtttatgttatgtatgaatgcaaatgttattgggttttctttcttgttgtgcgtgttgaacttttgttaaagctaatcatctttaggtttattaagctgctaaaagggttttgtagtgggtatatagatactgtacaattaagtcagatcttcaggctatgaaatgactaagtctatatgtctatctatctaaatgcggtagtagtgtgtgattaaagcatttctttctgtgttaccgtgtacctatttaatccgtctgattgcttttctttttcgttgctttgatttttctctctctacataagggttatttttctttaacttggtgttttttgcttttaatttgttttttggcagggctgagactgaagctgccattgctgcaggctttg

SEQ ID NO: 48614 - DNA, 983 bp, Ricinus communis
  Intron number 2 from transcript 27810.m000646 (locus 27810 .t000017) derived from phytozome v7.0 (chr-ID 27810; pos 1 62661 to 163643)
gctcgttgactggtgggctaaaattaaggtttctacctcaaaaacctctttccatatcatgcctttttatttatttatttactgggtttgtaaaaaatttcttacatggcaaatcacttaaggtagaagtttgtatgatgctgctgatctgttactacaaaattgtttgtagattgattaggtggtgtaatttcatttcagtctgagtgtgctctcttctattattggtccttggttggtgatgggggaagcaagttattgaaattttctataaatcagaagttagtactaattgggtctatatcataaactatttcagtttagtctagtatgttcttttgttaagtctctgttctcattctatgcaaaccaacccaagttgtgtgctaaaccatatttctatttgatctgattcatgtatagttaatttctgtatattatcaaaccaacccaatttctgtagtatgtgtaaagcatgtcaaacttgctgcttacttcttctcctctcaacggacaaaaagatggaacattattgagttcggttagacgtatgtagattttgagaatataaatatatgttgctacttgggaagtgaagatcagtatgtagaaattggaattttaaccatgcagtgcattttgtaaccagttctaaacactgttgatgatgtgcacttttatttcttgcatttggtggtggtctttctccaaatgggtacaagtgtacctcatgagccattccatttccttatgacgcccctccccaaatgggaacagttccttctttttcttgctctttatcccttcactttatttgagtgagatgctttttgtataatagtaagtacaatggagtcaatagcatgcaagaaatagcttctgacagttgggtttgttgtttcagttctacctcctggaaagttaaatcttaatcatttgtgtatgcagatccaagtatatacagatcgagagacattgtgctt

SEQ ID NO: 48615 - DNA, 617 bp, Ricinus communis
  Intron number 3 from transcript 29713.m000182 (locus 29713 .t000008) derived from phytozome v7.0 (chr-ID 29713; pos 5 4728 to 55344 reverse strand)
agactcatctcctacattgagaaaaagtttctcaggtatgattaattatatattatgtgcattaacatattttttattctatgatatatgcaaacataatctatttatatagttctataatatatggtgggtcagttttgattgaatctgtatctgatggacaaagtcacgtaggcaataaataaaattagtccaagttcactttatccatcttcttgcatatcttggtagctaacctaacattataatgagtttcgatcattgggctgcatataattaaactagctatagggcagaaaatattatggaggacattaaaatttctcatgtttgatatcgacctgttacttgtaggccttgtcaaagaaaaaaaaaatgttgattttggacgtttgcatttaattaaagagtaaacaatggtgttgctttcttatctatatacttgcagaaagaaagactagtcctgcaattgaaggcctgaacctatgtaactttgagcagtctatggcaccagaaacagaaatcaaagaatttaggcatgaatccttctttgtcaattttgcttacttaggatttttttttatttttttttattttaaataaagaaagtcaggatc

SEQ ID NO: 48616 - DNA, 922 bp, Ricinus communis
  Intron number 1 from transcript 29586.m000601 (locus 29586 .t000006) derived from phytozome v7.0 (chr-ID 29586; pos 4 6101 to 47022)
aattggtttgaagaagaaactgctgcttcctctaagtatgttctattttatttactttctatcaattaattgatttttgcatcaattcatgtctgattgttgaaattgggttatgtgccattatactttatagttattgttatttttgtcaaaatatttctgttctgttactttgattggataaaaaattgtttgaaaagggaaagatcaacgctttgtaaggttaaaaaacaaaaggcattctgaaggaaatgaaaatcatgcaaaaaaattgacatgattttgcaagaattaaatttagttgaactcttgcatattattcgttccaaacaagcccttatgtgtcaaatattgaaataaacatttgtgcccattgttttggctgtcatgtatttaaacattaaattggatgacaaatgcagtatatgttgacattcagaagtttcactattgactcaaattttatatttaaataactgtcttttgatattgatttgaaggctaaatatttttgataagctggctaatttggggaatcattttgaatcatctaaatgactgtttatggcgccggttacaagttattcagtgatcccttctctgttttacatgtctgttaatgccatgtttgaataagagtaagaaagtttcactagcatggagttttgaagacttaatccaaggacatgcttatcaatgtttcaccagggtaaaacctattgttgtgatctggttataggaaagtttgaactcaaaagtattattagaaagctttcaatcatgcatctgacttgtctgcttattctatatggtgctctttaaactaacttattattgcaacttgcttcttatggatgctaaagatgtgattaatgtatttcattcagggcatcagagaaggcaaaaccaaaggaactggaat

SEQ ID NO: 48617 - DNA, 567 bp, Ricinus communis
  Intron number 1 from transcript 28124.m000237 (locus 28124 .t000006) derived from phytozome v7.0 (chr-ID 28124; pos 4 3598 to 44164 reverse strand)
ttgtttcttgtgattcctccaaaaggtgctgcttcgcggttggaggtgaaattgatttgattttgttttcttataattgaaaggtttttttttttttctttgcaattaaatcatgtgtaagaattcaactcaattataatcttgcaaaatcatgttagttgtggcatgacttcgttagctttcataaacagaaatggattggatactaatcatcagacaaagatatcaaattttttgtacaattttatccatgttgaaggattttttacaagctatttgctagttcagtatactacataaaataaatagcatgtcatatttgaatctgtatttgagtgctaaaacatctaatttagactatatatcatgctaatttccatttgtgtttcatatacctgtgctgtgaaggtataaggctgttatacttgtatagtgtgcttgttcaaagtataaaaggcttaattagtttcctttagctgttattgctttctagcagctttaggagaacatcataatattacttgtagaacatcacgtgttcttgttgcaggtacagagacaatcgcc

SEQ ID NO: 48618 - DNA, 446 bp, Ricinus communis
  Intron number 1 from transcript 27543.m000154 (locus 27543 .t000006) derived from phytozome v7.0 (chr-ID 27543; pos 1 44163 to 144608)
ctggtatatcttttgattttcctcttcttttccaaaaagaaaatttctgtttgctttttattacataaaatcctaattgtcatttttcttaaaatttgttttgcttttactaagcagaatccttattcctatctgatttatgtttctttttagtcactgttgattttatatatatatattttttgtgtattagaaagaagaagtcttgtttgaaataaaccatttgcaagaatcgaattcaagacatgtcactttttgatatgattccatttcttcaaaattgaattatagcaactatgagctttccacacatgaaagttgactaaatacggttcaattgaattgaattctttcatcttttttgaagtctgtctaaacgcactcgagtattgaatagtgtgatacatatttattttgttgctcttgcttttctgttttccataggt

SEQ ID NO: 48619 - DNA, 530 bp, Ricinus communis
  Intron number 1 from transcript 29794.m003384 (locus 29794 .t000083) derived from phytozome v7.0 (chr-ID 29794; pos 5 28609 to 529138)
ttagaagagcacttgttagggttgctgctggtcaggtttgtttagatttaatttcttttttatatctacatattgatttagctcaattttggctgatctgttgctttttgtgatgttaatttgtttagtttgagtaagaagactgaatctttttggaatattgtggactgatctgataaatgtggatcgtgattattaattatgtatttgaattaaattaaatatgataatgtagctttgaatcctttcttttctcattgaatcatttgatttttgtttatctggatactggaatggtgtcttatgtttttgtctttactttgttgttgccttttgtttaaaagtctgacttcatactattgtgaagtagtcttggggctttatgccactgcaatatttttcactctgttacatattcattattatttcatattgaaagttctaccgcacttttaaagttttgattatcatatcatgctaataaacttatcacaggtcggaaggagaattgagtcgattgttcttccact

SEQ ID NO: 48620 - DNA, 597 bp, Ricinus communis
  Intron number 1 from transcript 29673.m000914 (locus 29673 .t000015) derived from phytozome v7.0 (chr-ID 29673; pos 9 8486 to 99082)
atccttgacgtttggattttgttttttaatcaaaagtaaggcaagctgttggtgtgcttaggccttaattaaccaatgaaataccaaccgatctagtagttgcaatccaagagttagaaggacttgcatcaacgtacattaatgcaccattaagagaggagctcaaccaccactatgttcttgttttcttatatggatactaaaactgttattattgttttttatgtggtttttatgcttggttaatgcttaaaattattgatggatgatataaattgtggttagatactagaatttgtgtttagctttgattcttctagatttgaatggttaatatatgcttagtttcaaactgggtggtttttgttttctggaatatgcttgagaatgtgaaactttagtgtggagatttcagatttggacttgactattttttagtatcaaccccaaaaattgtacacacacagaattttaaacaaggttctgcaattagaaggcaaataaaagaatttctcaacgagaataaaagctttcttgatgagttctatattatgttctttaggacttggatttcttcttcagagccatttgctgaca

SEQ ID NO: 48621 - DNA, 481 bp, Ricinus communis
  Intron number 1 from transcript 29728.m000839 (locus 29728 .t000045) derived from phytozome v7.0 (chr-ID 29728; pos 2 74035 to 274515)
tctctcaagtcagccttagtgaccctgttattgctgtaagctctccctgtttctctctttaaatatttgagtttcttggattcaatacagttggattgctccatttacttattgatgatctttgttgttgaaattgtggttaattggctttaaagtaacaattttgcttcctttatcagcatagcttcgtgattttttttattcctagattgagtagtgaaaccatgatattgcttgaagatgtttaagcaacttaagggcattcaaaatatttaatatgttgatagtagacaaaatgtaatgtgtattggttctttattatgaatattaataagtcgaaccattttttttaatgtgatgatgctcattatcattttgtggtgtttgcctgattatatgattattcgagctctcttttttctcttaaaatatcaaaaaagtttagcttaaagatggtttgtgttttttctttaggttcttg

SEQ ID NO: 48622 - DNA, 1003 bp, Ricinus communis
  Intron number 3 from transcript 29629.m001424 (locus 29629 .t000075) derived from phytozome v7.0 (chr-ID 29629; pos 4 60243 to 461245 reverse strand)
tgacaaaggggaaagaccagagccctgtgttgcaggttagtttcgtcgttcttgctcttatatctggaagaaataaagaggaaaaataactatcattaaatgcattttatgaatgtacaactgggagaattgaagactgcagcctgtgttgatgactagttgacctcattaacagaagattctgtaacgggattgacatgcaggacaccaatgagattggataatcttgtgccctggttatagtcaattgaacatgctggtctttgagattgttatgttaaaagaaaagggttaactgctgtatgtaggctgcttgaaacaaatgagaaattacttaaaatctgaattttggattaactttgattctgcagaaaagtggctcatcgctagatttggagctgtccactgtggcatgtgacatttagagtgtccttgataccttgtacaatgtatcatttggccctaggaattgccacttaagtggcgaaaatggcatgttagcagtcaaactttgtaaaacattgtgtgatggtcatgggaaatatctgtatctacagacttgtggcactttcttgccaacattcttaggattcatcttggtttagttattttcttgaattttattgattagggtcaaattcatagttcttatttgcattgagtttttcctgaacaagtttcacaaattattaattgaaatatctccaaggtactaatatttgtaattggcaatgtgatttctgtcattaacattgcataaaacatgccttttgttgttcctttgtcactattgttatgcattacatgttgttggtccttgattcagtgttaggttgttaccggggttggataaccaaaccatcgcaacgaacttccatgtgccactgtttttagtatcattgtaatttgattgttgagttatagcatcattggccttacagatttgactttaaaaatcagtcacgtattctgtttcccgtcttgcactagctttatacaaggg

SEQ ID NO: 48623 - DNA, 912 bp, Ricinus communis
  Intron number 1 from transcript 29780.m001320 (locus 29780 .t000006) derived from phytozome v7.0 (chr-ID 29780; pos 5 3254 to 54165 reverse strand)
tggttgctgttaaatatatcgagagaggtgagaaggttagtagagtggtctgttttgcatctttttactaagttatattattcctttgtgttggtgtctaatcaacagtttgttatgcttggccaaatttatgttatctatggcttggataggtgtttgagcttaggtttagccgctaatcaagttttgtctgtctagattgtaagttcatttatgtttcaagatcagtaattcctaattcaggggaaacttagttggtctctttctgaattgagtttgttttcagagtaagtgattttgtttgttcagtggctaatcagcttattgagagattgtataattggataaagcccatttagggattaatgccctggtgtctgtttgaatatactttaagaattggcttggtattggccataattggtagtccaatgtttaaataaattttacaactacatgttttacatgagggtacaatatagaattttatgtcatttcttttcatacatgagagtaataaagcgttaattaaattgctgttagtgaactgcaattacattgaggtttttgaggttctcttgtggaattggaggttaaagattccggacctaggtggatgttaatggaatctacaaaaattcctatctgaaagcagacaatttttaatttgccacagaagactacatgagtggtaacttttcagatgaagtgactttaaaatctatggggaccaggaatcttgatatcgcactatttagagtctccaatctgaagaatgatgtggaatgagtcatgtacattctgtaatttgtcactgcatactcacctttgaaggttttatgcagttttcagtttgacattgtgatttaacttgcttttttcttttttttttctttcttcttcaacagatag

SEQ ID NO: 48624 - DNA, 652 bp, Ricinus communis
  Intron number 1 from transcript 29742.m001436 (locus 29742 .t000072) derived from phytozome v7.0 (chr-ID 29742; pos 4 71533 to 472184)
cctggaacttctgattcttacttaagcgactctaggtatgtcaaataaacctcgttcattatgagatttgctcttttattgtgtatatatgatatatggttagtatttttctttggaagaaagtggaaggtatagctataaagatcaaagctcaatgcgtatagtaacatcatgatttttcttgttaaaacaacttaatcgggaaatactgtgatcttttcggaaaggtgtaataagtgagttttattttttggtcaccttgttctagtttgtagaaactgtttcctagttgtatatgtctaggttttgagaaggtacaagtccaagaagcaataaattgagttatagctttcatgtcaaagtatatttcaaatggatttgggcatgcacagaagtgatgacaactttcagttctaagacatcaaaatatgtccaggttaattgcaaagtcggtgctgtaaccctgaagcatgatgtgatatgattcagctagaaacatgcattcactttgcaactaatgaggggtgaaattttcaaagtgaaatacttatttgtgactaatttaactttttgttataaaatttatgcccctttctaatgctcatcattttgtgcacacttaatttcaatataatccctgcagatttgatca

SEQ ID NO: 48625 - DNA, 675 bp, Ricinus communis
  Intron number 1 from transcript 27777.m000278 (locus 27777 .t000012) derived from phytozome v7.0 (chr-ID 27777; pos 6 5023 to 65697)
gaaatctgcaagtttcttcgagctgtagatataaggtatgtagattttactttactgatctagtcaataaggaagttagtacacatctcttacattgcacgtatgcagttttgcaaatctataatgcaaaggagaaaggaatgatagagtactgaatctacggatcaatataattgtttttctttatgaaaaagataagcaaataagtaactagaagttatttttctcacttacatcaactaagtgttaatgcatttagcagctacccagggaatatgttcatttataaaatactagcactaagttgcttgcaagtactctttatcttattatgaaaagaaagtggagaaatattttaattaaaagaaaaaggaaaaggctgtcaacttaaagatattatgaatgaggacaaatacgattcccatagaccttggatattgattggtggattttagataatgatggattcttggtttgtcttaaataagtcttgttctccttcctaactatgtcgaacctgcccatagtaaaatggtttatttcttttgtttcttacacaagtaatatatattctactctcataagattcacaaattgcaagtctatgctgtcaaatcaaatatctgtttactgtcaagaaacaagattcatgttaacagctcttttatgcagccg

SEQ ID NO: 48626 - DNA, 567 bp, Ricinus communis
  Intron number 1 from transcript 29093.m000082 (locus 29093 .t000005) derived from phytozome v7.0 (chr-ID 29093; pos 7 6722 to 77288 reverse strand)
aaaaacttgagcatcttcttttatcttcatcacaggttaactccttttacccttcttctgtctttctatccatcttgtctcatcttttatttttccctttttgcatgcctttataacttagctgtagtctctgggtttccctcttttgtttgttttctatctttcactggatttccttatattgggttttatttatctttcttgaaaccatatctttaatttcataggaataattaatcacttgaaagcaaatagttcctttgtatttgatgctttcctttttgtgtgtgtgtctgatatttttgtatgttaatctttcagattacttaggtgaattagccttataatctttaattctaagtatgtttcttttttctttgtttctttccatctcttcttctatattggtatttgtgtcaaaggtattgctgtattggtttgtggttcagttgattcattctaatatgattaaaacatgatgaatttgtcaaatactgatgtaatcttgtcttttttctaattttgagtacagttgggtatctggaggcaaagtttcttggtattgaa

SEQ ID NO: 48627 - DNA, 914 bp, Ricinus communis
  Intron number 2 from transcript 29751.m001820 (locus 29751 .t000035) derived from phytozome v7.0 (chr-ID 29751; pos 1 92938 to 193851 reverse strand)
attggaagcctcttatttctggaatcatctttcaggtttattaatgcatttattgttaagttatagatttttgtctgggatgttttagcaaatctgattattaaaaaaaggtgggtatgcttaattgtctctataaactggagttttgttaaggaaatggaataattacaatgagtggggagggggggtgggtgttgttgtaatgtgggatagtagcagtattgcacttgagaatgaaatattatgtatgtggttggtggttggtgattttgagagatgggctgtttaaatatttacagacactaatcgtattgtcttttgacattgttttccctatgtaaaagactctaactttaaagaacattccttgatagtctagttctttatcaaccaaggcgatggtgaacaagaattttctttcatatagttaaaaagacaacctttttgatggaacagattttatcctttatgtattcctattttgttctcaatgcaagaaagttttgcttctttaattgctgaaatcatgctgtatgctgtcttatgtggatgattgcatcagctctcacactgccttctcattgttctgtgatttttggatggttgaaatgcatccctgaagatatattatttttgttgtttttgtgcaactgttcatcatgagctttttcagtttttcttgtctattttctgattgatggttgtgcatgtgctttgtttttctcattagcattaaccttttattttgttttgttttacttttttctttcttgttttaagtccttcccattcctgttagaactttttttttttgtggaaagatatagttctttatttgcgttccatgttatgctgtcaagaattggtattatacgatactaacggatggggctctttttgtctacagtacgtac

SEQ ID NO: 48628 - DNA, 995 bp, Ricinus communis
  Intron number 1 from transcript 29726.m003898 (locus 29726 .t000010) derived from phytozome v7.0 (chr-ID 29726; pos 8 2553 to 83547 reverse strand)
gtctttgaagtcagaaggtggggctgtgggatcacgtgaggctctttcctgagttaagaatttgggataccagaaggtggtatttgagcttgattgtaaggcagtggtagaagctgtcatgactagaaccaaagatgttgctgaatttggctctctaattcatagttgtttattggtattggactatgaaagaaacttttcagtgtgttttgctagaagacaacctaacgaaattgctcattcatatttcctcgccatatatatatataatttaatgagccagttgttagataaatattgaaaatctcattgaatgatgcatcggcatcgccaatcaatggtcccaaatgagacatacaatgccaaatgaagtgcaagttggcaagattgcaggctaaaggaatccttagctcaagtttttgtagctctcttaacaagacttactatgctacaatggcaattacttgaagagtataatgtttgtttttaaggattttttataagggattttgtagaactagtagcttttctatatattaacattcattgtttgattgaaaaaaggttatattaaattctataaatttattaatttcctatttacttgaaaatcttaaaataagagactctttaaacctccatagaaaataagtgaaacacacgcaaaatttattctaaagttatctgcgagtttgtgagacattcttctaaccgttttttttttcttttttttaggataaagtctcaattttatatttaattgtattacaggaccaaattaaatttgtccttattgttcctctatgttttttttttagctagttgcatataatatctcgccaaatgaagtgcttaagctcctcttttgacttgttaatgacggagctaaagaacggaagaaacttccgttaaatacaactagaaacaaagaaagtgacagtatgtccttgggatctgatataccatgtgaatttgacaggaaagaaaaatttaaa

SEQ ID NO: 48629 - DNA, 506 bp, Ricinus communis
  Intron number 2 from transcript 27956.m000363 (locus 27956 .t000018) derived from phytozome v7.0 (chr-ID 27956; pos 1 92529 to 193034)
aaagaaattcaagcttgcaaaacgcaaccgtcgtaaggggaagatcaggaggaatcatatttaactctggaaaatgttaaggatttatgtgtttattatggtctgatacgaaattttgattggtcaagttatatggctgttatttgtttgagactagtgtattaaattctaatgttatgataatttatatagttcagattatgtaggcgtatgtggaatggatgcataaatgctgtttctcttttaattaatggcagggcagtgtacaatacctcaaatcctattatgcaaaaagcataaaagcgaattaccaaaactgggcctagacctggatagtgaacataatattagacattgttaccttttagttagtttgtgcttttgtgcttgctgcaaagagaataggcatatgactaccagatatttgttcatgttctttcatttggtagaatttatcaggattttgaattttatgttggcagattatttgattgttccctcatttc

SEQ ID NO: 48630 - DNA, 710 bp, Ricinus communis
  Intron number 1 from transcript 29814.m000744 (locus 29814 .t000031) derived from phytozome v7.0 (chr-ID 29814; pos 2 14857 to 215566 reverse strand)
attgcattggaggtatcattgggtgagtgatttcttgttttctatacaattttgttaatttaaaaacgttgattgttttaattggtagaattcgcagttacgcttttcttttgttcaaatgtcacttgtttttgtggttttgttggatggaaaatttggcatagtaataatctaataaagtcgcaactttgtatttagcaatgtctaagaatgcttattcggggattcttatagctcttaataccaaatgtcatcgtattatattattagctatattacggacaaggctacttcgtaatgtccgtaaactggaagttttccacttacgagaatgattatttgcaaatatttttcatttgtcaggtaactactgaaacttttatgaaagcttgatgttgattaatcagtttcatttgaaagatctctaggtcttgtggcacattaacgccctctgatttttggatttaagttgcatttgttggtggttatattttgaaattgttggtcggggtggaaaataaagatggaggatttctgtttgagcttataaagttactttagctcttatttacatgcctttttctctattttatcttctcaactctcaagtaatttgttttaatccattcattcaaactccataatatgggtttttgaagtttatgatatatgaacattttaagtggcatactcgtcgcagatatcagata

SEQ ID NO: 48631 - DNA, 733 bp, Ricinus communis
  Intron number 1 from transcript 28166.m001041 (locus 28166 .t000004) derived from phytozome v7.0 (chr-ID 28166; pos 5 4565 to 55297)
gtggcagtgtctggaataccagagtattcttacaagtatgttttccttataccttttgtgctattgcctttgccagttgttttgaatactttgtagtgtgctattatctcttctgtgatggagtacataattaaggatattgatgcagtcaagaagactaggtatagggatctactttttaattttgaagttcagaatttttttgtaaattcttatttaggaagttccaaatttaattttatttttagttaggaatatttaaccctgttagtatttgtttcctattatatgtattatagttctaaatagtataagtttcctttttatttgtttagatagaattattttatttagaattatgttaagagtatctaattagtataggcttagttttctatatgtcggttgtagctctaaggcataggaagttttggggtttaataaaattgtttttcgtgtgataacataagttctacactagatatgcattctcttttataattagatgtggtttttttgcaatcgtttattgttgatatgtttgaattactaatgcaagacaactgttacatatctttctggttgcgacaaatagtgatctcataaaaatgaccatcagtgattcttataaatgcataggatacttttctttctggtcattcttgtttgaaatcttattcctggtgctatttgttcagggacctacaaaaagcaacctataattttacgacat

SEQ ID NO: 48632 - DNA, 855 bp, Ricinus communis
  Intron number 1 from transcript 28320.m001141 (locus 28320 .t000068) derived from phytozome v7.0 (chr-ID 28320; pos 4 15697 to 416551)
tttctggttcaggctgctccaagtttttttgcaaggtacatctatatatatgttcttggattatttttcatgatcttcatcttgcacaagcagcttaattgaactaatcgagattataacaactatgtatgatttctctctaattattgcctccacttgctgttatacataaaactttcttttattgtaatagtatatacttctttaaggaaagactaagtagttgtatttacgagaaaagtaatttaactatcttaggtttgtcttcatatctcttcagttttggaacttaattgggtatttatgttctgcttgatgtgtcttgcaggtaaatatacaggaaaatttcttgcctttcccggctatacatactcccatatataatcacatggcgtggtcttcactcgtatattaatatatctctttatatatatatatgttgggtatagtttagtagtatactcttagtttaaaaatcttagttgtatattattcatttccgctttataatgatgcgtgaaaagcataatccacctaatgttcttccattgacaagcttttatattgctttccgcaaatggagtataggtttcttgtttcgggagtgatatggctatcgtcaaaattttgcatccaacagttagacaagtgatgcatattttgattttttttataacatatacttaaattttgtaactatcttatccgtattactcattcgattattaagtgtcatatctcaagaatagcaagaaaaaagtcattttctatatggatacaagtaaaaaatcattcaattattatgtttcactaatgcttcttgcagatactggaaaacgttgaagagactgttgg

SEQ ID NO: 48633 - DNA, 942 bp, Ricinus communis
  Intron number 1 from transcript 29693.m002034 (locus 29693 .t000072) derived from phytozome v7.0 (chr-ID 29693; pos 5 40539 to 541480 reverse strand)
ctgatcttggtggtgataagttgtctaaggtctgttcgttctgctctggtttttgggttttggatatttgttataatattggcgggattttggatctgacgatttgtttgattcgtaatttaatatgctgagataatagagagaaacaatttgttaattctgatttctgtgtttcttggaagatgctaaacatgcaggacaaattggttgtcttcttgaatgacttattgcgtttgtgtcctttgagtttatttgatttttaccttatgcatttttgagtttctggtttgataagtaggctggacttgggtttattttgggggtctgagcatgttctctgaatctcaatattaaaaccatttattacatgcacagagcacatatgctatttctctctcccttccattacaaagtgattaggcatttgttttgtttctcagtttttgaagcttatattttttgttttagttctgctttgctttctctgttttgttataatgtagcaaattccttttgttttcgaccaattgaaactcagatcatcctgaatttgaaactgtaccattttctcgcaacaatattacaaaagggtacttgattgttggccaatgcatattattccttgagtttcaaattataaatcccattcaccagggaatgtgcaagatcctccttttacctttttttttttagaattttttttttcctgaaaagcaatagatacatttgaatacatcagaaattgcatggcaatctgatttgaggatgcaatcctgatcctaattttataaatgactgaagttcacggcctcttcacttaaaattgaaaagtttggttaaaaatgcaatagattcttatagatatatgtccaatttgtttacctgcgtatatttatgcacattgcagattgataaagagcgagctggtgtgcttgttggaac

SEQ ID NO: 48634 - DNA, 425 bp, Ricinus communis
  Intron number 1 from transcript 29815.m000499 (locus 29815 .t000011) derived from phytozome v7.0 (chr-ID 29815; pos 8 4619 to 85043 reverse strand)
accagtataatccaggtgaactacccacttcagtttttgctttctttcttttttttttttttttttttttttgacttttccatttgcatggatactccaaaggcgcttccaggtatcgctagttagtttgttatactattgttcattactctgctctatcgacttcaagttgaaggagtcccaccttctttgatttcttgaagaagtgtatgttattgagctgctaagatgggattctcattttaccaatgagtttttactcagtggtattggaatcatgtcctcttcagggctgtgaatttttgaattgcaaccccgtacaaacaaaaagaaaaggaataatcatgtacttgtttgctttagacaggtagaaatccataaacctactctcattaacaagttatgatatatttttcttcttagga

SEQ ID NO: 48635 - DNA, 741 bp, Ricinus communis
  Intron number 1 from transcript 29717.m000231 (locus 29717 .t000011) derived from phytozome v7.0 (chr-ID 29717; pos 6 3950 to 64690)
tctttgttcttacaggtagtgttttttttaactttttacacattgggtttgatttagtttgattggatctttgatggttagggagttcgaagagatcatttgttttggttttagttgatgtaatatgataattgatgttggtttaaggttgcaattcctttaaagttattacttttttaagatctaatgtaatgaatgagggtgtgtgatcagtagtatatttcttgtctgtggtatatacccttacaggtacttggttttatatttaatatcaggtctttattttgtagtgtgactggaaggttctttggtttgagctgctaaaagaattaattttacaggctcgttgctatatttcaaagtgattttggtgttttataattttctcttggctcttctttgtgctttaacatttttgcgtttgatttgactcaatatataaaccattaggatttagcaaacagagcttgttctccattttcacatgaaaaagggtgggtccttgggtatcaaatgtttttctgcataaatttcgcctcattttttgcttgatgatattcacaaccttttttccccaggcgtggtatttgtctgtgctgtatgcactgatgcttttgtttcctattgatgatgcaacaaaagaaaaagatatgttctgtatagtttagtagcttatgatttagtctctgaattgtcaggttatgttaaaacttgaagcattctttggcagaccccgtagca

SEQ ID NO: 48636 - DNA, 1004 bp, Ricinus communis
  Intron number 3 from transcript 27436.m000293 (locus 27436 .t000018) derived from phytozome v7.0 (chr-ID 27436; pos 1 82495 to 183498)
atcttcaacttcttctttcaagtttcttaaaaaaggtatatttgatgaatatgttagaaacgtatgtttttatttttatatattttatattattattttttattaattttaattttttaattttttggtagttaaaattgaaaaatatttttcttactgttgagtaaagacaaaagttgaatttggatggatttttttataaaaaaaaaagatatattcattgatgatgacaataatgacgatgatgattttgagtctcctccacctcgtcttaaaacttttgtagcttctaccttaaaataacctaacaattttgggtctgatgttgatggctttattgttaatatgaggaagcaattaaaattagtgtattctaggcagaataaactaattgttgaattttctagattgaagatttttttaaaatagaatttttttttttaggtttttgatgttttatcttctctttaaatgaagtttcaaagtgatcgttcaaaaattgctagttctaattttagagataaagattttgaaatatatgtcatatacttaatatatacctattgtatatttagtataacttctatatatttaatgtattctttttactatttgtacaattttgctataaagttgttgatgataaggaagatgttgatgtggatgatttataagatgatgatatttttgaaaaggaagcaagtaaggagaaggttggagatgaaattagtaaagatgataagatatatgttttaatttttttatgttaatatatatcttttagattataaacagataatattttatatttaatttttttagctaggttattaatgtgaatgttaatgatggtaacgaagaggataatgatgatgaaaataataatagagatgataaagagaattgtgaaaaaaaatgatgatgataatagtcctgatgaggatggagataatataaatgattcttttgatggtgggatggtaaaaatatttaagaaggcagta

SEQ ID NO: 48637 - DNA, 862 bp, Ricinus communis
  Intron number 3 from transcript 29680.m001668 (locus 29680 .t000011) derived from phytozome v7.0 (chr-ID 29680; pos 7 6271 to 77132)
ttgaggtcagttttggttttccattaagtgtcttttttctttttccggtccatttcaagctggctatgtagttcgatattgatgattttggatcacacattgggaggaaacctatgaaagatggcaccttttaagaaggggatatttctttggtgttccagtttgaaaaatgatgtgcttttttgccttgctaattgctacccttatagctgagaggtaatggtgttgctttcatttagattttgctagttagataaaagccaaccttagcaaacatctcttcttttttcgtagatggaaggggtaagaaagggtttagctaatggagatattaactcttccggaaaccagtaacgcgtaaaccatgttatttttgtcttcttttaattagaaatctgttgttaggatatgaggccttaggttgaagtacaaatgaagaattggtcaaatatactgtactgatgttttgaatctctgaacaatggatttatttgaataatttgcatgttttagatctgctatgcagtaactaataaaactcaaagtcagtgtgctcagtggtaactttttgctgctttcataatctttttcatgctctcattataagtcaggattagttccaacatcatcaattagattctttgtttttctcagtttataaacttacattgcttgtcttctgtcatattgtcttgcctcattaaatatttaccacaattcgtcacatgtgtgtatattaaagaaggaacacttttttctcttctgaaaaaaattggcagctgaaaagttttgtcaaaaattttcttttcctaggagaccctgatttgttgagctgcaatgactcaggtagattatcgaggtt

SEQ ID NO: 48638 - DNA, 1034 bp, Ricinus communis
  Intron number 1 from transcript 29729.m002382 (locus 29729 .t000115) derived from phytozome v7.0 (chr-ID 29729; pos 6 33053 to 634086 reverse strand)
tcctccttgcctgataatcaccaggtcctttgttactttctagatacattaattaattcatgtacagatatggataaacatgcatatatatgttggtcgtgtttataggtgatattggtcgggcacagcgctggagggctaagcgtaacgcaggccacccacaagttcgcaaagaagatcagagtagcagtatatgtggctgccaccatgctcaagtttggttacttgacggatcaagacattcaagatgtaaatttctatcataccctatctaccaatatacatatctcttaatctgatcattcatataaatacatatttcagatttcttttgactaaattattatgataatcttttaattgatgggacacagaagaacaagtttattcacagtgatgatgatgagtactgcttttttttttttttttttgagtgtgtgtgtgtttggggaagagaagaatatagggatgtatggtagccaactgtcttcaccaactattgagttgttacccacttcatgacttctgaactctcacttcatcatctccataacgttactgttactgttccatgccaaaacaaaaataaattaagatattatatttaattaaatcagtataggcagagagaggcaagctattaattcatttgaagaaactctccccacccacctaacactatgtgattttagctacgtgttaaaaatatcacttcacttgttcgtcatggtttgttctattttctgttccttcccaacgaaaatggggggggttaactgacaagcaagattattttattttattttttaaccaaagcaccaacttttttagacccatttatttagccaatgattgatgagacgtattcattgcgagaaaaactactaacaagggaaatgatcatcattgcatccttttttacggattaagattctttaagtaaacggaaacttactgtgagctgatatgcttccattgatatatatgtgaactgaacagggagttcctgatctgtcctcattcggagacgtgta

SEQ ID NO: 48639 - DNA, 546 bp, Ricinus communis
  Intron number 1 from transcript 29613.m000368 (locus 29613 .t000011) derived from phytozome v7.0 (chr-ID 29613; pos 7 1547 to 72092)
gtcctccttcttcatcagtcgcggttagatcagctgtgagtttctttgagttcctcatgggtttatcataaatattctatggatattattgaggatatggcatctaaactctattttatcaagaaatgaagcatactcggcaaagatatgatctttagacgtaggccggtagtccattattgtatacttgttgtaataattctttgtagtgctggtactccaattgtataatttataaagaatttggtctaatatgcattaatatgatcgagatttctacttcgcattgacataaaagaaagagtttagcgtcttctctttcatgtgctacttcttttctgttaaaaatgctaagcttactgcgcaaagatttgatctttagtaatttattctacaacagcaataagaattctttgtaaagctggtataaagaatttgatgcaaaggtaatttcagttatcaatttctctgaatttgatgcaagtttgtgaacctgttctattttgaacgtagttgtcggcgtttataatttatttttggtgcagc

SEQ ID NO: 48640 - DNA, 718 bp, Ricinus communis
  Intron number 1 from transcript 29651.m000292 (locus 29651 .t000012) derived from phytozome v7.0 (chr-ID 29651; pos 1 34823 to 135540)
ccccttacgggtcttacctttgctgtctccgacgtgtaatttttatttatacacctcaactagtcatttttgtttcgtgtaaatttttggttttattgcttttagtggtatactctttttgatgattgagaaagttgattccctcagaaaaggatttggtagcttgcttagaattgcaaaagaaagaagaatagtgagtacatgtgaattagttcagtatgttccttaataataaataattcaattcatttttagcataattttaattcctctaaagtgcctttttttttttttttctatggctagtcaaaggaattggattttagcaactgtgagctttccaactaaatagaataagaaaatgaagtataatgtttctttttggattgaatgcaatttccaatcttaggaacttgatttctgagtgtttgatactagtgttcttaattgaagttgtgcaaacaaagctgaaaaattttatttccaaaaaagaatttttgctagcatgatgttggagttggggtcgaaatagagtattcccttctgttagaagggaacttatgttaattgggaaaaccgctgtaacaagtagaaagttttgtttaacatgtccatggcttagaatcttccttatcattgcagacttttgtaattttctttttgtttaacctctaaactggtagttttcttgtatttatcagatttgatattgaagggt

SEQ ID NO: 48641 - DNA, 430 bp, Ricinus communis
  Intron number 1 from transcript 29729.m002273 (locus 29729 .t000006) derived from phytozome v7.0 (chr-ID 29729; pos 2 6556 to 26985 reverse strand)
gcctaagagtagggacgtaagattaattgtttctttttcgtaaagactatggtttttagtttgttgagtcaatgctcttggtggtttgattgctttttctcggatcaagtgtgattgaagctacttcatcttgtaggaagaaaaggggaatgggagatatttgttttaaatataacttgtagtttatttttgcataccgtttttggttttaagtgttaggaaaggggttcaatatctaattgtacatatgatatacatttgaagcttattatcttggatttttaattagttatttggctgctgaactattagttattacttattgtattatagcttcaggtgttgtcagtctaatgtgatatacatttatgcttgttaagatatgaaaatattgataatgtggttttcattttcatttcctagatttggt

SEQ ID NO: 48642 - DNA, 784 bp, Ricinus communis
  Intron number 1 from transcript 29596.m000723 (locus 29596 .t000037) derived from phytozome v7.0 (chr-ID 29596; pos 3 10136 to 310919)
atttcaaagactttggctttactttgaatcaaaaggtatatatttgtgcctctttcttttttctattatttttgcaatataattatgtatccctgtgaaaaaacaatctataaatctgttgcgtttatatacattgtctggttgctttcgaccgatcaacaaagcctttaaattttccatttcatattttattagaaacaacgaaaacccattattagtaaaattactttaaggacacagatcttgtctaactcattgacctctgccgtaaaataaaatttattgtatgaacgattttttttttttttaagcatttggaatgtagatgcgaaaagaaattaataggttcatgcacattgtcaataacaattagagattcatttaggtttctacttgttaatgtggtgtgcgagatgctttcttaatgcctactttcttaatcccgatttgcatgtttgaccacttttactgaaggcatctcttccatatgttagtgcaaacaatcctgcctcttacataaaaaaagaaatgtgaataatagaattacaatgctaatgcctcccaagtttagtgctaaattgttagactacactttcttttttaagtttacccaacataggaacttcacattaaatggtttttcatttttgatttggagttccataaccattcaaggattgaacgttagtgtctatatatggaagtcaattcattaaggacttccttttttgtttaattttatgaatatctaattactgatgaagagctcatgtctttagcagtt

SEQ ID NO: 48643 - DNA, 344 bp, Ricinus communis
  Intron number 3 from transcript 27758.m000327 (locus 27758 .t000008) derived from phytozome v7.0 (chr-ID 27758; pos 1 01108 to 101451)
tccaattgatacaataaagacaaggctgcaggcaggtcaaatatgaagtgcttcatcctttttcttcttaagttttacattttctttgttgtatgtaaggctttatcttatcatattagttatcgaagactgtcaaatttttattgttaagtgcttctttgattgtgtttattaatgggtcatactctgtcattgctagcgacatatatttgcttttgttagtatatttaccctttttttttccaatcattgaccttgttttagcatgtggatgaggcagagggcatctaaattttttgctaacattctgaaaataattattgaatttattgtataagcagctc

SEQ ID NO: 48644 - DNA, 673 bp, Ricinus communis
  Intron number 4 from transcript 27561.m000291 (locus 27561 .t000003) derived from phytozome v7.0 (chr-ID 27561; pos 1 7744 to 18416)
acctgtaagtgctttttgtttattttttgaacaatatattctcagtccatgggaattttttttttccttctaattcctccccttttgataatgatgttctttttttttttgtgaaagaaacaagtgttagactgtatgatttgcagttatagcgcatctttacaacaataattacttttttgtgtgtcaaatggccctttagtctcggaaggtttctgattaagttttggaaacctgttcatgcatgcctgcatgtaagaattcatgtgttatcccactagttgagctttaagtagaagaaataaagaacttaatccccatttacagtacgtaggagctgctttttgttctctttttctttttcttttttattattttcagttcttttctgcaattgccttttggtattctgacttttgggagaaacagagtaaatccatgcattttccaaaagatggtctcaaaaagcagtagtaagaaaaaaaaaatcaaaggcaggtttccacacagctacaccaaactggctcttattaaccccatttaaactatttgtcatttgttatggtgttatcgagatcactaatgatttcatttttctgcatattataccatcttccaagagtgatcagctcaactacctgctgatttgactttaatgcttgtaggttcgact

SEQ ID NO: 48645 - DNA, 1048 bp, Ricinus communis
  Intron number 1 from transcript 29687.m000590 (locus 29687 .t000031) derived from phytozome v7.0 (chr-ID 29687; pos 1 95153 to 196200)
caggactttgaggagttgtataaggtaaagaaagcttctttctcttttggtttttttttttttttatagattgtggtttcttttgaaggcttctttttgttagatctgatgttttgctatatttgtttttgtgggtttccttcatattcttgtttggattttggaaaaataaaaaaagggagaaaagttcgtttatttggttctgatttggctatttttcaaaaaaatgtgctaattttgcctttcaataagttgaaaatgattattatcctctttatgttcgttgattagtttggttgcagaggatattgggttcacgtgtgattcacctgagggaaattttgggtgggggcttttgtggtgtttgattgcttagagttatttcttttgtttgctcaacatccaaatatatgttctcttcttattattaagctttcatgggtttacatacaacttctgctttgtgatctgtaattttattttatgcctgtttgtgtttatattaatatgtcgattcatgtggtttatttatttatcttctgtgtatctagttgtgaattgttcatttgctagttccctgccttcagattttagattttgacctagaaatctttttaatcctgcttgataatagctttcttgtaatttagtagcttttcatggctttactgtttgattctttagttcttgatgatctctttgattttattggttttctgcaatattcacttttaaattcatgttgattgttgattgttattggttttaatttatctcctgtatgtttgatgaaatttcaatactattgcttttatcctgtctttataactgagcagaaaaaccttgttgacatgttataacatttagtttttcggttgagtagtttaaaacttttagctgcttctgttttgctacaaggcatatttgtaaggtttttaattggtttatagttaattaaagtttcaaattcattaatttcagttattctgatgaattgatgttttaattacttttccaggaaacagaagatcagaaaaagaaattgcag

SEQ ID NO: 48646 - DNA, 490 bp, Ricinus communis
  Intron number 1 from transcript 29726.m003980 (locus 29726 .t000092) derived from phytozome v7.0 (chr-ID 29726; pos 5 55785 to 556274 reverse strand)
acaaggtctcttaagtttaatacccaggtaatagatttcattattgatctgggtttcctcttcttttattgttttatcggtttaaatcttaaaaagattgctgctttttctgttcttcttttattgggattcttgattggaatgtgttggcttttcatgtgatctagatcttgaacttttgaagattcatgttttctttactagcctttataggggttgatgggttgatttagatttgcatccaattcatgtggacgggaagatgagattttctagtagaatttcaagtttcttttttaatgtttatggtgcctttttcatgcgaatgaaatgccaaaattattgagcaaaagtttaatgagtgggtttgatgttagattttgatattctttactttttgatgatttgtttatttattatcattagtaaaacatctgtatttttctttttcccttttaatgatttttagtgtttgagcaggcaccaagca

SEQ ID NO: 48647 - DNA, 613 bp, Ricinus communis
  Intron number 1 from transcript 29737.m001217 (locus 29737 .t000011) derived from phytozome v7.0 (chr-ID 29737; pos 6 9400 to 70012)
gagacattaaacaacagagtcatcttctcaaactggtcaatttctaatctttcttacttgaatttagctattacgttttgaaaattatttctttcgcatgagcctgttgaattgtttagattgattctcattttttttcgttttcattttcgaatcaagctccgtcaggttctttgttttttatttaaaactaatcataattttagttcgtaattgtttgttgactattcttttccgttttttgcattttcctgttttctttttcaatggtttggttataagatcttctattcatgcgcattattatccagatcttttgatttttgcattacagcttcaagttattatactttcctcctctcacctccccctgatgcttcagttggccccacttgtcaggatcttttcttggtccagggatgggttcccatattccttttccccttttgattttagactgcacttcatgctattgttaagctaatcttcctcatcttattataagacatctaaccctagtttagtcaacccaatagaacttgtctccttctacagatatatacatttgatatcctttttcatagtttaaatgaatttcttgatgttgatgaag

SEQ ID NO: 48648 - DNA, 425 bp, Ricinus communis
  Intron number 2 from transcript 29568.m000283 (locus 29568 .t000006) derived from phytozome v7.0 (chr-ID 29568; pos 5 6728 to 57152 reverse strand)
gcaagtaagctttccacatttaaagctgctaatatttggtataaatctattaatgtagttccttgcgtattgaaaattaagcatgatatatatacatatatctttttctttaaataatattttcacacttaaaacatcggttctccctagtgggtgccgtttcgggcttgcaatatgtttaccacagttaaaacctttatagtacgtgacgctctcatatatttattgttttagcttagcaattagatgcatcttcccttcttaacttttgattatattaagacatttccttgaatgcttatcaatttgctgttgaattgggtcaattggcatcataataggaggatttctttttagcatttggactaactaggagttttttttttatagatcttcattcaattggtggtttagtccctcttctt

SEQ ID NO: 48649 - DNA, 757 bp, Ricinus communis
  Intron number 2 from transcript 27516.m000169 (locus 27516 .t000002) derived from phytozome v7.0 (chr-ID 27516; pos 1 5308 to 16064)
gcaggtgaggaaactctgtgcctatggcatgcacttttacagaattttaaagattatattattttctctttattctattcccttttttcttataactatgtattttgctattcttttcttctttttcattgtacgaataatatatttgaagttaatctatgccttctctttggtcctcaaatactgttttgctgtcaatactctgaaatcttatgtgagagcctaagaggaatggttgcaaatgtggagattttctacagtagtttatattttatatgactggttagttgtccataatatttcaccatatgtttgttctggtatgcataaataagcttagatacataatacatgatttggacaacctacagttttaaggttttaggttctcttctttaatttgctctttagcaatttgcctgttctttgtatcatatgaaatcacagcagttcatagtacttctttttacattactatagatgaattttggtgagggttaatggacatactctatctaggggcttaactaacgtacctaacctgaacataattcaaaatagtgaaaggagatgctttatcagtcctccgcaagttgcacaaagaacatcatctttttcatatatgccctagtacaccagcattagaattcggagcataattaagagcacaaattcatttgagattaactgtctgaatgtaagtattctcctaatgagcacagtgatattcgaggtgtggctgttgctggtgttgagg

SEQ ID NO: 48650 - DNA, 1032 bp, Ricinus communis
  Intron number 1 from transcript 28166.m001071 (locus 28166 .t000034) derived from phytozome v7.0 (chr-ID 28166; pos 3 27096 to 328127 reverse strand)
gagtcagaaatctcgggtaagtgcagttaattttagtatcatagcccttgtgagaacagagattgcaaaaactatttataatgtcttgtcatatattctatatatacactaaactgaaaaataaagcgacacaaattattaaatattaaatcatataaataaatgtcaatcatccatcatttaagtaaaacatttatactggttgttactcacctatttattataaaggcaagacataaagagagcgagggatgtcatacataggaagcccattcttgcattttagtgcaacaaagaatataacttttactattacatttagcatatgtgatgattgtgcatagatcattttgacacaagtcatattaattcgtatgtggatttacataattgtcaaaagcttcgatctcatttctggccaattaaactcccaaaaagatgcggtcatggcatgcatgtccttctagttgttggatcaacatatattcagtcataatatgttgtttaatatgtgtacttttctgtcacaattctccttgaaactaagctacaaaaagtacagattaaaaatggtcatagcacctatacctttttctttatcggaaaaatgaactttctcattacttaagaagaagaatgatcctcatacattgagtgcatatgttttaaaatggaaacaatttgttgggatagtgacatatattattatccatcagttgttatatttatattggttggttaaaaaatgctacatgtcgaacacttaaattaatttattaaattgaatttatctaaaaatttcttataaaatatccaaaataatgttataaatttcttatcagttatataatttttttttttggctccaccttatggaaagttcaatatttaatatagaaaataaggataatcaaattttgttttctctaagaaacatatggttaatatatgttagtagagagggaactaatatatatgtattctcaatcattttcaggtcgactattgaagcatttgtcaacttagcagcct

SEQ ID NO: 48651 - DNA, 836 bp, Ricinus communis
  Intron number 1 from transcript 28140.m000102 (locus 28140 .t000004) derived from phytozome v7.0 (chr-ID 28140; pos 3 0943 to 31778 reverse strand)
tcgttgcatcggcatccctcgttctctcaatcaaggttacctttcttttactgtcttttttctttcttagttacttatatttgttatgtaatgttagatttttgatgtgattgctacttgctttctgtgaccaaaagttcttgaatttttggccaagtttttcttgatttcttgtgtaattatttgttttcttggatttgggatccttctatatgattttacaatgaaaagaaaaaaaggaaaggttagattatgggatttcctcatttctatagctgcacctttataaaataaataagcttttctttcaaattttccttaatacattttcttagattttgttatgttgcaattttatgttacttgctattgtctccttgtggggagtagtggctagtctgttgcggcaaaattatggtctcaaatactctttatactaatgccttgaatacaaatggggtatatgtgatgtgttctttcaagaattgggattattgatatatcacttgggaaaaaattcttttgacaaatgcattagatgagaaaaactttaggcttctaatgtatcactttaggagggtaattgttcaacttatagtaagaccttcaaactcaataatgtgtgtttgtatatctcttttgtaaattgaaccttttcctactctgtagtaatatgtttcagtcacctgtacaacctgggtgtgcggaagattgcttatacttactatctccttattacatgcttgttttaatgaaatatcttttttttacatatgctgataccttaagtttgattatcagttcccaattacactgttgcacagtctgaggtcgaa

SEQ ID NO: 48652 - DNA, 647 bp, Ricinus communis
  Intron number 4 from transcript 29726.m004050 (locus 29726 .t000162) derived from phytozome v7.0 (chr-ID 29726; pos 9 30178 to 930824 reverse strand)
acaccgagcttctatctgaggtatggttctttacagggtatgcttagtctaatttgaagggtaattccaccttcttgttatttgccttttactcccccttgtctcagttagtaattagtggtagtgggttgggtaaggttttggtatggaatatgtcaaggaaaaaggcaattctaactgttgatagaatgactgctcattaggatggtagtctgcctttgattttaaagtaatatgtacagttttagtgtacttaatataggcctatgattcttatattccattttatgtttcccctgagcctaaggattcctaattcggttaactaattacctgaagtgggcaactgtcactaactgtaaaattagtttctggagtttaggatgggtcccatgagcgtaaggaattttggtctgctgtttcttgcttctttctgccgtttccctttgctgtgttcgttgaatttttttacgaatgtttaataaataactaaattagactcgccaatacattttctgaatgttcgttgggaatctgctttattataaagtataaattatttttttcttcctttctttctcaatatagtaaggcctctctatccctttctatgtgttaatgaattggtgttccaatatatttgcagc

SEQ ID NO: 48653 - DNA, 757 bp, Ricinus communis
  Intron number 1 from transcript 29636.m000751 (locus 29636 .t000016) derived from phytozome v7.0 (chr-ID 29636; pos 1 92645 to 193401)
tctcccactcacctccttcccgtaacttaatatagctttattttttagttctttataacaaattaagccttattattattattattagttcatttactttgtaactaaaaactttatcactaatggatggtagcattttattagccaaaagtttatatttgtgatattggagacttaaacagtatgtttgtagaattatacgcatttaaatattttgttcttgattgaaaataaagagttaggtaaaaactgaggtgggttttgaatatactggataaatttgaagtgtagtttaagactttcggtatagcagataagcaaaccatgttagaaatttgcaccatgagaatctgcaaattatagcatttagtgttggtgaacttgccaggcattcataaattaaagtcttcaaaaaacactggctctctttatacaaattttgtctgaaataaattagacgcaagagtttttgaatttggtttcttgcaacatcatgccacttctggcaagattttgtttctctcatttcttttttgtttctgaagttgaaacattgaacatcagcaactatgagttttccaaacttgaaacttagctaaataaaattcaactgaactggattcttgcatgtttttgattttccaaacacattagctagtattagttcatatcctaattctttctccaattgacttagtttttccaatttgttttgtgtttgttatctcagaactgcagcagcagtttgaattttgtc

SEQ ID NO: 48654 - DNA, 630 bp, Ricinus communis
  Intron number 1 from transcript 29428.m000327 (locus 29428 .t000011) derived from phytozome v7.0 (chr-ID 29428; pos 1 14526 to 115155 reverse strand)
ccccagtgtcagtgattctatctttgtcttctcctttctttaatggcaaatttatgcaaatgctcttttctcttctatggcaatttatgcaaataattctgtttcacacatgtaatcttcttactgttcatctgtaacaaataatcacaataatctgcatccaaaaagaatgcagcattacatttagttctactttacagcactgcattacatttcaaggtttagtattgaaatgtaaaagcaaatttgcaaaatgcaatcagtctttttcattcaatagttttgtgtcgctgttttattgtttgttgcaagaatatatttctgctaaaactcattaatattattattttgttgaaaatctttttcaaccaaaaaacatcatttgagacttgagtgagggtattatcttctgcttctcatgaggcaaaatcaaaaagcaacgagacttatcttaaatgttgcaaataccttgagaaaaagaatctactttttgaataagtgcttttgctgccccttcattgtcaaatcttattactttcttgaagataatttggtcaaatattattattacaaactctgaagaaatacatttctctacagacggttttcccataccttataatcctaatt

SEQ ID NO: 48655 - DNA, 626 bp, Ricinus communis
  Intron number 1 from transcript 29692.m000544 (locus 29692 .t000027) derived from phytozome v7.0 (chr-ID 29692; pos 2 81972 to 282597)
ggtcaccaggtctctcatttttttttttcttttgatttaaattatgtggtattgaatcttattttaaattaatatttgaatgatctgggatttatcatttctgtgttagatgacttgagatgattaatttgattctgctcaatcactatttagcttcatcttttacaagtacttttcttttgagaaatatctaaacttttgctcctttctgtttttctcttctggtaatcatttaagggaaattggtaaacttaatttgttgatgaaaagggcactcgtgttcgtatatgtttaaaatggtaagaaatactgttttagcttgacacttttcagagaaatcacctcgttccagaaagtaatcggactctgttttggaattttcacgactaaaaaattgccaaatctatgatccttctgagtcacagactgtttgtttgatcaactttgagctcgtgaaagaattgttttactggttctgtttctcaagtctttacatatgatgatgtcatcttgttggaaaataaaagaaaagaaatttagacttgtgtgctgttattcctcccttctgatgtaattaagaagttggtgcagacattgaagactcgagtggtgaaaaagaactgcaa

SEQ ID NO: 48656 - DNA, 687 bp, Ricinus communis
  Intron number 4 from transcript 29739.m003598 (locus 29739 .t000034) derived from phytozome v7.0 (chr-ID 29739; pos 1 81216 to 181902)
aactgctggggagactcctaacattgtcgacacaggtttttcttcccacaaatttcagttttgttataagatacattctgtgtttttttctatttctatttatacaaagtattatgttttactggtgattttatttaagggtcaaataccaaaatttgtgtgtatttcctgtcatcatcactgtttctattgtttaccatagctcttcttttgatactctaatttgttagtatattgcaggtaatgacaaaatttgatagattccatcgttcaagtaacatcatttgtcatttaattgcatttctagttacttgaactccccgtagtatggtattgcaaattctggcttcttttaatagagtatatgacctgctgaaagcacctattataaatcgtctccaccactagatgagaaaagaataatactttgtgcgaaggagaaaagcctgaattgttattcatcccattcttcctttatcttcttaatttgtaattagaaacttatcattagtagcaatttttatttaagcattttgctatattttgtattacggtatcttggttaagttttgttttgatcttcccttctctttttctctagtgttcttttctgtaggattatgattttaaccattgattttttcattttttttgcagaagttggtcggataggtataggtatctgtt

SEQ ID NO: 48657 - DNA, 788 bp, Ricinus communis
  Intron number 1 from transcript 29634.m002115 (locus 29634 .t000061) derived from phytozome v7.0 (chr-ID 29634; pos 3 95228 to 396015)
ccttttattcgccgcctacccgagtttaagttctggtaatctttttgattccttagcttctcgttttctttttcttttttaattattttattaccctgtttcttcagtatggaacctgctttagtatgctttttttttttttttaaaccagcttgcgagaatttagtaattcttttgtgtctcgtatgcttgcttataccactggccttttttttcgtttatgctgtgcatgctgatgttgcataaaaaagaactctttggagctttggctattctgatatatcatgccaccattttgtctatttatgctggcacaatattgaaaggaagaatttttggttatctaaacttatgtaattcatttcactgcagtcagttttacaagggtattttcattcatgatgtttgtcatcggtcttttgtggcttttgtaagactctgattttggtgcatattggctgtgtatctcttatttagacatgcccgcaattatgtgttcttgttgcactattttggaaacagtttgtggagtttcttgcggaaatatctactcaatcgatatactgaacttgtgacatttgtttttttatattttctgaaaaccagctagcttctgaaaatatagtggccccgtgtttttcaatcagctttatcagtgcatctcattttatcctaatcctcacgtgaacgtcgtagcttccatgaagggtttttatttattcagcttaggtaaatgcttaaattcttaaagttctgaatgtgatatttcttttgtcatggtttcaggt

SEQ ID NO: 48658 - DNA, 1017 bp, Ricinus communis
  Intron number 2 from transcript 29709.m001207 (locus 29709 .t000043) derived from phytozome v7.0 (chr-ID 29709; pos 1 82504 to 183520)
tacctagaagatcgaactgttagattgcagctctggtaaggtcttagtaattctactatgttatatccctcccgaactttcccatatccatccatatgcaaaaaccatcctagaattctgacattttttattgtgcgtgcaatttgttcttttaagtgtaattcatgttttgcctatcagtttccttgatgattgagattatatctgtaaataagacacctttttctagctgctttactagcaccgtgtcaccagaaatacaacttcctaattttgtaaggactacataaaactcataaaatgtcttgaagtctgtttctctgttttcttcaatcctttgattgattagagcacacattaaaatagactgattgattcatgggatggctttaactttgggtagcattctgaatgataaacttcataataccctaaccctagaccaagttaattccatgctgctagaggttgccttcaggttgttgtgatattacttatggctacttcccttttggaatgtcttgaataaaaaggttctaccatatttgagaatcacagtcaataccttagtgtaggtacttctggtataaccctttgttccatattctggggctatttacaactagccaattaagaattttcagatgtacggactagtactagcccagtgcatcaaagatgcagtcatcagcatatggtaaataatccatgatatttccagataaaaatgttttctttttggggcaatttatgtgcatattattgtcagttaatgctctcatgctatagtaatgaatgatgttaaatattcaatactgggtcatatgaattttctaaacacttcgaaaatctaaaaactggcattaggttctgcatactgcactgtaatagaaagcctttttaaaaaaaaaattattctgatggaaaagagttttaacaaaatcagctttgctggatgcatttatatattgatatgctgcagggataccgctggacaggaaaggttcagaagcctta

SEQ ID NO: 48659 - DNA, 797 bp, Ricinus communis
  Intron number 1 from transcript 29767.m000205 (locus 29767 .t000007) derived from phytozome v7.0 (chr-ID 29767; pos 9 5138 to 95934 reverse strand)
cactgtccttgtcaccggagctggtggtagaactggtaaaatgtttttatattttaattcaaggtttttctccttgtttgtttgttttgtattgatggttttatattttataactgattcgatcctcttgcttactacgttttgtcactcaaatcgcataagctttgctcaaattaacaagcactaaaatataaataaaagaaataagttaactacttagtgcttgttagattcttttgtggttataaacccatgtgctctctgtttcttgttctatatgcgatcggaatctgtagttacttccaagccttcaaatgtaactgtaagatttgagcgtaaattgatcttaaatgaaagaactgctaagaaaagaaaaaaggaaataattgagcaacaatatagttatttagttcaaagtaaggcttgtaattacattaagtaattgatttccacagtgttaaaccccaaaacgcaattgtatttctagaaaatcttgcttgtttataagttaattgccggtaatattctaattacaatatgattttatgatctgtgctcagctaacttcattcaatctacaagtttctaatgcttaagcgtatatgtatgtgtactgtgttagcatttttttctttcactgctaaagccaaaatcagatgagataatgatataataccattcctttgttcttgttgtttaatgaagagatggattgttgattctttttcccttaatatgatattgtggctcaaactgtggcaggttcaatagtttataagaaattaaaggagaggtct

SEQ ID NO: 48660 - DNA, 669 bp, Ricinus communis
  Intron number 1 from transcript 29749.m000143 (locus 29749 .t000004) derived from phytozome v7.0 (chr-ID 29749; pos 4 8340 to 49008)
ggcgaggaacaggtaaaaagtttactgtttaatgcctctttgtttatgttgttaatgaatataatcgccattaaaattttttcttttactgtatgcttaaaatggagctgaaaaacagagtaaatgaatgaagttattactagagttattgagttttaaagaagctttctggcatattagtgtgtttgtgaagtttacaaaatgcaaggattgaattttaaataaaatatattttaggtagtcagttcttgtgtatggattggtcaaattgctagaattcaattatttcgaaatcaggaaagcaaggcttttcgtaagaattgaaatgatgtcaaataatgactttgattttgcaagaattcaattgaagtcttggacttaattttctttttccaaacatggacttacggaaatttgtataaactaagatggcttgacatgaaaaagttttttttttttttttttttttcttttggttagttaatggataagatacaggtggttagggatgtcagttctttttcttaaacaaaattgtattttttggttaattttaattttttaataggttgttttcaagttggagtaatgttttcttcggaagttggtgtattgaattttggggatgattcataatgcaggtgtttgatctatcagtagtgaagcctc

SEQ ID NO: 48661 - DNA, 575 bp, Ricinus communis
  Intron number 2 from transcript 28470.m000430 (locus 28470 .t000009) derived from phytozome v7.0 (chr-ID 28470; pos 9 5141 to 95715 reverse strand)
agatctcgctttcctgctgccaatctaatcttcaggtataaaccccaaccttgaattgccttatctttatttgttcatccctaaatcttacacttttcatgacattatatatgattctccaatgtcaaaagttatgtgggtcgaagtttcttcttctcatttgttatgtgatatatcttatttccaagttctgtccaatagagtgctattttcaaatgtaccttatgggttccactacaagaatttatctcgaagactcaatttatgagtttcttttaatgcatgatcgagtttgaactgattgtgcatatagatttagttggctttgtgtgattttctttttggataatgttgaacgcttttaaaaaaaattttacttaatgggaaaaagaagggaaggaaagaaaagataagccgcaatgaagtgtatcccaattctgacgtgttggtagacttcttattgtttattcttggaaattaaatttgctgtatgaaatgattttgatgcgatgagtttatcttacattttttattattgctttaaacaggaggtcctgtccgacacaaacagcaac

SEQ ID NO: 48662 - DNA, 746 bp, Ricinus communis
  Intron number 1 from transcript 29673.m000919 (locus 29673 .t000020) derived from phytozome v7.0 (chr-ID 29673; pos 1 46506 to 147251 reverse strand)
atagttcggagcccagctctaactactacttcttcgtgagtgaggtgaggtacttctttcgttttgaataggggtcgcccctttttggtttgaagcagccacggcttttgtcgtagtcagttcaaacacataaacccagtccacttgcagccatgttgatcaaaatgactaagtttcatgactggttgaatttatactctttatctctttgtgtaactttttttatgctctattagagaatactctgggaaagttatgttttttcatatgtttatatttattgttgttgttgttgttgttgttggaatggttgagatgatgtatcattgttgctcttgcttttatttctttttctgtttggtaatcttctgattttgataatgttttaggtttttttcctttttcaaaaatagactaatttcttcgtctgtgtagtgtaaaacacatgattagaattagttttgaagattgggttactatgcgtaatggccctactgggactaccttttacatttttagttgctgcttaatttgaaaggctaacttggtgttctaatagttgttaaggtttctaaggaggtgcagggttcaacccctcacaatctcctatctttaatatatgtatgattgcactcacatacattcatagtaatattttttcatgtgtgatgtactgtagtttctgctcaaatatttggtgatattgtgcagattacttgtagcacttcagtttgtgcctggtttac

SEQ ID NO: 48663 - DNA, 743 bp, Ricinus communis
  Intron number 3 from transcript 29648.m001979 (locus 29648 .t000066) derived from phytozome v7.0 (chr-ID 29648; pos 4 78622 to 479364 reverse strand)
tatagtagtgagaaggaaattttgaaggtatggttgactctgtgatcaatattatgagtgtttacatcacataaagtggttttctttggcatgaaaggccctttataaatctgagagagcatacatagatgctgtgcaggcacatagatttttttttttccgactcaaatccggtgattgatggactataagacaatccttaaaagaatcatctactcttgagctcataacattgttaaatagtcctttattgtatttatcttagggtctgcaaaagttattaacttctattaacatttgttgtgctgtgaagctacattgtattcaagttatgaaacttgatttaaaaatatagcacggttcggactgattttgattgctgttcgtagctacacaaattctctttcttttgaggagaaaagccattcatttagtttgatataatagtcattgtggtgccaaaagtgcagaagtttgactgccaaaaaaatcttggaggtgtttgtttggtaatggaaatttagtctcccaagtttttctatcttttatcagttagtattgtccatttgattaggtgattaattagcatttgatgttttacaagatttcttcacacttacaatatgtagaaaccaaagactcacctttcttctcagcagcctaatgttcttgaagcaacatcatcactggtttgactttcttttacaggttttcttgacgaagcattacaggaaccgaagatt

SEQ ID NO: 48664 - DNA, 387 bp, Ricinus communis
  Intron number 1 from transcript 29200.m000171 (locus 29200 .t000008) derived from phytozome v7.0 (chr-ID 29200; pos 3 5671 to 36057)
gcaattctgaccgtgacatcgaacaagtttgttttcttttccccttttcttttaaggcaaaaaggaaaagcatgattttggacctttgaaaaggctcacttttttcagaaatgggaagggttaaggttatgatatctttagattactcaatttagaaacttgctaagatatacaaatgtaaggaatttgttgttgacagaacaaaattctgctgcatttagagaatagtaccatcagtgcttcataacttatctagtgtgggtttggaatattagtgtgttaaggcagatgattctaagaatttcttgtggtctgaatttatgttttgatttgtttctttttgtttctgaaggcacttgttactttgaaaaaaggcacgcagttaat

SEQ ID NO: 48665 - DNA, 358 bp, Ricinus communis
  Intron number 1 from transcript 29801.m003103 (locus 29801 .t000048) derived from phytozome v7.0 (chr-ID 29801; pos 2 75383 to 275740 reverse strand)
caaacgacgacgtagagaaatcaaaactcgctcaggtttttcttttcttttgtttctttctttcttttgaattcttctgcgaattagctgaactggactaaagtttgcatctttatgtatattaattcattacattgcagtgaaatggaatttatatgtgcacggattgattaatttggagtaaatttgcatctttatgattgttaattgattaaattggagcaaagatatgtgcattgattgattaagttggaggacaaattgaaacttcttgtgtattgattgattaagctggagtaaagattaaatctttctttgtgtaggtagcgaagagattggagagtacagcgaggtattt

SEQ ID NO: 48666 - DNA, 305 bp, Ricinus communis
  Intron number 1 from transcript 27574.m000223 (locus 27574 .t000006) derived from phytozome v7.0 (chr-ID 27574; pos 3 9292 to 39596 reverse strand)
caagcatttcttgctcctcctcctcattttcgcaggtttgtttatcatagtttcttacactcttaatcattttctcaggtttgttattgccccctcaagacagattatttaaatattaacagcataaacaattagggtgtgattgaaaaatcttaaattcccagaaactttatgcagtgaattataatattaatcaaaaagaaaaaataaataaaattgttattcttaacttaattttggctctttgtttttttttttttcttttcttctgtcttaaaatttaattatttattgcagttgaatta

SEQ ID NO: 48667 - DNA, 381 bp, Ricinus communis
  Intron number 2 from transcript 28492.m000473 (locus 28492 .t000011) derived from phytozome v7.0 (chr-ID 28492; pos 6 3248 to 63628 reverse strand)
ccattgtaaaatctgatattggtggtaatatttcggtaagatgttccttctttgcatgaatagtgtttttctcaatatccttcccaccatattgcctaaaaggagacacatcaatcgactcaagggttagtttgattgataatatgggctcttcttttcttttaatctaattggagagataattttaaaatattaaattcaatcagaaccaattgatctgtaatactatttgacaataataatcataacagtggcggcctcagtctactgttttaagagtatcatttttatttttttggtgcaatgagaaactggtgatattacaatcttatgtttcctgttgcagaggttggagaataagtattcaaccgacccatcaga

SEQ ID NO: 48668 - DNA, 683 bp, Ricinus communis
  Intron number 1 from transcript 29776.m000477 (locus 29776 .t000011) derived from phytozome v7.0 (chr-ID 29776; pos 8 3414 to 84096 reverse strand)
cacagatcaaggtaagaacatctttcctttcatttttaagtgatttccttgtttctagttacttgaatatgttgccctctgtgttttgctttattaaattgctgtgctttttatgttgttttcgtgtttactgcaattgtgaagaaactttggataatgagttctgttcctaataaaagaactaggaaaatgctgaagtggaattttattgtaattgaccgttaaaagttacatctttcatggggtcctcttgtttggttctttgggagttttgtttgcacattgcctggaaattagggaagtttgtatttctcatgtcttactaatttttctaactaaatttttatttctctctctctctctctctctctctctctctctcctctctcttattttttgggttattatttgtctttttaacttttcccccacattcgtagttgaccactgtgtcaattggtggtattattgcttgtttattattacaattttgatttgtatttctgtattattcatccataatatcacctaacagtacgattatgcttcacactgccactgaagtttaacttttggtccttttaggaagatggctaagctaatgacacttgaaaagttaagcttttgatcattctttttctcttttaggagcaattcaagttcccacgggaactctggttcat

SEQ ID NO: 48669 - DNA, 729 bp, Ricinus communis
  Intron number 1 from transcript 29739.m003770 (locus 29739 .t000206) derived from phytozome v7.0 (chr-ID 29739; pos 1 260954 to 1261682 reverse strand)
agtctctttggcatcggtagcaggtactccttttttcctttttcttttcttgatttatcgtttctttatattgtattttaccgtacccgtgttttgtttagcaattcagatatctctctgaaatttcctcttgatgctttatgtgttttgtattggagctttgttattattacctgttatctttttcttttctttcttgaaattttagtgttttgagagggtggaaatgaaaccagaaattgcatttcaatatataggaatattgtgatcctaacattttcccccagttagaatttaaatacaatgcgggtcccacgttgcatgaatgtaacttgaatgaatatttatgatgaatatgtaagggggcatttaccttttgttctgataaattttatgaagttaatgatttcaatgccattgtttttgtgtggttggaaagtgcaattctttgctaattatggtactttgaaatggttttggattcattttatagaagatggcatcattgcactttattaaaatgtgctcatagtgattactatttttctttctttctgtgtggtacttttattttatttgtatgacttcctaaaatgaatgtatttgttgtcgaagtgtgagacaattcttctttcctttttctttttctttttttcttttaatctaatttgggaattcttcacccttttgattaacgaagaaaccagaagacatttcggcctaagaaaa

SEQ ID NO: 48670 - DNA, 663 bp, Ricinus communis
  Intron number 2 from transcript 29693.m001996 (locus 29693 .t000034) derived from phytozome v7.0 (chr-ID 29693; pos 3 11239 to 311901)
agaatttacaggtggccagattaagtttcaaccttgtatgtccagaagtttcagtttcttgatagtttgatgagcttatttcgtgtatacttgggaacgcatatatatgcgaagcagcttatcagagaaaataaaattgatctaaggataccagcagttacattagggaaagaaggcagaaataacaagtgaaaaagttgagactattataaagaaagctgtccgattcacttcagcaatccaagctatcgatggccactggccttctgaattttctgcaccattgtttctaatgcttccttttggtacgtactttggtcaagccaaccttaattattatatttttcgataagagatttaatttttgaaaaattttatatataatcaaatgtataatggtggaatatatatctaattgttagagattacaaaactgcagattatgtgcctatacataacagaaacactagacattcttgtcatcagaacataaaaaagtaatgcttcgctacatatataatcatcaagtatgtacttaactgcttagaagtctttatcaactgctaagaagtctttaacccttttttcttttctctcattttttttttttttgctataaacaaaatgcatattattagataatggtattagttgggttgcaga

SEQ ID NO: 48671 - DNA, 486 bp, Ricinus communis
  Intron number 1 from transcript 29740.m000491 (locus 29740 .t000023) derived from phytozome v7.0 (chr-ID 29740; pos 1 70088 to 170573 reverse strand)
tgcgccttccattggtaagccggggcatgttctgaagatttgtcctgatcaggatgaggaacaacatcaaaaaattcttgagaaaggtaagtttaaatacgggcttgccttgggagcgttttcaattttggaagctttaaaaaaggtaagagtaatacagcttttataagcaaagtaaagcagaaaacagagactaacttagtgagtaacataagcatattagaggagaaataaccaataaaggaagatcatccaaatgagttcgcgatggttcctcacgcgccgctagactgcatatttaaccaagggattcaagaaacatttaataactgtcagacttaaagggataaatttatagaagaagaatgaaggctcacttccatcattggcatgcatcagttcttgtttatgggtatagggagactattgggacccatcataattaatggaggggtttggagaatcctaaaagaatagtaaggaaag

SEQ ID NO: 48672 - DNA, 736 bp, Ricinus communis
  Intron number 2 from transcript 28610.m000073 (locus 28610 .t000004) derived from phytozome v7.0 (chr-ID 28610; pos 1 0643 to 11378 reverse strand)
gtgttcttcgcaggtaattttgctttctcttcctttctccttgtcaaatataccgctgctgaatgcttgtgcttgtttgtttgttgttgttgttgctgctctcctggtgttgctttttttatattttttattaatgatctatttgtattaacctgaaggcactgttcggattattctttttagtatctgatgctgttggccattctagggaatcaaaatagatgaagttttaaaatttcattcttttgcaacttgctacttggattactaaatttggatgaagtagatgaagttttccctattagttgacttttgtgtgatgagggatagaattttaagatgttaaggatttaactggtagcaaattctattgaactggggcattgtgcttgtatgttttgcaattaagtgctgcagaactagatggggaatcagcatttccattttgttttttctcattgtcaattttggatttctattttaatttcatttattttctgtccctttatgccaaagctttgctctaagggggttacactcctgtgatttttgtggttgaagtctaggaccctcctaaatttttcctcactaactttagggctgaggactggggatgagttctgcttctatattcttgggtttctgggaaaaatattagtttcaactgtgagtggcttgttaattgtgataagattatgcagtgtgtgggttgcacgaaggccgccaggatacgcat

SEQ ID NO: 48673 - DNA, 436 bp, Ricinus communis
  Intron number 1 from transcript 28610.m000073 (locus 28610 .t000004) derived from phytozome v7.0 (chr-ID 28610; pos 1 1455 to 11890 reverse strand)
ttacaatcttttcgagccagaattctttctcgaaggtaatgttaatcatcaattcttatttttctccattatttcttttcaatgttctcatgcaaaccctaatcggtaaatcgaaatgcctttttcttttctttttcaaactcaattcctttctgtatggtttgctttctcctttctttttcccatgtgggttttgtgcatctgtgaactcctgatggtaaaaagaaacctgtttgaaggaaattaattagagcacttcttttcttgtttcccttcttttctcgagttatttgggcttttagctatgtggattttgtgtgttttataaatttttgaggttataaccttattttggaagaacataagcaaagctctcattattattctttttctggtgaattatgttgataggttggtgtgttctggttgtgacata

SEQ ID NO: 48674 - DNA, 575 bp, Ricinus communis
  Intron number 1 from transcript 29188.m000051 (locus 29188 .t000001) derived from phytozome v7.0 (chr-ID 29188; pos 6 500 to 7074)
ctatattctccaccacataccgaagagctatcaaagtaagagaaataagaaaagatatacatatatatatattcttttatttttgtacccttttttgtttgtttgccaagaaaatcaagaaatgaaaattttgataatatcaaatacaacagaacaattgcaaattgaaaatgacaatttctttcttgtcactccctacatgaaaaaaatatatataataacacctattataatgacaacaaagccgtccttacaacagtgaatttacattgattgaaattactataatttgacggtcgaaaaattggtgtctttttaatattgtttattttatacggatatatggtgaaacattccattgtaaagttgcaacatgaatatatagcttttactaatacctttatttattcttttatatagtgattattttgttcctttggctttttccatagcaaacccaaaaaatattcacacttatatcattaatttatttattttgtaaagttactaatgtcaattataatgttaaaaaaatggcaggctaggactaaggtggcagaggcattaagcctgat

SEQ ID NO: 48675 - DNA, 742 bp, Ricinus communis
  Intron number 1 from transcript 28152.m000877 (locus 28152 .t000006) derived from phytozome v7.0 (chr-ID 28152; pos 2 7961 to 28702)
aagggctctattctcacctcttccacttttcaactgtactattctgctcgttccttttctcatatttttcttttcatttttgattttaaatgaggcattttagaaattagaaataatttttttttaataaacaaaagatttatatctttatgctgttttcagtttttaattagaatttgtgtgacaaaagttagcttatttattttctttaaaaacttgggttgtttagttattttggattaagtgagagttattttgttaaaggatgatttatcttttagggctatggtttgatttttctggttttaatttctgtaaaatttggaatcaaattggcatttttctttattgtaattttgaggtttagaatgtcactgacagtgtttggaaagtctaaatttgcaaggattgaatttcttttagtcagttctcatgtttggaaagctcatagttgctagaattcaactctttcatgtgctttttttttttctacaatttttttttatttgtatgaaaaatgcctcaaatgacagatcttgcaagaactcaactcaaaaactttactgtatccatatattccaaaacaagtctttgagtaaatatgcaaaaaatcgttgttggtttgagtgaataaacttttagcataagaagtttgatgggtaaatcttggtaataattttcattttattgatctgatgtacttgtaggtgggaacaaaagcttcagtcttctcacttaccag

SEQ ID NO: 48676 - DNA, 396 bp, Ricinus communis
  Intron number 2 from transcript 29680.m001734 (locus 29680 .t000077) derived from phytozome v7.0 (chr-ID 29680; pos 4 97036 to 497431 reverse strand)
tagaccatcctcttctgaaaaatcacaagatccaggtagaaacccttctctttattttactaagaaccagacaaattttggtccatgtaaagaaagatacactctctcttcctatatatttcacttcaaatggtattattttcatctataatattatttttttttcaagtccttttcatttaggttctactaagattttgttaattctagtaaaaagggttgttttggcaccatatatttgtcatcttctccttatagtataatattacctaaaaggtccaaaagcttaagagtaaaggtcactctctgttaatcattgttttttattgttaatacatgataattaatcattttaattatgatgatgatttgatctgatcagagggttccatcaga

SEQ ID NO: 48677 - DNA, 863 bp, Ricinus communis
  Intron number 1 from transcript 28152.m000890 (locus 28152 .t000019) derived from phytozome v7.0 (chr-ID 28152; pos 1 06015 to 106877 reverse strand)
caccgcattttcgccatcgcctttcctctcactctgtaagtgcctcaaaaatgttcttttcccatttattaatttcatttgaatcaatttttattttctttaaggtttagaagtagaagtatcttgaacattagtgttttgtaaggctaaaagataaaaagaaattggcactgattttattcaaaattccttgattttctctacgctgaaagaattgaattatactaaatatgagaattgactaaataagaattcaattcaatataattaatttcagacaaatttaattgcacaattgagatgaaatttaaaaaatttggccaacaatgagtagctttctgattgtcaattttgtttttctatgtaaggcaactaaggcagtaatggtgcaggaactgtagtagctaagctacactaacttgtaaacatcataattctggagaaattagaattggttgtggcatcaaatatgggacttcgtttacgggtagttttcatggtttattctttcaactcaagtaaatttgtttgtttgtatgtacttgtgatttgtgatcaaagaccataaagttttaaaggggatcacatgtgacttgcctcgatgggttgctctctctttaaaagattgaaactttagccaactataataagtgtattaaatggtccaaatttggatatattggtctctgcgctctttttttgcaaatgtgctatgtgttattagtatttatgcaatctctagttcaccgatttcttaatttagtaatcttggttggttatttgatatgttgtttctgctcattcttgtaatgcttttggctttgtcaggaccgtgcatcagttcggcttgatcaggctaccag

SEQ ID NO: 48678 - DNA, 444 bp, Ricinus communis
  Intron number 1 from transcript 28863.m000092 (locus 28863 .t000005) derived from phytozome v7.0 (chr-ID 28863; pos 8 2732 to 83175 reverse strand)
tttcctaggtgtgtatgttgttcttggtttattgctttatgtttgatgctcttttctattactgttggataattttctgctgtatcttttggtgaatgatgatggtatggtatcaagaattactgtttagagattccatgataccttcctcttggataaaattcttgaattctaaattctgatttgaagttttatagttttgtcagatcatcagatgcttgcttaatttggggcttttctgataattgattctttttgtttgtcaatatttataacattttaacatttggtttaaaaggaaagcactcatttccaattcctttgagttgaatgatatcttgcttgctttttcttcagtccttgtattgtaagaaattcatgttttttctagatttggtgtacttaactggatctcatatttctttatgtttaggcttggaccga

SEQ ID NO: 48679 - DNA, 436 bp, Ricinus communis
  Intron number 2 from transcript 29583.m000192 (locus 29583 .t000007) derived from phytozome v7.0 (chr-ID 29583; pos 7 9524 to 79959 reverse strand)
aaccagtatcccttacttgatgatgatgatgattatgtatatatatgtatatatatatatatatatatgctgttattttgaattgtgtttttctaatgcattgttactgtaatcattagtgcttcacactaaaaaatatgagcaattttttaaaataaaataccaaatttagccacagggataattacgactgtccttgttttctatgttggtcattgaatttctagttattagcccatcttacattctaaattggtagtacctgacctgatgtttatttttatctaacactctgcataaccaatatgcatcatatgaactgtcaaatatatacctgacagcttaatttcacccactattcttcctccaatggaagtttctattctttcagaatccatttgttttgccatgttgatcattgactgctaattcagat

SEQ ID NO: 48680 - DNA, 803 bp, Ricinus communis
  Intron number 4 from transcript 29782.m000119 (locus 29782 .t000006) derived from phytozome v7.0 (chr-ID 29782; pos 4 6325 to 47127)
atacgtgaaagaaaggttagaatattagatttaatttctttatttttccttttcttttcttggataaactcatatattgttgatcgattttctttttccaatttcttttttggtttttttaacatgaaatttatggttttattttcatctacatgatttaatttttttaggttaattttgttgggatttatatatattttaattatttttttatgagaagcagaaaaagcaagcttttcatcattttggcatgcttgaaaatttcattagaaagagatacttcttatttccctagaatactcttttaccttctatgctaaggtcttaggacttaagatttgagttcaagtttgggttaaattaagagtaacattctcgccatcggtactttgggattttcaaattatcttaagagatttggaacgataaacttcgctttgctaaaataaacttcaagaatatatatatattttcatttcaaatttaaatatttatgtgtattccttttataaattttagcaattgattttatgtaaaatatttatcagatattctcttccccatagttaatggaatagatgatcaagaagatcacacatagaagttaaagtaattatggaatttacagcgaacaaattgttgatcaatagcaaaaacaatcatatctatagttactactaagtaatttatgagatattaacttcattcttatgcctatcttaagtaatcaatcaaattacaattccaagtttcattaaatttttgcagtaccatttcatcgaaactcagacaaataccaaaag

SEQ ID NO: 48681 - DNA, 235 bp, Ricinus communis
  Intron number 3 from transcript 29602.m000211 (locus 29602 .t000003) derived from phytozome v7.0 (chr-ID 29602; pos 2 3091 to 23325 reverse strand)
tcagatattcgttttgtccgattaccggctattaagtaatcttcttccacttatcaatatatatatggtcgtcattcaagttctttttggattcaaacatttgttcctggttacttctgttcttatcagtaggatttcatgggcttcatattgcaacatggacaatgatttcattattggtttttgtttttgtcttttttcctagaaatctattggtaggagacactatttcagg

SEQ ID NO: 48682 - DNA, 987 bp, Ricinus communis
  Intron number 1 from transcript 29680.m001706 (locus 29680 .t000049) derived from phytozome v7.0 (chr-ID 29680; pos 3 20447 to 321433 reverse strand)
gaattcaagttctgagtttatcagtaagtttaattttaaactgttatttgttcttctaatcctttcctattttctttaaaaggtagcagttgtttatcaataaaatgactctgcacataccatttccaactcttggtcatcttttgttttaagaagaagaagaagaagaaagaattctcctcttggtcatccttggacatctttatttttcttaatcttaaccagtatacaagttactacaaaacccaagaaaggaatttagcttatggtatgaggatcaagggaattatactgccttaatttaacatatgggataaaagagtagataaaatttggctgtaattctgtgaatttgttgaagttgagaatcgttagtatgcaattctctaacatcaatccaagtagtatttttggtgttgagtagcagaaattcatgcatgaaaaagtgacgatgaaaatgataaaagagtgtgatcgaagaaacttaaaatgttaaatacaatttatttatttacttagctgctttactttgactaaagtgacacactgtttatcataattagattatctacttagttctctaatatacttcaaattgaagccaattatcccttcttttgagctggtgattttaaactagtttcgaaggaatgcatcaatgcttgatttgaccaagttttcctatattaccgtttattgtacttagttatctaacatgcttcaaattgaagaattcttaagtgattttgaagcttcaaaaagaattgtggtcctttaaattttccctttattaaaaagcgcagtatcggaatttgatcttttgaagtgatgcttccatggaaatagaattactttcaactgtatccctaatctataacatataggagtaattgttattgattttgttaagtgaatttaaaatatcttattatttcttagttcatattgctggagttttatgaccagaaactattttgatgcttgcag

SEQ ID NO: 48683 - DNA, 380 bp, Ricinus communis
  Intron number 1 from transcript 29661.m000906 (locus 29661 .t000008) derived from phytozome v7.0 (chr-ID 29661; pos 9 3320 to 93699)
ctggtacatacccacaataccatgcttaattgtccattcactttttcttttgtcctttttttcccctttcaaaataaacactaacaacatatctaatccacttattataatctcattttatatagctataaacaaaacaatacccaaatatatccatttctcgtttttacgtgtgttttcttttgttttgttttccctatatgttgataatcataaaagaagaaagaaaggaagaaaatgaaaacccactcgcccatttcatttctttattataataataaatgctactgttgggtttcgttttctaattgtgtgcgttttgtttttgttgtggttttgatgaataataggtggctgagttgggcgaagagatagtgggg

SEQ ID NO: 48684 - DNA, 651 bp, Ricinus communis
  Intron number 1 from transcript 29687.m000572 (locus 29687 .t000013) derived from phytozome v7.0 (chr-ID 29687; pos 1 02998 to 103648 reverse strand)
ggttcttcttcttgttctctctcttgcccgctccctctctctcttaatactattatatccatctttttgcttttgcttttttttggtctatctaatgtcttggattagtgattctctctcttaatactattatatccatatttatggttttgcttttttatctatctaatgtcttggattactgatatcttataacttagaaaacctttgacttttctacacccttgaagcttgctttttaatttagttgtttacattttcctaatcacagtcctctgtgcataaagggctgcatgttggatcctctccagttaagcgagcaattatgagaagtacaaataattgtaagtgattatagtcctagttgcatgaactgtttatcctatgtaatgctgtaatctaaaacggtatatttagtctcaaagcatataaattttttgaaattatgcaactttgtggctcataccaactttagcatctttatgttggtttctttctatctgttgtttagttattgcttggtaataaaatggtttctgatttttttgttaccttctgcactttcagtcctctagttgcttgattatatcagtttacagcttttaaagtgcttcatattatgttttttccagctgcttttagtggctcttt

SEQ ID NO: 48685 - DNA, 921 bp, Ricinus communis
  Intron number 1 from transcript 29646.m001056 (locus 29646 .t000004) derived from phytozome v7.0 (chr-ID 29646; pos 2 5433 to 26353 reverse strand)
gagtatctggttgtttctggtgagttctgctttgctctctttctgtttgttctattgtccatgtgagtttgttggaagttgtcactggtaggcatgataatataagcttcaagatgagattttccacatacatggagggtaatttttggctttgcgtgcttattattaagaacttgtagggcttctttcatggtgttcattgattataattgagactctatcctttttctataatttggctaacaatctaaacttacatcaaaataacctttgtcccttgaacttaaaactttaccttttattatcctttctttgtttttgaacaattgatatgctgtttaggtaagcaatatggatgtaataatagatcatggcttgaacctttggcattctatccacattttgtgaagggacgagctgaatccattgctttcctgattaaactgaacttctacaagctattgttactagtaatagatacaataaacaccggtagcactaccagggtggtaaagtacaattgcactaagtcagtcttctaggctcaattcccggctatagattaagggaaggaaacacttccatttacctacaatttaatttaaaatcataacttatggttctggagaaataagagtcttgctgccaaattttcttgtacttgctgattgttcttgaaatataccaagtcatatttgttttattacaacaaagttttccatatttactacttttcagtgacaattctatcatagcaaaagctatgagaattctttgttatttgttttagttatcattgacattcctgtgtttcacagataactttatggttattcttttattgggctgtcttttgtcgaagtatttcatttctttttttaaatctcataccttttctattgtgtcattgcttttaggcaa

SEQ ID NO: 48686 - DNA, 926 bp, Ricinus communis
  Intron number 1 from transcript 29693.m002002 (locus 29693 .t000040) derived from phytozome v7.0 (chr-ID 29693; pos 3 37365 to 338290 reverse strand)
gcctgcaaaaaagcttgttatcaagcttgttaaaggttcaatttttatttttcattttttctcaatttcgttaactttgtcaatcaggaaattggattaatgttgattttgggatctaggagctggttactttatttctttttgattagtggattaagctgttaattcatcgcttagagcttaaataaatgcctaatttaatatgaatccctacacttcgttcccattttgtgatctgatattattaattcccttctctttctctcagctagacctatcagctctattctagggtttacaaatgatctgataattagcagatatatcactctagttaagataggcttttggtaattgctttaaaatatgtttcctgcttatacaattctttctaatgttttgctacactgctatcaaagtgatgataagagaaattattggaatatctattgttttcagtttcattctgttttatcatttacacgcttctttttattttataagttagtatttaatgtgcacatttacaattactttagactattaaacactatcaactgcagctgcataatcttgcagttgcacactgatttctgtacaaaaggacagggaattagcgagcagataatcatgttttcttttttcaggtacctggtaacaggtttttcaatttttcttctctcttgcattttcttatcatatatatctaactggtggtagtattgattgattggagagtaaaggtgagatgtctatatattgttataattattatgaatgctggagtctgaatttgctgtgtgctcaggaatgtgcttcataaagtatcttttattttattatatttgtttccttgctttctttgatctagtttaattttgctatgtgaagctaaaccaacattacctataaatttcgaggaggat

SEQ ID NO: 48687 - DNA, 749 bp, Ricinus communis
  Intron number 1 from transcript 29811.m000525 (locus 29811 .t000004) derived from phytozome v7.0 (chr-ID 29811; pos 5 2284 to 53032)
ataatatcccttggtgcgaccgcgacgtcatcgctgtaaagtttccttttcatttcttctctcactgtctcttatatgaatcacaaattctttttccgctttctttaaaatttgggtcacttttgaaactggaatcattctgcattcttatttcattgaaaaattaaagctttatgcttctgtcagtctataaatcatattctttgtatgattttattaagaatcttttagttgctaagtgaaaataaaatgctttctcatgtttaggaattgattcatgttgatatttatatattatttggaacaaatcaagtgacataatttagtttcagtgccttgtaaatattgaattcaaagaactatgagctttcggaacttgggaattggcttatacagatattaattcgtttgtgttcttgcatttgtaggctttccaaatgttattgatatctcgaaatttcatagtttttctatattactgaaattgcataattttataattgtatgcctcatttcataagtgaatcatatttacatagtagtagattgttactttgtcttcatgaaatagccttgacttacttccttcgccttctgttctaattttcataattcttattttctgatatgcctgttcctgttcattgcgccacaggctttagtttggttatttgcatttgatagagttcttttgaacttgtgctgcatccacagggttgcgagcaagaggttattgaaactcaaaagca

SEQ ID NO: 48688 - DNA, 558 bp, Ricinus communis
  Intron number 1 from transcript 29761.m000433 (locus 29761 .t000027) derived from phytozome v7.0 (chr-ID 29761; pos 2 09369 to 209926)
gtattttgcacataatttttagcttattcacacaggtatacacatcggtctctctctgtttcttctcttcccctttttctttattgttttttagactctcttctgcattattcaatggtttcttcgttcattcaatgccttgatctgtagattttaagcctatattcaggtaggctttttcttggttcatccaaaaaagcttctgttatttttttttttttctgaaaaccgttatacatgttattctgttatttcttatttttgtttcttctttcttttgggggtagtttagcctgatatttttgtaaatgctaatttggcacctgggtttttcttttttggagataatttgttaatgtttttttttaaagttttttggtaatttctttaattttagcggtatgttttatgtggggtctattttcattttgcttgtcccatcaagtttttagttcaatggtagatcaagaaatattgatcttttaatttgatctatttctctttccctgtttctttttaccaggcttgaatcttgtattggaggcatagtttctccat

SEQ ID NO: 48689 - DNA, 652 bp, Ricinus communis
  Intron number 1 from transcript 27744.m000093 (locus 27744 .t000002) derived from phytozome v7.0 (chr-ID 27744; pos 2 3501 to 24152 reverse strand)
atcaacacagatcttgctaatttcactgttgagttgttaggggatgatcaaagctttacacaatcgaatgattttgctgagcttgaaccattatttcagcatgattcttatttttgtctatttaatggaagaggatggatgccttcctatcaacaaaaagaatgatgatggtgatggtgattagctcaaattctttgctgggtatcaacaattttttgttggtagctgattagttgtttttccttttgatcttttggtttgtggttttagtgtaagacgaaagaattttggaatattaaatttaatagttagatgcttgaatgcaatgaagggggagtttgatttttttctacgtatttagtctcttaggaatttttattataatgtttagaataatattttctagtatgctgaatttatttgattcatatatgtaaaatcctagtacctcatatgcaacagcctttcccttaatctgctataattcttgtgcttgatctgctgctgctgctgcttgcttacttcgcttatagttggaattaattaaaaatgccgtttagattacacttcctataatggtaatcagtactcaggttttagaaccctctttggtgcctttcaaatgctaatttagaaaacctaatttgaaact

SEQ ID NO: 48690 - DNA, 674 bp, Ricinus communis; identical to SEQ ID NO: 48481
  Intron number 2 from transcript 28066.m000021 (locus 28066 .t000001) derived from phytozome v7.0 (chr-ID 28066; pos 2 167 to 2840)

SEQ ID NO: 48691 - DNA, 825 bp, Ricinus communis
  Intron number 1 from transcript 29780.m001366 (locus 29780 .t000052) derived from phytozome v7.0 (chr-ID 29780; pos 3 84533 to 385357 reverse strand)
tttttccttctgctgttgataccgattctcttcctgtaagtacacttctttctctttttctttttttaacacttctctttcttgtttgagctaatcgacagctatatatatatatagctgatttcttttcttttttttttttgaaagaaatgattatccgattagaattatctgatcattcattatcaagcctggcgcattttagtataagaattaattctcttaggatagtaagtacacttacgcttacacttctttctttgtttggctaattagtaggtagaaaagaaaaggaaatagatgaaatgatttagtgaaagtgaaattggattccgttctcattattaatgattaatacggcgcattttagcttattaagtgatgaggcgcacgatagctttgcgctcgctcaaaatagcttcacttgctccgccgcacattagctgttgaatgattctttttctcttccttctctagaaacttttactttaatgaagtgaaattaatcttagcgcattttagcctaagaaatgattagcgcataataacaaaatcctcgtcaaaatcattcttcgcgcacaccgtgtatacttgtttcctttggtttctgttttcttaagatattttctatgttcgacttatgtttgattttacataagaaatgatgaggtgcgcgacatccaaacgcctgatcaaattgtatttatttgctttaacgcactttagcaaatgctttcgttgatgataatttctttcgtttttatttttcttttctggttctcttttacatggatagtgtcttgtttgatttaatgtaggtaagta

SEQ ID NO: 48692 - DNA, 510 bp, Ricinus communis
  Intron number 1 from transcript 28076.m000411 (locus 28076 .t000002) derived from phytozome v7.0 (chr-ID 28076; pos 2 1779 to 22288)
ctttattcttgtttactgcactgctggtatttctggtatgtttcttcttcatcacctactttaatgaaaaagaactgtttggttctagagaaaattcttgatcagctagagaatgattttcgtttttcttgtgtcaacttctctttggtttgtgctttcttatatttcattcaaaacacagttttagaatatttgacatgaaaaatatatgttctcatcagtttgtatattctttcatgagattaagaaaaagtgacacaaaaaagaagaaaacaatactttagaaagattgatttctaacaagaaaaatatatataacaacaattttccattgaattttttttacaacaaagcctatgttttgcctgtttcttttttagtttaatctgaattttttggagtagtcctaaaatttgcttttgataaatagttgaaggtgcacatgtattaatagttgtttgtatactgtacacaggaggacacatcaatccagcagttacctttggacta

SEQ ID NO: 48693 - DNA, 239 bp, Ricinus communis
  Intron number 1 from transcript 29751.m001886 (locus 29751 .t000101) derived from phytozome v7.0 (chr-ID 29751; pos 5 81400 to 581638)
ttgccctcctcaatcccaaaattacaatacctttagttttttttttaaaatttaatttttatttattatcctcactaatatttataattatttttatttttaaaatcttcataagtttatctttgatttttttaatttttaatttttaatttttagtttctattaatttttcttattttgtacaatattgataaaattgtctttaatctttattatttttttatatttttctttagttt

SEQ ID NO: 48694 - DNA, 910 bp, Ricinus communis
  Intron number 2 from transcript 28077.m000082 (locus 28077 .t000005) derived from phytozome v7.0 (chr-ID 28077; pos 2 9818 to 30727 reverse strand)
gttgaggtatagcttttgtttatcttattattgctctcgaaatttggtttgtgggattgctgtttggtactaataagagttggttgtgtattatggatgccatacattatatttttgtatttgtaatgatgataattatcaagttgtgtaaaactgtggttctatagggtattatttacatttaacaaactgaatttttaggcttaaaaagatatgtctattagatgtagtttataattcgtattgccagatatttggtttgattacagctgcactctttttttttaaagaaaaagaactattttgattctgcagtgctgataattcttgaattataactgcacgtctttggtattgttataagcttttacaatgcaatataaacatacatcatgcatgtgaaactgatttttgtaagttgtggctatgtatgtatgtttatatatttatttgtcattatctacctgtaaaaaacttagaaactcagaaagagagacagagggttagaaacttgagctcaggggcttgaaaatcacaaagcttgagctaagttattatcgttattattgcactgcaactaccattttggtctaacctgaccctgcggctcagtgctttctagtcaagtcctattcttttcagacagtaatcaggcaagtcggttaggtagcccctctatattgaactccttagatattatattactaatttcggttaagataccaaggggcattgtagatgtctttcttgcttctgtttaaaggcatagaaatttttaaggtgcacttatctgctttttgctgatagcttattttgttttttcttgcaagtaatttttcagaacttgtttttttaatttagtttttccggactttcttttagggtcgcggtattgttcttattaatactg

SEQ ID NO: 48695 - DNA, 306 bp, Ricinus communis
  Intron number 1 from transcript 28049.m000294 (locus 28049 .t000002) derived from phytozome v7.0 (chr-ID 28049; pos 1 5408 to 15713)
ggcttttggaattgttttcgccgtaatctcctctttctcgattgttacttctcgttcatgttcttgttgattggcttatgtttcttgatcttctttactttagtttctgctttttcttgattgttacttcttgtgttcgtgttaatgtttatttatagttggtgttagtgtttgctaattcaggctcctttctcttgatgttcttttatttgacttgtgcttttctgattgctgtacttcttttgcttatatcgtctccatctttgcacagctaattgcttgtgggattgctgtggcgacatacaa

SEQ ID NO: 48696 - DNA, 320 bp, Ricinus communis
  Intron number 1 from transcript 29729.m002359 (locus 29729 .t000092) derived from phytozome v7.0 (chr-ID 29729; pos 5 21791 to 522110 reverse strand)
ctattgtaagaacctattcgtcttgcattctgttttccatcttgatttcctatatgtgccttcttttgtttacttttttatattaattgttatttaatatacatgcagatcaatacggttgtctatgatggttccttctatatataaatatgaatactctgtttcttaaatattaagtaattgggattctaaagaatagatagctaattcactccagttttgttacacaaactgccaagaatccttcccttggaaaatattgcagagagaccatttattcatttgatttgcatcatcttctgcaggttaactcaacaaat

SEQ ID NO: 48697 - DNA, 749 bp, Ricinus communis
  Intron number 2 from transcript 28670.m000104 (locus 28670 .t000003) derived from phytozome v7.0 (chr-ID 28670; pos 3 5667 to 36415)
tggatcttaagaggtatgtatatgctaatgtttacaatataatatttgggtttaatgtatatgtcgcaaaactttctttccacagtaatgtgcatcatattaacactagtactatgctgccaaccttcatttgtggccttgaatctaaacttgtttcttctctttcttttgtacttggtatgaactcattgatatgaaacactatctctttctcagaattttatgaaaattaattgtcatttttattttattttaatttaactagtgtatcatttaagtttgataaaactctgagattttagtttcaaattgcaatatgcttgtgtgtatgatactattatgcagaattcgaactttgatgtattttgtgaaactgctcatgtgtgtgtgtgtgtgttgttttgagagggaggtaaaaaactttctcatataagaaactattgcaagtaaggcatgcatttgttttcaatgtttgttcttttaggcgctatagtattattatattctgtgtttagttaaattcttgtttacatatgattaacttttctgattaccaaaggtaaaaagttctgagcagtaactgttgttggttacgattttggttgctcatactgattaagtgacacgaacaaattataacatctagataaatatttattttaaaagcactgtaaaaacattgaaaattcttgtttatatttggtctgtgtctagtggctctggtggcagcaatacagagggaagaaaag

SEQ ID NO: 48698 - DNA, 766 bp, Ricinus communis
  Intron number 1 from transcript 29814.m000728 (locus 29814 .t000015) derived from phytozome v7.0 (chr-ID 29814; pos 9 7253 to 98018 reverse strand)
aactcttcattagaggaaacaggtgaatctggattattttgtagtggaacagtttgcttttatgtttctttttcaagtaaaatttaagataaaagtaaaataaaaataaatatgttaattgagagattaagttctgaacaatgataagggttttattgagctaaatgtagtagtatagtaagataaattgtatatgcatatttgtttttataaaaggtttaaaataattgaatggagcttgtattataatattggttcagtgagctaaattagtaatctattaagctaaattgaaaatgcagctatagttttcaatagaagttcagaaaatgcatgaattcaattcaactgaattctgtttaggcaattctcgtgtttggaaaacttttagttgctagtattgaattcttccaacgtataataaacaaggcattttgcaagaaatgaaatcatatcaaatttaactttgcaggatttcaatgcacaaagcctaaatattgttattgttaatacttggtttgaattctttactgctatagtttctttttcttgctggttttagtcattagacgtttgaaacttggttatactattattaagctggattccaaggcaaatcaagagaagacaagggaaaaaaggagaagtttttgaagttatatctctttactaatcacaattcttttcttgctttctgttttactctcctgattgattatttgcatgtttacataaatttctctcttctcatgtttaacaggataat

SEQ ID NO: 48699 - DNA, 914 bp, Ricinus communis
  Intron number 1 from transcript 29768.m000106 (locus 29768 .t000002) derived from phytozome v7.0 (chr-ID 29768; pos 6 2520 to 63433)
tgtataaagcgtaagtgtctatattcattgactactgatatttagttttgatcaagtcctgtataatgtagttgctcatgcctttattttgtagtttgttctctactctctgtatagcagtagcattttcttgctaataatgacttgctgggttactttttttattttccttttcaatgtgttttaacttcttttgtcaatgtagatttcataattaaataagttttcagttgtataatgcacattggattgtcaaataattgagagtttcagtcttaaaagctagaatgagagtattatctgtaaaaggaggacaaatgtgtaactcattaattttcgcaaaaagaaaaagttgttttatgaattgtttcccttctgagataaagcaacttttgtagtttagacagaattgatattttgaaaacatggagttaattaaactgctaagcacttttttatgctaggatactaagaggtttctgagaaatcaatgccgataagatctttggaattgaagaagattgattttatttttgtagttgagcattcatacaagtatctgaaaaaaataatttgcaattgcactataaagattttgatttgcccaatcggcaggctccttaggtgtgagttaagatggtttgcatagatcattaacatgttcataactcaaatcattggcacttgtattggaaaccaatggatattgctactacagacactcataatacaattgaatatttagcattgcctaaattttgattcaatattttccgtgtttttcatctcttactattcgtagtctatggtgatatcatgataaatgaaagattgttgcattccaagatgggatttcttgatgcattctctgctatgcaggtttgataaagagcttaacaaagacgttgcaatca

SEQ ID NO: 48700 - DNA, 615 bp, Ricinus communis
  Intron number 2 from transcript 28226.m000868 (locus 28226 .t000038) derived from phytozome v7.0 (chr-ID 28226; pos 1 73972 to 174586)
tcattgctaaactaggtatatattttttgctggcactcttgaaacctctactgtttctgttttttatgtctcttttagctactaacaactttatcacgaacaaatgatgctttgattctcaatttaagtattagggtgctgctgctatggtaattaattctctttcgtactatatcaagctgatattctggctgaatgcgcctctaccccttcaaattatagtcctcctgtagagacagtagcaaatttcttcacatctaaatgcatgcagaattcttaatacacctcgttaattgtgagaaaatagtcctaaccatgcagatgctatgttgataagaccaggagaagctttcacaattacttacattgaagactgtctttcaccaaaaagcttgggtagtggatgataggaagatttgttaacaactctgcacagcataagcgtgcaaattgattaaaccatttgatcctccatattgagtagtttgtttgagattttgctcttttgatgattgtgcttgaacctgtcaagtagagcagagcactaaagctgctttatagtaatcttttcacgctatattgctattaggttccaaaagacacaggcgacggtca

SEQ ID NO: 48701 - DNA, 448 bp, Ricinus communis
  Intron number 2 from transcript 27467.m000166 (locus 27467 .t000005) derived from phytozome v7.0 (chr-ID 27467; pos 5 2193 to 52640)
gcaaaagctagctgttcttcctgatatttcttcaagtatgcagttcttatttttttattacaatgattttgaatttacttgaatattaaataaaaaaaaattggttttgggaccaaagagaaaatgagatctgacaagaacgaactgatcaaaaggctggtacgtatgtgtgttgatgagtgatgggcacacaaaccctttagttttcaggtttcattcaggaagaaagaacaggagtttcttgtcaggtttgatgacataaatgaaatcttcaaataactaaaaggaagctttaatgttatgcatttatctttcactttactcagttatgtgattagatacaatgtccttttttaacttcttttaattgaaaaagcttgtggacattggttttcttctttttattaagttgtccttaactgaggcaacttgctgtggttctgcagga

SEQ ID NO: 48702 - DNA, 328 bp, Ricinus communis
  Intron number 1 from transcript 28578.m000033 (locus 28578 .t000001) derived from phytozome v7.0 (chr-ID 28578; pos 4 777 to 5104)
gaagcctaagggctgcactataccaaggtatgaagccaagtggtttaattttacttctttttttctttttcttttttctgggtcatggtcaatccttacttttttatctctttcaattgattaatgttgtttattatttttgtttgcattcgcgatccatcagtttctcttctacttaatttgtatcagctagtttatttataattcaacatatccagctacctaatttgtatcacattttaatttgatttgatctattgatttctacaacaccttttaagattgattttgatgagttgttgttctatacaggttaaatcctgccaat

SEQ ID NO: 48703 - DNA, 810 bp, Ricinus communis
  Intron number 3 from transcript 28134.m000175 (locus 28134 .t000007) derived from phytozome v7.0 (chr-ID 28134; pos 5 1569 to 52378 reverse strand)
gcatttcaggcaggtaaatgtcacccttgtgggcagcttttagttttagttttagtttattgttactagtgtaaaccttcaatagatcttatacccttttaatctaggcttgttttgttaattagaattttagtttctattctttctttttcatttcagttataataaaatttttgctttacgacattagtgaatctagtgtagcaggtttcctagtgtttaagaatttatcagagaggaccttattttttgagtacatatttgagatgcaatgcccacattgcttaggctgattggtaaaaaatgttagtcctttggatcctaaatccaggattacagattaaaaaattcttatagaagatttatatgaattgtcttaggaaaaatgattgcttttctgtttactcttatgggaagaaagcacttattgcagtattttatattttagaaacttaatgtttggctctgcttttccccaatcctcaagctttggctttcctcgatttttgtaggattatattcccgagttaataattttgttttattatttttgttatagataatggaaaaactatattctaaggacattagtgctatctaagtatctaaacagcaaacaagccagcaacaaaaactacaagagaataaatccttaattattaggcgtagttcctaaatagccactgtgaagaattggagaattgaaatttttttgttgtgatttggttcttatatatatgactctgttttgcttaactttcattctgctgttctttttcctcaggtgatcttgagtttacttgtagtaat

SEQ ID NO: 48704 - DNA, 353 bp, Ricinus communis
  Intron number 1 from transcript 29619.m000256 (locus 29619 .t000015) derived from phytozome v7.0 (chr-ID 29619; pos 9 3114 to 93466 reverse strand)
acgaaggtaagtagtaatcatttggttttgcttagtcaggtttagcttcttttatgataatcaattgctttatggttagtgtttgaaggtaacatgcaagaaaagaaaaccttacatgattaatgattcagtagtaaattatgaaagaacaagttggtttttttttttttttttttgtggaaagactttaaaatcaagctgtgttctagtttagaattttcttatagatacgtatatagttgcttatgcctcttatctttaagatgaactttagtaagttgcataatcaaaggtgtcactggttttttttcactctgctttaattaattactattaaatgacagattcaccaa

SEQ ID NO: 48705 - DNA, 419 bp, Ricinus communis
  Intron number 3 from transcript 29596.m000720 (locus 29596 .t000034) derived from phytozome v7.0 (chr-ID 29596; pos 2 72426 to 272844 reverse strand)
gttagatatagtgttcgccaagaggttgctcttaggtatggttgtaatttttatttttcaactagttaaattgctactttagttgcttgttgattttgcaaaattttgatagagaaattgaagtaatccattaagacttgcctgagatttagtattgcttatgatttagaagctcagacagaagcactaaactttatggcgactaatttgttattgtgtctgaccttgcccaaatgacgaagatacgattggtactttgtacagtgtttttaaaaaactcatagagccgcatactataatgggaaccataattttaatcattgagctagaacacatgatattgtagagtgcatgcggtgttgttgaatttgaattgataattaatcttttattaccttcttctgttttattacaccagg

SEQ ID NO: 48706 - DNA, 776 bp, Ricinus communis
  Intron number 1 from transcript 29668.m000314 (locus 29668 .t000003) derived from phytozome v7.0 (chr-ID 29668; pos 6 2444 to 63219 reverse strand)
gtgtgctgtaacctgcatagctttcttggtatagcccctttccctttcactgcttgaattcttttccacatgttcttcccttttttgtatgttgtagagatagttaatgatcatctactgatctaatccaacagcacttttatatttgtagattatttggtctatagcatatttacaccagtaatcacactgtattaagagaaagtagtggaggtttggtaatttaaatagtataaatcttttctttttaatgtatttagaaaaacaacagctgtataatagcaaacaagtgatgtctttcttctttcttctttcttccaaagaaaataagtgatgtcaatttcagcaatttggttgtacaagcatcttttgatgtaagatagcagcagctctgaccgctacagtgtctaaagattttaaatctcagatgggtccattaattgcatttccttctttctttctttttttcaatttcttatggaatagcaaattacttaagctactaggttcagtgtgtgtttactttatgttctttgtctaagttgaagactttatacacttgtcataatgtcatgtgttctgtagcactagttattaaaaggaagttcagaatctgaaaagacttaaatgcataacttcaaagggtaatcatgaattctactgtatcgtttctgttagcgcattctttctttatctatgacacttcttttaattatgtttcccctacattttgggatgcaggcaggactgagtggagcacttgagacactttgtgg

SEQ ID NO: 48707 - DNA, 718 bp, Ricinus communis
  Intron number 3 from transcript 29647.m002027 (locus 29647 .t000035) derived from phytozome v7.0 (chr-ID 29647; pos 2 43058 to 243775)
tgggactctgatatccttcatcatcatatcactgggtatgtttcaaatttctgggcactttatattttagaaactcttgatggaacttgttaattatatctgtatctgttacttcaagagtaatctttgaagtgatgtggctgactaaaactttgcttagcttctttcaaatgtgcttaagcctcctgattctttatttatcagttggatagaccagaaaaactttttacgccctagcttttgaaattttgtctagtcactaatgtttttttcttaatgacttgaagagtaatgaaaggagaagtttaaataaatttggatattggatcgcaataatcgaaccatgtgtaaggcacatagttgatacttggtagactcttgtttttgcctcatgaggagccctattgttccggaggccacagaaagaaagagaagctttctcccattctataaatctcagattccaattactgtgaaatttaaaatattgggatcttttagtgggatattcacacgctactagctattggagcattcccctgggaatttcaagataatgctgaatattttaaccagaaagtttgattttcattcaattggttttgatggaagaatgagtcttatgaaaagcagaagaatattttttatatttatcatgactctatcctctcaactgtcttcaggtgcagtgcagttattcaagacattaggtattgat

SEQ ID NO: 48708 - DNA, 622 bp, Ricinus communis
  Intron number 3 from transcript 29673.m000935 (locus 29673 .t000036) derived from phytozome v7.0 (chr-ID 29673; pos 2 67529 to 268150 reverse strand)
atttgtgtaagctcttcaactgttctggaatacaggtaaaatgattgaagaatatcttttacacttaaatctagaccaggtatttacatcacgtgtatatatatatgatttatacatggactatgcagaatttttctaaataaaaaaaggtctcttatacatcaattagaggtattttctttttttttttgtttaaggaattatatagataaattatgaaagcaaatgcatctcttgaccatacatgcatgagtgttgttagactcaatgacaaaggtcaactatttatagatgcatttccgaataccaagaaaagaaaagaaaagaaaaggaaaaacaccttcaatcaaatttattgctgctgaaattggcaaaatgtaatagtttcaccaaaactttccactgagaattcaggaatgggtttctaacctaaaatttccaagcaagtttatgccgatttacgtttatctgttaaagatatacacaaacatgtatctatattgataggcaaccattaaatttatttcttatagatacgcgattgcgtggttatatgtaaaataatttgtttcctttcgtctcttcagacttatattgcaaacaaagccaaagtgttgttctt

SEQ ID NO: 48709 - DNA, 691 bp, Ricinus communis
  Intron number 1 from transcript 27538.m000332 (locus 27538 .t000019) derived from phytozome v7.0 (chr-ID 27538; pos 1 84705 to 185395 reverse strand)
ccaaagcagatcaaagtctggttccaaaatcgcaggttaagaacagcttatgtaatttaatagagaaattgattatctgttttaacttccaggcaattgttttgctgaatttttatgttatcaagttctaaagttaatcgttctgcgtatccattgcattagtgattggtataagtttgggtggcaagaatgggaattttttttatagctatatgaatatgagcttagttgataatcagttatcaattttgcaaatttttaattttgaggcaagacaaagagtagatcattcctgaaactgggtttcatttccttgtttttgctactttagcaagcttctgtttataaatgcaaaaatttctgaatgccatcgtgatcttgagcgagaattgtgatgtttcaagttagattactagctgtatgaaatgcaattatgttactgtctctgatctaagatcactcacttttagtacgactcatgttctttcgattctgatttgtgattaagtcccaagttctagttatctggtgaagaaaacaaaaagaaaaagaaaacaaaacaaaagaaaaccaagtttgagaatgtgttaaatctgttttgggtatgaattggggcatctaggcaagctgagagtcaatcttgcttggctatacaggtgtcgagagaagcaaagaaaagaatcttcaagac

SEQ ID NO: 48710 - DNA, 411 bp, Ricinus communis
  Intron number 2 from transcript 29656.m000496 (locus 29656 .t000029) derived from phytozome v7.0 (chr-ID 29656; pos 1 92780 to 193190)
tactgagaatttcagtccaaaaattaactgtgttggtaaggcttttttttttttttttttttctttttttttgttttttggttgattatatttgcttaaaagtagttaagatttttgtattttagttaaaatatgtttctgtaatccaaacgtatttttgtttaatttgctggaattagaagattatacaattacagaaatgaacaaacactaaactatattttgaagtagcaattcgactaacacaatgggatttaatttggaataataaacatgaatagaatttgacttattactatttgattaaattacttgttgtatcattatctattttagtgttttcaatgtattttgcaatgttctgttaccaaattttacacatattccaaatggtttttgtagttggggcta

SEQ ID NO: 48711 - DNA, 576 bp, Ricinus communis
  Intron number 2 from transcript 29676.m001701 (locus 29676 .t000092) derived from phytozome v7.0 (chr-ID 29676; pos 5 68767 to 569342 reverse strand)
atagttcctttgaagcatcacaacgcataaagctggtaatattactcccctttttccttttttctttaaaaagaaaatataaatatattgctttatgaaaataaaaagtactgctgtgtaaatgaaggttagagaactaataccaggaatatttcattactttttttgcaccattggagtttctagttcttcttttcccatgttaagtgagacctcgagcctcaagccagccagacatcattgtacattgatctcttttaattcttatttttataactactatattccagatccttttagtctgtactgattatcatctgtttgcttagggtgggtggtaaagttgtgaatgacatgcttaatgacttcgaatcaaatctcattttagccataaataaagttgcatgtaatatattgttctttttagttcagtagaaaaataatacataattcattatggaaacttgagtttatcacagtattccttgccagatcagctaatttgctcagtttccagaaggactatctcttgggacatttatcttacaatcaattcatattatctgattacaggat

SEQ ID NO: 48712 - DNA, 833 bp, Ricinus communis
  Intron number 1 from transcript 29676.m001701 (locus 29676 .t000092) derived from phytozome v7.0 (chr-ID 29676; pos 5 69352 to 570184 reverse strand)
tggagagtgattgctagacacaagcgttcaaagaggtaaaataattatccttttttgttagtttataaattgtaattatttctcttgtgcttatttctgttcattttctgatgttttatacttgatgagtttccctaactggaattactttctgtgttgtgtttattgattaacatggaagtttctgccaaagctagtgttttagaagtaactataatcgaaagtacaattgcttaaactctcttttatttatttattctttttggatttattctcctggttgtagtcagtcactattttccaactagaaagaaccatcatcaaggatttgtggtccagataatgaaattgagagcttcaagaaagtgtgacaatgggctgttctttttaatttgtcaaaaacttcttcaaaatgggttttaggcatgaaatcttcattttctttctctttcttattactttgtttcagtttcttttcaacattcctcaagttcttccttgataaagtttgtgattaatgagtaactgctggtgttaaaagtaactgaagattgtttatcatgaatcttgggaaattaattgctaagtggacctctagtagacggtaagaggtaactgtagatatatctattcttcttctcgtttctgattgaggattaaaaaaaatcaaagtctcaataaatatgttatggggttttgttcaaattgtatatatatgaaagtggccaagaattccagttttttgttttttttttctctaatccatagctttgttcatctttgattttgcggtttgtatggtagctttcctgataagaaaagagttgaggaag

SEQ ID NO: 48713 - DNA, 597 bp, Ricinus communis
  Intron number 2 from transcript 27749.m000344 (locus 27749 .t000016) derived from phytozome v7.0 (chr-ID 27749; pos 1 01346 to 101942 reverse strand)
caggttagtgcaaactacattattagatgtttggaaaacatattttcatagcatagttgatattttatcaaaacaaagaaacaccaataatttaacatcaaaatatattaaatgaacccatctttgtatcacaaatgtgattattatgatgtggaaagcgactgtacttactatgctcaggcctgctcgtgccatacatgcctataatatatgtttaggccagttttgaatcttttcccagtttcctttcccgtataatttggaaataactaaagctacaattatgcaggagcagatagatgaggcatagttggatggaattgttatggctcttccaggggggtgggctagaatgtcatgaactgtaatctaagtatgatatatttgtgtaaaacttgctgtggttttagcttctcgactatctcgaagatctcatgtagctactacgacatatggttggaaacaatcatcttttaattaagaaatgaatttcaattcccagttgagcgattgaatttcagatgaatctttcaaaatgtgctggttttattttctttcacttttttgcttttgcaattacctgtctgcaggatcact

SEQ ID NO: 48714 - DNA, 553 bp, Ricinus communis
  Intron number 1 from transcript 29667.m000344 (locus 29667 .t000001) derived from phytozome v7.0 (chr-ID 29667; pos 3 458 to 4010 reverse strand)
agacttcaggttagacaaaattcttttcatttatttatttatttttgaatttattgaaatccaattataatatacctttgcacatctataataaaggaaaactttaatatattttatatatataaaaaattattttctttttataaatagaaaatttttaatgatattataatttaaaagacaattaagctacagcttttaatttataaatttgttttttcgtagttgcttttcttgatatatataaataaaaagaaaaaaagcaaatcatgattttccaaagatagattatagaataagaattagaaagaaattaaatttaaattccccaaaactaggtactctgcagcaatgtcaaattgatcctaaatctaaagctaaagtttggacattaaaatatgaattttttgtaaaatggttaacatatcaaacaatgtttggttcaattgtattaacataccatcatcatgtggattagattcatttgcctattttttgtgtttgacatttttctattaaaaaaaaaaagtttaaaaaggagaaaggttgtgag

SEQ ID NO: 48715 - DNA, 942 bp, Ricinus communis
  Intron number 1 from transcript 29792.m000622 (locus 29792 .t000030) derived from phytozome v7.0 (chr-ID 29792; pos 1 85825 to 186766 reverse strand)
gatttgcttgggatattcctcaagctcatacaaaggtattattagtaagtttatttttctttactaattttaatacatcttgtttcatgatctgtttgtttgcctagaaaaaagaaaggatcttttttgtgggattttgttaaaaatttatcatatgtatttgttttgattgagtgagaaagtttgctccttttacacttcaagttaattgtttggtacgtggaaaagaaacatttctgaatttgcatggaaatggtgaagttttgggagtttctagacaatatgtccatggagactttaaagaggaaaaaaaattagtagtttatctttttatttctgcgaaatatgttccaaaacagttgagatttttctattgcgaagcttgatgaatttttttatgccaatcctgctatcttgattaaatcatataactggttggtaaatgctaagacatatggggtcttaggcttgttgccaaattgttggattcttgtttaatatggtcttcatttggatcttaaagttatttccactgtttttacggttaagtttttaaatatcgtatcatattaactcatagaaggtttgcccctagatagagaaaattggagaaaaggggtccatagatctgagcccaacaagtgtataattgagattttgcctagttgagtatacataacgtagatatttgcttatataatttcatggacatagaatctaattggattaggatttcttgatgtcaatttttagttgttccttgcaatgattgaagttgattattctgatattgtgtaaatttatggagttattatattggtctagtaatatacaaaggaacaacctggaagtgaactattgaggaaggggtactttttaattactgtttatgttgcgaagaatgaacaaatggctgtgtgtaggctcagtcagggttatatt

SEQ ID NO: 48716 - DNA, 656 bp, Ricinus communis
  Intron number 1 from transcript 29609.m000599 (locus 29609 .t000026) derived from phytozome v7.0 (chr-ID 29609; pos 1 99826 to 200481 reverse strand)
ctaagaaatttcaggttaatgtatatgatccttcactggttttgttaggtttactggagatgagatgctacattaatttgttattttgttttacttagtcagtgattatcaggttatagtttctagaattcaattctttcgacttcaaaaaaaatagataacttgtagaaatagtagcaggattttgcgacatttcaagtgaatcgaatttatacacatgatttattccaaacaagcctgataatgaacgacattgattacactaaaacttgaattacttgttatctgttcagtttttgtcatttgtttggttgctagcatttctggatttgataagtcgtcaacttatagtcatcttttatagagaagaaaaggaaaaaaaaagggggaaacagaaggctgggcttgtcaaggtggttcgactatttgatatgagcaacttattttatcatcttcttttatcttcatttcaccaattttgttaggcttacttgagatgccacatttcttccatgacatgaactgttactatagcgtgccgttatgtgttttctaattatggaaaaggtgggaagaagtagggagtggaattattttggttgttactaatactaggttgcttttaaatacttcaaattggcaggttgaaaaggaga

SEQ ID NO: 48717 - DNA, 720 bp, Ricinus communis
  Intron number 1 from transcript 29044.m000166 (locus 29044 .t000004) derived from phytozome v7.0 (chr-ID 29044; pos 4 3256 to 43975)
cttcgaatcttggacagcagctgccattaaacgaggtatgcttttcttttttgttttgtttttgggctcctttctttcttcttcatcatcttcttcatttcttgttattgcttaattggctgcgactgtctctagagaccgaagttcattggtttcatcatcatctttttttcttttctccttcaccatatccttcttcttcctttcctcaatgaattgatggaaagtagaaatatagttatgccaaaagtgaacattgtattgggtatggtaaaaactaagaagtgatgtgtcaatggcaaacctggaataaaggtatatggaaattaagcaatactatgttatgatagtataaggcgaaataggagtcaagaaggactatcattttcgttttctttgtcatatccattatcatatataaccttttctttgttttgggacactctccatctcttcatctctgtaacttgtgttttgcttgtcatctttctttttaatgcaatttgatgttggttggttagaacaaccccattttgaccttttttttctctttttttagttcttatttgacattggttaatggaaaagcaagaatttaagattttttttttgaaattttttaattttgattaaaaaatcaggccttaattctttaattcatccaatatatatccctgaaagtatatatatatatatatatcacttgaagcagaagaagag

SEQ ID NO: 48718 - DNA, 958 bp, Ricinus communis
  Intron number 1 from transcript 29599.m000172 (locus 29599 .t000004) derived from phytozome v7.0 (chr-ID 29599; pos 2 1606 to 22563 reverse strand)
cggcattgtcttcttttgcttccaaactcaggtataattattgtaaatagcggtaaactgttctttgcttaaccgtttttcaactgggatttttctatttgacatttttacccctgcgattttttcttttgtttttagttcccttgattcttgtagttttaaattaataagaatctatattattttgaattagttcgacctgggaagagttttaatttatatccatagatttaatctaataggaagtgtatatacttcggccttgagtttgaaatttttatttatttatatcttaaaaaaaataaaaaatttaatttagtaacttatataattattttatttttataaaataaaataaacttgtgtcttttaagtataagtgtggatgaagtttactaaaaaataaaatcagggaagacaagtcgggcttgaattaggtggtggagattatgaaagtgaagatttcatttttgggaaaagcaaatcatgcaatttgttagaacatcattattaatatgttttttcacaaaaaagaaaaacactttctttggtgatggtttttcacatgctttgtagggtagctatgctccactagccatttcattcaagattcccttgtttcctgattatttttcacctttaacaaccaaatatccttccaactctttttattatttctactgacattctttttctactatctatagtaatttctttttttttttttttaaagaaaagaatttccaaatctaatctcatgtaatagtatattgtaacttcacgattatgaaaaccaaccccaatttaaatagtacgactaagctaaaaccaattactaattatacctcgacattattaaagatatagctaagctttttctttttttgtttggataactaatgcttggcatcccaaaattgaagaaagcttagatttttattttcttacaggcctatca

SEQ ID NO: 48719 - DNA, 1013 bp, Ricinus communis
  Intron number 1 from transcript 29679.m000388 (locus 29679 .t000014) derived from phytozome v7.0 (chr-ID 29679; pos 1 56110 to 157122)
ctgaggactactacattgaggtactgtgcgatttccacctttagcaatttcactcataatccagttaatcatcaaatactgcatattcaaaagcttactgtgaagactaatttactttatagcactagaagtgtttagtcttccattattaacattgaataaggtgtgagagtagattcaatctcaatttttcagttgaagctggtgatgtctcaaactataattcgataaatcataaaatagtatgcagcttcaagtttatgcacttgcacaatataaagcagctggtttaactacttgacattttggtgctaattaatttccaccagcagcccaaagacttataaaatagttgtacaaacttcaaactgtttacggtggctaaggctgaagatttctttaaggaatttactgcaactgatgcctaaattgttgtatctgcagctgacgaaatgaacttttgcattcttttgtggtttcttataattagataaaggctagagaagcctaatgagatggattctagtcattggtgctggttgaagcatcacttgaaaatttccattaatggtcggtcactttccaactttggtttgctgaatggatttttctcttcaatgctggtatgttgattgggtaaccagaaggcataatggtcatcggcacctgaaacctgcctccgccattagcctgttttccttttataaaatgataatctttgcaaataaagaaaataataaaagaaaacttgcccttggcatgtttcgatatgtcaatctatcatgaaacagaatcttttaattttacgtgattgagtcaatgaatgtaagagtataatttcacacttgacgattttgatggtgctgtcttgttttttaaacttttcttatatatatgtgtgtgtatgtctttcttttctttgtttggagaaagtatatatattagtattctgctattgtaatttacccttttgcattggagctagaataaatgtatgtctttctaaatcagaa

SEQ ID NO: 48720 - DNA, 866 bp, Ricinus communis
  Intron number 3 from transcript 27810.m000671 (locus 27810 .t000042) derived from phytozome v7.0 (chr-ID 27810; pos 3 41122 to 341987 reverse strand)
ttgatttcaatctcgacagcatattggctgcagaagtaagtgtattagaatagtgcggttatattattcgccacatactaggggaatattcttgtttttactctcttttttttgtttctcttgttcatgtaaagcttagagttgtttgtgcttaatccctagagggatctctgttgcatctattgaaacacttttaatatctaaaatctgctttattattatttggccatttgtggacagaagttcaagtttacttgattgtatcagcgggtgacaatttttctgtaattgtagcatggttgctagagattccgatctggtttgcaaaaggaaatttccttctgtttgtttgtgcaaagcagtttacctgatatgggccacgcctttcatttgattactataatcaatgccttaattagttggagtcatcctagatgttgatttgtgccttaatttgttggagtcatcctgagatgatggtttgtgctctctaaggccccttagctatagatcaagtgactaaattatgcactactctgttatgttcaattatattgtgccatgcaaggctcaaaaaaaccaaaaaggaagaggaaaaagaagaaaagaaactaaaagaagcatactgcatgccataccatggctatgtaattgttgcttattgattactaattcactacaaccaactggtgcgaatgaatgatttcaagtatggttttatggcagctctaatcactaatttttggatcacatagtgggctctatctttttgtaattccttaaagcagattagctagttttcatcgatgatatcattattgctgatacgtccaattgcccttttaaacttgcagagtggatctcta

SEQ ID NO: 48721 - DNA, 465 bp, Ricinus communis
  Intron number 1 from transcript 29671.m000293 (locus 29671 .t000002) derived from phytozome v7.0 (chr-ID 29671; pos 1 4413 to 14877 reverse strand)
gagaaaaaagaaagaaggaattgttctttgtccaggtatgcccctttcttttgccctcataataatctttgatttgtccgtcatgtatcgaatcagcccatatttatttggaagaattggtattagggtttaaagaaggaaaaatatgcagtaatgtacttctttttgtgcagtaatataattctttttcttttctctggatcaatgataatattaagttttaaattgtcaaaaacgcttttgctatattctttgatggaataaattcgatccctcgtgtcacttatttaggaatatgattgcatgattatttgtttgtttgtttctgaatccattatgcacataaccatggggttttttaatcacaaagaattaccatttgttttcttttgttatgttaaaataaagggatctcttcttatgttcataggagttgaatcattaaaggggttcagcggcttggct

SEQ ID NO: 48722 - DNA, 776 bp, Ricinus communis
  Intron number 1 from transcript 29742.m001391 (locus 29742 .t000027) derived from phytozome v7.0 (chr-ID 29742; pos 1 42253 to 143028)
ggggatttggatcctagagttgcagagacatacaggtaaaaccaaagcattttactattgtagtcttaaactatcaacctctattaaaatatgcagtattggcattattagcttaatttagctgtctctttttatttattttctttatcttatccggatgctaagttgcgactggaggctctaataaaaatagcaaaacccacctaaaagctgcgcgctctatcattgggaagatagacccccgcatgtttcttggatgattgaatggatctggcctttgcattgcaattgaacacgaagatggagaatcctgaattttgttttttcactttaaactgaattatttctttcttaaaatgcaactgatcatataattaattgatttgattatttcattttttagtcatgttggataagaaatagatcaaaactcattttcataaattaccatttagccaaggataagagttcatacattctgagaaatttctctttcccacactgcacaatcataaactagaccatgtgtccagtgaaagactgaaagcgtatatcttttgaactcatttgtattaatgtcatcaacacgttgaaatgccgactcaaattctatataacagatttaaaaataattctattaaaatgctcttggttttgtatttgctaatttgtaattgttattttctattataagtttgtagaatacttatactcgtttggaaatggtgttgaaaggttgtttgcttttgaaaaggacaggtatttagccgaggtct

SEQ ID NO: 48723 - DNA, 757 bp, Ricinus communis
  Intron number 1 from transcript 29666.m001428 (locus 29666 .t000004) derived from phytozome v7.0 (chr-ID 29666; pos 2 1208 to 21964)
tgaagagttttcttcgcaagaagattttattagaggttattaaaaagttatctttttaacaattttgatatgggtttttaggtttttagctggcttttctgtgtttttttttttttcttttttggaaattcttttgttctgtgcatattatgtatgattagggtaaatgtgagaaatgggttttatgtaaaaaaaattggtggtgtatgatttggtatttattcgtgtgaagtgtacaaagctatgtgttaactgatgcttaaaagggtttgggacattagagtattctgctacggatttttatttttatttttacttaagagtgtcttatgtttctcttatgtcttgcaatttcttttgagaatactctttcaatatttatgtcatagatgattttctatagatccttagtgttcaagttatatgcagttcatgctaatcaggcatcttgttgatgcttagcttgattatttgtgcggaatgtaatttagtgaagaggattgtcatattgcaaatgtcagcttatatggacatgtctaacccttggatgtttaagaattagtttgcagtaataccaataactatatagaatggaatatgtgtgattaagttaatatcctttgattgtgctttcaagtgcctgccttggcatcacatctttctgtcaacttcatcatgacttatagaatatatacgcccaactagttactattctaaatgtcattttcaaatatctaatttgttctttcaattgcag

SEQ ID NO: 48724 - DNA, 321 bp, Ricinus communis
  Intron number 1 from transcript 29080.m000172 (locus 29080 .t000004) derived from phytozome v7.0 (chr-ID 29080; pos 1 4095 to 14415)
tacattaggggcgtggccgaagaagaggttgcaatctgtgagctaatgcaactggctttgagttgaatctaggttcatgtccgctaagaagtggtcggaaggaaagaagtaaacagattgaactgcaggcttctcatgaattttctttttttattatcggttctgatactaaatgtataaaaaccatttttatggtttgaaatttctttgtactctgtttttttcgtgggtcttatttgcactgtttgtttttaatcttataacgtgattttatgttcatttgcagtttgtgattatctctttaactgggtggggattact

SEQ ID NO: 48725 - DNA, 560 bp, Ricinus communis
  Intron number 1 from transcript 29640.m000412 (locus 29640 .t000010) derived from phytozome v7.0 (chr-ID 29640; pos 5 8207 to 58766 reverse strand)
aggtcagtttgtaccgttctttctttcttttctgtttcttggttgtttattgttgaatcaatggaattagtcaatggttatatatgtgggtgtaccaactgaatagtgggtagttgagaaaatatcatagtttaattagtgcaagaagcgccaaaattttgcatcgccttcaatgctgtttattaattctgtgctaaggaattgtatttgaaaacaatcttttggtttcatttccttcactaattttctgttgtaatctttttcaattgaatctctctaaatattatgtacgaagatgaacatagcaaatacaagaatttagttctttggtaatcaaaatctcaccaatttgaggccgtcttatcaatgaattttaggtcagaactaagcatttgataacttaatttgccataatgctctaaggttttaggcccttggcactatgatcaatttggcatcaggtcagaatgcttatgatgtgttttatatgcatagatgggcagtatatagcatatttaaggtggaatatttatgctactgttttttgttgcagcttcctc

SEQ ID NO: 48726 - DNA, 441 bp, Ricinus communis
  Intron number 3 from transcript 29482.m000170 (locus 29482 .t000001) derived from phytozome v7.0 (chr-ID 29482; pos 9 963 to 10403)
ctgcacttgatttggtatgcaatatatttactcattctcacttacataaaaccaccgagtttcttactattaatagttttctttagttttattgtttctttacatgataatattgcattatatgaattataaagatgttttttttctttcatttgtgcacaaggcattgtctcatagacatgcttgtttaggtctgattaatgattctttttctagagcttatttgcatgtcagaactaatgttctagtttatgaccctcgataattgatactcttttgatgtttcaaaaaattagtttccccatgttagctggcgcagctgtggttagtactgcatttgacagaagacagaagttttatactattcttattttaaaatttttgagcttctgatgtgtgcacattttattctgttatttttgcaggtgatattatcccctg

SEQ ID NO: 48727 - DNA, 432 bp, Ricinus communis
  Intron number 3 from transcript 29783.m000311 (locus 29783 .t000008) derived from phytozome v7.0 (chr-ID 29783; pos 1 61471 to 161902 reverse strand)
gcaaccattctggggtacaagcactgaactaggttatgtatatgttacatgatcaaattgagctaatatctatcactttcttagttgatgtcactgattttcaacaattaaaccttgctgtagtcattgggtgtttcaatcttagtgatgtaaaacccaaatttcaccttaataggaatgagcttcacattgttttcttatataggagtgatgcttttcaattttaatgatgtatcagttccaatgttcttataacgatgaactaaattgggttagtgaggtatatttcttttggtaaaaaatgttttttgtttctgcaaaatcaatatgcatgaaaagtacttcttagttgaggaaatcaaacagaaaagaagcaaaaggttgaaccaataaggttaaaagctaaaactaaaagtgtctgaattgactagg

SEQ ID NO: 48728 - DNA, 1032 bp, Ricinus communis
  Intron number 1 from transcript 29661.m000925 (locus 29661 .t000027) derived from phytozome v7.0 (chr-ID 29661; pos 2 77722 to 278753)
ggaagcttttctgaattggctacgcaggtcagcttctccgcactcgctttccttttttttttttctttgcttattatttacatttgttgatttaattattatgattaattcttttggttgatttttatgtacaaagtgtaaaaattgaaagtttttgaatgttaaaattagaacgctgtaaattgctcattcttttggatttggtttgtttgttataggttttgtagtttgcttagagtttagattgttgttttgtgttgttttcagttggtcagttttagttagctaagcttccttgctttttgtttattgtttctttctgctactttggctgtttttgttgctggttaagcttctgcattttcttctttgagaaaattctttatatagtgtttgactttagattactcgattctcaatctttgattgtttaggacatgatttttaatttcagtaggctgccttcaaatcaaattttaaattttttttttttttggtgtaatttaattatgtttattagaacttctttttgttcagcaatgtatttcgctaattggcaattgcaatacattattcaaatttgaagggaaaggtgtttgtgcatataagcattacaaattaaggattggagaaataaccaagattacaattatcaagtagaaaaggcaagatatattattaggtatcactttcaggacagagattttatatatcctgcaaagtactcattttcctttcataagagctctatgacatataactgtgtgttttgttttttgaaaaaacaggaaacaggcatctttcatctttgatatggttactgtaactagaactagaaagatgcttgctttaactataatgcatttcatccagaggttatttgtttgtgtctggaagcccaaactatgctaggagaaaaaatctctaattttctttattagttgcttttactgttggccacttggccttgaggtcttcatgttgcctagctcactttcttgtatatggggcagcctgttctttaagcaggag

SEQ ID NO: 48729 - DNA, 506 bp, Ricinus communis
  Intron number 1 from transcript 29815.m000509 (locus 29815 .t000021) derived from phytozome v7.0 (chr-ID 29815; pos 1 61412 to 161917)
ggttttcttcaaaaaccataaatattataatctttgtgagtatatatattcatttttatttttctcttttttggtaaagggcacctaaaattttaccgagttggtgttgaatattaaaaaaaaggtttagatctttggaaaaaatattaacttactatttttttgaagaacaattttcaaattaagtaaaataaaaattgtggttttccaacttcaatgccaaatgctaaattttaaaataatactaacaagtataaattaaattttaataactaatttagtacattacctttgtattcatgctatcctataaaacatactttaattatcaatttaaccgtaattagagagctaatggttgttctattaaattaagaactagagtttgattattctaatgaagattaaacaaacttaaacaatcacgtgggtgtaatttacttgttttgttttttgtttttccttttagcaaactcattgtggtagttcttgtggtttgctaggaa

SEQ ID NO: 48730 - DNA, 705 bp, Ricinus communis
  Intron number 3 from transcript 29636.m000763 (locus 29636 .t000028) derived from phytozome v7.0 (chr-ID 29636; pos 3 29302 to 330006 reverse strand)
gtttaatcttttgacacaagaggtcatatttttttctttataacactttagtatctgaaaattatatattgttcttgtcaaatagatagcaaaatataattccctagtcttgtcagatcattcaaatctcgtcaaaatcgactaagattaaagaaaaaactgaattgtgaaattaatttctttctttgattttttttctacaaactctataaagtctaacatgactagtcttagatgaaagctaaatttataagaattggaatggtaataaaatggggaactgcacttattttttaataatatgcactttcatcactcgtgtaaacagtgtctatttaggtgttagtatggtgtctattcaaatattgtgtgaaattagtgaataggacaataaagttgctcaattctgcatttttattattttctttaaatatgaaattttattttattagatggaagaaaataaagtactgcatttttttcctaatttaaataaaaaatatctttacttatcctaaaataaatttcattttaatatagactcccgtaaggataagaatattctaactaatgaaaggattattacgatgaacggtatataaaaaggaagaatgaaattgcatattttaaaaaacgtaagtgcagattatgtcatcgaccaattaacactacaactatttaattaatagcatcttaattctcaag

SEQ ID NO: 48731 - DNA, 526 bp, Ricinus communis
  Intron number 2 from transcript 27461.m000099 (locus 27461 .t000002) derived from phytozome v7.0 (chr-ID 27461; pos 1 8764 to 19289 reverse strand)
gccttcttagcggaagctttaggtaaatttgcaactgcactaataattattgtataatctcgttgaaccaaagctttggttaattattacttattgttttagttctttttgttgagattttagtcatataagtactagaaatttaaactcttcattttttgggtaggtaatgactgtttgtttgtggagaaaatttcagaccgaatgagaaatccgaccatttaactcattgaatcagtcatagtttaggattcattcatttagggtgtaactatataaaactaatgaaaatctttagaattcaagagatttgattacgctcatatttcttatgtctttgttcgctttaatgtcgctaaagtaaacatttgtctagttcacttttatttattgcctaacagtaagtgcattactagtttctaactgaatggcgtgtctttaatgtttgtgttgtactgttgcattatggctgacctttgcaactcgtgcagtgaatcaaatctgaactgtgtttcaatccagtgga

SEQ ID NO: 48732 - DNA, 600 bp, Ricinus communis
  Intron number 1 from transcript 27504.m000611 (locus 27504 .t000003) derived from phytozome v7.0 (chr-ID 27504; pos 1 1901 to 12500 reverse strand)
ggagtgggttgtggtgtggtggcggacttcttgtggtatgagagtgagaggaggctttcctttttccataacttcacgagtaccgacatctcatttctagaaattctttgaaacggcccactgaaaacatggtgttgttgttgtctctctgttggacattttaattcaatagttttcgaaatgtcaattttttgggctgcttagctttcccatttatttttccaatttcaaatactgctgggcagcattcgctgacagagttttcttctcaaaatcttttatctagctggcaacttagcttgaggcatatgaacagaaatgctgttctcgttggtgaggaaactggtgtttgttttagcctttgtctacaccaatgtcagctcagtgtgaaaacgaagaaactcctttttactgtcattgcaagccaagttttgtctttttgacttgagatttggaatattagctaactgcaatgatggttgccaaaagttcaaaacttgtactctcaatttgaatattgtttttctttttcattaaacaatagtgttttgcttgaatttttcatctcatgttcgttagttggttaaagacttggcacga

SEQ ID NO: 48733 - DNA, 468 bp, Ricinus communis
  Intron number 1 from transcript 27917.m000091 (locus 27917 .t000002) derived from phytozome v7.0 (chr-ID 27917; pos 1 6385 to 16852 reverse strand)
tctaactcctcagaaaggccttccaaccaggttttctccactttacaaagtacagttccaattatttttatcacccagcttccactctgccaaactcctgcagacgacttcagtaccactattctatcaaaaccactctgtcaaagagcttattgatataattttaacttatttcaattgaaattatttaatataacatatttaattagatgatctttttctcaacggtaacaaaaatagaccttaagagggcttcaactccatgttttttctcttttgctactggttgaagatgaattttctagttaatgagattctgcttttgagtatggcagtatatatacataaattgtttggcattcaagtagattatagtatttaatgatattagtttgataattgataattgataattgaatttgggtttgtgcaggtagtggttttgagagtgtcactgcactgcagagg

SEQ ID NO: 48734 - DNA, 386 bp, Ricinus communis
  Intron number 2 from transcript 29765.m000755 (locus 29765 .t000037) derived from phytozome v7.0 (chr-ID 29765; pos 3 45455 to 345840)
caattcacttgcggattaaagtcagaaagctagaggtatgctctatattacttttcttaaaatttaaggatgcattcagtttcttttttgctcaaaagcttgaaatagtcttactctagttgctggaatgaaattaggaagtgaacccaaagagttacaaatttaaagaaaagaattcttatttcttactataaaattgaaaaagaattaaggaaaaaaatagaaagtgtaaatagagcggcagtttgattatttagttacgttgggtgtttacttactcagcagtcagcaaagttagtaaccacaggtattgattcgtatccattttttcataaatatggcttgcttttgtctcttcaggaagagaatataaaccttcgtacagc

SEQ ID NO: 48735 - DNA, 563 bp, Ricinus communis
  Intron number 1 from transcript 27715.m000181 (locus 27715 .t000004) derived from phytozome v7.0 (chr-ID 27715; pos 7 1879 to 72441)
aagaagaggaagaggaaggtaacttcttttctattgctgtattttctatgaggtcatcaatactctcctatgtaggatgaaaacggaagcggaaatattggcagttatcaaaatataggacagagaaacgtgtaaacattgaaaattaggggtattattttttattattaattttatatgacaagttagaaacaccatttacttgagtaaatatcaccataagaataacaaataataaatgatgtgttcaaatcatattcaaccatcaaagtatgtagaaataatagtattgtagatttcccttttaatggaaaaaatgttttaccaagttggaaatatgttcacttttagaaaaatgacagaaacgacagaaagagctttcataatttggaagcattttggaaagactgaaacatttctgaaatgtagaagtgttgtttcacagaagtttctgtactttcatcataccctcttgaaaatgcagaatttatgtactttcatgcatatcctcttggaaattctgtttcatgggactgaattctttatcttattgcatgcagaag

SEQ ID NO: 48736 - DNA, 934 bp, Ricinus communis
  Intron number 2 from transcript 27798.m000585 (locus 27798 .t000006) derived from phytozome v7.0 (chr-ID 27798; pos 6 0487 to 61420 reverse strand)
accagattatctcactagagagtaaatatcaacaggtgtggttacttactagagatttaaaattggcaatcacaagtcagttgaaataaacattgacaagtcttaatctactaatctgttttttggtccaatagaccaataacataaaatgtaattggtgaattaagacctcgaattacaagctgacatgaatggtcttaccattttatgctttctgcctttaagaattaactggagtgcgaatattctggtttctatgtttggaaaatgcacttgctcctgctagtcagactggttcattttggaacttgcccttctctatgtttacaacctacactagcataatcctttccaattcacaaatttaaagtttttgacagattgattgattgaactcttggctgttttttttaaagattgtaacctatgcttttatttcaagttaatagtatcatgccaatgctagaattaggactcttctcttaacagtgggtttaaagtatccaattcaatatgcgattgctttagattagatggattagataaaagtgcaagtataattgatcttgggcaagcttgaaaagaaaatttaaattttggattcttgatattcatttgaatttgcatttctttgtgaacaacagacaagtaatgcttgtttctttttggcttgaaaatattagagcatgatataaaagctacatagaaaattaagaataatgaacatgtaattgcatttcaacaatatatatcatgcttattggtgtttaatgtttaaatttttttaagctctgtttgacaaaaatgttatgatgaattttaaatccagattgtagaatgctttaatgaatgttagttgctcatgatctctgtttcttttttctcttttgtaactacaggctctaaaggatttgtatacacatttgacccctat

SEQ ID NO: 48737 - DNA, 940 bp, Ricinus communis
  Intron number 1 from transcript 29648.m001958 (locus 29648 .t000045) derived from phytozome v7.0 (chr-ID 29648; pos 3 47371 to 348310)
agtcctttcaatcccaaggcaataagctagctgaggtatgttattttaccacaaaagattgtttccactcgaaaagatcatattttgtccataatttagcataaaaacatgtgaaattagtgaattgattactgttagtagaaaagcataattccttctttattttcgtgtgtgggtattggaaaatttggtactttcttgcttggagtggcagtaattgttttatttttcttttgatcctatgttttagtggcattgctaatatgtgctgtgaagattgaagatgtgcttgagcggaagtaaatgttattaacgactcttgtattcctatacccaatttttgatgttttgttctgtagtttgtaagtgcttgtttcctttgttaacatgggtactatagttaattgtatggtgttattttgcatatattctaaagaaaaaggcctgtttctatgccagtaaattcaaaacaaataataatttattagcattaccatgttatagatgcgtactaagatatcacattgcatgaaccctacttgaaaagctttaggatcaaattgtcctttaggaattgcaaattatcatttagttttgtttccattaaccagtcttgaaactgaaagatcctcatctagtgcattgagctattgcttttgttttcattggctcggctctggaaatttggttgtcaattttcctttgctactaaactcgataataacttataatttttgatgcccgtatctattaatggcttaagagtaaactctgtgcatgttcctgttatatgtttaagtgttagggaaaactggaagtagaagtttctgaatggttgccaaacatgagtccattctaaagttagcattaggatgtcattgtggtgatttacttgttattataatcttctttctttttttttggaaatttgctttaaagg

SEQ ID NO: 48738 - DNA, 388 bp, Ricinus communis
  Intron number 2 from transcript 29634.m002104 (locus 29634 .t000050) derived from phytozome v7.0 (chr-ID 29634; pos 3 32159 to 332546 reverse strand)
cttgggaaggtatttgagttttattgccatatttccttgtgtattctttattgtttatttgtctttgtggactatatagttgctgcacaagtttctgtagcatgcctgtcttttctattttgcttccatatcctggtgccttgtcttgctttaatgttccaatgtttgcatgaagtatctcatttttactagaggacttatatgttctcccatcactatttgagagtgcatatatattgatcctgcatgtgcatacacctcctgttgagatacggcagatagattatggtcatttttcttaatagcttcgtagaagaattagcaagcttatttgtgtttttcactatatttagagctttcttctgagagtgggcaacagtcttctttc

SEQ ID NO: 48739 - DNA, 852 bp, Ricinus communis
  Intron number 1 from transcript 29634.m002104 (locus 29634 .t000050) derived from phytozome v7.0 (chr-ID 29634; pos 3 33349 to 334200 reverse strand)
tttcttttcctcctcctgctattccgtttattaaggtaactatgtctctttatctattacctaacgttcttaattttaaatcccttatttagaaaaacaaaagctattatcatgctgacctctgtttggttgctgattaagaattgactgttacaaaattgtaggatatcagggttctgataaaatttgtaggatttcgttaaatttagggtttcgcttattaacctgttgatgcttttctattgtagttttgtttagacatggaacggtaggccccttggaagattcaatatgtagtttatcaattaggaattaattttgtcatatttttctctgattacatgatcaatttaatgaaacatgatgttttatgttctacgttctaggtaatgtttttaagtttcggaacataaaggctcattaatatcaatactcggttcttcatatgagaaatcataattttggaactgaatgttgttttgataatatggttttatagcttagcaagtactgtggttttggattttggtttggtggtttcagtctattgtgcagtgataggtactttctatttttatgttcactagctctgccggtttcataagatggctctagtctctgtattttcttaacctgtttgtttttatttattaatttggattcagtaaaataaaagctttgtttggggtcaccgacaccagttaaaaatccttctccccaattccaaaagaactgcttggttataactctgatgaagtaatttattttattttattttattttttattctctcaagtctcatgtttgtgagctattttcacatagcttgtcgctgtttgataatgcagagcc

SEQ ID NO: 48740 - DNA, 630 bp, Ricinus communis
  Intron number 2 from transcript 29794.m003473 (locus 29794 .t000172) derived from phytozome v7.0 (chr-ID 29794; pos 1 124701 to 1125330 reverse strand)
gttcgcttgctcaacttcacattaagttattgaaggttttctgattttgtatgattgttattattatgagtccatggctaaagtgatgtagtgaaaattatacaatgatgtcattgcgtgcatttcttcatgaaaggaatcagtgttaacatgattttatacgagcatttgattatatctttttactatagcgaagcaaaggaatttcattctttaggggtttgctctgatttaatatagctatggctctagacacggcatgtgtatttgtgcttttattttcattgatgctactgaactagatccaagcttgcacttatttgtcaaattcatataatgttccttttttagattttaaatcctgcatttttaatcgcttgaccatttgtttcctctaaagcttattttacaaaaacgggatagcatttggaattctggtgaagatattatcttaattttaacttcaaagattgtaattcaatgtgaagtgccagttagtagatgtcacagtaaatgctgcacagctctagagaaaattattttgtttaaatctgtgtatagcttctgcccttataattgcccacatctggaatcttttataggggataccacctgtgagtaaaaccttga

SEQ ID NO: 48741 - DNA, 921 bp, Ricinus communis
  Intron number 3 from transcript 29263.m000093 (locus 29263 .t000005) derived from phytozome v7.0 (chr-ID 29263; pos 5 3092 to 54012 reverse strand)
ctttggttgcagtaacgccaccgataactttctaagtaatgtatcctaatctaaatccttttctttttttttttttttttgaaatttgtttttgcaactcttatctattggagatatgtattgaattttgatgctaaaatcatttctatttttagattatgtatctgacgtcctagattttatacttaattttatttatttatttattttaactcttctgttactggaattttattcatagaagaaaattctcaaatattaatgattatttagagagagagagagagagagagatggacagctatatttttggagagtttgtctaatttaatttatatcataatttgtgagacagctcacatccattccttttttccatataataatggagatctaagaaatttagattttattttatattcttacgtaattagtaaattgtaataaaattttattcaattcatttgtatttctgcatttttcaggtttgatataaatgaaaatctggaattttatgtcgttatctttgagaaattgtgtgtggtgacgctaaattctaccaaattggatagaatttggaaatgaattctaaactaataataaggggagcgagctagtgaagctataaatatatagtacaagctagtaatgctataaactgaaattcaattgtattataaatccaaacatgagaatccatatacatatgcattgttctatacaatttgcttgcaaatgaaatcaattttacgttgatacaatcacgggaaagatgggcttatacagaattgtacatacactattcaaatttttcatttcatctttgttagggaaagagatagtaggcaaagttgcttcaattattgaaatcagaggatttgagccaattgatttaatggggtttatatgttgtagctgctg

SEQ ID NO: 48742 - DNA, 992 bp, Ricinus communis
  Intron number 3 from transcript 29706.m001351 (locus 29706 .t000081) derived from phytozome v7.0 (chr-ID 29706; pos 6 70377 to 671368)
tcaggaagcgtgttgagtttctgcaggagattcaggtttggttggagcttccagctttattattagttttattttggagtaattgttccgtttaatgtcaatactttcccattagttgttgattacatggatagtgtgtactgccttatgtgtttcatttcatgagctgatgtttaaactttaaaacgggtgagttcctattcattacttgacttaacaatgagaaatagtttaaaatatgggctctatattaccatgtattctttttgtttttgtttttgtttttcactcctaaggagaagagggagggaagttctagatttaccgtgtgcgttctaaatgattagctttctgaaactctatgttttgtatgatgtgaaattaatgtcgattgcaagttaattcaagggacctgtgatgagaaggaaaactatgtgcaggactagaggagaaactgatagtactttgatacagtacagattgaaaagtctttctactcatactgctacagtgggagatttccagtaattgataattttttatttcagacctaatctttcatgtaaatgtcttgtcttatgccctagctagttagaatggatgaagtgatagaataatacatattttatgttgttgagatttgtgttgttggggctaagaatttcgttatgcactttctatggttttggtgaatctaaatgcgacatatgttgaaatcggggtgattcttttaggcctttcctttgcatacaggacatatttgcatatagggtgcattatattagtgccacaatacactgcagattggggttaggggttcaatcttttccactctcttcctttctactgaatgttcatgcatcattgattttcttcatggtctttagcatgcatctgcaattgatgtaaaatacacacattgatatcttatctcttattactaaaagatagatagaaagattaattatgcttatgaaattttcagagccaac

SEQ ID NO: 48743 - DNA, 440 bp, Ricinus communis
  Intron number 4 from transcript 29801.m003215 (locus 29801 .t000160) derived from phytozome v7.0 (chr-ID 29801; pos 8 48195 to 848634 reverse strand)
tgctcgaggccttgcagcgcactgctgccaacaaggtatacttctttcaattctacatttatgttcataaatacatttgatatgaataggtctttctatcaacatctggagttgggttttaccttcttatttggttcatatatcagaatgacggaatgagcatgactgtgtcctaaatcttagtgtttcaactttattctatcaccgtaccatatattatcaccctcaatatagcaattggtggagcatttgcagtactgaattgaagcattttccacttcatattatttcttacttacaaatgcttgctacttactagttggggataattctttgtttcttctgctaacttttttcttttctaattttttagctgtatcatttatcttgactccttgatggattttcatgcttacaggagaagaagttggaagaagagg

SEQ ID NO: 48744 - DNA, 605 bp, Ricinus communis
  Intron number 2 from transcript 29002.m000143 (locus 29002 .t000001) derived from phytozome v7.0 (chr-ID 29002; pos 1 5295 to 15899)
acgcgctgaattacccaattcaccatcatcttcaggtgggttccgtcagtttttcttgaaaaaggattatgtagagagagggcatgagttttggtcgcctttgtagtcttgtttgcctccaagtatttgttttcagaatttagattggctgtggtcatgggaatattcttatcagatcagatccggccctgccacagtgattttttgaatgacttccgcactgtattccactatttcgcagcatcaaagcattttggagatttcgtctggattatttttctatcggttcgtatattttctagctttaattgctttatgcctatactgacatttttttttatgtttaacaggtgactctgatcaatgatacccttaattaatcctccttgacttgttaccaaattattacaaatgattctttttcttaaatattttttctttttatccgcaaagactatgctgattatgttgagtcttcatgtgcatgcttagtttctgatatttagttattgttaaaagggtaatattatggctcttaaagtatctgacagtttagtgtcttgttctcaggtcagcaactgcaaaatcctcttctgttacttggg

SEQ ID NO: 48745 - DNA, 488 bp, Ricinus communis
  Intron number 1 from transcript 29729.m002333 (locus 29729 .t000066) derived from phytozome v7.0 (chr-ID 29729; pos 3 66023 to 366510)
tggttcgcttgttcttccacgactgctttgttaatgtaattcttctttttgttttattagctataaactcgcccacccatattcatcttacataatttgtaattgaaagttaacttattttggaagttaatatttaattaattaggccgagcttaatcggtactaaaattatttctaaaatcgtggggtcttaaattagaatctagtcttacccaatttgtcgttgagttgaatttagccttaagtagttgtgtttgcatgtaaaggtcaacaaaaacgtctatcaaaagacctatgtctaaatgcattgacatgaaacacattgatttatatcaaggctagtatgttattatattgtaattttcctggtgatcgtggcttaatggattactgttggacctaccttctcttagtttgtttttcgttttataccatatgattattaaactattattcttattgttctttgttgtcttttcatgacaggg

SEQ ID NO: 48746 - DNA, 363 bp, Ricinus communis
  Intron number 3 from transcript 29788.m000332 (locus 29788 .t000015) derived from phytozome v7.0 (chr-ID 29788; pos 8 0588 to 80950 reverse strand)
aagatctcagggcagaaccaactagaaaaggtacaatgtcgctcattaacaaatataacttttaaaggacttttacgtatatcaattagaaaaggaaatccatgtggtgtgttttttttgtgtgcaaatccagttgggaaggatttttcacgatctcttgttattatctccttgttccttaaagcacaagagaagagtgcatataactaataaatgtgataacaaactgaattcttaaacaattcagtctttgaatatgcctgtttctttgtcaggttataattatttgaatcatcctttttgagcttaaatggtcactgtagctctttgcagaacctgaaaacgacattgaaatctgggagg

SEQ ID NO: 48747 - DNA, 493 bp, Ricinus communis
  Intron number 2 from transcript 29788.m000332 (locus 29788 .t000015) derived from phytozome v7.0 (chr-ID 29788; pos 8 1112 to 81604 reverse strand)
ggttacctactcctaataaatctattactgacaaggtctttttctttttattttatttcttttaactatattattttatttctggtcttcttgtgtgtgtgtgtgtggtttttaatgttgatcatccggtgcctcgttttgggacttcaaaggtttgtttatttgcttttcaatgttttgttggtcttaatcgctgggaaataattgctgtgtggtgtgggattaagttaatacattttacacttgtttgaaccctggattgaggacatttgatgggtttaattcattagagatctaccttgaacttaaaaggatttttatgcggttgttgacaatgattttcattttcccctttatttctatcttattttgaggggtttgaattcagtacttcttatgttatctttttgcaagtcttgattcaatcgtctattcattaatacctttttgtgtttcaggattttatcaaatctgctttccagaacatagtttc

SEQ ID NO: 48748 - DNA, 433 bp, Ricinus communis
  Intron number 1 from transcript 29792.m000616 (locus 29792 .t000024) derived from phytozome v7.0 (chr-ID 29792; pos 1 59412 to 159844 reverse strand)
ctttgacctcccttttctccatctaccatcgattagtaagtctttgatctttatttgaacttacatttctttgttcaaattgattgaaatcgtgttataattatataacaagttgttaaatttacgtacattatatcaaattattttttaaaactttatgcttaccggatggtgttttttgaagttttttgcagatcaatagctttttttaaaattttttgttgttatttgtttttataattatagtaattgtttttggtatttactgctattcttgtgtatgtgctttgcttttttttttttttacctctaccataactcttggttgtaaatttggaaaatttatgctatttgtagtcgaggcttagttgtgctaattatattatgctttttgatgctcatcgttgaagattttacttggaatttttgtaga

SEQ ID NO: 48749 - DNA, 612 bp, Ricinus communis
  Intron number 3 from transcript 29687.m000565 (locus 29687 .t000006) derived from phytozome v7.0 (chr-ID 29687; pos 5 8824 to 59435 reverse strand)
gcttgcttctagatctccatctgttaaagattcaggtatttaaagagataataattatttgaatctgaaaatggtatttctatccattatttgtgaattttgctgtgggtgtaattgggcttattgtccaatcgaaaagtttgcctacttgcagatctgatatattcatactctgtttataaattgatggtacacaatagaatgtccatagtccatattttccatttgaatgagagaacattttaattcagaattttggtttagcagtgaccaattttgctagtaacattcaattatgcttgttgcctattatagttctcacagtaattgatgttttcctttagtataaacactttcactgttatagtggagttccacaggataatggtattgaagtatgttcgtcttgtctctgtataattgttacttaaagtttttatgcaacgcagtgatcctgatgattttctgaacgaaattaaatgctaaatattttgtttatttgctatttatgtgacatctggataagaaataaatttctgtgtgaaatcatgagcgagtattcttgcttatttgcaaggtaatagtgcttcaaacaatcaaaactcatcagtt

SEQ ID NO: 48750 - DNA, 1019 bp, Ricinus communis
  Intron number 3 from transcript 29651.m000283 (locus 29651 .t000003) derived from phytozome v7.0 (chr-ID 29651; pos 3 3482 to 34500)
tttgccccttaacaggcctccaaacagtcttcgtgcgtaatcgttaaattatttccaacttttctcactgtattcttgcatgtttcaaacgggttgagattgttatatcattttaaataatttgcagggcagtttgttgaattaattttgaagaattctgatggctgagagtttgtaagtttagagctcaattcatgccatcaagtggtacaaattgagagtataaaccacaaattgaaaacctgaaatttagtcaatgctattctaataaactgaaaataattcttttgtagttttgtatctgtaagcaagcaattgtaagcggaaatggaaatgtcttactatgggatggtaatgacgtgaacactggtaaggcagccatggtcctagtaggttttgagttacggctgtggacatggtactagtattaattgtaatggaaacaatgatggcagagaaggaagtgaatggtaatggtgtagaagtgatgttatagtcttaaagtttgtattttcatttaatttattcttttaagctggtcaagactattacatttggaaaatgccatttgttgaaaggaagatcaattctttacacatcacttgttattgtaggttcaggcttaggatttgttggagaatttgacaggaggaccatttttagcattaacatataagatttctccattcacgaaattgctgtgtagtaattggtttctccattgtcactgtggcagctgcggatcatttgattcgaatgaaatttggaatgggtacacttgacaaggattgattagaggatgaaaatgctcttttagagcattgtgacttaaaattttacagtgactagtacatttctagttctagtttccaatttttttgtttttattggggtgacaatagataattttgccatgatgttgatcggttccagattaaatacctatttgcagacgcttcttgcatgtaaatttgacaatctttatgtcatgtttaggtgggctcaagggttttgataag

SEQ ID NO: 48751 - DNA, 860 bp, Ricinus communis
  Intron number 1 from transcript 29726.m004001 (locus 29726 .t000113) derived from phytozome v7.0 (chr-ID 29726; pos 6 69528 to 670387 reverse strand)
ttggtagagttagctcaggtaataaagtttgaatttattttggtgaattatatatggagattaactttgttgaattatgagtttttgggtcttcttttgagtgttttgttactgtgtttctgttaaaatttgtttctgctttgatctgtttcatctatgcctggtttgcttaattgcggttcttttagctttagtgctaagacctttgatgaatagggttggttgcttgtggaattccttatcgtttatgctgtttgattcttatggtattggcatggtgcttagtattgttttaaagatctgctcttaagtttcaggacccctgttttggagtcttctataactatattttcttttctatcataattgtcaaagacaaagctggatgttagtatttaaaagattctcactgctcctgcaaatatatgatctattgataggttaggtaaaaaattgtttatctattgtgtttgttcaaagaatgtaaaaacggaaatgttaggcttaagtttacattttgtttatggctacactgtgatagccaattgatttgggaaaagaaaataaaaaagcttcataatactaaccctaatgacaatgagagatcaacaaagtctcaccacttggaagcattctccatggaaagtccatttagtctggattggttaatagtaaatctacctaggagaaacataaagatctctattttgacatattttttggttgtgcatatactagtttagtccttaggctgttcaattatgttttataatcagctgcttatatattcatttacctttccttccatttctattgtttgtctaatgcacctaatcatgcagacaaatcaaaatcacgaa

SEQ ID NO: 48752 - DNA, 608 bp, Ricinus communis
  Intron number 3 from transcript 29729.m002323 (locus 29729 .t000056) derived from phytozome v7.0 (chr-ID 29729; pos 3 20252 to 320859)
ctgactgttttagattagaagcagttagcggagaggtaagcaagaatgaattttcttattctagtgacaatcaaaaacagctatcacatgtgactttttttttcttttaataatttctttcctttcatgcataatccgaatactcttttaacaataattcttggaaaattggaatgatttttattttgaaaaaaaaaaagaagtaaaaggaaaatctctgtgtcttccccatttagctgatttttggtgtgtgaggctcactctatattgttgtcagtaatgtcttgttgctagcttctgtaattatataggtttgcttgcttgtgtattttcaactatggagtggtcatgtactggccttgtaccatgtatggccatcttctgaaagtggggtctttttcttcttttttttcctccttcttctttgtttggaattttcaattatcaaaaaggaataatctgatcattggcagccatccaactatgggtggtggagactctatggattgctcttaccagttatgatgttatatgtcagttaaaaattataactaacataaaaagattgtaatctgtttcgcagaacgaagaagaaggtgaaagcatcg

SEQ ID NO: 48753 - DNA, 496 bp, Ricinus communis
  Intron number 1 from transcript 29736.m002095 (locus 29736 .t000091) derived from phytozome v7.0 (chr-ID 29736; pos 6 51424 to 651919)
gtctcttcacgtggtgaaacgtaagttaattttgtttcttatttttaattttctgtttagtgctttgattatagaagctaattggctttaactcggtctgattgttatttttgttcggggaattggtggtttaagaaatatgaattcgtagttcactgattagtgtatttagtcaaggtttcagaattttgttcttctctttgtttgacggatgaagaaagatcattttttttggctagggttctctttgctaatttctgtttaaaagtctgatgtcgtatatggatgttagatgaccatgaatagcaattattctagcaatgactgttataaacctgcaattagtaacgtctgtataagatttatgtaataaaagtgaacctctagttgaatttaggcaatgatctactgggttgttttctccttgaatcttacagtatttatatttacttattatgtttgaatctttttacaatgaagttcggggcaaccacag

SEQ ID NO: 48754 - DNA, 505 bp, Ricinus communis
  Intron number 2 from transcript 29092.m000449 (locus 29092 .t000008) derived from phytozome v7.0 (chr-ID 29092; pos 6 2722 to 63226 reverse strand)
ccataattggaaacacggaagtgtatacttcagtggttacagggtgttacaaaatgattaatatccttttttggggtttctctcttctgaatattgtggttgcagttttctgctttcatcatcattgcacttgtgttttctttttttgtttttgtttgttttctccttaactgccttttttttttcttgttgttccacctcgagtgatgatgaatcaggttagtcgctgcaacaattgttccccctttatgtaaataatttaaatctgcatttagtttccttaaaaaattttatttttttgttctgtaatttgttggtctgttttgtaccttcagagtctgagcctgaaatcaaagaggatcttccagttgctaccaacaatggtataatattattgtcaaagttttactttttttgttatgtcttttgagggacaatttttgattctttgtttgtaatctttacatcagagaagcctgggtcagagactaagaaaccacagcct

SEQ ID NO: 48755 - DNA, 523 bp, Ricinus communis
  Intron number 2 from transcript 29693.m002028 (locus 29693 .t000066) derived from phytozome v7.0 (chr-ID 29693; pos 5 22233 to 522755)
gataaagacgaacataagcgttttgttaggtatttgattttttattttacattttatacatttatggttgttatatataatgtgtatttctgaatccgggaaatcttttatcccttaaacttgatagtgttttgttgtggattagattttagttgatactatggtaacgctcttaacttaaaatgagaaatgaagtggctctagaagaattgacaataggtttcattttttacacgttaatcaaattataagtgattatgcacagatgcatagggtggtatgagtattacagtaaggatagaaaaatgtctatgtatgatgctttagatgctgaagaacaggataatattgacttttcataaactaagctttaatccttttcctttcattccataatccaattaggttatttttccatgttttggcatttgcagttttatgcttctcttgcctgattcattatctatcatctgtatctggaactgataatcctctatgttggtggttttctttagggaagttc

SEQ ID NO: 48756 - DNA, 879 bp, Ricinus communis
  Intron number 1 from transcript 29804.m001481 (locus 29804 .t000012) derived from phytozome v7.0 (chr-ID 29804; pos 2 35082 to 235960 reverse strand)
gaagggtatgttatgttcttagcatctgtttgcatgtattctgcatcttcaactgcttacctagagatatcaatattttagttcaatatgatgaattatttagtagaagggtttaataataaagttaaaggtaatatgattgatattattctatattacagtttacaaagtactaactaccgtatcattatctttagtatatttttcatctctactttccattttttattttctttttaacttctattaggataattccaactgggttttaaattatgttgacatttgtatatagttgaaataaaaagaaggaaaaacaatatcacagatgataacttgtttgacttctattttgtggcagggatttcttgaatacttttacatatatccatttttttctcatgttgtacattagtattcttttctggggtggaattgctctggtttggctaggacaattaatatcctagctattatttagttaatttttggttgacataaccttaaagattctttactcttaatggtcaataaaatattgaaagatgttttgttatgtttaggatttgaaaattaattcatgtccgaaatccttcacttgaatgacaaattagaccattgaaaaactaagtaaatgcaaattcaatatcatagtgatattattggacttttatatacaaactaaattgttctgtaatatagtatctgagcttcattctatttaatccgtttgagtttccgaatttctagataaattttagcggcttgttttcagtggggaattttggccaatttagtgattactggttattaggtatactgaaaaagataaattgatcctgccatggacagttagaagaagttctgggaaaaggggca

SEQ ID NO: 48757 - DNA, 881 bp, Ricinus communis
  Intron number 1 from transcript 29633.m000918 (locus 29633 .t000037) derived from phytozome v7.0 (chr-ID 29633; pos 2 10395 to 211275 reverse strand)
gggtaatactttaagtgtttttgtttctggtgtttgcaatttcttagcttctgaagtggctttttctttttctgtctcttgttttttttctttttttttctttttcctgtttgatggttttgtaattttgcaatctgggtttttggtatttttaaggtttgtgggttattgttactttttgaattagttttcaagaaactgatggttttagttaatgcttagctgggtttttgctgttggttcttgttgggaatggggcttagcttggacttattgtaattagctgaaattgtttattgggtaagatgttaatacgtagaattagagtttcaactttgaacaatcttgattcatgggaaggtcgtagaaggattgtgtttgttaaaatacattttagcaggatgaagatggttcgagctatattttgtgtatttgagccctagttttatttttttcttggaatatcagcagaactgttgtagctgcgattcaacagttaagttgataatagtgccttcaaatagttatgcttgatgaattgattcctacagcgttatggtcatacagaggttttgaactttatatctggagaagaatgcaaagaacagcctgctactagttgttttcatacacatattcttgggtttgtagattctgctgatatctttagctaatacctctgcttgccccactaatagctggagttaaatggtccatgagtttgaattatttgtctttctacaatctctgggatgtgctatgttatccatgttgttgaagtaaaactccataaacatagtttctgtttattcatctttgtaatcagaaacaatcctcaaaaagtttggagttctaatatgaattttcgaatttttgcaggt

SEQ ID NO: 48758 - DNA, 990 bp, Ricinus communis
  Intron number 1 from transcript 29740.m000474 (locus 29740 .t000006) derived from phytozome v7.0 (chr-ID 29740; pos 4 4380 to 45369)
agaagtgctggttagctactgataaactcctgcaggtacatatgaactatatatactcttttaatcagttgcgtacgccgtcatttgtttatttatcatcacttttcatcttttagtgaagactgaattatatcaacagaaatagaggtcattgttcctttccaggatttatctatcggatttatttaatagaaaaaagccaaaatttaagtggaattgaaatttaatttgcacaaaaaacaaatccgctggtattaaaatccaatcttcatcttttaaacatgactatattttcatattcctaaaatctgacgcgatgtggagacaaagtttggattgctgtcgtcaaaggatttggggttttagtaacatggttttgaggaacaaagctagaactttttttataaatgaatgggtaattaatatatatatttattaattttaaataattaattatgtgtcaattatttaatattaaaatataattttttattaattattatattattaatatatttttattaattttaaataattagttatatatcaattatttaatattaaaatataaaagttttattcattaccacatatgtatctaaaataattattatcctgtatgcatgctacttaagtagcaagttttgcactaagttctgttctaggtgatataatgcaaaatgtttttatcttcaccaagaaaggagaacttagttaggatgtgtttggtttgtcaagtatataatcacatacaaagaaaaatggtcaaatcagaagccaagggtaatttccttttcttttgagttatccttaaaagagaaaaaaaaaaaagtgaataaaaagtttattagtcaaactcaattatagaagccagtcaaacttgagtaagttgtatacattgacgtatgtatccagaaatccttttataattttggatggtgaattctaaatgcagactgggttgctctttgacactactgaaggtgacca

SEQ ID NO: 48759 - DNA, 378 bp, Ricinus communis
  Intron number 3 from transcript 29780.m001399 (locus 29780 .t000085) derived from phytozome v7.0 (chr-ID 29780; pos 6 63867 to 664244 reverse strand)
agttgccttggaaataaggtacatggactataaattttagtttataaaactaataagctaaattgcactcacaaatcacaaccaaaatctttatcatatgtgagtacatgcatgctaacgagatgaatatttacgtaattgaagaaacaaagattaacagttcttctgataaccaccttttcaactttatatctctatacatatgcatttatatatgtactttttatcatttccagtacattagagaaaaaaaagaaagacagcattacttgattaattgtattcgataattaatttattatgtctccatgtctgtaaacgggtaattacaattttgatttaatttgcagggttctgtatcagttagatttcagctgc

SEQ ID NO: 48760 - DNA, 410 bp, Ricinus communis
  Intron number 1 from transcript 29804.m001506 (locus 29804 .t000037) derived from phytozome v7.0 (chr-ID 29804; pos 7 53666 to 754075)
acaattttgctgatattgcacagtatataattgaggtattgtgcacatttacgcattggaaagattaaatcttctttctttttgaatttttgttaaagttgttaaccttttatatatgaaatggttagagtgctaaatatgcaaaaaattaattgaattgagttctatttagtcaattattgtgtttgggaagcacgtagttgctagaattaaattctttcaacttcagaaaagaaaaaggtattctgaaagaaatggatttatgcaaaaaaaatgaggtgattttggaataatttaattcaaaagaagtactgcacatgatttatcccaaacaaggttttggttttttggattttgtattggagttgatcgggactaagtgtccaatgtctgtgttgtggtgttgaagc

SEQ ID NO: 48761 - DNA, 623 bp, Ricinus communis
  Intron number 1 from transcript 29610.m000402 (locus 29610 .t000017) derived from phytozome v7.0 (chr-ID 29610; pos 1 21631 to 122253)
aattgtgagggagagttactggaggttgaatctaggtgtgtatttgtttgaaaaatatgttgaagaggatattattactattattggttttattttattctattaggtgactctatttatttggttgctttatttgtttatttatttatatgactggcaatgtaaaaatcttcatataatttgatatgtgcaaatttgaaagacccaattgtgtgtttgtgtgcaattaacattaggatggtgattaattatagagaaatttatacaagttcattttttggtggttcactacaactggaagaatctattggcaatcaatggtgtatggtattttcctttatgtctagcatcatttgcaactttttcttgtggaattttataagtcacctgcgaatcatttgtagggtatttggtcatttgtgtaatggcagaatcaagtcattagtttaatcctaatgctacatctttatccctttttctttctctttttctagtgtattgagaactaggtccattacttaacgctgagatgctgttatagtggatttcaggccacaaacttttcttcggaatccaacttttagttgaataaagtcttttatgtttcagttcattttcaggtg

SEQ ID NO: 48762 - DNA, 596 bp, Ricinus communis
  Intron number 1 from transcript 29709.m001199 (locus 29709 .t000035) derived from phytozome v7.0 (chr-ID 29709; pos 1 58574 to 159169)
gtggtgcttcttctgcttctcacgctcctatcgtggtaaacattcgctgctccttttgttccttcctctcctttctttttcttgtagttattaatctttgttttgtgtttgattccataatctcagcactctgatcagtagctagttaaattaaaatagaaaggtttatgctaattattgataggattacttgagtcaacctgtctttcttcttcttctttttttctttttttactatgccttgtttggttactgagaaagttctaggaaagtagtaaaaaacttaaggaagcaatagaattaagtggtgagataggctggttatagcatctttcgctttcttagttgctactctaatgactaggataaaataacttcaagtccacttgttattttgacggtttgaattttcttttcctttttgtttttaataaccttaaaagtttcattcaatctcctaaaatctgtgacttatgatgcatacaggtggtccatttttgttcttggttatatcatccacctatcatggaaaacttgattatcatataccaaagtgattctaaattctgaattctcaaaattttttcccttcctag

SEQ ID NO: 48763 - DNA, 542 bp, Ricinus communis
  Intron number 1 from transcript 29701.m000602 (locus 29701 .t000023) derived from phytozome v7.0 (chr-ID 29701; pos 1 85628 to 186169 reverse strand)
gacagaagtagcataaatggctctctatttgttgcgtttcgaaatccattctgacaccaagtgagaatcaatctcaactaacaacttgtcaataccacgtttcttagcaagactcataccctgataaagcccctctagataataattttccttgttcactaataaatcgactaactaaactcatgtttctataatcaattcatggtttgtttattctttatttcaaaaatcctatttcgttcaattggattatccttaactcacttggacattttagcaaacatatatcctacaatcttaaaaacagagtacaccataatcttaaagcaaaacataacaccaccaacacatcctccactgccaccgccacattaaaactcttctttcacaatttcacatcaaaacccataaccatcaaaccaagtacctttgtttcccaaacccaagcaaacaaacaatcaccataaaaataacatgcaatctcacctttataattttacaatgaagacacaaggcaggattgcaagaagcagcgccgcctt

SEQ ID NO: 48764 - DNA, 1045 bp, Ricinus communis
  Intron number 1 from transcript 29740.m000476 (locus 29740 .t000008) derived from phytozome v7.0 (chr-ID 29740; pos 6 2048 to 63092)
aagttaattccaccctccagaccaagttcagccaggttatttccactttctctctctttatcatttgagttgttatttttgtaattttatctgggttttgttttttacaagacaagattgtgtttgtcttttctcttctttttttttcggtctctatgcgtgtgtatgtgatttaggattagggacattggatctgattgattttgtgggggtagttatggaatgtgatttttgttgcttgattagtatttgtttctgggatttgggtttttttttttttcttttccggttgttcttgtaatgattgcatttttgtttgtgttattatgctgcattttgatttggtgaaggtttgtaatttttgttttgtttgatacgagataagggtttaattttatatttgaagttaacttgttgctagttggattgtgaaagactattttgtttctttggtcatgcgaaatgaactaaaaaagaaattgaatttctgtgattggtcttggtctttttttcacttggttgaaagcttaaagagtttggtggattcaattttactcaatttggtggagggtaatggtttgttagattgatgagaaaacgtaaaagtaacttatttggtatgcatagcagaaaaagcaaatagttcaagcaattgattctgcttggaatagctttgaagatctcagtgtaacatctattaaattaacataaaaaaaacatgtaggagtaggactctttctctgcaagtgtttttgcataattggtatgtgaagttattctataagacttcaggcccctgaaagtctttgcacgttatggtaaatgctttctctaatgactgatactatgactaaaatccatgtttagatgatatcatactactattatatgaaaatcataaaggtgaatttgtatcttctgaaaacagctctctgaacgctgcggttgtctatgctagctgtcattgtagtaggtactcttttatggttgttgatcttctctttctgcaggaacctgaacctatagactgggaatattataggaa

SEQ ID NO: 48765 - DNA, 546 bp, Ricinus communis
  Intron number 1 from transcript 29648.m002020 (locus 29648 .t000107) derived from phytozome v7.0 (chr-ID 29648; pos 7 73224 to 773769 reverse strand)
tcataatctccgttcgctttccatctcaggttcaggtagactcttatgactttatcatcatcattcgattttatcgaaattaccccagtgtaattttttttgccttcgtttcttgaatttttgttgttcttattgctgctaaatgtccgtatcacttcttctttttcattttattgtctaggagaaaactcttcgttttctttaattcgtaattgcttgcttgatttcatttcctgaggttgagctaggtttcgacgaactgaagcttcaagaagatttttcttcttctagagaatttgggagtgacctaaatgtgcatgtttacttcccagtagagattctagtatccttcatggtgcatcgctttgttccgtgttgtctcttgcaacttcgtgaaattcattcacaactttcttgtttggaaagtctagaatgcaggaattcaattcaattcaaatattttaattgaattcttttttgtggctattgtaagaacgatgttgttcttattaattttttttttttgcagtataggttggtaataca

SEQ ID NO: 48766 - DNA, 663 bp, Ricinus communis
  Intron number 1 from transcript 29726.m004114 (locus 29726 .t000226) derived from phytozome v7.0 (chr-ID 29726; pos 1 250659 to 1251321 reverse strand)
tgaatacaacgagggagagaaattgttttagattggttagtttgctggatggatgtagaagtatatttccaactatgagttttgttgctactaatgttactagcaactgctatggaagaaaaccccctttcgtagatttctgacttcatcttgacttgcaatttggttgttcgtatcaggctagattctgcttcagttaaaacgtaatcaaattgattataatgcaaaagacctgatcagatgatattccctagaaaccgtgaactatgaaagaatccaataggaactcttgataattaagcatccatttccgaatatgtgatgtgtgatatagtcatgcagccactaacaaaaagaaaattgctgcttaagaaaagaattttcttttcctttcaataaaaaatggtgggatgacacatggataataatctttggtatgtcactcggaatttagaaccaaagtggagaattagcattaagattatggaacagagtacagaatcccctttctttgtcttgttgcccatctgtaagtataaggtccggtagtgagctcgatagaaactgttgtcatatcacaatactgacaatatctccacatatagtctgacctttttctgttctgcagtgtagtggtgaattagcagaacccagatcagaact

SEQ ID NO: 48767 - DNA, 763 bp, Ricinus communis
  Intron number 2 from transcript 27704.m000147 (locus 27704 .t000005) derived from phytozome v7.0 (chr-ID 27704; pos 3 2591 to 33353 reverse strand)
agtctcttcgccattgcaagttcgttctttctctttcctttatatcacctctttttcttgctctgctgcatcaattctcccaggaatttgaattctgatgggattttttggattattggaagactggagaaatgaaaatgcatttgagtatattaaaatattattcttttggaaaatattagagattggaaaactagtgattggaaaattgggtatgatttccacaactaaacagggaaaagcttctctaagaatttcgtttagtcttccattgtttttaccaggatttacacttctttgttttaacggataaatctcgaatattaatagtttagaattgacctgacctataatcccaatcacacagtagtttccagaaacgtacaacattcgatagaatttactagtgctctgaatctataaggtgaatgaatcacaatgtacattttgttctggctgaatcagtcgattcttccattattaagtaaataggacacggcagttttaaaatttaaaattaacgtcaacttcattgagaaaagtgcccctaaatcattccccaagtgattttgaattgaaattaatttattgttgaagaagcaaaagtattttgcatgtagaaggaaaaaagaaacgctttgtagcattggctattggttgattttgatctttttaatattttatataggacctgcatactaattaatcttactctattatgtactagagcataaggcaatgcttgatagtgtgatttttgtag

SEQ ID NO: 48768 - DNA, 741 bp, Ricinus communis
  Intron number 1 from transcript 29577.m000449 (locus 29577 .t000006) derived from phytozome v7.0 (chr-ID 29577; pos 5 9966 to 60706)
gaacttgctcttattgaccccaaacgtgcaaaaaggtatcatgtccttatttatttgcttattgtatagtccatctttaaggtatagtgagattgtatcagacttttagtgccaattttaatagtagcatttttcgttaactagtaaatattatttattatcaatgacatgaaaggatcatgtactctcaggagtggtagggctatcaagtaaaaagtaaaagtctttcttgaaagttaaaatgtttttttcttcaatggaagttaattgttttttaagtttgttcttttcattttattttatttttattgggtctcttccagtatattggtcgtcaaaacaatagtcttctcaggttttgaattgtattgtatttgcttagcacaatgtgttcatcagagaagttaggcgtgactggctcgtgaggtgcccatcttaggacccagaaattggaatggttttgtatgctgtcgattttctgatttttaattaatttcggttttccttttttaatgaataaatccagtttggttctctgttaatgtgtacctattgcattgtccttggccactgtcaaaggattcatctttctcttcaatcccacccttcaattatctatctttcttgcaaatttcaggatttcaaatggctactttttgcatgttttcagaataactgatcatgcgcttttctctacatgtaacaggatctgggcaaataggcaatcagctgcaaggtcaa

SEQ ID NO: 48769 - DNA, 393 bp, Ricinus communis
  Intron number 1 from transcript 29250.m000232 (locus 29250 .t000003) derived from phytozome v7.0 (chr-ID 29250; pos 1 6960 to 17352)
caaaagaccaaggcaaaaataataggtcaggtcaggtcagtaatcttcttcttttcttttttcaattgtttttaatttgctttgttgtttctttaactccgatgatttggtgaattgggcatgttttatttttagctgattttagattttattgatttaaaagagaaagattttgtataattttcttgaattgatatgtcgttttcagtttaatgaatttagggtatttatgatttgattctcgagtttaaacttgaactagtttactttctttgtggagattagaaatttaattagggcatagtagaccagctcgttgtcttcaaggatgttaatgttaggttttgtttgattacaggttgattgggtagcaatttggatattagataagag

SEQ ID NO: 48770 - DNA, 729 bp, Ricinus communis
  Intron number 2 from transcript 29758.m000646 (locus 29758 .t000009) derived from phytozome v7.0 (chr-ID 29758; pos 1 09309 to 110037 reverse strand)
ctaatatctacaaggtttgctttttttttttttctttctttctttctttttctgcccttctggtttcttactatttttaatcactatctatttgctaaatactcgagtattatgattttttgagcaagccgctgattaaattaatctttttatcattgaaaatatgggtcattggaattgaaaaggaaaccctttggcatgtctgatgtgccttggaaatgctacggaatggagatagaaatagttgtctaagtctaagaaatcttattcccttttctttttgagataaccaaatagattttgcagttcgcgaagaacatgaaaatagagatgattttcactataaattcagccattttaaataaaatatactacagaagaaagtatttgaattttttgtgtgtcaaacaaaacttggaatcccattttatgaaatggatttgactcccaatctcgaagcataccaaatgtgaccttggagtactgatatccttagcagcaacaagaattaagaataaattatttttagtagaccattggttgcactaatgtctgttgcgtcataattttagtgaaatgagtattcatgttctaaaagttttctaatttcccacatttgggatcaaatggatatttaagaaaatttatttccaacaaaggtggagaaataatcgtatcccattgttatgtctcctaactttaggaggaagaggaggaaagatcagatag

SEQ ID NO: 48771 - DNA, 971 bp, Ricinus communis
  Intron number 2 from transcript 29637.m000740 (locus 29637 .t000018) derived from phytozome v7.0 (chr-ID 29637; pos 1 40302 to 141272 reverse strand)
gctcaggtgtgtattctgcattatattgtggtttctatgcgatgcaagactttaagacctctgatatagtcataagcagcgtcagtgcttctgacatcaagtttgcaatatgatcatctgtctctaagtggacgcttagctggtttcaacttgttggcaacaatattaaatctttcttgtttattgttttcctatttattcactagttttatccagacaacagaagatttgatgttagcttagcaatgtaaatacaagcttttgcaatatctattcactcctttgttgccctacttctatcattcttcgttcatgaaatatgccttgtatgctatatttcaatggtacaattgtggattaaatctctgtccctctgtgtgtgtgttccatttgaagtgcctataagacattgtaaaaccttttgtggggattcgtctttccatatgaagcaggggagagggtggttgatgaaatgcaatagaacttgttaattcaagtatttgattcctgctcctttatagttcacatggtaccctaattcgtctattaagctagattattgatcaaatttgtggagaagtgcatatatgatataatgtcagccctcattccataaaaaattacaagatccttatttgaagcacttgactccttatttcaatcatgacagacaccataagtcattggtttcattggctctgcaggtcttataatcagggacaaggagtgtaaactctaattctatgtctctataagctacttctagatcctggttaatttcatacagttacagagtttatttctaaacctgttaatggtggcagtccatgtgtaatatttttattaagttgttttgttgtgcttcttgctagcttggatatttttctccagagtttctccaagaaatgttatgttgaccatatcttaggtgttccactcattttattccttctcttgctgtagtgacacca

SEQ ID NO: 48772 - DNA, 914 bp, Ricinus communis
  Intron number 4 from transcript 27687.m000066 (locus 27687 .t000001) derived from phytozome v7.0 (chr-ID 27687; pos 5 177 to 6090 reverse strand)
accgtcagcctccacagcgttttctgaggcgcagggtaattatttgatgcaattaaatttcttttatttctcatagtgtctagaaatgcaaaatttcaatttaattgatgtccctttagtcaaattgtcatatttgaacaacttccaattgttaaattttttctttctattttgaagaaacagaagcattttaaaagaattgacatgccacaaatataacatgattttgcaatgtgatttattccaaataaagcctcttgtgtgactttccttgtatttttatgctttgatgttaattttggtatttcattttatttacttatgctcgtaatgttttctgttgcatctacctaagctcttttaaatcttaaattttacttggttttacctgaaactaaactatattcttttgttgccctgttatttgtcaaaatgtaataataattgcttttacaagctcaatacttgtccctataactgcaaagttgaaaggatatttgttgttgccccttgatttttcgtttcatattagtttttggtgttagctgaatggcatggttgtctactgctagatttgatatttgaaggaaaacgtgatgcattaatataacatggcttgtatatgttcttctaaggtctacttcagtttatttatcttttagttgaagttgagattatattgattaggctaactgttctgttgctgggttttattattcttggagatatttggaatgaatttgaatagttattattcttgttgttgcttgatttgtgaataacatgcatgcctcatattggtttgtgttgtgtgtatatatcattttttttgggaagtatattcattttttctgattaaagacgacaaaagtatattaattggtttttatttatggcttttgttatattttagg

SEQ ID NO: 48773 - DNA, 441 bp, Ricinus communis
  Intron number 3 from transcript 29703.m001470 (locus 29703 .t000006) derived from phytozome v7.0 (chr-ID 29703; pos 2 2984 to 23424 reverse strand)
aaactgatagagctcgcaggtctgcccatcaggaggttagtgatttaacttaatctttatgtcagaacataattgacattcttcgttcatggttcgatattctggtgtcctaggcgtagaggaaccacaccaatccatcccgaacttggtggttaaactctactgcggtgaagatgtctgtttctaggaaccatatgggctcagaataagacattgttagagatggaaagagttgcttaatgaattttaattcctcaccttgttgaattttattatatcaaaatacagattgcttgacagaattagagaaatgatattttgctagacttcttttatttttattattttattttttctctatggtggtctattatttcagtgtgacatttgaagttcccatttcttataatttatgttgctatttggttatttggactgcag

SEQ ID NO: 48774 - DNA, 922 bp, Ricinus communis
  Intron number 1 from transcript 29729.m002313 (locus 29729 .t000046) derived from phytozome v7.0 (chr-ID 29729; pos 2 57302 to 258223 reverse strand)
gtattcctaaagattcccaaaaggtttgatctttttattcatttgtttcatttatgcgtgtttttgttgtttttctgatatgggcttgctttaatttgttggaatttttcttgttgttataatttcatttgaattcaagcttggcctttccaattcaaggattgttaagaatgatagttgggattttggaattacattgttttcgtttccagagaaggaaaaaaatgctcaattttggctaatagatgcttggctgcaattatctcttcatcttttccgttaatagtttgcttgtatttctgtatgtttgttgtctaaattggaaaagggacatttgaatggctgttggcttgtcagtctatactgcatttctccccaaattaaagaagatttaccgctttggtttgttgagtacttgtattgaggatgaggtttctgtttatttttcttgtgcataagagaactagacaaaagaaactttgggttctgtcttagcagccaaatttgaaagtagtaaacttgtaaggtgactggaattctggaggatactaacactttcattgtttcaattggcatttgtcacccaaattttgcttatcccgtaggattattaatccttctgtcctggccttaaggaatttgggtgtggactgtaaaggagtactgctcacttctcaatagctaccttatatcatagttttgacctattcatatctttgataagtctaaaagagggcattagttattatatatgtcatcgtcgtgacaaaattcagcagtatactgttgaatgtgcctcctttcattttcaatgtggaattgatattctcaggtttacttgtcgctagtgttacacttttgtagtcgggttcatgggtggtgaacttgcaattttgtccatttaattgtgtcaggggcgtgc

SEQ ID NO: 48775 - DNA, 864 bp, Ricinus communis
  Intron number 2 from transcript 29661.m000904 (locus 29661 .t000006) derived from phytozome v7.0 (chr-ID 29661; pos 5 7897 to 58760 reverse strand)
ctctgaatttctgcttttggcctggtataacattcatctctcttctctctgtacttatttttcctattatctttgcatatgtttgatttgttgtttacactgcgcatttctttgttgttagtgtttttggtgtcagtttgcgcttctgcttttctttgtttgaaaaggcacttttgcttttctaattcttctttagcggtagcccgaggaatatgaattatttaggagcatatgaaaagaatggataaaagtgttatcgcctagtttattttcaatttctcttgtttgcttgtgtagaaaattaacaatgaaatctagaggggaaagaagttgaataaatttttggttttttaaaatgttgtagctaattccaattttacccaattttttttagtgcaatgtctatttactggtgttcagttaactaactgtacaaatcatattatatttttttctggtctaagaacatactgaaaatggaagaacataacgtgtgtgtctttgcttattaattctcaaagtttagaatgagctttgtgtttttgaggagtaggttttcattttgcttttcttatatgtattcagaacatgttctaagttaataacggtgctgtttagaggtgtaatgtaattgtacttttaaataagcaaagaacagagtgacatgaggcaacagcaaatgcagctttagctttgaatttgattgccacgttcagcttccagttattatttaaacaacttcttaaagcttccctgataagtcaacttatatggatgcattttttactcggctacatggtttactttactatgttttctttttgataatgtcttgcatcttatttacagataaggatctgagct

SEQ ID NO: 48776 - DNA, 854 bp, Ricinus communis
  Intron number 1 from transcript 27798.m000592 (locus 27798 .t000013) derived from phytozome v7.0 (chr-ID 27798; pos 1 01285 to 102138 reverse strand)
tcgctagtagcgctttcgctgcttgtttcgctgaggtattaattaaaaattcaatagcaccgtttacttcgattctcatcatcgcctttgttttttaattagtcagttaagacggattgagctataatttatgatattagatctaccatctaatgtggtttcatgttaatgttataatcattctttctcagttcctggtgtctgagaattttattttattttattgttctttttagtgattgataaatggcgacgagtttagtgatagctatagctttgtccttttatcagcatctgtcgttttgtttgtttgtttgtttgtttcaatttgttgtagaatgggatctacttctttatcaatctcctttgcttgtgttttcgcattaggacttctgttactgattgtccattaatttgctctatctctactttatgttaaacacttaggctcctttctttagcttgttttcttgctcactagaaaataatttctgcaattttcttttctcgaaagcaaaagcaattatcagaaaatctacttggtaaagaaaaaaaagtttgacttcacatgtatacatatttaaaaaaaaaattgtgtttttggatgttgcttttgccaaatttgcttttctattttgcaatgctaattacaagaatgttttcagtgtgtataggcttacatgctgattataaaaatctaatttgaatcttatatgacagtgcccttatccacttacattatgcattaacaaaattaaactatttttatactcatggagtaaaaggcttctatattactgtatttggaagcgttttttggttcatcagatgtgagcattaaatctactgcagat

SEQ ID NO: 48777 - DNA, 729 bp, Ricinus communis
  Intron number 1 from transcript 29607.m000240 (locus 29607 .t000009) derived from phytozome v7.0 (chr-ID 29607; pos 1 38889 to 139617)
aagagattttctccggttttgtgcttcaatactcggtttgttctattttcttgaatgaatacttactgcagtaccatttgagtttaactgctttgatatctcgttttattgacttacctgattttgtatgttttgcatttattgggagtgctaagtagatattctcaaacgaagaatatctttacacaatgtttggttgaaatccataaaatttatggaattcatttgcgaatctaaaatttatatgctttaaatggatgaacttatttgtgtagaattgattatagttaaactaaattttaacaaaataggtagaatttccaaatgaatttcacgtaagtaagttaatacattttataccatcaaaatatctctttcaactttatcatttccattttctttttcatgtctttttctcaaatgaaatgaatttttttatagatttcaaccaaacatagcattagtgaaacttgaaaacttcttttggtagattgaaagtctgatttggtttcgagaagttgctatacagtttcagacttggagttttatggcacttgtgtatttaactaaggaacattatcaaaatttgttgaatcatgatacttatattgtgttgatttttaattgaagtaaaagcagaaacttatggaaaacagcagttatggaatatatgttcagttcagcttctagttaaatagtagcaacttaatcggtttgtggttgtaggtg

SEQ ID NO: 48778 - DNA, 376 bp, Ricinus communis
  Intron number 1 from transcript 29711.m000319 (locus 29711 .t000001) derived from phytozome v7.0 (chr-ID 29711; pos 6 2897 to 63272 reverse strand)
acttttaataactgcactgtttgatcctgtggtgggttcgcttttctttccacggttctttggtccatgcattttttatttgtttttcttttcatcatggaagggaaatccgcccgagctccataaagctctaccactagacgcgcaatgtatatttgattaactagttatctagcttttgcatttctttattacatataaaaatgtcaaatgctagctagagaaagatcaatctaataattatagaatactttagttttcagtctttcccaaattgattgaggtaatcatttggaacgtatgtccctatcttttaacatggatttgcactatccgttcagggcttcgcataacaattgattgcaagccagaaaat

SEQ ID NO: 48779 - DNA, 595 bp, Ricinus communis
  Intron number 2 from transcript 29814.m000752 (locus 29814 .t000039) derived from phytozome v7.0 (chr-ID 29814; pos 2 62603 to 263197 reverse strand)
gaaaagttgtaattttgtatgtctctctctctctctctctctctctctctctctctctctcttttggtatatttagctttaactcaaaagtattgacttttattttattttattttctgtttggttgctgagaaaatgaagggaaagtacagaagtgagaaattttgacacttgagaagctttttttatacttcagtttgcataagctttcatttttcttgtttgtcaaatttgtaattcttgaagctaatcaagtcaaccatgaaaaatttataaacagaaattttgaatgtgttttagttgttcattttattaatttgcagtctgtttagttatttattgctagctaggaattagaatcattgaactttctttctttagctgtgtatctgatctctcttgttttaatggtatttcaaaaggattttcttttagttgttacacttgatatattaattttagaaatagagaatttacagtttaaaaatttgagtttagcacataatattactatctgagatgtcctccggttgatttttaaagaagaacgtaatgtgcaggaacttgaaagatctttgtctcagaggaacattat

SEQ ID NO: 48780 - DNA, 670 bp, Ricinus communis
  Intron number 1 from transcript 28320.m001106 (locus 28320 .t000033) derived from phytozome v7.0 (chr-ID 28320; pos 1 83969 to 184638)
gcgtcgaacgattcccgacgtacgtttctctcttttattttattatgagtctattaagcaaatttaggtataaagctttaaccctaactgaacgtaatttaactaatgtattgctagatagtgaagtaggctcacttgatattatggagatttatttgaagctgaataagaaatagtggttaacctataacattccccatttttatttttattttgaacttttcattatttttcctttggtttccaagctgccgaacagaaaattttatgtcaattttgaatttcctgtattactcaacttataattatgcatctataaaatcagattttgggtctaagttgaaaacctgtgttatgactcaagttcatggatcataactaatgtttggataatgagaaaatagaagagaaagggagagcaaaaagaggaaagggaggctgagagaagagttgagataagaagaaaaagaagagagataaagagatatcaatggtaattgttattcatttcatatcttttcaactcccaggtatatttatacacaattagttacaataattactttattgtgtcatgaagatctgataaatagaagtctttattaatttattatatagtgaagtaagtttatttcaattagcgtttgtttgttgtttttggggaacagtg

SEQ ID NO: 48781 - DNA, 805 bp, Ricinus communis
  Intron number 1 from transcript 29792.m000611 (locus 29792 .t000019) derived from phytozome v7.0 (chr-ID 29792; pos 1 28306 to 129110 reverse strand)
gccgccttattattgacttcattggtacatatacttgtatattctgtgcttttgttatttcttagtataaaaatcaaatgaaattacactcgtatgaatttgctatcaactttagtgagaactttgttaagtcttttcttttgtttctttttctcgggaaagttttgatttcataatcctagtaaaattgatagtatatttattagtttcattataattttcaaagacattaataaaatgattaatccttgataagcaaaatatgaaatgcttggaatacatataattaatctttctgaaaacacatatgcctgtccaaaaagatgctgaaatgaaatgacatgtcccatgctataagaatttatgcagagtacagtggccctgatcactgaacctaacgttcataaaatcatgtgaacttaaagcttagttagcatcattgtctttttgcttaggttcggtgctggtttccatctttaaagaaaacataaatccaccgacactttttaaaaaataaacaggaattcttttatataaaaagaaaattacagatcatgaatatccctagccaatttgcaacttgggtccactgcgcatgctttacatatttgatttcttgaccttatgtgcattataggacactggagatgtggccctggaaatattcctgttcccttcttttatatgtataatttttttggaaagaaaagaaaagaggattaagatttgattgcttgataataagtttgtttttgttttccaaatcacagctgagagccttagattgccttatctaagtgcatac

SEQ ID NO: 48782 - DNA, 501 bp, Ricinus communis
  Intron number 1 from transcript 29804.m001504 (locus 29804 .t000035) derived from phytozome v7.0 (chr-ID 29804; pos 7 44948 to 745448 reverse strand)
tcatagctaattttatcaaacttcacaatcgccaggtacccgcttaattttttttgttaacctttttttttcttttctcatcagtaattctaattaatcatgccagtgatatagttgtaatgatgaggttgttagttagcttagttaatgtcttccaaatgtttgatcaatgaactcaaagaagtcgtgtgatcatgctaataatatattcgtgatgactagtttttttagttatttaattaagttaatctcttctaagtgtttgattaatgaactaagagaaattgtggaattcattttttggtgaaacttttgtgaataattatcaaggcactaactttctagttattttcaataggtaatggtaatggatgtgaaagaattgtgtttcctttttttttttttttttgaattcttgatgcaaactctcttttcctttttggttgccttctattatgtcttgcagaaccctgcgaagaggaaagaccgttattttctgga

SEQ ID NO: 48783 - DNA, 993 bp, Ricinus communis
  Intron number 2 from transcript 29726.m004024 (locus 29726 .t000136) derived from phytozome v7.0 (chr-ID 29726; pos 8 07038 to 808030)
ccaaaatactttgacagaggtatttatagagtatttctgcatgctctgtaatttctgaagctatgatcttcaaatgcggatgcaatggttaaatatactactcatgtatagaaacacatagaagcacatatgcataaagcaatcggtttagacagtatactgaccacttcttttcaagttttatgttagagatttattataattctgtctattggcttcttctagccttaccagttgcaaagcagtcatctataattattctcataatgtgtgttatttgcatacagtcgtacatttatctaacagattcagtggaaaaaactgaatggtgtctttcaacttttatgccttggttttatgtatagactggtctcgcttgatgaaatccttgattttgttggatctgaagactcaagagtgtgcctatctagttaaagaaaatgacctttttcttttcctcgaggatattctttgatacaaagtggatcttggaatgataaaatggaaatggaatttctgttttgaatttagaataaaaagttcttaactaaaaatgaggatatctctcctttaagataaaattgcttgtattaattttaaccattttcttttctttggtgattacttgtttgaaaaatcatatggggtggttttatgttggtcttttcttcatggttgctttgatgaaccaccgacaatttcatttagctgttgacatgaagctttttgaattctctttgttgaaatttctcccagaatggtcatttttggcataaaaccaaggatatttagttgtagtagagagtgtgtctgccatttttgttttggacacgattatccctgcgcaaaaattgctatacttattattgtgcctgtcatcagtgcagcagaaactgttatttttattagttcatgatcaagtcattatatctttccatttcactgtttaatctgatctgttggtaggttgctaagaaatttggagagggaaat

SEQ ID NO: 48784 - DNA, 147 bp, Ricinus communis
  Intron number 2 from transcript 27436.m000291 (locus 27436 .t000016) derived from phytozome v7.0 (chr-ID 27436; pos 1 60977 to 161123)
gatataaccttcaaggcactcaaggtgaatttaagacctcattcttcatgaatttctgtttgttgattattatagtttttcttttccaggtttatttgtaatcaaattttgaattttgcctttcgtaggagactgatataggaagac

SEQ ID NO: 48785 - DNA, 571 bp, Ricinus communis
  Intron number 1 from transcript 29673.m000942 (locus 29673 .t000043) derived from phytozome v7.0 (chr-ID 29673; pos 3 14224 to 314794)
ttgctgctaagaagggccatttgggtatgattctgattctggtggcttcttgtaggcatcagcttttgttctaattttacttatcctattggaatgcttttgacgctttttttctttttttggtgtgatttatgagctctaaagttgcactagctatggtaattggtttagttctatgttggcaattctttctttctgtcatgatttatttatctagttttaatatgcacatggaagggctagacaatagagaatagaaactcaaatgcttggtaagctcgagtatcttagactggaaattgaacaaaatatgcttattagaagttaaagatcaagcttgtatacgttgaaatttttcaagatttagagctgtcaatagaaagtccactctcttggtaggaacggaattgcattttcttgctttgcaaacattgaattatgtgaattcatttgagtttcatttgcgcctattaatattctttgccacaggtattgacaggctatttaattctttatattatttgctgttggtttaggtattgtaaaggaacttttgagcatttggcctgag

SEQ ID NO: 48786 - DNA, 608 bp, Ricinus communis
  Intron number 1 from transcript 29805.m001481 (locus 29805 .t000012) derived from phytozome v7.0 (chr-ID 29805; pos 5 5215 to 55822)
gtgagtgctgatcttgctttctttatatttctttgttgcccagttattttctcaaccaaacattttgaacagttgattttttttagtaaaatttgtttcgtttagggttttgggttctattgttcagattgtgattatggacctttttaggatgatttgcgggtaatctcagctgggacatgagattatttgattttggattgcgcagaagacaggaagaattgagttttatgttatgcttcttaatgaattcacctattgtttgcttttcaattagttccttcagtttccttatacaacttctgtcgcagagtttgctagacgagattttgtttactcgttggaacaaagaatttcttgttgttcaatagtgatgctgattacttctttttcctctgaatgatgatctttttgttgttctgttaaaattacgtgccgccatactgagtgttaatgatatatataggggttgcgcctcgctttcgtgatctctattatgatattactctatggtgttgaatgggagaaaaacaaagatcgtctcattaataccttgagtaaaatttgtatcaggttgcaccaattatagcaggcgctgctgtagctgc

SEQ ID NO: 48787 - DNA, 636 bp, Ricinus communis
  Intron number 1 from transcript 29806.m000967 (locus 29806 .t000038) derived from phytozome v7.0 (chr-ID 29806; pos 2 80247 to 280882)
catacgggaacttacaggtatgcatctttcttgccctttaattttatttatttattatttatagacaacaagaactactaaagatgggttatattcaattactaaatgaatcgtatatattataagtatttgcatttagaagatttgccactatttaaaacttgatagctaatatttatgtctcatttgtacaatagataaataatttggaataagtaagaatttttctttttaaactactgatggtgtacttgctataacattgtaacttttaaaggggaaaaaaacaaaacaaatcatccctaatgttttaaggaacgactacagtggtccagcacatgtaagcaaaagaaaataatacttgtcctaaatgatatcgagtaggaaaaaagaggatggggttcttgttgacaaatggtaacaacccaattggtaatgaagaaaatgatattattttctatttttctttttataatcaaaatataaggaagtaatatatgtattgttatattgctattattattaattgagcaaaatcctgattagcatagctgaaccattttggttctttgtgttttgcaacttagaggaaccaaaagaaaatcaatacttttttatatataacatatgttgcag

SEQ ID NO: 48788 - DNA, 711 bp, Ricinus communis
  Intron number 1 from transcript 29629.m001435 (locus 29629 .t000086) derived from phytozome v7.0 (chr-ID 29629; pos 5 30139 to 530849)
atttttctagctttattagacagcttaacacctatgtaagtttctatctttgtctttaattatgtatataattgtatcttcttctgctgtttctagatatatggtgaattaggagtaaatagaaaaatttagctctgtattggatgaatattttattattttatgtttggatcaactcaaatcgtttgtgaattcttttttttcttttttttgagatatgtttgcagtttttgcttgtcagaatgatgcaagagccttttatattgacagagattgttgaggttccaattaagttttgacccttttagcttggatttttatggttcttgtggctaaattacttcgtgcaacaattcttttactgttttttccgtgtcaacggaccacatcttgttcgtttttggtaattcaacctgcattcttcgcttgtggaaagaaaaattcccatttggtgctattctgataattggatttctttctttgatgtcttggctcttgctatcattcctttcctttctttttttatttttttattttttgacttttcctcacttatagtggtggtggaatttgtcttatcattttgctcttccctctccatttagtagcccatggatattgctctttcgctttgcaatttgctttatgcttataatatgctcagtactgtgtaatttgatgacagggattcagaaagattgatcctgagaa

SEQ ID NO: 48789 - DNA, 519 bp, Ricinus communis
  Intron number 1 from transcript 29794.m003380 (locus 29794 .t000079) derived from phytozome v7.0 (chr-ID 29794; pos 4 53611 to 454129)
agcctaaatctgcatcaactgttactaaaactgaggtgcttctcctgaaagcttgtttcttatctctcagatttgtttgtttattgttctattttgatcaaggcttcttctttgtgtttgatttgttcgtttgtcatttgggcttctgagtatctgaatttctgatctttttttctttttaatttcattcttggaattttgttatctactttaaaatgagtcattcgctgattgtgatgcgggcaaactataatttacaatctgtgattaatttgtgatgcagggcaaactataatttacaatctgtgattaatttgttcactgggatatgacagcttttgcgtcgaatttattgatttgatataatactatctttactgtgtcatttataattggttcttggcatctaatattttccatgttcggtctaatgaattttattgggtatctttttttattagttattattttcttggatttgaaggtgaaatcaaaaacaacaaccagttcatcaaagac

SEQ ID NO: 48790 - DNA, 682 bp, Ricinus communis
  Intron number 1 from transcript 29623.m000326 (locus 29623 .t000007) derived from phytozome v7.0 (chr-ID 29623; pos 3 06563 to 307244 reverse strand)
tcctacagctaataccactggtcaagtcagttcaggtaattaaccctttttaacatagcatacgtatagtaaccaaaatttcatcagttttctcaaaattcttctctgggtttgttttattggtttctgatcattaatggatgtatttgatactttagaacttgtaagtcaattgatataattcagatactactctgtgtgttttgttttttgggtcattgttctgttttattttatggaagatttcttgtatgcatattttgtgtaattgataaggaatttttttctttttgttatatgatgtgttcttcacaacctaagtaagttgttaaatttgtaatatattgagtttcttacaattctctgcaactactgttgtattctagttataaatgttcaaatttattggattttggatagcttttgcttctggactctgtttattgttcaatgcgataggaacaaagttatggtctttaatttcttgtttgaatttagttaaattctttgttcattcttttgttttactcaatctaaatgacaagatgaacttcctttgcttatcccttatatcattctcaaaatttccctattttgactgcaatagtgtatcatctcatctcaattttataattctataattacagccggattgtctcaaacaactagcaacacaacttct

SEQ ID NO: 48791 - DNA, 650 bp, Ricinus communis
  Intron number 1 from transcript 29703.m001531 (locus 29703 .t000067) derived from phytozome v7.0 (chr-ID 29703; pos 3 38223 to 338872 reverse strand)
attttgttgtaagcgccagcatcacaattggaacttttcttctttttttttttttttttttttttttttgtgtttttctttttcttgatttatagaaatagtgaaaaaaactattataatatgttagattgcatcaaaaattctaaaatggtttatgtttttgtgtcggatacattttggacaccaaaattattaactaaataagtttgaaaattttaaaaaaaatgtatcatattattttttatattatttatttactttttaaaattttgatttttttttttaaatatttccatttagttagaattcttactttaatttttttatatttattttactttctatttataaataatttttttattatattaatattcttaattcttaattgttttacatttaaaagtctatatatttatgcatatctttttcatacattatctttctctaagtctattgtaataatataattgtcatcgtgaccaattatattaattgtatctttgatattaacaaagagcaataatgcagctggaaaggtgaggaaatttttattcattactggttaagatatctttttctttctttcttcttctcgtctattatattttgcagctggaagataagaattttacaaggttgtgcagcac

SEQ ID NO: 48792 - DNA, 905 bp, Ricinus communis
  Intron number 1 from transcript 28779.m000140 (locus 28779 .t000004) derived from phytozome v7.0 (chr-ID 28779; pos 3 9329 to 40233 reverse strand)
ttgactcgctcactaactgcctggatcctgccccggttagtcttttaaattctttaacttttgtttttctttttaagttatttaaaaaaaaaaacattttatgtacggagggctaaggtttcaagaaatagtgagttacatattagttaaattagtatgattattttgtgggaattataataaaataatagaatttgttacaattatgataatatagtgtcgaatttgttgtattagataattaatctattagtgttgcagaatattcaacgagtgaccttttaaatgggattagtggccaaggcataaagtgcatttgcctatctagcttgtatgttagaacatggaaaactgcagcattgcttaaaagcttagcaataaaatttttaaaattcaatctttgtaaaattagtgaacactcaaactcaattgtagttttttcttgtggtaaaatcagactttgctaaagatatttggacttagttgttgaatcttgaattaatcttattctgcggatcctatgcatgaagatggcacccaaagtatagagtccattgattttagcctatgttctcttggcagaacttatttcttggaatttgacttctattaatatcacataatttattggatttctgccttctttttttttttttttttccctttgattttgcttttagcattatacttctgaaaaggaaaaagataatagaagagaaatctgaaggttttgctgtttatatctgagcattgcttattgtaatgagccacttgatgtctaatatgttctgcgaaactagtttcttatcattcataatgatctgtcaccaaaaatcaatattttctgcaggacttgagaaatatttttgtgtattagcaggatccagcacctgtggatcagcaac

SEQ ID NO: 48793 - DNA, 668 bp, Ricinus communis
  Intron number 1 from transcript 29751.m001804 (locus 29751 .t000019) derived from phytozome v7.0 (chr-ID 29751; pos 1 01838 to 102505 reverse strand)
tagtgcattcgctgcttgttttgccgaggtatcctatcaagctcctttttctttttatcacgatttttatattcgagtttaaagtctctcagagcttaattatggtttttattcaaatctttaaagaattaataacatgggatgattttagtttttgtgtgtaatagtatctttgatggtttataagagtctgctacagttgacattggagattccagtgaaatgcttaacccgtcacttttttcaaagcttatttgctgctatatccaaattgattgtcatcaatgtaagaagaagtttatgtcaaatgcgcataattcaattttacatttaggttaattgaaaggtaatttgggtcagaattggaggcatagtacatagcagctcttaatttgacttgtttaagctttaattaacttgttaatgtggttttgggatttatgaaggtgcatcgcatcctgagttattagattaaccacttttacagtttgttcaagctcataactgctagaatttattatattacacaccatgtggtttactattattaaacttttatatctttttcaaccttaatgttctaaaaaacaagagtcctacatttatttatcattatgctcctgggtttaacagttctgcaccattcctttggacactgccaaagttag

SEQ ID NO: 48794 - DNA, 832 bp, Ricinus communis
  Intron number 1 from transcript 29660.m000781 (locus 29660 .t000034) derived from phytozome v7.0 (chr-ID 29660; pos 2 50378 to 251209)
ctttcttatgtgagtctctatttgatcaataagcactttctcttttatgggtatctgaatgttgagagattacggatgtttattgtatatatgaattgactactacttgatacattggactaggtagaagttaatgtttggcattctaaagatttctattccagttttaatatctctctttgtgtatgtcttcacggggatatgccctcttcacaaattccccatcgttccttcctagttggtattttttaattgggatttttctttgtacttttccccttgttcctgatttctgtttagttttgggccttgtggagcagctctattcttaatctcatatgatggaaccattccaggtctgaaacatataagataatgggctttctgcttcttaatcagtattaaaaaatgatatagcagaaaacagcctatatgctatcatatgaatcttgtaactcatattgtaattttgtcctcttctcatttttaaacatcatctgatcacaaatgatattgctgacgccatttaattttggatttaggctaatcaaattcagttagttgagttgtatgtgatcacaaaagtccaatatgtgcctctattaacattccaattttgaatcctgaactccacatattattattgctgccaaagaaaaccttgcttttatatgatatttcaactctgttgtttaagatacatgaagtatgagaaaaactgagtctcttgatacagtgctgcagtcgtttgaatgttaaatttgtttactaaatttggttgtatattgtgcattcagttgggcaagtggagcccttgatcctgaaagctgtg

SEQ ID NO: 48795 - DNA, 493 bp, Ricinus communis
  Intron number 1 from transcript 29222.m000409 (locus 29222 .t000017) derived from phytozome v7.0 (chr-ID 29222; pos 2 07521 to 208013 reverse strand)
ttcaacaggtgattcttcaatctcaagtcttttatctttcaaatgggttttcgtggattttttttttattgcagttcttactgttttctttttttagtgattcaatatagtttctattgaatttagtttcaaacgaataattgcaagattgtttggagttaaaggtgatgggttttgtttgttgaagtaaattctgttcagttctttacatcttctagcttgaaatttgttttcttttagctggaaaaatgaagtgagaagtgagatggagaaaaattattagattgtttgcagttgtagaatttgcagatttttaaggatgcccagtttaaaatttatctaatttaaatgttaattgggccattttttgagggaataaaacgttgatatgtttctgattctgggatttcttttctttcttcttcttgtttgctgatcttggaatttatgaccctttaactgagagactgatttatttgcaactgaagcctgg

SEQ ID NO: 48796 - DNA, 1032 bp, Ricinus communis
  Intron number 5 from transcript 28492.m000487 (locus 28492 .t000025) derived from phytozome v7.0 (chr-ID 28492; pos 1 82933 to 183964)
tcaagttggaagctagcatcgaccatcaagagcttgtaagtgttatcaataccaaatctgcctgtgctgttaatctactgttagctttacttcttcgtgtaaccattaatcaactgttttatttactttttgattcttatttttcataaggggtgaaagctctcatgtgtaatctaaggtcataaaatatagtccttaatgttaatggcagccttggtgcttaatgctgcagttgtttgccgcctttatttctgctcatgttttttatttttttgcttacgtttttataggtttttttatattgcttttagatcttccgtatatgtacatcttccgtatatgtacactacatgactatttgcagtgcatgaagtacttgttttatccagttctttataattacaagtagcaactgaattagaaaactcaaagggagactgctcatgttacatgggatgaatacgactgttgaccaaagggaaaacaaaagattaaaaattagaatgaacagaaaaaataaaatatagacataaagaatgtgatttgaaagacctaaagttcttcacaaagaatcaaattgaacaaaaccataatgagcaaacatatttagattgtgtaagctatgcaattgcatgttttgaattttagttagaaaataataaacctggtaattagtaaacacaagtcagttgaacccattttaacttaagaaggtcattattctgaatatatccaccatagacatttatagaaacactatagagcattgtttatgacatcatgtggttttgtgtgtgttaacaaactcaaaccatctggatccagtttattttaataaggccctaacatccaactatcttccagatctatattatagataatttaaccaataccttctgcttatcatatgtggtgtatggatcttcacaagtcacaacttccctcaccttggaaggagcacttactttgattccaacttcatcaccctttattgcagtgctcactcttatctcttggtggaaaggtgaagga

SEQ ID NO: 48797 - DNA, 964 bp, Ricinus communis
  Intron number 2 from transcript 28180.m000394 (locus 28180 .t000019) derived from phytozome v7.0 (chr-ID 28180; pos 1 12082 to 113045 reverse strand)
ctttagtgcacaagaaacaaaaattcaacttttctgtaagtacccgttaacttgtttaatcttgatggctgtgggataatggatagtttagaaagaacataagataaaaaaaaaagggttatatttgtaattactgatgcttttagcatttgagaatggatcaatgttggattagcaatacgttctatgaaaaaattcattacgaggtgattaaggatattctaaagtgatgttgccttgacataaggttttctgtatagattaataagcagccatgtgaacaagatttggattttttttttttctttctttttggtttgttgcgcttaatctacactgattacgttgttgggctagtgtcaaactcatcctagactttgtatctcctgtcctttagccttcttacaagctcactatgttcttgtccgtgggatatgagctatcaaaactacactcaactgcaaaaggatgtaaccttcgcatcaatctgatgaattctctggcctctgtttcaatcgcatcaatctgatgaattctctggcctctgtttcaatgtatctgaaatcatgtttatggtatataaccatagcaatgtgtgtctgattgatgtgaaatagctaggatttgatgttaagtgtttgaaagaagaatcaaatttaaatatcaatctgactttgagaattgttatacatacaactttggtgtcttgttttttatagaccaacgtgtattttgctgaatttataccttttctagctttctctggacttctttgatgtaatataatcttagttggtttcttattactagttccttagcatatgctactccataacatctgtaagagtaagaagaaaataaattgcagaccatgtcaaagacaatgcttgaggtttacatacttggactcattgttttataattggcaggaacagttcaactgtctaataagaagaaatccaag

SEQ ID NO: 48798 - DNA, 705 bp, Ricinus communis
  Intron number 1 from transcript 29428.m000323 (locus 29428 .t000007) derived from phytozome v7.0 (chr-ID 29428; pos 7 3700 to 74404 reverse strand)
ctaattctgctgaatctgtttctcatcgattttgggtatttttacacaattctttcttgctctcttttgctttaatttattattgtcttttactagttttgtttttatgcaagcttttagttgatgggttcgttgctcttcattttagctacatttgatttttcattcttataattctctctttattcattaagccatgtttgctataaaacataaatgcaagaactttaatggaattagattctatttagtcaattctcatgtttgaaaaggttacagctgctagaactcaattctttcaacttaagaaaaaaaaagtcatttggaaagaaataaaatcgtaccttatttctcaacttaaagaaaaaactagtccttttaatcatttctttcaaaatgcctttacttttttttctagaatttaaaataattgagttctagctgctataaccctttcaaacagggaattgagtaaattcaattcaattcaattgcaattcttgcacttttagactttccaaaaaaactgtagaacttctattttctttaatatatcgaactaaaacagaattttaatttatccttacgagtattgtctttttcttttaaaaaaattgtaaaagcaatggtttattgtgagagttattcgtttattactgcgacaaactatcatgtgataccgtgtcttcaatgtgttacaggtga

SEQ ID NO: 48799 - DNA, 722 bp, Ricinus communis
  Intron number 2 from transcript 28962.m000460 (locus 28962 .t000029) derived from phytozome v7.0 (chr-ID 28962; pos 1 57470 to 158191 reverse strand)
ttttgatttcttacaccagcaacaccttccctacggtaatactttctttctttcttttgttttttgaaaaaaaagaaaagattattgtacggagattatggcagttactgattcattctgcatttttggtgatttcaattgcgtaatttgattgctatacttggaaatgtttatggaatattgttccttttctttttattttaatgcttttcttaaaaagcccagtttatttattgatcgaaattttgatttttttgtttttggtaatatgaaatgggctgatttgtaaagcattgttcttttgtttgctatgggattggattttaggaacgtcacattttgttatctgtttttggtaattaatgtaaaagaagcattagctgaaatgaattaaatactttcaactggaaatgagtcattccttctttttcacatccatcgttttctttggcttagttgaagaatcatgaggtgtttttatttagacaagtgtagctatgaacaattaatttcattccttttctgttttacaatccttatttcgaatttcactctccttccagtttcccttgactgtttcaatgccaacactatcttttgtgatccggttccattaatattattttgataaatttcttaaatgtctttttaatttggtgttttgaaacatcataccatttccttaattctttttgcaatttttctgtgtggaaaacaggatt

SEQ ID NO: 48800 - DNA, 329 bp, Ricinus communis
  Intron number 1 from transcript 29675.m000393 (locus 29675 .t000006) derived from phytozome v7.0 (chr-ID 29675; pos 7 6256 to 76584)
aagaagtaccaattgcaggtatctcttactgatatttttttctacttcattttgttactattgtcaatgttaaactgagtgaggaatgttaaatggttgatcttatatgagaatgttggtggagaagatactgtggataatgattttaatggtcctataggtattgcatcaccctttaaaggactatcttcaattatacccagttcacaagtttgttttgggttctttatactatgctgataatagctatgtacgttgctataatactatgtataatcaacttggatgagatgtatgtttgactagtttttcttatgcttttaaaacag

SEQ ID NO: 48801 - DNA, 957 bp, Ricinus communis
  Intron number 1 from transcript 29683.m000476 (locus 29683 .t000014) derived from phytozome v7.0 (chr-ID 29683; pos 1 56121 to 157077 reverse strand)
agcatcctgagaggaggcttaaggcatcttttaaggtgagtgtggctgtctctttgttatttaattttacgtggagttttagtcctttcccttacatatgagatacagtagatagaaaccagtagccgagttagtgcctgcattgcattagtggaaacctggggatcagtcctgatggctgtttaaagatttgggatgtatccaaaaagaattgagttaaggaagtttaaaacatggtaggatgtgaagtcatctgatcagattattttgtttaaagtttaaagatttgtcccttttagttgaagatgcagtaaaatgtggatggttgagaaagagataattgacaggatcagatggttaatacatcacttgcacgtttcaattgctcaatgaaactagtgatataatgtttattgggattttgtagtgcaattcagcttgcttctggaagtcatgtgctggctacttcgaagagttggagccttaaatttatgtgagaaaagctctcataaattttagtgctccagtttccccagaaaattttggtttatttttggtaataaaatgagaatggagaaggaagtcacttggaaccccttccacttttcagaggccaattgaaccttatttagttcttaatactttttaaaaattggataaagcaaaaattattattgaaataaaatcgaacttcattttaaatataaaactagagtagagattctaattcagttctattttcaagataaactaaatgggttctttatggttttagagtcatatatcagcagtacaatactttgtcctatgaatgctccatcaagaatgaaagattatataggaggagaaattaaactatttggtgtccaaataattttcagaaatgtaatttacttgtattcttcatctgttatggctgtaggcttttgaagaagctgagcttcctaaactcaaggc

SEQ ID NO: 48802 - DNA, 722 bp, Ricinus communis
  Intron number 1 from transcript 29736.m002044 (locus 29736 .t000040) derived from phytozome v7.0 (chr-ID 29736; pos 3 10504 to 311225 reverse strand)
caaagctcagtcatcgtcacgctacaagctccgaggttagctgtaaaaccaccattccagctaccactcgaatcacgaatgagccaacccgcactcgccctaccctacgtcacacgcgtaccgcagcatctgtattaactttgtgccatatccttcattaggcttgcatcactggatcaacctctccaccccagccgcaggccccacattcctctcaaacatatcacgaccagcttcagcaaaggattttgctctagccaccatcatatgaatcgggtttgattaattgaatcatcttgcatgagaattcatgttgagctaacagtccaaagcatgcttatttaaataaaatacaataaattattcaaaactaacaggaattttgtttcacatttaattaacagtcgagcaacaaaaacataaagaaaaaaaaaagcgcaggaaagacgttcaatacatagtcgtatttgaaaacaaaaaagaaataaaaattcaaaactataagacatgttctgaacttccctgcccgtattatgactggtaaatgaccaacttaacattaagatcagtttcaaagcaatcaattatcaatctaattcattctcatacaactttaatagagctcaagcaaatccacacacatcttctcatcggttctcatcttaatgatcctaattttcttggtcaatttgtagcatcaattgtcctcaaaaaccccaaga

SEQ ID NO: 48803 - DNA, 958 bp, Ricinus communis
  Intron number 1 from transcript 29669.m000830 (locus 29669 .t000039) derived from phytozome v7.0 (chr-ID 29669; pos 2 49872 to 250829)
tcttccctgaactcttctttaggtgagaaagatattaaacgaaagaacaagaggaaagaacaaagaaaaaaaagaagaaaaagaataagcaagcacgtgctttactgtcaattcttgtttactgattttgtgttttgaataagcacgtgctttaatttcttttactgttcattttatttttgataattgataatggtattaatatgtgatttagttttggtacaggagatttatttttttttttaaagaaaagttatgttctttgggattgtttaatcaagattttgattaacacactgtgtgtgtttggttgctgagaaaatttattgctcgacttggtcttattaatgatattccgtttttttcctatggttaataacgaatcagatgaagcagcatttaagtttcagttgacagaatagttatgtttctgctggttaattcattactggaaccatttcctttgatttacgttctcattaattctatcggtgcaaaatgtactgctgttgctatatttagtaggaagagcgtatcatgtacttcttgtattttgattctcttagaaatggaaatagaaatttaataattaaatagaatcgctttaataatggcttttagcccttatgggtttaaagtgatctaccgaataatttgcttcctgttgttgttgttgggtttaagtgcaaaatgtagaggtgtaatgactctgtcaaaaagatttttttttttctgctttaattttcttgaaaaagttcatttagcaaattaaatggttaaatagaatcagtttaataatgggttttagcccctgtttggattgacgtgttctacagactacagctttatttagaaaaatttgtgttactttaggaactttacttggaaacttaattgtcattctgattttgatatttcggtagtttctgacggggccaagttcactgaagctgctaaa

SEQ ID NO: 48804 - DNA, 1009 bp, Ricinus communis
  Intron number 5 from transcript 29791.m000555 (locus 29791 .t000030) derived from phytozome v7.0 (chr-ID 29791; pos 2 40160 to 241168)
cagctaatagagtccatccaaacaaccacagaaaagtagggatcataagtccttgttaatatgcagtatatgaaatatgtataataatgtgcatttgttatgcttgtttctattgccttaatatcatgctatgtcattatctgaatgtttttattactattgcttacgattttctgcttcattctcacaaagcaaattgttctagttaaagataactgaagaaagcatgagcaatcgatcttatgtatactttgattctcttacttgaccttggagatgtatgaatttgttcttacaatttacagtaaatttgtctctgtttcatttgcgtctccctcatctagttactacaccaggcctatggctttaaagttttggatttaccctacgttgtctctgtgatgttgttattggactaggctattgtcccttatcctttctagcagtactatttttgtctgcgccctttaaaatgtatacctaagctttgtctaacacatgatgcttaagcccacttttgattaataattgaacgcataaacttctatgcataaaataaaaattctttgacagtctcaatatcatttccagctgttgtcttgtgggttgtagattttgtttgcttacttataggttaatgcaggataccttcttctgatgatgaagtagttattcccactaataatctaatgttttcatattgagttatttatcctccagcttcttgcaggggttgtaattcttatagtcattttactataaccaaatgcattcttttctctatagctttagactgttccattgtgcatggcttgttcaatcaattgtcattggtgtgattttcaactccaaaaatttgtgtgtgcaacatttacaataattttgtgcatatcttttgaactagcatgtttcagatgaaattagaaaatggatggaacattttggagtccgtcctatccctgaaatatgttttttctttttccccagattaatcagtacctcaatttgt

SEQ ID NO: 48805 - DNA, 830 bp, Ricinus communis
  Intron number 2 from transcript 29653.m000292 (locus 29653 .t000003) derived from phytozome v7.0 (chr-ID 29653; pos 3 4566 to 35395)
gtttgggtggtcaaattccacctcaaaataaaccggtgaggactaattccctttcaacacctttatctatgtctttagcaattttgggtttcttcagcttgattgttagacttgttcttctattatattattgtcgaaaggatcccttttcaattttgattaagacttattctttcatttgctataaatggaagtgctttttatttctttagatttgctattcaatgataaataactctgtatatacaagactggttttccttagtcaagcgagagtgcttaattgacttgtgaaatacacttcccaggacctttaagtaacttaaaaagcacttcacagacaagagaatctcaaaaactgaagtgtttcttgaccataaaatatcagtgtttcttgtccttcctatttaaggtttttgacgttagacttaatgttaatcctgtttgcttcagcttattggcatttcaagataacatttcagctaattaatttcgtaatctgttttgagttaaattttcacaggggattcttcctttatacttaaaagtgtgctctgcgttgtttctcaacattgtttttgaaactgtcattttggattattgaatgcaagtggctttcttacatggcattgataccttctctttcgctattttaagaattcttttcagaattaagctgaactctttgcttcatttaaattttacttttctaagttgcaagcattttaacagtgagtgcagaccattttgtttgttcatttggcaattaatatgtgttgaaaaaaggattttcacttcaggagaaaagtggtattgacacctctgactct

SEQ ID NO: 48806 - DNA, 960 bp, Ricinus communis
  Intron number 2 from transcript 29703.m001488 (locus 29703 .t000024) derived from phytozome v7.0 (chr-ID 29703; pos 1 05647 to 106606 reverse strand)
gcaaattgcaattgacaaggcagcagaggacgcacgtaaaaaagcaaagagcaaaaagacttcaaacaggggaatgaataggtgatgaatcaaatttcattctcaaccgaacgggatcagaaccacggcttgtatatatgtacttagtgatttggcgatgtttaactagtgcatgcctgcttggtttttagattggcttgcacttaggtggcatatcatttaggtagaattccttctgtctctttttctttttaaggattagaggtttctttaccaagacgtaatcttgatagtgttttttccctcaatttctagtctctttgccaaattggtattttgtgaatgcattgaagttttgctagttgctacagagtcttgtttatatgatgaaatgagctgaagatgtatcttttcagttagtttatatattcaattgcacgaaaataatgtcttatttgatataaaattcacattctcaagttttagacactcaaaatagaatttcaagtctgcacgaattctttttgttttttttttttgaaattgagtgaatgaactttgagaatgtgaatttgacatttgacaaccttgccggtgggtatttatcactttcattgttctgattccacaagtagcaaactgacttgagtatgaatgctataatttcaaacccgaatgatttatttgcatgtcatctttttcctatatatgcaattctttttctttttcacacatgctattgatatctcttacagtttgcaggtacattttgttaacattctgatgatatctggtgctgtttattttccactaatatagtatataacttgttatattctgatcatatctattgtttatttcccatggatctagtgataagttgtcacaatgcatttttctgttaatttttgttaaattatatcagaactctagaacgatcttggaccttttcgaggagac

SEQ ID NO: 48807 - DNA, 745 bp, Ricinus communis
  Intron number 3 from transcript 28320.m001083 (locus 28320 .t000010) derived from phytozome v7.0 (chr-ID 28320; pos 5 8043 to 58787)
gtcttggtgataacggatcgaggtaatgttgtttttctattgtactcgatgttaattgatatattagtggcgtcctggtgatcatctaaagtcatgttcatgtcttttgggttttcttaaccacatatagagtggtgactaagagactaagtaaagcgaccggtccaacaaccctgcttcttcctcaaggggaaataaaaagactgaaaaagaaaaactctttcagatgcatgcatgcacatgcatattgaacttctaatctgttagatttatggcattcttgacaatacttctttgatcaagacatctaatggtgttctacctgcattttgtatcttaacaggaaattgttatttttgtgatgtctagtgctgtttcaccttctgttctaatgtaccttggaaactttttttgatatgacatttatatgagtgtagcattataatttctaaattattcgttcatgccaatggattttgggattgaaatactctgatttcaagtgcccaaagttacgtttatttactgttatgtttcaacagtttgcaatcaccatcaagcccctaatgtgcatgcttaaccacaatggaaatgaggatgataattgaaaagaaaatgaaaattagagagatgaaaggatgaaaaacttaatttcattccctgttagcctctttcccaaatcctcattcattgttgatcttgtttggcagctggtcccagcttttggagacccttcctcttccaa

SEQ ID NO: 48808 - DNA, 468 bp, Ricinus communis
  Intron number 2 from transcript 29785.m000969 (locus 29785 .t000038) derived from phytozome v7.0 (chr-ID 29785; pos 4 31000 to 431467)
ctgaacttaaggaagagctcaattctcagtacaaggtcttctctttttattctcttctataggcattgtttggaaaaaaaagataatgtgcaagaactcaattgcttattgagaaatcatgacgcttttagcacgatttcatttctttcaaaatgcttttggtttcttataagttgcaagaattgaattctagcgctctgaacacggaaatcgactaaatataattcaattgaatggaattgcattctcatgtttgagtagttcctatttgctctaatttaatattttcaactttcgaaagaaatataatcatgccaaattgacatgattttgcaagtcttcaattgaataaactccttttttctttattcaaatgaggtcctagggttttgattataattatagattctttaagctgcatatgaaactgaggtggttggatatgtattttgtaggataagagaaaag

SEQ ID NO: 48809 - DNA, 721 bp, Ricinus communis
  Intron number 1 from transcript 29706.m001338 (locus 29706 .t000068) derived from phytozome v7.0 (chr-ID 29706; pos 5 98206 to 598926 reverse strand)
atcaaaaccacactcaacagcctctccatcgtcaggtatatcattagtatctaatacatgtaaagaaattttgattctgttgatgataatataatgtctgattctgttaaagatcacgacttattagctctttctttcaatcttttaataagttatgttattaatctttgttctggagcctgatctttacttgttgtaacctttcatttaggtgtattgatttactgttgctgattgtaaaagtggttggctatactttcagttcatcctatttataatatagacaaaatgtggagttgaatttctttggtagacggaaaggaaataaagagggaaatgtatttctttcaccgatataatcataatttcttttcattgtttaaatggatgcggatatatgcttacatagttatcaaagtttcccttttattttttctttttgtaaaatttgagctgcttatggaaattttaattgttctttactgaattatgtgttctatgtctaaagaggctactatttgttacattttctggcaaaaaatgaggtttttttaatatcttctgaaattattctgtgatgtaaaatcagtgtttgttaatggtgtttgtaattgttttttcgtgtatgaatctttgaagcaactagagtagccctcagattgaactgaatccgaagaactaagtgttgagttctgtggttttgaatttgatgtagagaaag

SEQ ID NO: 48810 - DNA, 505 bp, Ricinus communis
  Intron number 1 from transcript 29726.m003905 (locus 29726 .t000017) derived from phytozome v7.0 (chr-ID 29726; pos 1 26809 to 127313 reverse strand)
agtgagtagaaggtacacaagcatatgcatatagatatagttatggtatctgatcaaaggctgttgaatcctgagatttttctatgataggttttatgtcgaaggattataaacaacagatgtgtaattaagtagctgactgaggccgcctgccggcatacccaagaatatacagaaaatgctgtaaaaggggcatttcttcttcttcttcttttcttcatttttgtttttactggttgttgatgtaacataaacgagctcttctttcatttttgtttttcttttcatctctttctttcgaatagacacacatggacatggccgtgtgtagaccagcttctccttaattgctttaggttgatgagtagagctctaatattcggcctctgaatggaggagggttccaaaagcaagcctttcattaaattctaactcgaacagagagtttgattgctgatctctatactcagtaatcacgcaaaagaacagaaaaacagggcagttg

SEQ ID NO: 48811 - DNA, 778 bp, Ricinus communis
  Intron number 1 from transcript 29628.m000749 (locus 29628 .t000003) derived from phytozome v7.0 (chr-ID 29628; pos 2 5677 to 26454 reverse strand)
accattttgtgacagcaatacagattctttctcaggtatctaattctttattatcacaatcttctggttctatttctgggtatctttagagctctatttgattgctagcatttaactggttgaaccctggaatttcagaccaacggttgaaatattaaagttcttacttctcagttgttcacaatgtgattttgatctatgaagtaatcctgggtccattcatatatatgtgagataagaagagagtatcttaactgttttggtagtggataaagagagaaagacttcattcgcggtggaaccgtggaagtatggttgtaaatttaactcttatgaacacaaacgttgtggctgtacggttcttaaactaaccgaagtactttttgagtttttttactaaatgaaacatggtcggtttatggttgaagttcaacgaaaaccatgttctttttttcatttgaggatgtacttctacatttctttaatgttgtgttacttcctttaatacttaatatgaatagtgccatcatgccattcttgtgatacgtcattcgctgctttgtctgtttttgacagtctaatgtttctaacagtattttataccttttttattgcattgtttcttctgcatacttgattcacagtatcgtattgcagctatgttattccttaggccttagagatcattcttagtttcatagcttcttggtgctgtcctgatatatatgccctcttaccaacacactgtttgcagaattttgtgtgccttgtccagaaa

SEQ ID NO: 48812 - DNA, 366 bp, Ricinus communis
  Intron number 1 from transcript 29742.m001396 (locus 29742 .t000032) derived from phytozome v7.0 (chr-ID 29742; pos 1 73296 to 173661 reverse strand)
gcagcttttccactagttccaggtctcatttctgggttagttctcgactcttttattttgtttttcttcattctgtttcagaagtcccgcgtcttagggtcaactatctgttgggattattttctgttttaagtccatttcagatttgcaatgcaaatttgagcagtgaatttccattaaatgattgagctatgtaattgcaaattacatcgagaaaagcacgtcattttcctatccttcacgagtcatgatttgattgtccttgtagccttggttgatagagcgagttgccattgtctcaagttagcccgtttgctcatcaccagttaacagtttgtgttgacatatatttgcaggcaactattt

SEQ ID NO: 48813 - DNA, 995 bp, Ricinus communis
  Intron number 2 from transcript 28833.m000154 (locus 28833 .t000003) derived from phytozome v7.0 (chr-ID 28833; pos 1 5706 to 16700)
tatatatcaagcttggtcaacacattggacagctggtattgctttcattatgctttcttaactatcgtttagtttctttttgttattggttttatctattcacttaaggcatgcatttggcacccttcagaattggagtagaatccaattctaggagtaggattccacttttttgtttggttgacaaggaatttaagttttttttttcttcaaagtattttgagatatttttgtatttagattgatttaattttagtgaagataacattttctttttatttagaattcttcatgcagcttttattttatttgctcatctcgaaaaaggtttgtaatttgattcgtcggacttaaatgtccatttctaagacctatgaaatctgcctttaccttattagaatttggatggtttgttgggtatttatgccgttaccctatgcttggaagtgggaggaaagagagaggagggggtgggggtgggggtgaggcgtgtgtgtgtgtgtgagaggaaggagaaaggccgagtgcaccaggaaggcaggccaagcagcaccagctgcatggaaggctctagaaggcagcagatgctggaatattttctaggagaaaggaaggagagaagaaaattatgtgattttaaacctcatgggaaaaatttctttctcttcaacatgaggagaaaggtgaattaaattactctttaccttcttaaaatattaatacagaaaataatctcattttattgaaagaaaaaaaacatgaatttgggcttattttctttaatcattttctgtaaataaaaaagttattttctccacactttctcccccttgactttcacctcttttcaaaccaaatgaaaagtacataattttatcccttcattttcttcccccctgctaaattttttcccaaacaaatagttaatgattacagcattggataataattgtttctttcttcttttgttcaggagtatttagtccctgaggagt

SEQ ID NO: 48814 - DNA, 653 bp, Ricinus communis
  Intron number 2 from transcript 29646.m001081 (locus 29646 .t000029) derived from phytozome v7.0 (chr-ID 29646; pos 1 91360 to 192012)
ggtaagttatgtttcttttttttctttctgtggatttttcttgcatttttgtcaagtttctacaacagttccacatcagttgcatggttctctgtgtatcattggatatatcctactattcaagtctgctagcacaatgatttggtttaggactgtgtatgtattttatggaattatgtaaagttgcctagttataaagtatgttagttcttgtcaaactattttgctagtttgaattggagggtgaaataagattggttgtggcatcacatccatagatagggcattcatcccagtgatgaaaattttcctttgataaaatggaaggatgttgttcgtttcatgcttgctattcagcattttgttttgaatttcaaaacttgatgttccccaatcgggtaaaatgatattagatttgaaaatttcttattatgttccattagtaggatatagatcttatggaatatgtatgcctttttgtggttgagttacttgagtattagattctgcagttttgactaatgctaacatgctatagatggtgaagttgaattctaaactcttagtctataaaaatgcaaataatatgaaggatatgtctattatcattatttgtctaatatcaggctgcagcagaagcagaacctgcaaca

SEQ ID NO: 48815 - DNA, 511 bp, Ricinus communis
  Intron number 1 from transcript 29629.m001426 (locus 29629 .t000077) derived from phytozome v7.0 (chr-ID 29629; pos 4 70869 to 471379)
aaactgcacagaagctgctttatataggtaaaagctaattttattttttcttaatgttcgtgtatagggtttattgagttttgatctatttgaacggcaaaagactgtttgtaatttgttgatttatgtgcttgtaaaggtattgactttatgaagtttaaatgttgttttgatccactgtagttgagctaatcatcgctttttatacggaaatcatttatagttgatatagctactgccttgctttattgacaaactttctgagtaccattttctgatcatgcgagtcatttcctttttgtctcatagtaaaactaaattcatcttcattgagcaagtttgccattatcaatacaggttatattatgttcgcacttgtttctagttgagaatatattcaatttgtacaagttgagacgagacggtgcttgctgtttctataatttctgtatctgtggccaactatataacatttcttgatttgaatattttggaattgcagatacgtttc

SEQ ID NO: 48816 - DNA, 400 bp, Ricinus communis
  Intron number 2 from transcript 29801.m003239 (locus 29801 .t000184) derived from phytozome v7.0 (chr-ID 29801; pos 9 69773 to 970172)
tctcagaattgaggtcagaccttctaatttcttttcgaatgttctgtattccaccaatgcaatgtgttcgttttgtgtaattttcaagatccattagctggttatttatcacgttagctgcagttctcattctctattttttgagaataattcaattcataatttctgttaagtgaagattgtacggatttattaatcctagcattcttttatgatattctggaaaggtgttcaataaagtattttctagttacggtttctgcttttacccgctttgagtttggtgtactggtttgctcatgccaatatcttacatttttcctgcctcttactgattttgaaaatttgagctctgttttccacattgtatcttatgaaccctttgtttctttcatttcag

SEQ ID NO: 48817 - DNA, 594 bp, Ricinus communis
  Intron number 2 from transcript 27940.m000329 (locus 27940 .t000007) derived from phytozome v7.0 (chr-ID 27940; pos 5 4000 to 54593 reverse strand)
gcactggctgtggtggttgctatcaggtttacaaaataaaaaccacagttttctttttctttttcttttttaattttgtcaacgaaccgtattttggaatttatttaacattatatgattatattaatcactatataacgaaagtgactgtatctactatgtacctagaaagtatggtagaaagtaataccattaattaaaggataaagtttttacatccacttaatcattactacaaatgttgaaactaacaagccaacatcttaaagcttctacgactgcatatgaaagaagcttaattaattatcaattcatttacacttttctttctttctttttagataaaacatggttagcaaagaaaaagaaaaacagatggagattcaccttcaaattacaatgtagcatatacatatatatacatcaaatcattaggtgctctcaaatttaaaataaattcagcaaatgaattaattattatgaagtatttagataagtcggcatgcactaacaaataaaaaatttgataacggtagtgacagtgatggttaattcgttgtgcaataatgattcaggttaggtgtaaagcaccgc

SEQ ID NO: 48818 - DNA, 800 bp, Ricinus communis
  Intron number 2 from transcript 29732.m000325 (locus 29732 .t000018) derived from phytozome v7.0 (chr-ID 29732; pos 1 10758 to 111557 reverse strand)
tagtaggtcgcagcaagcaactggtctgcagaagggtatgattttactttgggttttttaacgaaatcatttcagattgttgtttaatggagttgaagatgcacttttaaacttgttaaattctgcattaagtattttgtgatccctaatctcatatgtagcatcgggcagtgttgacctggtaatgttagcccccaagtgtgctttgtttcagcttattttggagcctttgtgttgagaacatgttcttgtagtagtagcttattgaattttaaggtgaattactaaaaagaaattactaaatactagatacatttacttcacatatagagcttcatgttttctctcctgctgcttgttccctgttattcccattttcttattctttaatggtttaagcacgcacataaatttatacagacatgcactttcttctaatgtaaagtttgagttgaatatagtttggtaggagttcttgattggcattcttgttcaagtttggaaatagaatgcaaacatacgtttgcttgctttatattcctcgttacctgttattgtagctacgcatgttctttgtccggatagattaggtacattgacttggatacttcgtccataaatgtgaggcatcttaacccaaggagaaaagggaggaaaaaaaggttaattattaaatacatgtaccctcttgtctgggttttactgttggatattgtactatgacttcattatactaaacaattaaagatactctgtcttcgacagctggttctactaaggagtggaaaccaaagccagca

SEQ ID NO: 48819 - DNA, 750 bp, Ricinus communis
  Intron number 1 from transcript 29805.m001491 (locus 29805 .t000022) derived from phytozome v7.0 (chr-ID 29805; pos 1 10635 to 111384 reverse strand)
ccaggtacacccactttctgtttttccctatgtttgtatgcaagtgtatagatacagtgtttcgtatgatatccttaatccttatgtatgtgcaatctgtcattggtccttttcttgtttttatagaaaatacacttttcttttctttcccttttcccccttatagcctgtgttgttaaattccctgacatataaactaaaaacttaaatatatattgtttccggctttgtatattggtatctaatttgggtccataagtatgaaaggtgcgttttcctggtcaattttgatttacttttttgactatagaatagaaacaagtttaggcacctaaaccttctacttagttaaactcgacatatgtgtaatctcgaattctttggagtaggatacttgtagtgcttcttctttgtagatgtcataagaaacacagcagcagctggcatatgaattgaaaaatttattgtgtttcattttattgaatggggcttgcttttagccaaatttataatttgatgcttgtgtgaaaaagagaactacaagaaaaggaattgtggtgattgcaattaatgcttgtcgttaacgtttatgaatgaaaatgtctcctttgcaaatccagattctttctagtttccagttgccagacaagaatcttataattgcgattgaaaatgctgctctcattatgagttgatgatgtgaattttgtaacaggtttcgtgagtttgaactgtgggggcaaagaaaat

SEQ ID NO: 48820 - DNA, 180 bp, Ricinus communis
  Intron number 4 from transcript 29679.m000382 (locus 29679 .t000008) derived from phytozome v7.0 (chr-ID 29679; pos 7 0364 to 70543 reverse strand)
gctgaggtgcttgcatattcccagatttcctatgtttttcaaaatcaactgaattgtttcttttctaattatatctttgcttttagcatgtgcatttttcattttattttatcattttatggatgccatccttgcaaaattttatacattatgttcttgtgcctgcagaacattcaaaaa

SEQ ID NO: 48821 - DNA, 415 bp, Ricinus communis
  Intron number 1 from transcript 29092.m000452 (locus 29092 .t000011) derived from phytozome v7.0 (chr-ID 29092; pos 8 7775 to 88189)
tcatcacactggcaaacacgtccagggattccagtgtaagctaatccactttattttcatttcaagaaagcataagcaattagtgtccattatatgcgtataatgacaaaaaaatcagattatttatggtggtagatttattcagaaaggcctgatgaaaaagcaattgaaatgatacctttacatattatatgaagaataaagtgcatgatagtttcctgatgtgcattcagaaaataaaaattacaatttcgtttctttgaattatctgtgttttaagataaacgcaactagttcaaacaatttttcagccggtttccaagatacgattttcagtttcatagatcatgttatgattaatctaaatattttggtgacccaacagatagtcttcccattcttcaaggatctgctt

SEQ ID NO: 48822 - DNA, 649 bp, Ricinus communis
  Intron number 2 from transcript 28304.m000173 (locus 28304 .t000004) derived from phytozome v7.0 (chr-ID 28304; pos 5 0001 to 50649)
ggggccttcgtgattgtggtatgttaaatatttgtttcattttcaagcttaatgccatgtgtcagtggctaaattctcaaatagctgtctactctcttgattttattttcaagtcatactcagaattggcaactttagtgtaaatgtgttttggttaggaagacagtgagttctttttgtgttattagactatgttctttgttctaagactgtttctttctggcatcttaatatatgaagaggtttaacccattatatctggtaggcgtttagggatatcatagttttcttttaaattaaatgattggattggctcaacactatcactatgcttagcctagttatcattttccttggttttagggtacatattataataatgtgatgttaagagttaattgtaggatacctacttcccattgaccttttctccaagtgccaataaattttggttgttatcttttggtaaaatttatatttggagaatttaagttttctatatatgtttagttgcattgcacatagtttattcctgcttctcaaggttctgatgaattagcaggatgcttttttgcatatcaaaggttgtggattgtgcctttgtgacagttaaatatgtaaaatttggaactttaatctcaataggtga

SEQ ID NO: 48823 - DNA, 880 bp, Ricinus communis
  Intron number 1 from transcript 29409.m000281 (locus 29409 .t000014) derived from phytozome v7.0 (chr-ID 29409; pos 1 42702 to 143581 reverse strand)
ccgaagaagctgtgagttacaaagttctgagagtaagaatttctacttcatttgagtccttagtaccaataggacaagagaataaccctataatgacaccatctgtacccctaaatactccaccaattccggcaggaccaggtttgcaaaagctaacccattcacattccatttgaaaaaattcattagtggtggagaccatggaaatgctattcggattctgccataatgttcccaatttttaaaacaaatggaggactaaaacatatcgatgatcgaatggggaaagaaggatcatgtgcgctaatcgaaaaatacaatctggctaagataagttcacatagctttgtctagcataccacaaacacattgtcaaagacaacattatttcttttgagccaaatacagcaaagaactgaatagaaaagggtgtgccatactttaccctaaaggaaactttagagaaaatataccattgaaagaaaggtacttgcactgatcctgaaaatggatttgagcagacatgagagaatagtttctccccttggtaataggattcttctccatcgaatgttccattgccagaggttgttattccaaaaaccagattctgcaacagaagcttctttgtttgatgccagagaaaatagctagtaaaattttgtgataaagagctcttcctacaccacacgtcggtccaaaatttgatttttgagccatttcctgaccatattaaatcatatttttatatttagaatgacttataatgcaggatattaagagttcaactcttaatatatatatttagttttaagaaaataaatattaagaaatattttgttttcacttatttaggtttccaaagggttagaaagtaaca

SEQ ID NO: 48824 - DNA, 659 bp, Ricinus communis
  Intron number 1 from transcript 28266.m000192 (locus 28266 .t000001) derived from phytozome v7.0 (chr-ID 28266; pos 9 419 to 10077 reverse strand)
aggtacattaactctctgctttcatagtcgacttcattgatcattcttttaccttttcatgctattgcctcaattgcataatctaattgttctgtgatagcattttgtgcttgctgaatttatttattttcaatctttataggtctaaattgctctttgtacttccatcttctatttcctattttattgatgtcttgataactctttttccacatctaattgtatatcattctccagaaaatttctgcacgtattttctttgaattgcatgatgaattgtaccagtgcgactcaactgtttagatatacaatatagctgaagctcctaacttgactaggacagagatactatatgcaattaaaaacttcattgaaatatttagagttataattctaagcactaaacctttttaatacaaatcataagtacttgctgttgaattttcttttgtttgtataatatttgttttatatctttaggattccgagtactgatcaccctaattatgcttacaaacagtgcatgctctcttatataataggaaaccctgttacatcataatcactataatgagaatttcatttactcccattatgcttttgttatgcattttcccatgcttttaacacactttttacttcatatgcaggattagata

SEQ ID NO: 48825 - DNA, 850 bp, Ricinus communis
  Intron number 1 from transcript 28193.m000296 (locus 28193 .t000002) derived from phytozome v7.0 (chr-ID 28193; pos 8 126 to 8975)
gcttcctactaagccacctcctcctgctcaggctggtgagcttttaatttgtttttaatttgattttattggctttgggtttcttctgtgtaaagaaagatgcgaactttatttgcttttttgatagtccgataattatttggtattgtgccctgctagtattagtgaagaaagtgccattttagtgtttatattgattttgatttcctgtttgttgcttgaaatagaacaaaagaaatgtaagtagaattaatttacagtctttcactctttgtttctttaatatttcaggttaaatgaatgcaatattttcagctgtctttattgaaccttcttgttactgaattgatagagtcataaacccaatgagtaaatgtgagtttgtcaagttgaagttttgattggaattagtatattgattattgatgttctttaatataatatcttagcagtactagcacaatcacactttagagataagcttcagcgtacttggttttgttctatttaaagctacttgcatgattgttcatactaattaggcgaatcttctctatatatgagacgcttatgtttgctatcatattactggattgggcattaatctatcttcacatcaaatattgttaatattttctagcttagaaagcaaaaaaaagttgcgtggagatcaaaattagttagcatagagtttttctcaatcttgagtcgtgcttttgttttggaaataaaccgtggcatttttgtttattggatttaatggagtactgttgtgtatcttatgtcttttccaatatgtttaatttgttgattagtgagggaaggaaagagtgaaggtggtcgtggaggg

SEQ ID NO: 48826 - DNA, 587 bp, Ricinus communis
  Intron number 1 from transcript 29813.m001480 (locus 29813 .t000032) derived from phytozome v7.0 (chr-ID 29813; pos 1 90276 to 190862)
gtactgggttccaaactacaaagctctcatctccggtaatgactcacgagactatcaggtcaagtacaaagtaaaaacaaatgcatcccatttattttaattggattctgattgggactcgaatttgaaaatcccagaacgtacgagtttacctacgtataacataatatctcattatcagaggcattcgatttcatttgatttttttaattttcgtttctgatcattgccagaaagctaaaaagtttgaatttttccttaaaatccagttatagtgaaagaaaaatgtgcctgtactgaactcaacaatctgcaaacaaaacttttaaaattctgaaattcagtcaaaataaataaattttaaagagaagacaaacgcagtccaattccagaaagtattaatgccactacatacataatatcatggagctaacttaatccaagaacgaaatattaagagataaatgataaaatatgtcctgtctttttcaaccttaaattttatatttattttcttcctgtcaaaaccttcattttacttgtatcttggagaacaagttcaacaattcagaaagataaaaccaaac

SEQ ID NO: 48827 - DNA, 517 bp, Ricinus communis
  Intron number 3 from transcript 29814.m000720 (locus 29814 .t000007) derived from phytozome v7.0 (chr-ID 29814; pos 3 4402 to 34918 reverse strand)
tttctcctaggcaattgccttttaagaacttggaggttcgtgacttcagatgcaaagaataattgattagatcatatttgatattgctattgagaaaaagactaccttaacaatgttgattagaggtcactataatttaatttttaaaagcaaatttgattgttctatttgaagctaaaatcaaatccacctttaagacaatgcacgcaagctgtttcttcttccttttcttttccccctaccttgccaaattttccgctgttcctttcccataattccacgaatttgcatgtattgttgtattatttgtgattcttcacattgcttgaagttaacattggaaagtggcttcaaaatccaaagcctgaaacaatataatatggttaattcctgctagttggttgtcatcatgtgcttcttaatttgggaaatatctaattaatatattgagcctcgttttctttttttatttgtttttacagttcctacaaaatcagggttttctagccagtatcac

SEQ ID NO: 48828 - DNA, 714 bp, Ricinus communis
  Intron number 1 from transcript 29629.m001356 (locus 29629 .t000007) derived from phytozome v7.0 (chr-ID 29629; pos 4 0795 to 41508)
agagtcaaaatttacattcttcctggaatttacaggtttgtatatacatgtaccgggaaaggaattctttgttatcacaaggactctatcactaactctgttggacatatgtgatggcaaagaagttttgatttatttgtttatgatttgttacttatagccacataccaagaggcaattatcttagtcaaatttatttatatattatcgttttatgttgcacatcagaaaataataatctttatcgagtataacttatggctccttgaaaatttatattcttccataattttaagtgaacgttggaatgtgcccataaatccttacaatttggccatagattttttttttttaaaaaaaacttaatgtttttttcttcttttggcattttaatttgggtttgcatgtctttttaacttcctctagcagaacattggaatttagatcactcttgcagttttcctagctttagttttctttcttttgggaagtgggcacacaattttagccaggtggttatgttgaggtagttacatgcttaattaccgcctcttattttctctctttaaaatctaacttaaaaaacatatgaatttcttaaatttgcaagtaatctaacataagaaggccacacaaattcttacacaagttcataaggatttaattgaatatgatgcagagagaaggtacttgtaccaagtacaaagccatata

SEQ ID NO: 48829 - DNA, 674 bp, Ricinus communis
  Intron number 3 from transcript 29726.m003890 (locus 29726 .t000002) derived from phytozome v7.0 (chr-ID 29726; pos 2 7052 to 27725 reverse strand)
gattgcccttggtgttgcatcttcaattggtcttggtaagcagaatttgtttggattatcaaaggctctattatgggatttgggagaacttatctcaaggatattaatacctcaaagcttggaacgattttgtttaacattgtagccatactgctcgaggacttaaaagttcccctttaatgctctatagtcaaatgccaaataagcttacctgctgaatttacgtcaataagtatattattaactcagctaccgattctgaaataatggtactgagagcttacttcaaagagctgctgaattatgtaatagtggcttctgtttttttttttcttatctatttcttcccagtgaagttttcagaatgagcaaataaggatatgataaatgtagatcaaatcttcatttgaagcatggtggttaaaatgttcaccttatttttaaggtgtccctgaccatgattgaactcattttatgcaaaataaagctcttaaatcataaaattaaacattgtaatcagaccttacattaattgtattacacatgtgaaactcatgctgcattgcaaatctaggtttaatttttcctcgcacctgaatctctttgtctctctctttgcgtatatcttaaaatgtacagggtctggattgcatacttttgtcctttatctgggt

SEQ ID NO: 48830 - DNA, 618 bp, Ricinus communis
  Intron number 1 from transcript 27516.m000171 (locus 27516 .t000004) derived from phytozome v7.0 (chr-ID 27516; pos 4 8101 to 48718 reverse strand)
ctgttggctctgattctcttgatctggctttacaggtattctagtgaaagtgtttatctttttcttaaatatatagtgtgtgatactattgtatttgtatctgatcaatctctaattgtgttgtgcttagcggattttagtactggaaatttgggttcgaaagagtgaagtgattgtgttttaaaaaataaactttgtagtacttttagtctggtaatagtattactagtatcactgcagaacctgtgcttccaatatgcaacatcctggttgtgtttcaaaatatcacttttgaagtctcttgcttatttgtttgtgatttgttgctaattttctgttaaagaactgtcagatataaaattatgcatttaagttatctttctccatattggtttggtagttgagaagcaagatgaaaaagaattttatgtaagtcctagtctctttatacgtaaatgaaatgattggttccagtctggattctggattatgaatatttagtagtttgttcccttctattatgcatgggctttcccatttcgtagtgactattttaaaattgtttgatttctgcagccatatctacatatcttcatttaatatgcattacgctgcagt

SEQ ID NO: 48831 - DNA, 288 bp, Ricinus communis
  Intron number 1 from transcript 29726.m004011 (locus 29726 .t000123) derived from phytozome v7.0 (chr-ID 29726; pos 7 24329 to 724616)
gtgaagagggagtcgaaatgtgagtatccttctcttatatcactaatgttcgttttgtttgttaggatctgtattagtttctactgtgatttatctgatattgcatggctaagaattttcataaatatttattaactcattaattctcctgagaaaaataaaattaaataaaaactcgttaattttcatagactagtagtttgggagagttacttttgatttgtgtatacaaggattatgatggtctcatgatcaggtggttggagctggagctaaagctcgttgcag

SEQ ID NO: 48832 - DNA, 834 bp, Ricinus communis
  Intron number 2 from transcript 28525.m000261 (locus 28525 .t000002) derived from phytozome v7.0 (chr-ID 28525; pos 4 1140 to 41973)
acttgctcgcaacactcagccaagcccaaaggtttaaatttctcttcttttcaagttgttacatttcattgtctatccaagaaaattaaaaaaaaaaaaaaaaaaaaaaaaaacctacaagaagtcagattggaatcttatttttcttgattaattttgtatataatatggttttatatgtgccaataaacaattcaaattcaaatactttatttttagaataggttcgaatcaaaaaacaatcactgaaaacataaaattttcaagagaattaaaattaaaaatttgatacgaaattagtttgttttttttttcatgtattcacatccaatcaaaaaagagatttctttttttttttgtatgaattgacttcttaatctctgtgtattattataataataataataataataatagtaataaaagaatctttttttaatcaatttttatcaattatacttaataattttagtattttatttccaatctcggctttctttcttctaagacaaaaattgagaattttctaatttaaatatttactatctgagcttttctctatatcaatgttattattttttactagataattattgataggaatacctttaaaattatttaaaaagttacttttatttatgtagtaactataagaaatttttcgcttattgattatttgtaatggtgattcgagtccttcttattttcataataaatagatttatatgataaatgattatatttatagtgtttttttctaaaccatcttcttgattcaataaggagtcggcctcaaataagttcatttttcatgctgctgcttatgcagtgtaa

SEQ ID NO: 48833 - DNA, 545 bp, Ricinus communis
  Intron number 1 from transcript 29794.m003333 (locus 29794 .t000032) derived from phytozome v7.0 (chr-ID 29794; pos 1 77430 to 177974)
acttgctgcacctacccaagaaatcaggaagaaaggtcagcttttttatcttcttcttctttttcttctgagttgaacaatggagtctcagatatataaaaatccataaacctgttgttcttctactatacatcattcaccgtattatactatggccttccaatgaaaattcccaagggttttatacattttgctactatatattgatatgcttcaaaattccactcactagacaccaaggaagaacaaaaaaaaaactgtacctaaacattaaataattaatcatctgagagaaataaagaaaacaaaaggttagattttatgcatataagaaacataaaaaaatgaaagagagaaaactaatatttcagatctatttttatttctttttttcctgttgaaatttatgctacataattttgttcttgtattaggattcaaatttttgagtgggtaatgattggtcatttagtttcttttcttccactcatacaaatgtaatgatagtattgattaatttatgcctatgtgattttaggtgtgcc

SEQ ID NO: 48834 - DNA, 960 bp, Ricinus communis
  Intron number 1 from transcript 29634.m002095 (locus 29634 .t000041) derived from phytozome v7.0 (chr-ID 29634; pos 2 80496 to 281455)
ctcagaattcattggttcaggtaaattaattaattatatattatacatatttaagtggttctcaatttttctcaaaacagactgtgattttctcatttgatactaaattaattattatttttttgacattttagaattctgcaagtaacattattagtactttgatagtaagcaactgagtaacatttataatgatgaagtatttttttttaatatgaatcacataagaattattacttttaaatgtatacaccacaaaaaataattgaataatacattcatataagaattttatatttctatattaactaattaagatgcatttcatattttttttttaaatttattaaattattttatgatttaacatatttttattttaggatccgtaatttattttttttcatttcaatattttgaaaatatgaatttatataatattattaagagatttgatgtgcgatacagtaactactattctttcaactgtcacataagtactgttaaagtgttattctctggtacgaaatgagccacttcgaataggttcattgctccggctcaaaatacgattaatccagcatgggctacatgggctcctagtagtttaccggataaattgataagtcaagcatttccagcccaccaagcgaaaccagtggtttcttagtcacgaccggctaaagataaagttccattaaagagcgtttccacgtggtaaaacctcctcaggaaatataaggttttcatgaggcctaaaataaaaaaataaatcataaatcttaaagtgtaaatatatttacgtgataatttactaaaattttaccttatctaaaataataatgtatcttccaactaagtatctttaggacccaattctttttcttgtttttcatctataggacccaattctagttaatataagatccaataaattatatgcagcaaaaggtaatctct

SEQ ID NO: 48835 - DNA, 802 bp, Ricinus communis
  Intron number 1 from transcript 29682.m000577 (locus 29682 .t000010) derived from phytozome v7.0 (chr-ID 29682; pos 5 9081 to 59882)
caagacacaatctcaataatgtaagttactgattacattgttcccttttcaattctgaagttgtaggcactgcctgtcttcaaaaattagaaatacatgcatacacattcgtgcaactaattcatatggagatacggtgtgtgtgtatatatacacacacctattaagagacctaactttgttgcagctctatatttgttttgtttttgtgcgagagcccatttattaataccgttaacctatacaaataataaataaaaaaataatatatttaaaattaataaatttatattaatattttattaatttgatattcttgtgaggatatacacatggtccaggcaattttttttattatttaattcagtttgaacaatttagatttatatataatattatatataggctatacagggactgcagactcttgattgtacattataggctactggctaggggtaacaactgctcagcaaaaattgatggaatgaaattatgggcagtgtggggttagagaagggagaggagtcatctctccatcgtattgcacactcaatagagttttattcatatggccaagaacaaaataataaatttgacaggaaaagaataaataagtggtagaagccagtattctgttccttctggtgtgcttaatcaactagatagttgtttgaatgtgacatttggcaattaatcgagtgcttagcagtcaatatttatgttggtaatttttcaggctatatgataattcaccgtaacagcagattcttgggttgttgtcttgtgcagcttgtgttct

SEQ ID NO: 48836 - DNA, 535 bp, Ricinus communis
  Intron number 1 from transcript 29648.m001914 (locus 29648 .t000001) derived from phytozome v7.0 (chr-ID 29648; pos 1 2050 to 12584)
gttctctctccgactacagttaatttacactgcgggtaagttttattctatatttgttagtttctgtgtttttcttttttgagcaaagactttagctttagctttggatctttgatttagtttatcaaggctcgatcgagctgattttaatggtcagtttttaagcattttcctggactaactattttgcttcattacagaaagtttttttgtctttgcagtcattttgaagtttaatgttttgggttcgctgtttagacttgcgtatttggtgtagataaaaaaagaagaagtgttttcttgtatgggttttgtttaattttgattgaactttttggggtttttttttatataaattttttggcgtcatgggtttgttcttaggagtttgattgagctaatttatggttagtatcatgtgggttcttaaaagctgtatttggcagtgggaatttgatttctttattgttctactgtatttggaggtattgtttattgaactggatctaaaagtgcttctgtaatacagagattt

SEQ ID NO: 48837 - DNA, 628 bp, Ricinus communis
  Intron number 2 from transcript 29651.m000290 (locus 29651 .t000010) derived from phytozome v7.0 (chr-ID 29651; pos 1 12006 to 112633 reverse strand)
gattgagagcctacacccgattggacgaaggagatgtatgcctgtgttttccttttgctcaatcctggcatttacatttgatctcaagcgttgctagtaattatgacatggaatgataagagaagctctcttggcacactagctaaaccatttgataaacaatgtctgttttgtagcttaaagctataaaacgtgttttccccattttcatcatttcatatagttactgtcactaaaatgaagaatccataagtctttcaaatataggacatcgaatagttgtataacctcaagcagtctaaaaattttaaacaaattttgttctttttgtttttacttttactgaagctatgaatttgaagggcagtttgatcaatttgatatgtttgttgatgaagtatggtgttatgatgaaatcgaagatatttgattgtgcttgtaattgttatttaaaccttaaaagactagagtgaaattacctattgcttaaatctttaggaggccagaaattttattttcttttaaggaaaccactttgttttatcaactgttaaggattgttagttatgatctggctgaaatcttgcttgcaggtttgtagtgcttgcaatttacggggatcttgtga

SEQ ID NO: 48838 - DNA, 736 bp, Ricinus communis
  Intron number 1 from transcript 29706.m001336 (locus 29706 .t000066) derived from phytozome v7.0 (chr-ID 29706; pos 5 91215 to 591950 reverse strand)
gcgttctctggctctcgcgtaagtctctctctttacgctctccatatgctttaaagatcccccaacttttaacttcactggaattgtatctgtatgtctagatctcgatccgaaaattttatatttggaacatgcctgcttggttgctaagaaattttaggagattaaggagtagagaattgtacttttcatgttatgttattaattttttgctgttatctacggatctctctttgttacagcagttctctttgtaccaattgtgattttaacctaacccaatgaggcaaagtgtaatgttcttctttatgcttgatttgatctggactttcgagacttaggcgtgatatatggaaattttaagttttgagattctgggctgtgtatggaaatgataaatacttacgggatttgattagtttaagatcgtgtatctttgttgattttgtcgctttggataaatcagtagagtaagaactaaattgcagtggttgattgttcatgtatcaatatgggagacttcttttcatgtaaatttcttgattagatagctttggttgaatcttggagcaagaactaaatagtaatgcttgatggttttgtgatttgttcgagattgttttttttttttttctgtcatctcttggtcaatgtatatgtatacttttcaagatctagacttgtatagtattccttcctgaacatgattttgaatgttaactttgtgttttgtagg

SEQ ID NO: 48839 - DNA, 709 bp, Ricinus communis
  Intron number 2 from transcript 28128.m000155 (locus 28128 .t000002) derived from phytozome v7.0 (chr-ID 28128; pos 3 1161 to 31869)
ctgtatccaactttcaagctaccattttttttgcttcaatgcgatgaatcatacatatttttgacccatgattaagtttagtgtaaagtttccaattgaagatggcatatttattgctcaataacatagagattctttattgagtttgcttttctctagctgttctttcttgaattagaacattttccagtcagagtttaggaattttaacaaaattctacaaataggcaactcctaatccaactgaatctaggaaacaatggtaagtttatttcgttgaattttttatagtctagcctcttcaagcttctgcatatatgtgaggactgacaatttaatggatctttgttaaactgttgctgacaaaagtgcatttggcattgaacttatagatatgtcttggcaatcttagaagatatcttgcttttcatgcacatattctgatttctatctgctgatatgaagcggacttctgatcttcttgcaacagagaaattgttggatattggatctaaaatttccaatccattgctagaagttaatagatgatttgaatctccattaatataaaaaatgaaggctcagataaggggggtttgcatctcaccatttgcctttcccagttaccatctgtgagcaaatttatactctttttttttttttttttctgtgttatatttgcattccatgacagcactagaaatcaaag

SEQ ID NO: 48840 - DNA, 601 bp, Ricinus communis
  Intron number 1 from transcript 28597.m000120 (locus 28597 .t000006) derived from phytozome v7.0 (chr-ID 28597; pos 2 9937 to 30537 reverse strand)
ggcatttagatatattggaagttcttgattaaatatttcttcttttcatttttgtaaaatattttgatttagaatatgaattttgcagcttttatttcttttgcttttgggtaatattttctgatggaaaatgtgaaattgagaatgtttttgggttgttaaattcatgattgctagtgccaatcaaaataaaatgaaaaagttataagcttgaggctcatttgttgtctttttgtcaattgttttgaatcctcaattgggatttttatagttaatggttttgatggttagaaattgaaatttgttttggaagaaacagacaataatgatatgcttaattaatagggaaacaatacaaaataagactcagaatttgaaaataacagaaaatattatattaatgttctgaacaaatatacatatatagaaatactagttactgatccaggaaaataaattgataatgatagagtcagtttaatgtgatagcgttaattatgcaaggcatgctgaaatttttgagtacaggagcgttctgtcttggtatgttgatgtaattttgtttgtttatttttacttgtattgtgtatagtcaacttca

SEQ ID NO: 48841 - DNA, 475 bp, Ricinus communis
  Intron number 5 from transcript 29358.m000046 (locus 29358 .t000003) derived from phytozome v7.0 (chr-ID 29358; pos 2 2889 to 23363)
tccagcttgcgggttacaaaggtcttggtggcccggtatgtccctacaaattccctaatgcaaatgttgtttttcctcccttaaatttccttcctttagttttttagaacagaaaagttgagaaactatttggtgcttgtcatgttttctctatttcatttcccttacggttgatagacatgttttcactttctttgatctcttgtgatccacaaggctgcaataatccaaaagatttcttcaaccttactctatctgttgcaactgcagatgttcctccgcttttgcaacagaaaaatgcattagctatcctgatttggttactagctccttgtagcttgataatggtttctctttgtcgctccttgttaaggaaaaacccttttgtccttatgcctatgctttaaatgatgcaagatttcaccttatatttttatcttgagtaatatttactgaagacatttattgcaggaag

SEQ ID NO: 48842 - DNA, 732 bp, Ricinus communis
  Intron number 3 from transcript 29506.m000165 (locus 29506 .t000003) derived from phytozome v7.0 (chr-ID 29506; pos 3 1801 to 32532)
gaactgtcttggataagttaacaggttttctcccattattcattacattgttccaaaaaaagagttttaccagtagagacaaaatttgtcattctgcagcagtaataacacaatttccccaattctcttgccagaaagaaagccagattgattgacttagataacacagtctaagcatcagtcaagaccttagtattgcattttaaaatcacattacgtgtgaaatcagtaaagccaccagaattcttcactttatgaatgacgattaaagcagtgaagcagcttctcattattgaaaaatccaacaaaacgatgcaaacatcctttttaatcacaacctcaatatttgtcgaaaaatatgtcatgatacccatcagggccaagggctttaccgtctccagtgctagatatagcattcttagttcttaatcagtaacaggaatctgaagcccatcattctcttcttcactcaacacccttccttccttcatgatagcagcatccacatgttctttattcagtaaagaatcactaaataaagatttataaaagtcaaccatacccttcgcaattcctccatgatcaaatataacagcatcatccccaagcttgatacaagagagaccttgttgattagaactatgtttttgaataagttatgttagctaacaactggtgtataattgtacatatataggtctggactggaacaaaactattagaattatcaaa

SEQ ID NO: 48843 - DNA, 543 bp, Ricinus communis
  Intron number 1 from transcript 29729.m002271 (locus 29729 .t000004) derived from phytozome v7.0 (chr-ID 29729; pos 1 7991 to 18533)
tggttgggtagttcttagctttccattgtcgttgtatagaactttaggcaagagtagcatattaacaatgctaatgctaagtcacttaattagtccttccgatttgaagtgtttttactgttctgtgctgaatggtcagccatgtacttcatacagaatgagtttctgcaacggaaatattccatatcacaccatgaacaaaacgattctaactgtttctatttcctaattcacactatctctgaaagtgaaaactttgactgttttaagagaccttgtcgtgtgctgtgcaaggtaaaggatgcatgattaatgacccatttagtgcatttatatatgcttatttgtttatattggataatagaagagagagcctgaaatatcagatcaaacacttagcaagtcactttcttgctccaaaaaatgaaaacatttcttgttctgctcgccttcctctgtatcactccattatccctgacgtctccaattgcttggattacctcaccagaatctcaagaatactttgagatcacccctccgcta

SEQ ID NO: 48844 - DNA, 631 bp, Ricinus communis
  Intron number 2 from transcript 29608.m000208 (locus 29608 .t000007) derived from phytozome v7.0 (chr-ID 29608; pos 8 8653 to 89283 reverse strand)
tggaaggttagttcaacattatttatggttagtttattcaacaatatttatggttagtttgacttataattgatcgtttagtcacttttatttagttggaaactactgttatggagttcttgttcatggaaaacaaaattatgaacttgatgtgtatatgtcctataaagttatgctgaataatttgttgtaaaacccaaaataattgtaacaaggatctttggttgacattatgaacctcttctttttgttcgtacactttctcaactaacttggaagcctaagcgagttcttcttgttgacatggcctgagcagaactaatggagagatagttctacccttgatgagtgcaaatcaattatgatttgcatatttatagtgtttagaagattagcattgtacaacttcaattataactaggctttcacctgttctaattgaataggaagtttcccaatggataattatagaactggtactggctttctggagcggagcgcatgttcctatatggaagttatgcttcccatgcagagggcactagattgcttaaaagttcttaataatcttttgtatgaatatgctgcttttatctaaaatgatagattgattgtgtgcccatttctagcc

SEQ ID NO: 48845 - DNA, 228 bp, Ricinus communis
  Intron number 1 from transcript 29608.m000208 (locus 29608 .t000007) derived from phytozome v7.0 (chr-ID 29608; pos 8 9315 to 89542 reverse strand)
cagctttcttggacccaagacccactcagttctccttcttcttcttcttcttcttcttcttcttcaatatttcaaaatttttcttttttcgtttgatgttatgttgtttgttatgggtttgattatggaaattgaattctttttatgtttatattggtgggtagttaatgattttgatcatgtgtttctgtagagaggacttttattgtgttggataagaagttgtta

SEQ ID NO: 48846 - DNA, 399 bp, Ricinus communis
  Intron number 2 from transcript 29639.m000154 (locus 29639 .t000008) derived from phytozome v7.0 (chr-ID 29639; pos 7 1263 to 71661)
agacagttgatattaagttccccatattctccgtaattaattataagctgcaaagtatttaaatttttaaatccacatttgtatcacttgtgcctgcttgatttattcattagtttgattttttgtattttaaatccccattgtgttcatattgattcaaattacctgcttctctctgaaagcagttttcagaattcaaaggaacaattttttttggttgaaaagcacttttgtccaccacaatgggaggagtttttttatgtatcaacatttccttttatctcttctgcttacactttttaggataaatgctgatttattaaatatatttttttctttttcttctgtaatatctggttgccaggttattccatctctactaagccaacaagctgagac

SEQ ID NO: 48847 - DNA, 665 bp, Ricinus communis
  Intron number 3 from transcript 29639.m000154 (locus 29639 .t000008) derived from phytozome v7.0 (chr-ID 29639; pos 7 1772 to 72436)
attctcgacttcttggtggagtaactctgacagaggtagaatttcatattattcagttctctagatactatactgttattctattgtgcattatgttatttctatcttaaacacttacctttttcaagttttgagggctggagaagtaatttgaagttagaaattatgtagtacatcaaattagtttaaagttcatctctgtatgaatgaatgtgagactatgtgcttttgacttgtttattttgggtatggataaccagatcaaagagaataaaaaaaaaacctaagtatttaacaagtatagactaaattatttgctgctaaggcaattaagagattggtgaaagagtaaaattagctgtagttttaaccagtaaatctatgcgtgtcttgtgcctatcaaagtttttatggctgttgctatgtgctaaagcactatgcttccagaaccagaagattgtaggaaatgcgtacagaaatcctaacctgtagctgcgtccaatatgtccaagtatcttatgatgcgttttatccaagcatttgaaatctaatattttatgctatctgtttagtacgctctatatgttgtgtagggtttattatgctctcctgaccttttgactttgacagacaaagcaaccacaatttataactattagcccatc

SEQ ID NO: 48848 - DNA, 881 bp, Ricinus communis
  Intron number 2 from transcript 29709.m001225 (locus 29709 .t000061) derived from phytozome v7.0 (chr-ID 29709; pos 2 82402 to 283282 reverse strand)
aactggaacttggattgctggaattctaatactaggtaaatcattcatatctatatatttatatatgtaagatgtcacatgaaactatacgagtttttttacagttacttctggtagtgcaaccgacagtggggaatttggtcgtagagagtaggcaaacttattaggaaattaacttacttagattttttttctcttttatatgcataaacttacttaagtttctttttttcttttatgtaaaataattggattagcaagttgaaccaaaaagcccgcacttaaacaactgttaacagaagaaaaaggataccaaactcatgtagtctgtgcacatgtaattagctcggacccgcttgctgcctaaacgtctaaacctgtcggccataacttatttgaaaaaaatatattttttttcttttgaacattgaagaaaaggtttttaagacataagaacaatatctgtatatttcaagagtagaaaatatgtttattttgagaacacacacatatatatatcaaatttgaagtcagacgagcgaagttaatagtaattttactataaataattaagttatttaaaaaaaaaactatttctgttaaaaaaacaaagaaaattctttttgggatgatgacatggagaagaaaaaaaaaaaaagggtttaatttgaaatttggcatggacaacatacaagttgaatatagccatgaatataaataaagaaattaagataaggagtcgtgtgattggttttaataaacttattatgaaatggaaaataaaaagtatatatttaaatggttgcatttggatagaaatgaaaataataatgtacggaattgcagtaaatcaagggctggcaacgttggcattcttcgga

SEQ ID NO: 48849 - DNA, 708 bp, Ricinus communis
  Intron number 1 from transcript 28462.m000129 (locus 28462 .t000003) derived from phytozome v7.0 (chr-ID 28462; pos 3 1264 to 31971 reverse strand)
tattttgctctttgggttaagcatttctagaggaggtatggtttgtttggtttagtggtatctttttgtgttctttcttcaattttttcttttaaaattttaattgaaatttttgtttagttagttcaagtggggttttggatttatgtgatattcttgcatagcttaaagaatagtagatgatttttgagttctttttcatggcaatttttactgtgtggatatgtgattactgagaaaatatatgatcggatgctgtgattttgtgaagtttcatgtcattgtatgataaatttgggattggatctaaaagttataggagaataagaaacgactagtactattttattgttttctttttttcttttatcttcccctcatttgaatttggaggagctagctgagatttgtagcaaaaagctagaaagttcatatgttggtttgtagctaggtgataaaacataaggtctttggttggctatcatggtgagaactcgttgtaaaaaagataggattcttgtggtgcattggtttgtgcttttagtgtacaatgcttgcttgtgttattccgattttcttttattccttttgagatattgaaacataaattgattgttcattgtttttttatttgcatagctctttttttctaatatttctaatgattgatcttggcctaaattctctgttatgaagatttgcaaacgg

SEQ ID NO: 48850 - DNA, 595 bp, Ricinus communis
  Intron number 2 from transcript 27916.m000157 (locus 27916 .t000006) derived from phytozome v7.0 (chr-ID 27916; pos 5 8204 to 58798 reverse strand)
ttccacaactaaaggtggttgcaagtgagtatcttcaatttaaagcctcaattttccaaatttattggatttcaacaattacccatgtattttttatcaaacaatttactcccatgttaaagaaatcaattaaagttcaaaagattgtgactttatgttctttgaagacactagttattatgattagaattagagaataatgtggtatcattattctcttgaaaaatccttcccttgagcacagtctttcaataggagtttagagaactaacttctagatgaaaaacttcactggcagctcatttatgtcaatactactgcaaactcaaatgagtgacataggctagtagtagtaatagtagtacatgaacgtgagagaatgaagcataacacttgatgaagttacccttgagtaactacttgccaacaatatcaggtttcaagtggaattaggtgtcatagttatgtttctttaggaacttaaatgataaaaatttggtaattacgataacttctttttctcctcttatattgttgaggaacatctttgaaaagaggtttgattttgttgcaacatgcagattatttgagttgc

SEQ ID NO: 48851 - DNA, 654 bp, Ricinus communis
  Intron number 1 from transcript 29739.m003566 (locus 29739 .t000002) derived from phytozome v7.0 (chr-ID 29739; pos 9 458 to 10111)
gtcccattttcaggtcagttttcaacttctgcttcttgagctcgttgattatcatgttgggattttgaacaagttcctttctttctttctttgttgtgcgagtgtgtgtggtggtttggaaagaagtttgtatttttcttaagaaggagaattttaggtacgtttagcgaaagagaaattattaatagaaatgttgttgtcccacaaatgtttatgggtcgtgtgagagagatgatatcatgattcttgatgaaactataacattggttaggatgaaggaagagacttttagatatgtggctatgcatttgccattcccatgttcgatttttgggccaagtgattgaattaagcaagttttgttttttctttctttcagaatttaacatataatcctcagatatgttgatctttaactagttcattatatctgaattcaagaaattctgatgagtttttctttaataaagatatcctactagctatagacagtggatcgaagatccaataattattttaaggtatttttggtgttaaggtcaggcgcctgtttttgctgtgccaatttgattaaaacagtgaagcacaaataatttggtaaagccactaatgattggggttatgtggttgtaattgctatggagcagatttcat

SEQ ID NO: 48852 - DNA, 835 bp, Ricinus communis
  Intron number 1 from transcript 29708.m000185 (locus 29708 .t000001) derived from phytozome v7.0 (chr-ID 29708; pos 6 755 to 7589 reverse strand)
ttccaattaataaaaagtttgtagctttctttcaggtattatcttgtgtttcttctaattgaattccagtttcttcactcttcttgaatttttgctttcttattttccttcttccttctttgcgttgacttttgctggttatgggtttttcttttgtttctttatcttatgcttgatggatctttgaaagttcgaggcgtttgatgtttgtctgagtttactctttgttttaagatatgggtcctgggggatcagacctggaaactttttgagttttgtgttagatccgagcttttggatatcatttcgtgacttgtttcatcttgtctgaacggttaagtcacctgtcataaacggtgagatctgggtgctttagttgatgctcgacttagattagatgataaaattcaatttcttttgattctagtttttctccttgttatctaatttgtttgctctagttttaatttcagtagatctgcttttttcttttaatagactattgttttgatcaattggaaatttctttgtcagtcttctttctgaaatttgtgttttctattgaagttttgagtggaatttttggtgtttgggattttgtatacataaatattctctaggaattaagaaggctgatagttaacttgattgtgtttgatgatcatatacacctgccgtcttataaagattgaaaaaagaaaaagaatgatctgatcacatagacctccttaactattatgaactgaatagctttgaggggattttattttttattttttctcttctattgattttcacaggtctacatatattgagaagggggtaagaaagttga

SEQ ID NO: 48853 - DNA, 990 bp, Ricinus communis
  Intron number 3 from transcript 28582.m000324 (locus 28582 .t000009) derived from phytozome v7.0 (chr-ID 28582; pos 8 5375 to 86364 reverse strand)
tgcagtcctaatacggtcttgtgctcccattagtggtaatgtttcattgtattgcttgtcttaccattttaaattgcttgacctccttagatggaattttttcctctaatgtggattcaacggaacagttctgcttcggcacataaacaattaagcatgtctgatacatggttttaaataatggatgatatgttacatttgacatttggcttctcaatatgttagtttgtaatatgttataatagatttttgaacatctcagtttccctttcttattcattctttttagcatcccaaatttaaagggactgtcactaaagagtctttagctgcatttttaattttaccatttgaatgtgcagtgttcttaaaataattatagtagcggcggctgttttggtaaaatttggtccaacaccattataacgagtctgatagcgtaacagttgacaatacattacttgaaaccctgtacaatatcaaatgaaggaaaaagttgctaactactagtgtcagtgactaaataacaatcttactgcagttaaaattgttacataacaatatggaaccaaccaaataactttgcatattctttttcttatgtgaaatttgctagaaaggcaagaaatcttagattcagaatggtgataatagctttaactttctgcctaaaaccatgctgattagtatgtggcacagcttagatcataagtacttgctcaagatgaaaaacgaaaaagagaactagatataatttagtgcatctgtcacaagatttcagctcattttgatgctatgttttttctttttgtgaatttcaaatgtttatttatggattcttcattgagaatttattctggtgcattagtgtttcttcttgaaggaagctgtcataaagtactcactgtcattgtatcctgctgctttctcaaactaaatttgacctcaattgcagggttggataccattcagcagcgtcggggtcagaaa

SEQ ID NO: 48854 - DNA, 349 bp, Ricinus communis
  Intron number 1 from transcript 28582.m000324 (locus 28582 .t000009) derived from phytozome v7.0 (chr-ID 28582; pos 8 6599 to 86947 reverse strand)
ttatccttcagattactgaggtaattttattttatagttttatgtattttgttaaggagctgtgttcacattgtacgataaagaagagatttttagttctgggttttgataatttcttgattatttagtttattacctacccttttctttgattgttgatttggcagtacagcaagttagaactttggttgttattatgttaaaatactccaatttgtcaagtgatgaaataattttattttttttaaacaaaaagagagaacttcttttctttccggattctggtactgcgaccacagtgaaaaggtattaaggagttgtgtttgacaggttgaagcttatagaccta

SEQ ID NO: 48855 - DNA, 537 bp, Ricinus communis
  Intron number 1 from transcript 27496.m000095 (locus 27496 .t000002) derived from phytozome v7.0 (chr-ID 27496; pos 2 1158 to 21694 reverse strand)
tctctctttctttttgaagaaacagccgttttctcgtaatatctctttttttttttttttgcttaaatacggctacaagattcatttatgattttatatgtttaatttttttaatacaaggactgaatttgtttggtttatttaattatgtactataattataataatgagtgattgtgtatcttgaattgattattaatatatttatgccagccagctgtctaatctctgactattttggatgattaattgcctctgatattataaatattgatttttatatttggtatgaaggacattgctagttggattgctgataattttaagtaagattgctttcaatcctagttgatgaaaatattgtgttgtgactctaatgtaatcgctaattaagtttttttttttttttaaggaaaaaaaagaagaagaaattcctagaatttggttgctgctcattttgatttatttttatctgtgtaactaatctcttacttgtttgtagggaagatctttgctgaaaagtccctctcttataat

SEQ ID NO: 48856 - DNA, 975 bp, Ricinus communis
  Intron number 1 from transcript 29693.m002059 (locus 29693 .t000097) derived from phytozome v7.0 (chr-ID 29693; pos 6 67368 to 668342 reverse strand)
gcggtttcgggagcaattacgcctggacaggttagattctgttgagcattgctttacaattattattattattattatcttttttttttggttgatttgtaatgtgtatggttgtttctttaggactaatttaaggatttgtaatttacttgttatttatcatgattagatgttgtaatgctagttttcaaagttgctatgattacatttttgaactgatctttgcactgtaatgatacatatttaaaaagcaagacgacgatgattcaattacttagaagcttagtgatgcacatcgattattctgttgtttatatattctatttaatgacttcaaaaattagttttcaggttttatttgctaggcctagggatagacttctaagttctgtttgatcaaatgctgattgtaacttatgttcttccattcggaggacctagtgttttgctgtcaaaaacagtttctcacactttttaccgcattctgtaaaatgctaatgattttgagatgatatatgtgtatagcactgcagttttagctgttttatttgtttaaacttgatatgtttcacatatataatgaagaagcaataaactgttttgctcttgcttttttctttttcttgccactaactgctttggtttatcagagatttgatgtacaagtgttgcaaaattttggtttaagtttgagttgtctatattcttacaatgtgttattgatatgtgtctaatacacttttgttttggcatgtcaatgattcttctgatatagaatacagatataactgaaaaggcactataagatttgcttgtatttattcaaaagtgctttctgcatttttagcatttttgggcctgttgtttgtcttgcatagctcatttttctccaagttatggccacttacatgcctaatggagtttctttatggtgtctcaggtgtcctttttgctcggaattatacctgtttttgt

SEQ ID NO: 48857 - DNA, 507 bp, Ricinus communis
  Intron number 1 from transcript 29691.m000279 (locus 29691 .t000002) derived from phytozome v7.0 (chr-ID 29691; pos 7 088 to 7594 reverse strand)
caggtctctatctattcccctaatttctttttattttttttatgtcttttagatcaactgttatggcttttgtggagtatatcatttgcatgaattcaatgtcttgcacaatcatgtcaattaactaaagaaaattcagttgaattgaactcttttagactttccaaacagactcttatttcctgtaatctcaacagccaaccaacagtcttttgtttgtcttgaaatggaattgaaatttcttacatgcttaactgttcataagttacctaattagtctattgatgtgattaatcttcgattttgaattcttttggagtgtagaattgcttatggtcctgagattttgtttctctatttgatgtttcgcaatcatgtgatgaaaaatattttaattcttaatccttaaaattatgtatattacttactgatagcgattggaaagtgggcagtcccatttaaaaagtatttcttctgaaattgctttatttgtccatttttctttag

SEQ ID NO: 48858 - DNA, 763 bp, Ricinus communis
  Intron number 1 from transcript 27389.m000068 (locus 27389 .t000003) derived from phytozome v7.0 (chr-ID 27389; pos 1 9457 to 20219 reverse strand)
gaagggctctctgttatctgtaggccggtgttgtctagttaactcagttattcaaagctcttttattcatagctttatggtttatagatgggcttctaagcttctttcgaaacttgagaaatttcatttggaattgttctttcgccaagaaaaaggacatttctgttgcttggcattattgttgctctccaagaaatgaaggtggtcttggcattaaaaatctcaagattttgaattcagcaatgctctataagttttctcattctttaatggaggatgagtcatttgttttctgattcttgcgagctcggttttttaatatcaggaagctacccagattggttacttctttggtctggtgttctatcaaaaatattcctgagcattttcatagtgagtccatatggctttttggtgagcgttctaatctcagtttatagcatgacaattgattaggggattctctagcttctaaactgaacattcccattcataggaggaagtttctctcggggattgttttttatttctatattgagaatgagtggcattttccttcttatttctctttggcatttccagctatcgttgatgaaatccaacgtctccaccgtttccaatcttctgatatgttgatttggactgttgcttctcatgggaaagtttcctgtaggttggcttatgatcatctttggacgcattatgtcgtgcattcttggtgtaagcagatttggaagcatttcattccgccttcaaggtcagt

SEQ ID NO: 48859 - DNA, 441 bp, Ricinus communis
  Intron number 1 from transcript 27504.m000627 (locus 27504 .t000019) derived from phytozome v7.0 (chr-ID 27504; pos 1 46757 to 147197 reverse strand)
tacaggtggctcggaattctctcctaaaattcgtttctcatgttttttcttttccttggtttgcattaagctaaattctggaattatacacggaagttctatcttgttttcttctctttttgttttttgactctttagacaatatcattcttgctcattagtcaagaatgattgtaatcatctcaaagctttgttcaaaaccattggagtctatattagcaaaagaaacaggatattattttcctttatgtttctgaaaatttcaaggcattttcatatcacatcaggtaaaattacattgaaagaagatttcatgtttatttggatgcagtggagagatttcagtgaaactgataaatgaatcatttgtgtaatttgacaatctcttgccttactttctgtgcagaatcaggaaaaaggcagaagtgggccattatcatc

SEQ ID NO: 48860 - DNA, 814 bp, Ricinus communis
  Intron number 3 from transcript 28738.m000150 (locus 28738 .t000005) derived from phytozome v7.0 (chr-ID 28738; pos 1 27625 to 128438 reverse strand)
aggtatgcttttgaataatggttgtagaatttttaatgtgtgagctatatgatggatttcatgtttctattttttgctctagtaagtcttttgctattttttcagtcttaagatcatgtttggtattttcttcaatgaagatgtatatctgagtgcaagagtttttttttttttttttagtatttgagataaccaaaagatagttagcagtatttgagggaatgcacaaattgtataattgatgttatctttactaaaatcaaccatttttaagtacattaatatgataaaaatttgggtaggagcggaagatgctagacactgaaggactttgaaaagaaccaaaatgagctccaaactaaaatatggaatctgactccaagattagaattctatttctaattccataatgtactaaatgcagtgtctagatttgaatgcttcttgcttaacctatataattggccataattttcagtgcattagtaatttatatttctctttcttagaggttccattaggaagatggctaataaatttctttttgaggattcttcaataagatgataacgtagcccattttttttctaaaatttgtttaattgacgtagttattgtgataactgttactatttgacatttttcttttgttagttggttctgcaggcttgctctatgataaggaactttaatctttggtgctgaaagagcttagatatagttgttgcttaatgttttgataacttgttttgtttgtgtacttttttaattctttgtaggctaaatttctgaaagcctgtggtacattacccga

SEQ ID NO: 48861 - DNA, 1030 bp, Ricinus communis
  Intron number 1 from transcript 29617.m000137 (locus 29617 .t000006) derived from phytozome v7.0 (chr-ID 29617; pos 3 4258 to 35287 reverse strand)
agaccgattccctttatcaatctcatactgaaaaggtttgcttttgcataaatttttctttttggttttgtttttgttccagcatcctctcagcagccaaaattgcttgtatgctgtgatggagtggttcaatttgaacctaattcttatatatgactattgtatctattcatttcgtgagttctatgatatgggttttatctatttcattaaagctgttgcttttgctatctgggtttctctatctaaagctaaaagtacgcataaaagctccgattttcttgctttcatgcaaggctgacatagaaaggggcacatgcttttgagagtctgagtttgcattttaattttatacttggaaatatgctggtcttttggatctttatgttaatctttgctatctaattcagctatttgattcaactcaaggaatcagttgtttccccatctgcttttcttctgttatactttagttccctgcagaaagtttttttttttttttttaaatttttttcccttgtttcccatttcagcatctgttttcaataagtttccttgtatagttcactcctttgatcttttggacaaacaatatcttttagtctggtttgtctctgtatgggcttgtttgtttgaatggaaaagcataattttgtatctgggactctttggctggagggttatgctttatgaaaagtccatagcttattcttccagggctatttatacttaaatcttgaactttctcgtttcattttctgtaaacgagtttttatgagaaggattctgataggtgattattatattaacatttatgttgaaaaacccgtaatgcaccttgctttgagagttaggtgggttttggcattccaggcctttttcatttcacattcatgtactgaattataattttagttatctctgttagctataaatttgtaccatattgcaattgcatgactttactttgaagttaaacaatttcactgctacagggaatcagaagactttgctgtgagctattggattt

SEQ ID NO: 48862 - DNA, 836 bp, Ricinus communis
  Intron number 3 from transcript 29588.m000862 (locus 29588 .t000017) derived from phytozome v7.0 (chr-ID 29588; pos 1 16971 to 117806 reverse strand)
cttaatcaggtaattatgcaggctaagttgaattccgtttttaagctgttattggttgttgttctgtttggtggattattgcaatttgtttgtcattcttatacgagttagaccatttcatgcaaaaattagtcatgttttcttggtgctctctgtttacaagtgtaatgttcttcataagtatcctttacataaattctgctcttattttcttctgttttactttccaagaccccaccatcataatcttctcatgattccctcttaaatgattctgtagaatttttcttttctttacaaaaaaaaaaaaaagaaaggcaaatgaatttgctttttctgctggctgtacataagggttgcaactccacttgtcacaattctactattaaagaacctttctgttgtcaaatgttaaaataatttcaacatttgtcctataccaaaattatttggactcccttacgatctttgatgaatgtcttaaatgggcaagatacacattatctagttgatggaagtccatccttccatgtattagtttgtatatcagaggactatacttttgaacctttgaactatcttttgtaaacatctggccagtactgagagctggtatttaaatcctctgaatccttatagatagctggaaaaaaaaattgagcgatttttagcatcattgtgaagcaaacatttgctcctcaccttagaagcgcagaactgtcgaagactgctcgtagttggatcattttcactttaaaatgctgatccgttctatgatttataccttgtattattttgcaggggcagtccaccatccacatcaaaaattgaagctg

SEQ ID NO: 48863 - DNA, 757 bp, Ricinus communis
  Intron number 2 from transcript 29648.m001969 (locus 29648 .t000056) derived from phytozome v7.0 (chr-ID 29648; pos 4 06534 to 407290 reverse strand)
aggaaaaggaagctctttttcatcaggtattcttatgtatatattttcttaattttgtttcttcttgtttttgatgttcttttcaagattttgtgttactatatggcattttttttctttttataaagaatttttagcctgggtgtggatctgttgaaaaagaaaattgaggttgcttaacgattgaaggagtggtttctggtgacaaagacttaattctacggcttggtgttgatttactaggaagctatttagcaatacaacatgttacaggattttcattatatctccagttttcgttcaaccaaagttaacatgagctgaagacgagtttttgtttattcttcttcttttttattttttttcctccaataagagtgaagttcaagagggacatagactttgtttcttggttgcttggtttctttttttgtttgggtggggttttggtacaatcttacacaattcaaattatatatactacttcattagattagtgacctaattttcttctaagtggctttatatcctttttttcattgtatttagattgtagtaagaagaatttgcttcattggttcccaacttttcgtacttaggatgtgcatctaccagttgttttaaggcctgatatatgccaaactacatggcaatttcatctcttctttttaatgtatttttactttctagtaaccttcatttcatgtgattgttccatctaggtgtctcgactcgactcaagctatcctggaggttt

SEQ ID NO: 48864 - DNA, 958 bp, Ricinus communis
  Intron number 3 from transcript 28842.m000929 (locus 28842 .t000024) derived from phytozome v7.0 (chr-ID 28842; pos 2 27673 to 228630 reverse strand)
ggatctgtggtaagtttggcataggcacctagtgtgattagttattgaactatagttcctgtttcttcaagctctgtctctgtggtttcttaacccttttgattcagaaagcagataagaaataaaagcaacagtcattagtagttgcaaatacttgaagcaatattgtgatcacacgttagatcagcaaaagaaaaaaaaattattacactcaattcagaaagaatatctctacagattctgcatgatattatcttattaaaatgatgagtttctctaattcttttgtgaagtgaaactatgtaatgcctctacagaaacaagctagggacctatttcactggactggtttatttggttatttttcatacttgtatttgtgtatatggttctttagttggaatttaccattttctggtaaattgttgcttgccttgtaagtttattctatgagcacaatcagaatatggtgtacctgttataggaaaatagttaacgttaaatcttcagtttcacttttgcaagaccagaataaaatgaaacagttgaagttggaaaatatgggcaatgaaaaattgtatattggaacccaatatatagagaacatacataacatgtagaacaatagaagataacttctatatgcaattttctaattgagcattgactgagaagggaaaaaaatcatcgcgatacactttttttaaccgtaatcaggtatttagatggccccaatgtcctgttacaggtatttttatttttgttttgttttgccttttctttttctttttttttttttttttttggtggctggatactgtcataacctctctggtatattacccagctgccacccccctccctttcttttagtctcttcttttgcaggcaatgcatgtccttaattttatttttcctccttccatgtatttaccgtctcactatgcagactgctgtg

SEQ ID NO: 48865 - DNA, 268 bp, Ricinus communis
  Intron number 2 from transcript 28842.m000929 (locus 28842 .t000024) derived from phytozome v7.0 (chr-ID 28842; pos 2 28683 to 228950 reverse strand)
agcctggtgagtttttactcactgctccttgttttggtttcctcttcttacaatgaccattctttggcaatcgggcgtaatggttttcttaatcgggcgtgatggttttcttttctttgtccatttggattgctgcatcttttgattgtattattctatttggttgatactattttaacactgcaaaacattttattttactcgtattgactatatattcttgttaattgtaggcacatcagcttgtccagctgggaaattttattgt

SEQ ID NO: 48866 - DNA, 1012 bp, Ricinus communis
  Intron number 2 from transcript 28592.m000290 (locus 28592 .t000018) derived from phytozome v7.0 (chr-ID 28592; pos 1 02207 to 103218 reverse strand)
ggttagtacccatttgcaatttgcttctgtattccacttttcatatccaattctctaacagtttgtttggcaaaatgatggtaacgtaaggcaagttttaataaagtaaacaaagataatgttttaggagatatgatagagtttttaattttcctttattggaaaagaacagatgggcaattgagattttagaaggtaatacagtctttcaaactattatctccatttggtgaatcgcaggttcttaagaaaatttcataaaacgttatttcctagttagtattttctttcagaacaaaaatgaaagtgaaaaccttataaaacattagaaaatcaatattcgaaaacctctatttaaacaggttataacactatttaataaaaaaaaaatcagaataaaataaggtaaggttccgctcgcttctcctacttaggggtgccgtgcccgccccctcatcatgaggtttgattttactttgtgcggaaagagcatatgctaaatagagatttcggaaggcagtatagagttttctatgttatagtcttttaatccaccaatctggtgggttgaggtttgaaggattttagaggttttcaaaagcccctaaaaatctcatctcttactgatgctttctttccaaccctccaaaaaaggattggagatttaaaaaccttatataactctcagaaacctccaaaaattttcatgtgaggcggctagaaatatctatctgactatgtctactttcacttgcctaattgtgtgccttgtatttgtaatttcactactggttcctttatgatgctttcaatctataatttagatacacttatctaagctactcttttaagacatggcacaagcgttatagaacactttcatttgaataaagaaactttgatattataattaatctttagcctcactactcacttgtatctcaagagattcatttggtttgtttctatctcaatagattcatctggtttctttattgcagatattcaactt

SEQ ID NO: 48867 - DNA, 609 bp, Ricinus communis
  Intron number 1 from transcript 29813.m001513 (locus 29813 .t000065) derived from phytozome v7.0 (chr-ID 29813; pos 4 26286 to 426894)
aacttcttttggtaatttattttagtgattatactattgttattctgttgtttggaaagtgtaaaaatgctagaattccattgaatttgaagtgtttggaaagcatatggatactaccattcagttctttcaatgttttttggcatttggcatttggcatttaaaaagtaataatgtcagacatgattttgctggagttcaattcagttggactcctgcacattatttattccaaacaaagcctaaacataaattggagaggaaacagcttcatagctggctatgattattatgctattttctatttgcatgcaaagaaaactatacatattaagagcatttattctcataacaaaaacaaattcgggtcaaatttcctgtgatagttttactgtaaggcagcgaaggatgtattaatgaattgcttcgtcagtagtatctgttagatgttgattttcatttatgtaagtgttgagctattatgttgctcatgtgttgggcattattttagaggtttccaaattgtattcgttgcatgtattgcttaaactgtttttctcaatttcttttccagattattggagaacctgctgttgttagaaaggctct

SEQ ID NO: 48868 - DNA, 643 bp, Ricinus communis
  Intron number 2 from transcript 29794.m003405 (locus 29794 .t000104) derived from phytozome v7.0 (chr-ID 29794; pos 6 86565 to 687207 reverse strand)
aaggaatttttccaaaaaattgcaagaagttttaagtgagtcgctttcatctgcatcttatgtaattataaataggtcatttggctttctctggatcatgctatctgttttatggtattttgatttaccatactaagttttgcaatcttatcttacttatattagttttattatattagtcatgttatgaaatttggggtgctgctcttaataaatttcgaacataagttacagtttctatccaaaactaagaagaaaattccagttgcagttgtcttgcattattctaggcaaacttaggattcaaattcgccagtgcacagactctcattatctcccaaatcccaagtgcacggcattgtttgctatactttataacacttggaccacttagttttaatatgtctttgtgtatatgggcagctatatgtatatatagattcacatcaggaaagtacaaaacctaccaccagtttgcatcaatttccttctgttctttggatcaaattgtagaacatgctgcacaacttagacatgtacactcttgaatgaaaaccactgttttgggctttaagttgtcttattatttacgtgtcattgccttgcagttactcttctgcccgtgctgggaaacctattgtta

SEQ ID NO: 48869 - DNA, 798 bp, Ricinus communis
  Intron number 1 from transcript 29794.m003405 (locus 29794 .t000104) derived from phytozome v7.0 (chr-ID 29794; pos 6 87247 to 688044 reverse strand)
agagacaggtgttctctggcttctccaagactgaggtaaacaacaaagcttttttctttttcttatctatatttcgtttctttatgccggtattttattaacttttccaatcaatacacaactgtgatagatgatatagcacttaattttgcatccgatactattaggtttttgcattgtctattgtaatgttctgatttttacatttatatttcctcttttgtctgtcttttttttgatgatgtggttttgtgtttggttctgataggacacttaaaacaattttatggtatagaaattgaaagttgagatgttaatttcagccacgttttggtagtattcaataggattatcagattgtaaggcatttaatgtggaaagtttttcttggtttgtcgattgtagttccagaaactgaacatcctgatcaacagaaaaactggggattctataactgtttccaaacatgaaatgtttgcatagtgttggttcacttctttgagttcttcctaattgtgagtggagagtacatgttagattaatttattttgttgtttctatgatgcactatatactgattgaagaaacttagtttgttggactttgtaacattgtaaatgttctctttgggtgatgcaaagtctgttcactctgctattggcaaggttacatgtttcttctgggagctctgacaatctattctgctgacatgattgcctttgacatttttgctaatatttcattttcatgctatggaatcatgctttattcttccttcatccaagccagattgaaaag

SEQ ID NO: 48870 - DNA, 679 bp, Ricinus communis
  Intron number 1 from transcript 29736.m002115 (locus 29736 .t000111) derived from phytozome v7.0 (chr-ID 29736; pos 8 02546 to 803224)
ctctgccaattcaggttactttcagctctgtttttttattagttttggattgaagggtagttatatagatatctacgttttttatttgttcatgcagtgttcaagatacgaagccctcactttactgatgtatttaatcaatcttcaatttataattttggcatttaagttcgtaagattcgttctttgtttactgggaactgtgcttcgcaattcttaatggcagtatttgaaataaatgatgcacaagagttctatattcaacggaactcttgcacaatttttttgactttttttcccctctagctgaaaaattgaattcttccgcacgcaagaattgactaaatagaactaaattcaattgcgttttttgcatttcctttttcttagtaagttgatttatcatcgattggaagccctttttgccatatatgctgttgagtcaaagccttatcgagagaattgaggaacacaagtagagcaataattgttcattgatccaccctttcgtgtagaataataaataacaaagaaaggcattgtaacttagtaatcgagtattgccttatagagctacagattcaggatcaaaccccgacacctttgtgtgctttaagaatttcctatgtgtaaaagaaagtaacttggattatgctgctttcctataggaattgactgg

SEQ ID NO: 48871 - DNA, 711 bp, Ricinus communis
  Intron number 1 from transcript 29736.m002024 (locus 29736 .t000020) derived from phytozome v7.0 (chr-ID 29736; pos 1 89292 to 190002)
ccaatctaatctttgaacccaaaaaacgtttacaggtatgttcaatttcttctacgtagatcttactaaattatcctttggtttctgtaaattgtagagccacatttcacgttgttgcttaaaccattgaattttagcttcttttaaacaaactctggcctttctttttctttttgttggctttttattaatttctttgggtggttggtaaggagtttcttatgtcaatctatctaaattattaatgggatgctgatcgtttgacagatatgttcaatgtatgtggttgatcaattggacaaaattgaaggaaaaatggtctttaatggtcaaggatcaaggatattgcattttaatggtctttaatgagtgaaatagatctacaagaatgtgaattgattgaattgtaggagtatattgtttgagttcatgctttaagaaatgtaggaacaagggaatttgatgaggaaatttttgcatgtgaagctgactaggcctgctatttttttggttttccaacatggctagaactaaagaattcaacataagtaaatctcctaaagcataatctcacactatagctaagttacatcaaaaccatattacaaagtcaatagaattgagaggtattcattaattttttttccatgcatgtctttacatttaaatgaatggaatcgtaagggaagtcttgttctatgcaatatagat

SEQ ID NO: 48872 - DNA, 522 bp, Ricinus communis
  Intron number 1 from transcript 27471.m000412 (locus 27471 .t000012) derived from phytozome v7.0 (chr-ID 27471; pos 1 02818 to 103339 reverse strand)
gtggcttcctcgtatcggcgattggatctgcaccggttagatattcctcttatccttcttgtttatgcttcatgtggattaatagattagggttttttgatattttttcttatgtttcttgaattcagttcttcatttcgttatctgtctctgttttagggtttagggtttaggtttagctagatattcaattttttcagggtttatttgcttatttttaaattgttgtctaatgtagcagattatacttcagtacttcgtgcatatacatttcagtgagaaaataagtaatttttatttgtttgtgcttgtgcatatatgaaatggaatgaaaaagttgttttattacaaagtcaggttgagttgagtgtggtttgtgttttttgtatgtgtaattttgatgtggtgggatgggctggttggtgtgcgtatacaaatacatgggcttcctttccatcttcgtggggttgcgttgcgtgtgtatgccaattggggatcaaataggttgcactaacaacaatt

SEQ ID NO: 48873 - DNA, 929 bp, Ricinus communis
  Intron number 1 from transcript 29647.m002037 (locus 29647 .t000045) derived from phytozome v7.0 (chr-ID 29647; pos 3 13293 to 314221 reverse strand)
agtgagaataaggatacttcggcagaactccaaaggtaatatactttttcttcaattttatgatccccatgttgatgttatatgattaaggtccttattcttatgtaatgcttatataattaacttacagtcatgtactcttctcaagcttactatcctggaaacttgctagctaccgcctccatctagtatggatgtccatcgaatcaaaatattatattcattattattatggcttttcgtctggattcaagttttatacattctgaaaaatatcacagaaattgagtttgatatatagttaccttcacgcactagatttcctgacaattgtaaatgaaaacaataataactattatacagttaaggcttcagcacagatagtcccaaggaacttcttttaggaaaaaaaacaatcttccaatattgtcaacaagagatcttttacattgcgaatggattgaaggaggaccatttttaatcatatttggctatttaaacttcctttttttatagaattaatttataccacacagttcttttgcttttgtaaacaggtaatgtaattctgttgctctgattgcagattgggtagcaaaaacaactttgaaggaactattcctagttgctgggttgctaccctccgatgttaaccaaactgtctttttgatattaatacgacatccttttaattaatcactttttttttttctgttttcaggtgttttttttttactctataaagtctttagccataaatataattccagtaacaaaataagggtaatgcataactgtgaagttcccagacatgcattctgaattctcatttctgcttaattagcttgttatctgttatcaagatgtgttggagaagtataaatacatgttaatttactgaaggaaaaatcttggcagggatatcgttg

SEQ ID NO: 48874 - DNA, 589 bp, Ricinus communis
  Intron number 1 from transcript 29676.m001652 (locus 29676 .t000043) derived from phytozome v7.0 (chr-ID 29676; pos 2 94030 to 294618)
atactgatcaccgcccatcttttgtcttggacgaggtacttggttttgttattacttttgtcaacatcaataattatacttacatattcatcttccttcttcttgttgtaattttgaaaaagtacaaattaattcaggtcgattcttctttattatttctttttcattgaaattagactttgtagtggatgccatgtttgaacaagaatactaaaattttgtttgactttaaaattgttagaaaatgaaaatttcttagttagttttcgtatagctggatagggtttttctttttgttttttcctttagtttgtttttactaatttgttctgctattttattgtattataatttaagaagtaaactaattagcaatttacaaactgatataaagataagaatctaactataaatgtagaaccctagaaggaatgaagaaggatcgaaatatttaccattacatactctctttttcttctttcttttgatggaaaatatacgaattaatatgtaagagaaaaagcaaagatttgtaagttcattttcgtgtttatttcataaagtataacagaaggaccccaagcgaggc

SEQ ID NO: 48875 - DNA, 593 bp, Ricinus communis
  Intron number 1 from transcript 29757.m000730 (locus 29757 .t000025) derived from phytozome v7.0 (chr-ID 29757; pos 2 10780 to 211372)
actttgtctcttcttccaccttcgcctcttttaaggttttaatttctttttgatttgttgcgccactgtaattcagtttcgaaattggtctgttcttttactcagagctgcgaaacgagcaaagagaaaaaaacaaaattttaatttactattgttgttattattattattactattattatcactgttgctgttaatttgtggttttggaattgattaagaaattgagattgctagaagaggaaatgatactaaaactgctaaacggtgatgaaaaaaaaacaaggaaatgaaaaagaaattagagttgagttgggttttcatatacttaagttactgtgtacgattaggtagtgatgacatgtttgatttcttttaaagcagtacttaactaaattgcttgaagttattagattgcgtgattctttatttgtgtttagttgagtgctatatgggactagcattaatctttatgtggatattctatattttttgggagttgagctgttctcttagcttaaaagctgtatgttttcttttttaattttttggtttcaggacagctttgctttcccagtgtggaagaagggagt

SEQ ID NO: 48876 - DNA, 936 bp, Ricinus communis
  Intron number 2 from transcript 28492.m000467 (locus 28492 .t000005) derived from phytozome v7.0 (chr-ID 28492; pos 2 2770 to 23705 reverse strand)
tcaaaatcttctgctcctacaccttcttctccagggtaatgaccgttattttttctaattcccaacctgatattcacttttgcttttgatgatgaatgtctttggatattgatgttttaccttttgagtttcaaatacgggcaattcatataatgattcattattaatactaatagctgtgtaaactctaattaaattatcttatattgatcatacaattaatgcagtcatttcttttttataaaaatttaattagtcattaagatattgttcattaattgactggctagactaattttcttttctaccattattgcaaatggctatatttctcatactttctgaggttgtcagtatgaagagtttaaataaggcatggcaataattgctagcacttgcaactttcaccgaacgtgtattgtacttggctccttctcataaatagttgcctattcctggtcttccatccatttcattattagacaattctttcagaaacagaaataagaacttccaatgaaccttttcctttctccgatatctctctctaaataatggagaggagttaagagatttatttacttttgtcccttatgcttctttaaatttagaagccatttttcagtatggagacactatttaagtgatttgaaatatataaagacatcatgctttaaagtgaaacttatagtatctgaacttcatatataaactattattgcatttgaacagcaacttattgtccacaaaaatgaaaatgacaaaacaagcagagatgggtctttcttattgaatcaattactatgcccgcattttccatttatctttttccaaaattaaggagcattttatgtgtttaatgatatgtgaacgatagttagtataacttcactggtatatctttttcatttcaatttctccatttttcacagactg

SEQ ID NO: 48877 - DNA, 1000 bp, Ricinus communis
  Intron number 2 from transcript 29308.m000179 (locus 29308 .t000005) derived from phytozome v7.0 (chr-ID 29308; pos 3 5219 to 36218 reverse strand)
ctattgaagccatcaaggtaaaataaatctaaaacctccccacaaaacccttgtttgtttttctacaaagtttgattttcttttttctctaaaaaatttgttgctacccatcatagatgtttgacttcttatgagtaataatttggttaaaactgtttttctggggaggctgtaactgggttttaagtgattagtgttcagtttatcttaacatgctaattttgacatgattatcatgtataattcagtaaggggcataataattttttggaatttttgtgtatcttagtgaagaacccagtactgagacatttagaatatttaactaggaaaaattgctgtctaatcaatttaatctctactgagttttggtattaacaagtcttagaagtgtaaacccagcaattagctacattctttgcatagagtgtagatcaatacattgaagcttatgagttgatcctgctgaatgaactggatgctttatcaattaatgctatcttctaatagtcttatgttcctttcataattgcataatgtaagtggagttatttaactttatttcttgtttattttaggttatttcaagtgctaaaattgcatgttatgaaattgaagttctggagaatgctaacttactgagatgaattagcctttgttactttgactttaagaaattaaggaatgatccgagtgattctagtattgccataggtgtgtttcaaacaaattgttgtatttactttttattttttattttttattacccatgtcctattatcagaatccaatagcaatagcctcaacattgaggaagtggtgactggggagttttgatttaatctcccacaataaattgttatatacatataattctcaatcatatctccaatgttctgctgcaaaatcaagtctttgatgagcttatttaattgaaaataacttgaatctaattttaattacagttaggttccactgcaattgggttaaagacaaaaga

SEQ ID NO: 48878 - DNA, 1022 bp, Ricinus communis
  Intron number 1 from transcript 29662.m000467 (locus 29662 .t000021) derived from phytozome v7.0 (chr-ID 29662; pos 2 06723 to 207744)
ggttttaggggatactcggtaatttctttgctctttaaaatttatttattttccttcatcattttaaacttaaaatctaacaattaattcgagcagatttaaagaaaaattggataagaaatctcccattctcacatcatagcagatgggcaaaactgtttgataaagtctatgacaatcaagattcttgcccctctttcaatttcttggtttcaattatatatgtctaataaaattgttgttggagtcttcgcctctcaaactaagaaaacatagaacaaaatatagctaactaatacgattgttgctagtctctccacctctaagacttaaggaaaacatcattttttcaattctggaaaagaagaaaacatagctaaagtatcttggtcaataagccaagaggccgagaataactcagactcttgtttgtgctaggattttgatcttctttcttccaattaatcaaatcaaacaaatcaataacctttgttgcctaatgaactttgtgacattttttttcataatttatttaatgttaacatattactctccgattcatttttattttgtaaactgagtcttgctttgaccacgaattttttctggtttgaaaatgtggtcatttgcaatttgctttcagaaatgctgttttgagtttgttgtggaaactttaatggattttccttccctttatggagaaatttgaatgtttctcagttactgcatcaattaactatagctaatcccctcttgatcccttctatgaggattgataaaaatgtagatagaatgaacaggttttgataccataaaatataagcagattggatatcatatgttaaaggttgagaactttgtgcccaaattattctgcatgaagtagttaaattgctaacttagtctggaaggagtgttcctcttttctacttatcccaataagggaaagaaaagggtatttgaagtggtctgttttcacttactagtattcttttgtatcaggcctgaatcattagtcatca

SEQ ID NO: 48879 - DNA, 471 bp, Ricinus communis
  Intron number 1 from transcript 28455.m000361 (locus 28455 .t000008) derived from phytozome v7.0 (chr-ID 28455; pos 1 06358 to 106828 reverse strand)
taagattcgtgttgtccccaatttccccaaaccaggtttcgtttcttttttgttctggccaccctttggtttttattctatttggtcactgataaaaaaaatgcagaaagatagcaactttttttttgagaaaaaaaaaaaagaagaattttagagacaaaagaacaattcttcagcactactggattttctttatctgtctaaataacaaaatctcatgttctttctttgatacaaaaattctgcagcaataaatgcttcaattctttgaaattttgaaagttctgttctttctttttaatttgtttgttagtttcctacttttggcaataagccatttaagctgttgggtttcaaagttttgttcttcacttcttttaatgcttgtagtttattggtagacaaaagaaaggttttcttttttctaataaagtttgataattggccatttcttggcaattggcaggtatc

SEQ ID NO: 48880 - DNA, 981 bp, Ricinus communis
  Intron number 1 from transcript 28359.m000281 (locus 28359 .t000009) derived from phytozome v7.0 (chr-ID 28359; pos 1 81483 to 182463)
aggttagatcactaatagccaaaacactagttgttgaagttgatcataagaatgaatttataaattattaacttaatgtcttcacttgatatatttatgctagttgcatttcttactcttgttcagatttctgaaattttgattcaatatttaacttcataattgctgaaaaagaaattataattgagaacgaacaggctgcaaccattaaattaaaaccacaagaaatgttcctgtcacacaaaacttcgatcacaatcgtagactgaactacaattcaaaacagcaactacaatggctagaactatgaagttactacaatgctcatactataaatattccacatagggatttcctttacatccttctatatagaaatccaaatctggagtttgttattaactgcttaaaagaataattattaaaaaaaaacctaaaattttgttccaggtgttgatatatggttgaatctaacctattacatacaaaatatatcatctccctacaaatcactgcaaaaaatagcaaaagaaaaacaaaaaaaaaaattaatgtcccgaagaacaaataatgaaagaaaaaaaagttatcacaatgtcccaaatgaattgcataattcataatcacccattcaaaaataaaattaaataaacataaaaataaaatacctcgtgttctctaacgagagtctggcgatcccaaaggagcaaagaagcacaaacaaatgctatgaaaagcaaagctaatcttttgggtctttttagataatacgacggattacaatacctccacttgcttgatgacgacgacgacgatgatgatgatctactgcttctccccatttctaatctcccaatcgcatccaaaattctgatgaattactatattttaatttattatataacttcctctctttcttgtatttagatataaaaattatttgcagccgatctatccaacaaaataggaacgaaagaacaa

SEQ ID NO: 48881 - DNA, 418 bp, Ricinus communis
  Intron number 1 from transcript 29765.m000740 (locus 29765 .t000022) derived from phytozome v7.0 (chr-ID 29765; pos 2 07303 to 207720)
tcctctcattccagcaggtgatttctctctatttctctctctttacctttcatatgatcatcaattaatttgatttctgatcacatagattgaaagttatgtggtataatattgctacatcatgactaacctttgatagaggttgccattggaaataaatgctttcctttattttggtaaccagaactttcccatgtttgtgaatgctgaggatttgtgacgtttgagattgcatactgttgtttaagatgctgagttttctgtatgaaggactcacttttcttctcccttgaactgcactctatgcattttggcagatgaaaaaatatattataaacatataaggagtgcccgtcatgttttgttgtatctgtgactatcctgtgacctcatcttttcttgtttttgtctttctcag

SEQ ID NO: 48882 - DNA, 820 bp, Ricinus communis
  Intron number 1 from transcript 27894.m000802 (locus 27894 .t000030) derived from phytozome v7.0 (chr-ID 27894; pos 4 21566 to 422385 reverse strand)
ctggcaaaatcactttcccttcttgccttaagctggtctgtttctttttctttttgcaaaaattccattatatcttcttttgtagaacttttgaaatttagggatttcatatatttgttgatgtttatgtttccttttaatttttgcaaatatttgggattgcatgaaatttaaattattttattttatgttctcgaattaatgaatttgaatttttgtttgtatttattcattgttgttcatgctgtgaaatttagctttgctaggttatagcattaacttctgtgttagaaaggggggaaaaaagaaagaaaaacggaaaatgtgggcatctaatttgaatcttgaaagcaaatgattttgacctgttttagcaacaagggatattacaatgatataacaatgtttgcttcgttttggaaagataatttttaatgttcatggatatgtttagcctaccaaaagattttgctaaattttcatagtagatgtgctgtaatcacattctggatatgcaaatttagaatagtatggcagtacatatattaggttgctgagctgaaaggtaaatttattgtgttgtataatatttatggacatataaggtatttgttactaagaatgtatctttttcttttcttaatggtctcttttttctttccagttcactttccatgaaagatgaaattcttgacaattggactgcttttggattggtttagctgcttgatttattttctctcactcattactgttctctgttccaaatttttgcaatgtatgtcattttgttttttgttgcaattgcagccaggtccgc

SEQ ID NO: 48883 - DNA, 954 bp, Ricinus communis
  Intron number 1 from transcript 29673.m000937 (locus 29673 .t000038) derived from phytozome v7.0 (chr-ID 29673; pos 2 75361 to 276314 reverse strand)
agcttataaggtaatgaagagattgatttttgtttgaatataaattatattagtgatagaagagatcgttttgttttcggctgctgttttgtgattttaggctggctttggttttaatctctatggatagttttcatcggtatgcatgcaacctgtttgattttgtgtttatatgagaggactagtttttctctatcttcgtagggcaggttattgccctaagcagcttaatttatgagtaaatttggaaaggaaaagtggtggtacttgtcaagatttttagaaccctaaatatcaatgttcttagggggctgatcatttactaagggaaaaagaatattgttctctccacgccataaataccaaaagaaagaaaagcttagcaattatgagagacttctccaaactgcctctgaaatccttcccgagtctctcaccatcctataggtagcaataaaatagttctaatacatagcatgaaacttaggccagtaagctgtgtctatatttgatcacttattgtctgtgtggtggcatttccacatagcgtggtattcttttagtaagagcaggatttttcagctcgtaaaaattaggcaaaaagctggggggacaacaaacaagggcttagttttattatatccttttcttccaactatgaatcaagaggggattctatcaaagtttcttccaaaatgcatttgaaatcatcataaagttggaaaggtccgtcgcaatttggtcaacgctattaatgtgaaaaagagagttttcttatgcttttgatctataacaggaaagtaaatatgaaggagattgtatccctttatgcagcatcagatacaagtatttcaacttttacttaattgagtgatctccttttaggatttatatgcataccaactgcctttgctgccagggttttctcacggagagatatccacatcatcgcag

SEQ ID NO: 48884 - DNA, 641 bp, Ricinus communis
  Intron number 1 from transcript 27623.m000136 (locus 27623 .t000002) derived from phytozome v7.0 (chr-ID 27623; pos 2 5454 to 26094)
caggaagtgaaagagtttctctcttgtcaaaagaggttttatttctttttcttgtttcttctttcttttataattcttgctgtttttctttttgctagaaacaacgtgcacgattgtgtttaaaatcttggattatcttttctggttattggttgaatcacttgaattgcttatagaatttattattatataagttctgtttggtttgggttcttcggtaacaagattattgtttattctcttgtgggatatttccatatcctttgtaaaatatcacttctttaaattttgtatttatatttcattttgactgtttctctgcaggtcttttctcaaatcttgaattgcgaatttagaaaaaacaactaagaaaacagaatgttattgggatttaagatttctgttgtttgcggtatccaatatgttaattgtttgactagacctcctagctgttctagtctcgaatgatagaagttataggtttattatttcaaaagtaatggaacatagcgacatattttttaaccaagtggatttaagtaaccatcacaattttatcaagtaagaggtgcttagctaattcttcctaaaacaaaatgtagttgatttctttactgttgtgtaggcacgaaggaaagcaa

SEQ ID NO: 48885 - DNA, 439 bp, Ricinus communis
  Intron number 1 from transcript 29726.m004042 (locus 29726 .t000154) derived from phytozome v7.0 (chr-ID 29726; pos 8 79310 to 879748)
tcgatcttagtgttgctcaggttagtcggtaaatgtgcttgataaatgttgttcactaagctttgtgaatgaaaaatgttcttttttttttttaaagatcttagattattgtttaatcactaaacaatacttcacattgctgtttatttgtttgatttcgaggcggagtgtaggcatttctcaaagagaaagaataataccaaaatgtttctattttcttctttgccataataacatgaaataattcttttcatgatcccaaatttttgtgctgtttcactttctcaaaatcgtcttctttcttagctattacttggtagttgtaaatgttggtaaatgatgatttaggtatgaagttattgataagtggttgttaacgactgtaactttctttttgaaacgttgttcagttattcaagctaggaccgaagcaatcagt

SEQ ID NO: 48886 - DNA, 914 bp, Ricinus communis
  Intron number 1 from transcript 28535.m000119 (locus 28535 .t000002) derived from phytozome v7.0 (chr-ID 28535; pos 1 8597 to 19510 reverse strand)
agattcggtttgagagataatcctggttttggttagtatctttccttgtccttttcgtttctccttctcatttaatttgttaatgcgtacgtatatttgaaaatgaaagcgctgtttattagttaccgttgaagatggaaaaaaaaagagtcctatttatagaattaacatctacaaactatggaggataaggaagtatacttgaaagagctagtaaatttcttgtctatgtcagggttcttttaatcaatgaaggcaactaaggtttatcaagcagacttggtgtcattactgcaatgcaatgtttctctttctgtcagaaaatagatgtggactaacatcaagcaaaaaaaggataagagaacaaactgaaatgtgagtgaggaacttacttataatgcacgagatttttaagggctggtatatgttgatcttgaggactctcgtgatcatcagtattgaataaatttgggcagtgatgcaaagtctagtttaattgcgatttttgagacagacagatttccagagaagttaacaatactatgaaattcttattttgcaaattgttttccttgtttatagttcttttattgaatgattgatcagcatatgcatttaatatgtgatatcatgcttctagatctgtaactctcttctttgagcttgaccttcatgcctatgccgtgagttatatgaaattttgcaattcagaaatcttatgtttgagttgaaaaattacaaacatgtaattaatttaaaaagaaacaagaacttggaatgtgatttatcaaagttgcagatgcttttgtctttcattgatgatttcttttgaattctcattaattttctagaaatcagttgttttcccccatccttacttggttgtcattaaactgcagtaccacttatatatt

SEQ ID NO: 48887 - DNA, 942 bp, Ricinus communis
  Intron number 2 from transcript 29724.m000856 (locus 29724 .t000036) derived from phytozome v7.0 (chr-ID 29724; pos 5 04155 to 505096 reverse strand)
ataaggtgcttagctgctatttgctttgtttattatgtttccttcattaatttactggtaaccttttcttttcattcaaagggcacttctctatttttactaccataggttactgtttatggaatactttgttggggtttctgtatatatatatatatatatatatatatatatcattttgtcttattgaagcctcatgatgatttgaataataggaggctttaaaagcatgaattttaataattcaccttatacatatatatatatatatatatatatatatatatatatatgttctcatcaaggagccttcttgattaaatttagttgtcttggtttttgatttctttatcagtacatatatattttttcttttcagttgagtcaccttttggattaaaggaccatttaaattgtattctcatttattagaaatgatttagggcgtatatgattagtctacttaaatgggatataactggtttgttcgcctagctgtcagatctcataacttataaattagaacttgattacagaatccagattctgtcgtaatttttaaattttttgagaacgcatcatactaaatctggtggcttcatatgctccacttctcttgtgtttgaagtatttgtcagtaaatatttactaactcaacgctgtttatggttgttattaaatgtcaataacatgataaatttgctagcttatatctacttcaaactaactctttctgttcttttattttcctttaagtattattattattatattactattattattattattattattatttttctactgtttttagtttcttctgatcatatatgtatatatatatatatctgataaggaggctctgctgtttgattttaattattcttactctttttactttaaggtcctcgcttttagggatatatctcctcaagctcc

SEQ ID NO: 48888 - DNA, 797 bp, Ricinus communis
  Intron number 1 from transcript 29729.m002357 (locus 29729 .t000090) derived from phytozome v7.0 (chr-ID 29729; pos 5 14190 to 514986)
ggtggtggcaaaggtattcttgtggggaaaaagctattgtcttgtttttctcctcttttctatgttctaactttgatgtcctaaccaaattaattaggaagttgctactagaatattggttctgcattcaattgaaagttctttcaaatggttaatcttgcttggatggaaagcagtcttctttttctggttgtattacttttattatttggttaatgaggtgtatttaatctcatcttcttaattgttctatacttaccattgcatgggacttggaagaaatttgattgagttcatgtagggttttatttataaataacaaagtcttacgtgtttagatatctgaagttgagcaaactagtaacaaaagctgaagatatgcttctttgaggaaatgaaaataattgttgcttgaatttgagaaaactagagaagatgatttctgactcatagtggtatgtgtagtttaaattgctattctgatttatttgatatctgttgctgttatcataataatgtgtatttgaggcctttgtttttctattgcagatgcactatgtctactgagcttggatttggttccaactcgatttattagtattttaacttgtttcttttgttcctcttttattgtcatccctcgatgattgactaaatatttgtcataggtgctaagtgtttgtcatgattatgttagaccatacagggtctctccagtaatgttgcatctttcttgccacatatacttctgtgtgcttgaacatttgactaatttctttctttactgatagctgctg

SEQ ID NO: 48889 - DNA, 677 bp, Ricinus communis
  Intron number 2 from transcript 28152.m000922 (locus 28152 .t000051) derived from phytozome v7.0 (chr-ID 28152; pos 2 74255 to 274931 reverse strand)
ttaccgtattctttacaagaagcgaacccgcagaagtatgtttgctttttccttttatttctgcttatctctattattttgatttttctctttatgggtttcggtttttaatttctaaattgctatttctcatttgggttttagtaggttaataagaaattcagtttgctttttttttttttttttttcttttccttgggtgatcttgcatagatagtttttgctttaattgcataaattggtttggctccttttatgttttcttcttttaaaatttatgcatgatgtttgacccctaatttctctcttttctttcatttggattttattacatttaagcagaagtctctgtttttttgtgattgcttcagaaatcttgcatggggaacttctactctggttgcactagttgttggggctaatcttgtttggagataagatttacttgattaaataattttttctgctataaattaggtttagattgttctgtaagtgtatgtaaagttttgaaagtaagcatctactattagctgctactaattatgtggattttagttcatctgattgcaagtgtcacttagaagtttgacaaagatggctcttataagaagtgcttccatgtttgctgcatctcggttactattcttatatccttaggttcagagctatctaga

SEQ ID NO: 48890 - DNA, 585 bp, Ricinus communis
  Intron number 1 from transcript 29680.m001726 (locus 29680 .t000069) derived from phytozome v7.0 (chr-ID 29680; pos 4 58377 to 458961 reverse strand)
aattctgggcttttaaggtgagtgttttttttcttttgaagtattggattttagggtgagttgggaaatgggtaaagttagttaactgcgtttgtgatagatgtaattggataatgtggaaacaagtacgatgttcatctgcatatttgccctctgattatggtcagattcctcagagagagttcccaatgttattaatatagcaaattctttttagattctggatataaaatttaaagcaagcaacacatgcacttggtgattgttgaagaggaagaatctagtgatttgtgaaaagctgagtacacaatcatgatctcaattaatcaccggactcatactactactgtgaaaaaaactttcttttgcctatattgctcttgtttgcaatcaattgtaagaataattagttgcattgtctgtcccaactatgtggggttactgaaatctccggctcaggcacaattgacgctatgaactgatagtccttgttgatttgcaactttgatggtttaagatgatatttgacattacctgaaaatgttgtttggtgatttattgcaggtgattagagcttttggttgg

SEQ ID NO: 48891 - DNA, 455 bp, Ricinus communis
  Intron number 2 from transcript 29785.m000937 (locus 29785 .t000006) derived from phytozome v7.0 (chr-ID 29785; pos 7 7633 to 78087)
cagaaggtacttatgaatatagctactaatgcagcctgtatttgaaactgatagatatcataacctaaataaggaccactgccataaagttttcttattgtaataagaactcatatttgttcagaaagacgagaaacgtctgttgacagaattcctgagccgcttcaatggatttggaaatatactgtctataggctttctttttcctgatatggaatatttgatagcatagatgacaaaatgcaatctagttataattcatctttgattttaaaaatcatttgttttacaacctcagggtagatgttctagtgaatttctgaagtgcaagaccatgaacttatcaggaagattgagtttatgaattgtgcagtttccatttaagcttaataagatgttttcttttgcatgaaatcccaggttgtatttaagatagaggtggcaacaggaccttc

SEQ ID NO: 48892 - DNA, 507 bp, Ricinus communis
  Intron number 1 from transcript 29724.m000839 (locus 29724 .t000019) derived from phytozome v7.0 (chr-ID 29724; pos 3 08513 to 309019 reverse strand)
cattgtcactataagcagcatcttccatttcaacggtaagaattcaaagttcttaaaacttgtatgttgcttctgcatatgcacatatatggaaggaaaatactacttagatgctatattttttttatttatttatgcatagagaatctatttttcttctcattatattaatatcaagaatttatagaaaactgatatttatttttaagaaaacccttataatattatgattacctgaaatgagacttataagaatataaaaatattaatttttttcttgcattctatatgctaagagatttaactaaaaaatgtacatagatatgggcaataagtgtaatctactcttttgcaatgtgtagtgtctgaatgcattattatatttgtgtcattttcaattaatttctatttgcttacctctttacattgctctctagaattatttttcttagttttttaaaacttgttgcagaggcaagattatttcctgatcaagtactaaagaga

SEQ ID NO: 48893 - DNA, 656 bp, Ricinus communis
  Intron number 3 from transcript 28223.m000096 (locus 28223 .t000002) derived from phytozome v7.0 (chr-ID 28223; pos 2 7736 to 28391 reverse strand)
ctgaggtatatctttcttatgaatgtaacaaagccataccatttgaattttcaactgcatgtctaattgatgcaatgcctcaagcacatagtaaatgttgaagtagaatgatatattttgtcatttcaaggccttgtttgagataaatcgtagtgtaagaattcaattgaatggaattcttgcaaaatcatgtcacttgtcgcctgcttttatttctcttgaaaaagtcaaaagagttgaattctatcgactgctatttattgtttggaaagttaaaaaatgtaagaattcagttcaattgaattctatttagtcgattttcatgtttgggaagttcgtagtttttattcttccaacctatagaaaaataacaaaataaaaataagataagcattttgatttaaattaatcatgctaaaattccatgattttgcaagaactaaactgaattgaattcttacatacaattgcttcagaaactttccaaacatgagaattgactaaattgaattccattcttacattttgagactttccaaacaccatggaagttcatgcttctttccgttgttggcagtaggttgttctgtttctgcaaaagaaaatcttgtttctttcctccacttgaagattgattgacatggatgtagggcagg

SEQ ID NO: 48894 - DNA, 799 bp, Ricinus communis
  Intron number 1 from transcript 29628.m000781 (locus 29628 .t000035) derived from phytozome v7.0 (chr-ID 29628; pos 1 60280 to 161078)
gcaatacttctggctcccatattgttaatcacctggtcagtttctttttcctttttcgtttttctcttttatttttcttttgctgcttgtgtaaaatgttagtacttttctagaatgtcttgttgtgactggagtgattagtttgtgattatagttgaattgatggaaggcatctaagggtgttgtgaaagaggtgctaaaccatgtaaatgcaagatctaggagtgtgttaggttttattttcctatattcactttataggggcaagttgtttttgaatttttgcattatttgtgggtcttttagtttctgtatttttttgggggcaataattaatgtttacaagtggaaattttagggaccttgtttttataggcttgaaattgctggctggcagattgttgaactataaacaacctttctcagacttaatgaagggcagtgaatgttcaaaacttgaaacgttgtgtagacatttagaagtctagactagaaatcttgaggtgcctattgatatattattgacattgggtcataagcgcattgcaaatagtgtttaaaccttcttttcctaatacagcaacctatccatgtattaatttcacagttgggatacggtggcatacaatgccagtttctgtatactgtttaaagtgataaaagttaccatgtagcactatttcttaatctactctggctggatcagttataatgaggttttctttttctttggcaataaagtttgtttggctggatctttgcaggttcgtgcaaaacataaagaagtctgtcttcataa

SEQ ID NO: 48895 - DNA, 809 bp, Ricinus communis
  Intron number 1 from transcript 29780.m001374 (locus 29780 .t000060) derived from phytozome v7.0 (chr-ID 29780; pos 4 48759 to 449567 reverse strand)
gactccttgaagaggtatttcagttatctgtcctttttttttttttttaattgctgtggttgattttccccgatttgttatcgttcagaattttggaatttttttagtgttttgagtaattgaatatagcattatgtaaacgttatgaaatttgtttccggattttgactttttaattcttttaactccattgagaactgaagatgaaattgtgattgcaatttttttctgtttctttccatctgttccttagtgatatgggatgagggcggtctcaattatcttttgttagtaggaaaacttgaatcttgtttttgtccatgcaactagttctgcttttggtagtttttgcaccattttttttttatgttcaatgtatgattaagtaaaagcctcgatcgttttttgggattgggatctgtttggttctgataatttgagtgattggcagatttgtttaggctgttaattatgtttacaatggcagatataaacatgtattctcttaggcttatttgcccttaagtttgagtctcgttactgtagcagcacagcagggatattaattaaatgtataacaacctttttttgtgttattactattagcaagaaagaactgaaatagttggtaatagttttaataaatagatataaaatgattttatttaatatcctggattcattgtatatccgtaatttcttgtttcctttgtatatatgattagtttacttgactaagcaaaagattagggccttgcatattgtcacttgcatataacatttcatattgtctcttcagaataaaagca

SEQ ID NO: 48896 - DNA, 786 bp, Ricinus communis
  Intron number 3 from transcript 29737.m001211 (locus 29737 .t000005) derived from phytozome v7.0 (chr-ID 29737; pos 3 3648 to 34433 reverse strand)
agaggacaaagtactgcctcacttctaaggtatacttgcatttttattatttttctattatggtcatgcttacaaacgaacattgaaataagcaattacatcccttgttttaatggtatgaatacattcaaaaggaagccaataccgaattaattggctaatgatgtaagcctaacagaactttcaaaatgactaagcaaagttaaccgaatgtaccttggtctagtttatatagtaatggccacaatttgtctgcaagtgcaactggggtaacattgactatagatatgcaaaatggcctacttatctcaatttttatttataaggaaaaagaaaaggaaaaaagaaatgtggatgctacagctcatagatggaaactggatttgtctgaatatttatggttgggactactcatgcgtgagccattttataacaattggtagcctgaagaatcaggagtgagtcttttgctttttgaatatggacttgtttaacaaaaagttggcttccactcgcaaaacagaaaaagcaagagacacataataaaaaacagaagaaacattaaaaaagggttaaccaaatatggcctgcaattttatgacgaaatgagatgaaagtaataataattacagtaactgaaataaggcatgtagtaaattagttcagtgagagtattgttttagtttctcattgatttttgggcaagattgttaatatagtttatgaattggagttgtattaaaaattgcagatcccccttggagtgatattagccattccaccctt

SEQ ID NO: 48897 - DNA, 435 bp, Ricinus communis
  Intron number 2 from transcript 29629.m001401 (locus 29629 .t000052) derived from phytozome v7.0 (chr-ID 29629; pos 2 89597 to 290031 reverse strand)
atatcagtttgatttcaatacttgtatactcgaaggtattttctttcttcattatttgacagtttcattttctgtaaacaatatgcaaaatgtcaatttcggattctatttagtttgtttttatgtttggaaaggtcataattgctagaaattcttctttcaatttaaacacagtgtttaaaaatacaagaatttaattcatttcaattctcgtgtttggaaagatgacagttgctgaaatccaattctttcaattttgttcttttaaatggcagaagtgacgtgattttgatagaattgagttctagtgaatgagtttgttccaaataatgcaaaagaaataaaaaaataaaaagccgataataaggcaatttgaaagaaatgattcatgccaattatttttgcgaaattcattgtctttggttaatatcagga

SEQ ID NO: 48898 - DNA, 840 bp, Ricinus communis
  Intron number 1 from transcript 29005.m000251 (locus 29005 .t000002) derived from phytozome v7.0 (chr-ID 29005; pos 1 2307 to 13146)
tttataagcctccaacactccctccttaccctcaggtacattcccattactgcaaaggtttttttttttttaatatgctctttgaattttttcatcatgtgtcatatggtactcttcttgataaaaatttggaaaaggagaatttgggtcataatttatggggaagaggatgtctggtatatgtgaaaagaaaccagactgttggttttcttggttattattattttttttttttagagtttcacattttcttggtatgaatttaacggaaaattgggatttgtctacaacccacaatacgtaagttctaaatggaaacataattgaatttgattacattgcataaggggtattattttgtaggaatctttgtatggaatgcaagattttatttctgtttgaggtttttggttactttcattagttattccaagaaaaaggagcaactttttttttttgcctctcttttaatttatgcaatccttattttgaatgatcttttctttttacagctgtgcttcattccatttaactttggctgactgtgatcagaatcagtcctttcctagaaagtaaaaaatgggggttcttggaaatgtaatgagaactcattttcctacatacccttgttttacaatttcactaaattgattttcttggcagatccaactgaaaccatttcccttccaaccatggcaagtatttcttgcaaataattgagtttcaatagtagtaatgcataatatcttgcatatgtaaaaaaatttaattcttattgttagaatggatcacagcttttcttttttcttagttctgtttgtgttcttttgttgtatatag

SEQ ID NO: 48899 - DNA, 617 bp, Ricinus communis
  Intron number 2 from transcript 27893.m000220 (locus 27893 .t000001) derived from phytozome v7.0 (chr-ID 27893; pos 7 616 to 8232)
agctcctgacttttgaagcatctgatttggagaaggttttcacttttttcctttaaaggcaatcttatagtgccctattttcacttgcttggctcatttatagtactcataagatggagttctgctagtatttccaaccagaagttattgtctgaaaacgcacaaaaaatttcctatggacatcctttccttactcttagattgcaggttgtgcatgtggtctcttacataaacttgcagattaatgttccttccttgatcaggattgaaaattatgcatatcctttcttttttggtcagttgactcccaactgaggtatgaattcaaagcttcatatccctggagaagacttcaatacctgttagctaaagctcattggaaattcgagcatgcttttcttttaacagacatataaacagtttcacatatttctagtcattagtcagtgtatcttcataacataaacgtaacacatgtatacttctgattgaaacatttccttatagctgctatgataatttgttgtcatatgccttctctaattaaccaattctttgatttcaaaatctggggatacacagggaggttcatcaagtaaagttgtggactgtattct

SEQ ID NO: 48900 - DNA, 702 bp, Ricinus communis
  Intron number 2 from transcript 29794.m003348 (locus 29794 .t000047) derived from phytozome v7.0 (chr-ID 29794; pos 2 58732 to 259433)
ctcaaaaccggattttaagagtggtaagtgctttttagttcgttgtaactgttacacttgaacttgttggtaattatagataatcccaactcatcttccctttaatagaggctcacccggtgcacaatgtgcttttctgggggaggatgggaataatttgcgtatccctccccttttatctttatagagaggttattttcacacccgagcctgtgacgtactggtcaccaaagaagcaactttaccatctgctccaagtagttaacaatgaaatctatgaattcgaatcctttggaatgtttaaagcaggatagaaacattacattcatcctttttctcatgtcgctagctttggctgaatctagtttgtttggaacagcatttggaaagatctttcttttatcctatgccatgttgctgacccgtttgatttccagctggtgcattctattttcatttggagcggagaaatagaatttatatagcccacctcaattaagttggattaaagcttagttgagttgagttttagatgctattgaaatgtactgtattgtgaagttcaacaagtaattacttaattattgcttactatgactatgcttatgacattctgccttttcttactctccatttgtcatgagcgacgaatattgtgttggttcagattcttgtctactgtagatcatctgttcgaccaca

SEQ ID NO: 48901 - DNA, 694 bp, Ricinus communis
  Intron number 1 from transcript 29648.m001986 (locus 29648 .t000073) derived from phytozome v7.0 (chr-ID 29648; pos 5 47466 to 548159)
tcattagctctctcttatttcttgtgctgctaacagtgagtccagagccctttcttttttcttgttatttacagcttaaggagaaccttttgcctgttcatcttatcactattagcttgcaatcaatattatataatttcatgctatatctgcttggatggtatatgtaggaggatcaaaatgtgcatgcttttattggccagatgcctttcttgttgttgaattcttttagttggccttttgtaaattttttttttttttttgttcctactgttctttctttttatatttgtgtgtttgtggtaaaactatcaaattctcttccttctttatgttcttttaccaactgagctcaatgctgcatgcatagtttctaactttctgctttttcataaaaatctagcgtttgctttgtggtcttcaaatctactatttcttgctgttaatttgatcaattaatttttttaatgtataaagtgcatatatgcacttcctgtttcaatcacaaaaaacatcagtcgtgatcttatgtccacttatcattattcaagtttgcagtattttacaaaaaaaaaagctcaggtttataaattgatctttatatgaccttcataagaaaatttgcatgataacattttttgctgggttgctgtttgcagttcattggcaattttcaagaaacgtgtggcataaa

SEQ ID NO: 48902 - DNA, 479 bp, Ricinus communis
  Intron number 1 from transcript 29788.m000326 (locus 29788 .t000009) derived from phytozome v7.0 (chr-ID 29788; pos 4 9849 to 50327 reverse strand)
ttcttcaaggtaatatgattttttattttctaatatttatcgttttgttttgttttgtttatatgagtaatttttatatattttgatgcatcactttgtttttggtgtttaatctatattgctcatcttttatattttcatgatttgggtttagatattttatttttttaaaattcatgttttttgtgttagggttttctttattcaatgaaattgttatatgggttttctttattcaatgatttgtaatatgggttgtcttttgtgttgaacgatttcttttttcttttggaacatttttttgttatttctattctgttctgatgagcttttgggttttggtgtcatatgggtttaatggattttttttaattatttattagaagattaaagctctgactgaaagcaagtgaaatcaggcattctaaatcacttaagcaatcactttatctgaactatatcattgatcttgtcaggta

SEQ ID NO: 48903 - DNA, 728 bp, Ricinus communis
  Intron number 1 from transcript 29633.m000892 (locus 29633 .t000011) derived from phytozome v7.0 (chr-ID 29633; pos 7 4178 to 74905)
gtctcaccagattcactctgcaaccacccaaaagtgtaaagctcttctcttctgttttctttttcctttttatggtgtttcattgaagttctaaattaccctttaatcgattttgtgattttatagtgttttaagcgtgtacacttgtttatgtgaaaatggttgtacttgtgttgataattctttgctgggttagcttctctttccttttcttttcttggaagccttttgattatttgtagccagttatggctttggatgttatacttcatttctataaccatgctgacagtaaagcaaaaagtgatattgtgattcttattagcttatgatttgatgtatgttttttatttgcaatgttcagtttttggaattaatgcatttgaagatgcgggctttgggtatcttctggatggttgttgcttttacttagtgtctgtgcagtcttcatcttgagctcaactctatctatattgccttacacttttcatagttgttggcagggttttatggacctctaatataagagtaaattggagagtaactgaagaacccttagttctatgttcttttctcgtcatattatcagatattgtttagtgtatgctttctctatctttaagattgcttatgagctacagtgatgttggtttttagaatttttagcttccatgttcttcaagtgtgcatgccctttttgaatttcttgctataggtagaggtggaat

SEQ ID NO: 48904 - DNA, 442 bp, Ricinus communis
  Intron number 3 from transcript 29676.m001635 (locus 29676 .t000026) derived from phytozome v7.0 (chr-ID 29676; pos 1 92459 to 192900 reverse strand)
ttatactcctcgccttatttctataaacggtcaaggtacttgatttgtgttcaaaattgagaagtacagtgtagtttatttcttctagcaactggatctattgtgtggtatcatctacttcaactgttcaactgcaatcgttatgcatatgctcttggaagttttatacatgctttttctcattctaaagtttagttactagcattgcaaaaaaatatgttttatgtatgccattggatatctagtgtttggagatgttcttgtaagtctattgctgaagtgtattagtgtttgctttgtgaagaggccttgggctttagccataatgacaagacgtatcgattgtattagaggtatcgtgctgctttcaggcctccttacaaagaagtttgcagcaataattttagttggattctctcacattgcagggtctctgggatct

SEQ ID NO: 48905 - DNA, 555 bp, Ricinus communis
  Intron number 2 from transcript 29676.m001635 (locus 29676 .t000026) derived from phytozome v7.0 (chr-ID 29676; pos 1 92877 to 193431 reverse strand)
gggaaacccaacaggtatgaacttcttgtcacattattattatgatgaaaatgatatgatgtgccaattttgtgtatggtttttcattaataaatcatgttagtagttgtcttattgaaaaaagtttgtcagtcttcaagttaacataattgcttatatgatataaaaacaagtggcttgtagtatccatgtttcttattttaaaatgctaagatggatttaaatcagcgttgatgtatgttcaatatatttgaatcttcacaagttctaaattttgatactcttgcacatatttgtgtttactttgtatttgaattttaataagttctaaattttgatagctcatgtatatagttttccgtagtgctgtattcttttaatttcttaagcaccggcaattttttttggcagcacagcatgctagacttccccagacttatttgcaacagcttcactgacttgctgcatatttgctacttagaaacaaatgcttacatagttgttccttaaccatgtgcagggcattcatacttatactcctcgccttatttctat

SEQ ID NO: 48906 - DNA, 430 bp, Ricinus communis
  Intron number 2 from transcript 27744.m000097 (locus 27744 .t000006) derived from phytozome v7.0 (chr-ID 27744; pos 8 6807 to 87236 reverse strand)
cttcaaaaaacccattacgaattcctaaggtttgtttaccataactgtaaatgaatatgcattgacattactaagatttaaaatttggtttattattttctttgatggatttgaaggggaaacaatagtttgaagttaccatgaagatcgttcctttttccccttgctatatacccttctcccagcactgctatcacaccattcaacagctatctgattgagctatgaaccattcttgtctcatttttatttgcctggtcctaattgcacttttgataaactataacgtcgtgataaaattatttaaatttcagtatgaagctctaataagtggttcaagtctattggtgagttccaattgcatgcgctttatctttttccaattatctgcacagattacagagacattggagcaaaggtttttcaagga

SEQ ID NO: 48907 - DNA, 634 bp, Ricinus communis
  Intron number 1 from transcript 27744.m000097 (locus 27744 .t000006) derived from phytozome v7.0 (chr-ID 27744; pos 8 7248 to 87881 reverse strand)
agaagttcctttctgacatctttcctcgtaatcaggtagtgttttaattttatgtttcatgttaattcacttgaaattgtctttgtaagcaattctattgtttttaaattcctgggcgaatattggagtgatgtagcttctttctttgttattgcttatggagatgattcctgcgttgttatactttgaaagttgaagtggttaagtagtgttgatctagtggattttttaatctatagaatatcagcttcttggcgtatatgaacaaatgttttgagttttcatttcattattagttgtgtaaatttcacaaccactgatgcattgtttatctgcaatcacgaatgttatcattatcagcaatctaggataaaacttgaagtgaagtttagtggaattctcagggtgaatagattagataatggtgtcttgcttgtgaaaaatgtttgatgtttctggttgtctctccttcaaggttcttgaggacttctgattctgagcgtccatccctctccctttcacccaatagggatagaaagaaaattattttaatgtgaaattagaaatttatgtatgtttattttctgtgattattgcaggaggcagaaccaaacgacaggaaaataggaaagct

SEQ ID NO: 48908 - DNA, 656 bp, Ricinus communis
  Intron number 1 from transcript 28226.m000852 (locus 28226 .t000022) derived from phytozome v7.0 (chr-ID 28226; pos 1 12906 to 113561 reverse strand)
ccctcggttcgttattattacttttttttttttctttttaaatcagaacatttgttttctcctattcaattagttgcaagctttgaatgttctacttttaaggtcgttcttagcatacaaactgctgctttactttgttgctcctttttttattcctctgttaatcttgcaacattgcagtaaccgccttttttttttcttttaaaaaaatatatatatatatttttgttcgccttcatttcttcaaaaatttcagtagctaatcctagagaatagaaaccgtaatttgtcttcgtttcttcgttcttattatgatattatattaattaggtaaccaatcgaattctttgggatattcgctaataatgttttcatttgtaatggattaccaaaattgttccacaatattactgttctactcctgtaacttcaattcttgtaactcctaactttaaatcttacaatatccttctgtcctcttatcgcattgtcaccgacttaggaaagaaatgtgaatatatttactttatgtttctgacttgtaacattttatttccaattctggattgcttgcttatgttggggtttttctttttgccttttgcttgttggaatatgaagaatcccagattgacgagagaacacgagaattgaag

SEQ ID NO: 48909 - DNA, 274 bp, Ricinus communis
  Intron number 3 from transcript 28320.m001136 (locus 28320 .t000063) derived from phytozome v7.0 (chr-ID 28320; pos 3 58973 to 359246 reverse strand)
aggtcttgacgacgaggatatcgtaaccttagttggtacctatatatcatgtttctcttcttccattttatgttaccttacatatacaattacgtatgttaatcaaaccttaatgcattagtaaagtcgatgcaccataatttaaatttatgaacccactatatatgaaaagtttatgcactgatttcttttaagtttttttgtttaagttatatttaattaaatgatttacgttgcaggggcacataccataggtcaaacagactgcttattc

SEQ ID NO: 48910 - DNA, 351 bp, Ricinus communis
  Intron number 1 from transcript 28525.m000271 (locus 28525 .t000012) derived from phytozome v7.0 (chr-ID 28525; pos 1 65584 to 165934)
gcttcagatctttacctgaggcagtaaaggttctctataatcttttttttttctttctcttttttaattggagtcaaatttctttttgggtttagaagagcaaatgtgattgccttttaaatgcgtttgtcatctttgtatagtttctaaaggtaaagcctcatattctagtgtttatgggttcactttgattgaagggatcgtttacagcgattgatttatgattcttgatgttaaataagagaaaataatggatctttatctgaggtttttcctatttcagtttctgggtaccatttatttgattggatatttcggttttttttttttcttttgaagcttgaattgtga

SEQ ID NO: 48911 - DNA, 624 bp, Ricinus communis
  Intron number 1 from transcript 28014.m000117 (locus 28014 .t000007) derived from phytozome v7.0 (chr-ID 28014; pos 5 3817 to 54440)
gaaaggtcagtcagttcggttgggtttacttgtttgctcgtttgtttgtttttttcatatgtggattatccggtcaactctccttgtgtatcttttcatgagccactatccgatctattcatatagttactcgtgaatcataatcaatatatagtaaattgagatgtatagccacagtgctagatctgcacttaaattacgttcctgtaaatttagtgaagagtaatctctgttacggccatatataacaaagaattcttagaaacagcaatgttgtacagctacagctaagtgcaaattttacgacatttggtacaactcggtgatttgagttaaagatttgctttttgaaaaaccataccattgcgaaagcagtttacaactgcttttcttaattgtctttgttgtagttcttacgatcaaaacaaacgaggtaatgcttttcttttcttttctcttcccacagctgatataactataatgtctgccaaacactcggtgaatttctagctttatgtcacatggtttacttgtgggtactcctgtctctgctttccatagttgactgaagagaaacaaaagatttgggtaatttattaatgctgaattgctgtctccaggtgt

SEQ ID NO: 48912 - DNA, 751 bp, Ricinus communis
  Intron number 1 from transcript 28514.m000025 (locus 28514 .t000001) derived from phytozome v7.0 (chr-ID 28514; pos 1 2152 to 12902 reverse strand)
tgttgctttacctgtcggagaaaatccagcttggagtaattctctttcattctctcctttctttcattcctatatatattccaggtcttacaaaataatgtagattatatataagcttcaagttgtctttagcctcaagtatactcgttcgtcttaattttagatatttcagattcaagtattttagaattcaagtttattcaatccgggtcctttcgatctatgagtggttttgagtttagatcattcatttttgaagttaagattaattgcaaatgataaagtgagttttccatcagaaaaaaggttgagatggtatctagcaactctcaataaaaatttaaaattagattaatataaaaatattataattttcattatgtagtccaccgccaatgcctttttataaattaaaaaataaattagaaatagaaactcgacgtgcggtgtggagaagagtgaagaagactcaattttgaaacgagggatttaaatttctcttccattctttttagatcccacattgctggagcaaaatgtactacagtacacgaaatagcattgtcgcacttaggagaaaaacctaaaagaaaccctcattctaggcatgtcaggatcaaaatgcgtgaggtgctaacaaaaatcttaagcttttacaatttgaatgtcactgtctcattcgagatggaggagttatgttctgataaaactcctgggtcttgctcgtttgtgtgaatattatcaaatatag

SEQ ID NO: 48913 - DNA, 516 bp, Ricinus communis
  Intron number 1 from transcript 28694.m000676 (locus 28694 .t000019) derived from phytozome v7.0 (chr-ID 28694; pos 1 98169 to 198684 reverse strand)
ttctaaccttctcaaacgcaacactacacctcaaggtacccgccacacacactatcacttcttcttgctcagttgtagtatgattcttctttttcttttttttgttgataattctctttaaagctctgtttttcattttttccctttttagtaggcaatagtcatagtttagtgggaacttatatacacgtaatagacaaatctttctttgctatttagtggacaaagactgttttagttctatcattttagtttaggagattcttggtgtgttttcctctgtggaatttcttataggccttgtttggaagaactcagttcatttgaattcttgcaaaatcatgtcatttttggcatgatttcgtttctttgaaattgcattctttttaaggtttgaaggattacattctagcaaatagcaactatgaccttcgcaaacatgagaattgactgaattgagtataattgaattgaattcttgcatttttagacttaccaaagtctatggtaggagtt

SEQ ID NO: 48914 - DNA, 678 bp, Ricinus communis
  Intron number 1 from transcript 27843.m000158 (locus 27843 .t000002) derived from phytozome v7.0 (chr-ID 27843; pos 9 918 to 10595 reverse strand)
tgctaataagattttgttggtgggttcttctgcaggtatggttcttttggtttatcatttctgagtatatgggttaatgtcattgaattgctcatgccttgtgaatcttgtggtgatcctttttaaattgagtacgtgattgatttctttcagaaactcttatttgtgctgtgttgattgatgataactgatgagtgtgcttaatcaaactatagctatatcatcatgcctttttttgaggcaatttatggagatggcacacagtattatccatgtcttcaaataaaaagaaaaggaaagaaaaatgagatgcatgtttaacgagggcaagaaacccagcaatattagtctttgacctcacatttgtgtattttcatctctttgtctatatacaagttgaacctatatagaatgtgtgattaagccctggcttgtggaatttctattttgcttattaggttagaattttttcctaattaatgtgatacaagtcctatgcaacatcattatattcgaacaacattgtacatccgacaagcacatcagaattctgtgtctaaatttgtttttttttttttttttaatttccccaccatcatgaccaagaaatttttatgtgtgttccttggttggctggctgcaggagctccaatctctggttctgctgttgacaaggta

SEQ ID NO: 48915 - DNA, 990 bp, Ricinus communis
  Intron number 2 from transcript 28934.m000058 (locus 28934 .t000004) derived from phytozome v7.0 (chr-ID 28934; pos 3 8917 to 39906 reverse strand)
gttggcaagaagcaggattctgctagttcttggaacaccatacctggacctccaggttaaatgatttatgcacttgtacatttaattttgtttttcttctctttttgtattttgtatatgcttttgctgtctcattcagttaaaccatattgttcttcctatggtaacttattcttatgttctaacttgcaattttaagctttaaggttttatggctcaccaatatggtgtccctttttgccaccttatcgtttgtagttgaattattttgcatggattagcatcaaggtgatgagtgtgctcttagtagaaattataaaagaaagattagattctggtacgaagggcttaaagcatgtcacagaacatttgaactgggtcttggacttaaataaaagtttaagcttgtaggttggtagttcactaatatttatgggattatagttatgctaccttgtaattctcgtatttaataatccccttataattattagaaaggtaaaaagaaaaacccattacaggattatatactgcaaactgttttattcagcagtttactggtctctattgagttaaaccttgagctgggcccaagaggaaatttatttcttctaccccattattgtgaaggggaaattttcctgttaagaatcaaatttaacatgcttctgaaagcctgccatgttgaagccttcttcatttccttattttcgtaacagagatagaatcaattgctagtatattcgactaatagggatgaggagtgtttaaccagcaatgctgaccatcgtgcttgattattttattcattttcttaactatttcctccaatttcaaaaatatttgagaaaaagctattaaattgcagagggcttttgttccccaaatctatattttaggattccccatgtagtacctgaaatagtgaatctgattaatctttatgtttatttagccgaaacttctaaaagcaacgagagtgaaggtcag

SEQ ID NO: 48916 - DNA, 545 bp, Ricinus communis
  Intron number 1 from transcript 28934.m000058 (locus 28934 .t000004) derived from phytozome v7.0 (chr-ID 28934; pos 3 9913 to 40457 reverse strand)
ggatttttggctctatttttgcacctcctcctaaggtaaataattcacctcttggacttttttttaattattattcttgttattaatttctgattttcatttgatgttagttggattttctacattccattactattaattcttttttatggatatatataaaatctcatgtcctcttttggggtttaaggcaattaggatttcaaaagtttcattaactatgaagtctcgaggtttgtctagttggttgaggacgactgatagagagcattgaagggcaatttcttttttaaggtagagctaaattaagaaacaaacaggaagaccaagtctgacaaggggacctgacatgcttctaataggtgctaagaatggataactttacccttcatcgcgttgtttatatcctctttttgttgtatttggctgctcttttatgttatttcatttacctttgtgctaaattttttatggattattattctcgagtctattgcttatggtggttgcttcaggtgttggggagagggtcactacgatctgag

SEQ ID NO: 48917 - DNA, 809 bp, Ricinus communis
  Intron number 1 from transcript 29751.m001862 (locus 29751 .t000077) derived from phytozome v7.0 (chr-ID 29751; pos 4 00869 to 401677)
ttgagggcacttgcaggtttcttcctttgttttttttttttttaatgcttgaattttaataagaaccccagttcttaattcttgagttgttgtatgtgaagaattaatcaaaacccatatcttaaattttgaaacttgaattctttaaataagattgcatgtatgagagaagagtagaacttcttgtaagagttttcttttttgaggggtgtatgtgtctgaaattcgaagagaagattatagtaatttttgggtttatgggcgttatcttattcttggtatcagtcattagagaaagctgaaactgtcagtcaaagtttgtattttttggatcattcgggtttgtgccattatcttttgtatgaactcagattacagctttgtgaaaatcgacaaggaatcaaagtgatggtgttaattaattatagtctcaggtcattcatagtgggtattggaaaagtaaggcttcttggcttagctatattgagataccaagtttgtatatagggttacttggtgaggtatagaccaattttaatccattttcttgctcttgctagatgtctgcttgttgatatttttttttcgtattggcatatttctctggttaatatttgtcttattaaccgcaaagcagaaagacgggcaactgaaaattctttatgtgggaacctaagcataatgcaattcactaaaattgagtcacagttttctttgaaatactagaggaatggttaattcttcattcaaaaacaaattgtttcacgggtaaacatgattctaaattcttggactctgcagtggtcgac

SEQ ID NO: 48918 - DNA, 496 bp, Ricinus communis
  Intron number 1 from transcript 28838.m000254 (locus 28838 .t000012) derived from phytozome v7.0 (chr-ID 28838; pos 8 3307 to 83802 reverse strand)
caaaaggacctacttcagcaggtgacaaattggcccttcttaattttaatattacattttgagtttctagtgtaaatcctgatattgctcgatttattagattatgaatttacattataaagtttgtggctttgatggctttttctgttaatggttttttatgaatttattgagcgctgaatactctattgcatggcctattatctataggttgttacacttattacttcgagcgataactttagcttcttttttctcctccgttggcatgatggcttgttaagaatttgatggtataggtttaataatacttctattaaaatctgtcttctccttgctaatgagattgcagatataatgcagcttgtgatattatcttatcttcactctcatctcattagtttcttctcggcgagtattaaaatttgaatgctttgtcaaacatgataaatcctttgcagattgccgaaagaaggaaattggtttctgatataaa

SEQ ID NO: 48919 - DNA, 773 bp, Ricinus communis
  Intron number 2 from transcript 29709.m001183 (locus 29709 .t000019) derived from phytozome v7.0 (chr-ID 29709; pos 9 5194 to 95966 reverse strand)
tcctcaagcacggctatagcttcattttcacggtaagtttcttcatttaattatttaatggtttcagtgtacatagttgttgtgtattaacaaaatatttgggattaattaagaaggatatgagatggagcgtggcattttaatgtcggcacgtactagttgtcgtttaagtagcaaaacgaccttacgcgtcagggatggattggagaggcaatgctgctaatttttatcccttccgggggattgattctcaactccattaaaaatatgtttcgacttgggtctgaatctttttcttaatgtgaaagctccctataatactttttgatgccactatatattgaatctggtcaaaactgaaatttctagagaggcaggcagctgttgtcctgaaatttcattaaattgacttttctatttcacaagtctgaattttctcctcccaattctattttctatgcggcttttcacttcctgctgccacacatttggaaaaacccctgaacactccattctcaaaagtcaatatgtcctaccacaaaaacaaatcaaatcagaaactggtttcttttgttttatacttttcataccttccgcaccaactattacaatctaatgttggcgtgggcttccgcatgtctggattgtttcaagcccagccctataaaccatgggttcgactctgaaaataaagcctaaatttgggacttcaaactgccaatcaattccaattccaagaataatcaacaatgtttttttgcttttgccgcagg

SEQ ID NO: 48920 - DNA, 833 bp, Ricinus communis
  Intron number 1 from transcript 27777.m000271 (locus 27777 .t000005) derived from phytozome v7.0 (chr-ID 27777; pos 2 8323 to 29155 reverse strand)
tcttttcattttcttgcttcaaagaaagaaactctgtaagctttcttgactcattttggtgttatttctttatgattgttgtatatgctattatgtgcttgaatctttgacagttatttttgttaaccaatatgagatctagaaatttaacccccccaatgttcatctcacattgttgcttgtttcttctgggttcttttcaatttctttgttgttgttagtatagtttttgggttggttttgctggtaagactctactagctgcttcttttattttatttatgtgtgctttttatttatttattttttttctggttttttaagttattgtatttgtttttatttctttgtgtttttataggatatataggttcttgtgctttttcattgctaggctggagaattttgattcagaaattgtgaaatttgttcctccctgccccctttttttttcttctttctttttttggtaatctcaattctcttatgagttggatgctttatatatatatatatatatattatatatatgaaggaaaattattgtcttatattatgcttaatttgtgaagtaagcaaatatttgaagaagtggaaaccattaagatgattctatgtaaagaattgctttaacgtcttgttgtctaattgggttatttagttttctttgtttgaaatcttaccttcaaattaatatattagttgcctttttgcttcttggttgttttgattgctatagagatagagtatgcaacttctatacaatgattgatttataatatcgaagcagcttaatgtatttctgattgtttcaggcatatattttctgaacc

SEQ ID NO: 48921 - DNA, 720 bp, Ricinus communis
  Intron number 2 from transcript 28752.m000336 (locus 28752 .t000016) derived from phytozome v7.0 (chr-ID 28752; pos 1 10201 to 110920)
tgcgcgaattgacaagatagattcttaccaaacaggttccttaaattcaaatctcagactttgctatcttttgtctaatcctgattttgaattttggatatgtttcctttgttaatcaatttataatcatataaaggataatctagacttttgttgtatgttttgtttctatttcaacagaaagaagcttgtctcctctaccattgttaataactgtaaatataaccccatgcctacagtactccttggtttatttggccgataaaaagagaatctttgcccaattatttttttccagctaaccaagtataatcagggttctccatgcttagtttcaatgtccaagaaaatttagccaaaaaatgaatgcaagtttgatatattctgttatttattccttctttggaagatcctttgacttgacgaatttcacccttccattccaccatgatctttaagctgagtatttgaagctttttgggttttattaatttttctcattattataaattagaacgaatcactcaagatatcgagcattgctgtttacatattggttaactgttctagtaagttgcacctgtgttggttgttggtaaaagaatttaatttctgttaaaccagtcctaccatgttattaatttatgtaaatggtgtgaatttgtgatttttctattccatacaggtttgcctgcagaattgagcgtaatacgttctcca

SEQ ID NO: 48922 - DNA, 866 bp, Ricinus communis
  Intron number 3 from transcript 29595.m000296 (locus 29595 .t000020) derived from phytozome v7.0 (chr-ID 29595; pos 1 64396 to 165261 reverse strand)
attttggcgggaggactcccctcaagactttttatgtaagtacatatccaatcaatgaacatgagatcattgttgaagtggtttcatcaaatgtttttttgccattatactgttctccttctggcaagtggcaagtaatatatttatgtaagagcaatggagggctgcccaatactgggcggtatacaacctttttttttttttttaattcctttcctctctgtgttaatcacaacaaaaggaaagatgaattcccatcctttctttctctttttaccttccttttgatctgtgtagtgtcaaacatagatcaagatctataatttgaagctaaatttttctcgaaaatgttattggcatttcacataatttatagttaaaaattcactaatagatagagtccaatagcacaatccttgtgacttttgattaaccgactttccttcaacctggcaactaaactcttaaaaagaattcaactaaggttattatcttctttctgtttcagaagcagtgataaaatctggtgaaagacataggggtaatgatcatgttgatgtagcttagatttttaggtgtagtttagagtttattctagcaatgactaataccaaagaaaagcttataaccttaatccatagcacatatttgctgatattttaatttagtttgtatatttcatgttatatggtcatgcaatatgcatacattatattcaagtgctctatgggttgatttagattcacagcataccttttcacttaatttctactatttgtatgtgcaagcaagcgtgccggttttatattttttagattgtaaaagatttactgatactggtattatcttagattgtttttggagca

SEQ ID NO: 48923 - DNA, 851 bp, Ricinus communis
  Intron number 4 from transcript 28124.m000248 (locus 28124 .t000017) derived from phytozome v7.0 (chr-ID 28124; pos 8 9503 to 90353)
atactggagaagaatcacccaggtgagtgtttctatcttcaaaaggatatattattgtgtaggagcaaacgaatgtagttttccaatactagcacaactaaacctgcactttctaaaacagtgtgggaataaattagaaatttcggtactgtgcattgtggagttcttttagttgactttaggctaagcataagctggcatgaatctttggaaatatgcagttaacctgcagagatgttacaaaggccaggcagcctgtcatgactaggtagtgtaccatggtctactcacattggatccaaggagatgagttttgagcttgaagataaaaccaaaatgatataatttcattaggttctgccatcgctgccctgatgatcctagcatcatatttagctttttccttttgtgtatacatatccagattggtccaacctagcacccatgtgaataatctagcaggcaagttgtctctcatttaagcaatttttctcattcttggaagaatttaatcaaaggccacgcttttttcccaattagttcttctaaaataattctgtcctgtctgccaattttttgcttcacagattttggtggataagtaattattttcactcagcattcgttaaagaatattgtataacaaggttctacaagttatttatgaactccgtaactttgttttttgcaaatagcgtgcagaataatacaaattgaatactcgttatattctgatgcgagtttacaaatgtacataaaaagctttattttccatgcaattgcttaattgcttactcttttctctttaccctgtagaaatcttaagcttccttctcggcgtccttctattg

SEQ ID NO: 48924 - DNA, 432 bp, Ricinus communis
  Intron number 2 from transcript 27496.m000097 (locus 27496 .t000004) derived from phytozome v7.0 (chr-ID 27496; pos 3 5571 to 36002 reverse strand)
ctactctgaattcagtagaggtgttgccttctgtttctctctgcatttcttttttaatttattttcttcttctaaactgtggttttataactttttgattttgtcttatgattgattcatgctttttaagtggaggaatttgtggaactgaaaaagaccacaaaagaaaaaaaaaaaaaacacaatctaagaagtgcatgaagctttaagtcttatcttgaaatccgaactccttttaattgtgtttttttttttctttttcttttaaatattttcttttggtagtaatcaaatgatgacataaattaatttccgttgattcacgatagaatcgatattattagtgacatagataattaattttgtttgtccattttgatttccttttgtataatagactgttcttgggttgattgggcttgctccatcaaa

SEQ ID NO: 48925 - DNA, 670 bp, Ricinus communis
  Intron number 2 from transcript 28952.m000016 (locus 28952 .t000001) derived from phytozome v7.0 (chr-ID 28952; pos 1 5612 to 16281 reverse strand)
ggccattcctgcgattgtggccgtgttttctcaaggttcattttctttgatcttaatgattctttacaataacaaattacagtacagtagatccccttcacttttttctgggcattcatccatttccattatcaaatcttccttcatatgaaattataggttgcatcgcttatcaagttgggttctctcttggaataagagaaaaggcaaagaaaagaaaaaaaatcttgtatggtttttgactgatggaaccttaatcctgtttattgacagttgttgaacacagttcccgaaattcagttgcagttggttccttccttttcctgttttctttcttgaaatgctttcaactgctcataacccaaaacacagttccttattaatatgccttttcttttttcaatatatgtacatgtatatatatcatttcaactatttttataaaggaatgattgccttcagttgtgataatatatcatgggtttattctttctagttaataaatattattatcttctactatttcagtctcattcggtcggattttaaaatattatagtttatcatgaatgtttgtttgtttgtattacccatgttcattaaggagggcacccagatcaaacttgtttaattttaccttgcagagtcgagagttttatcgaacaccaag

SEQ ID NO: 48926 - DNA, 817 bp, Ricinus communis
  Intron number 2 from transcript 29740.m000496 (locus 29740 .t000028) derived from phytozome v7.0 (chr-ID 29740; pos 2 07716 to 208532 reverse strand)
ctgaaagcttacaatcacagaaaggcagaaaactagtcagtgttcttatttgttgaattttacctttgacataaaataggttctcctctcatatttatcttgtggcctgctcccattttactcaatagaatacagtgttattatatttttgtcattaaacttgaagtaaagttgctttccagtgaacttggaacagacactattctctaatcctgcacctagtttctcttatgatttatctcctttggcttctatgtaagtggttagttttcagatgctgcagtagtgcactgttgctagttaatgctatctacaattgcaaaaactttcttcatctcatttccacttgacgatgtgttgttttattcttaagattgccacatgcgatggtgtgtagctaattatatctaaaattcattaacatgtataagcctgggtacacatgcaaatcaaaatgtcactatagtagaataatagatcaaggacattagaggaaattaagtaaattaaatagccaaacctttcatttctttgaaaagattctagggttgcgagtttataagttgtggctgctatgctggataataattaaaacattatggccacaaatatactgtcatttggaagatcatgtaaacttatttgaaaatattgctcgattaatgttttattttatttgacactattttttttttgtttgtcctccgttgcttatttcccccaatctatctgaatgtccaacagtgctttcattgttcattagatactattttattgttcaggaaactcctgaagccaaacgtaagaatccaaaacg

SEQ ID NO: 48927 - DNA, 537 bp, Ricinus communis
  Intron number 1 from transcript 29728.m000814 (locus 29728 .t000020) derived from phytozome v7.0 (chr-ID 29728; pos 1 41509 to 142045 reverse strand)
aaaccaagcgtgaggagatttttgctgttgttgttagtagtcaattatagccataaagattgcactttttttttccttctccttttccttttctgtagttttatagataagcttagtgctttttgaagtaatggcatttcttggtaggatagtttttcttctcgcattttcggttgaatctataattctcaaccgtaatctgtgataatgcagcttgctacttattttcttgaatttatttcttactaatttgtttgttacccagtttttgttgtattttcattttattcaaatttgtttttctagtgtaatgtagtgaggatcttaataatattagatggttggtagagttatattttgatcattggatgataggtccgaaatttttgttaggtcatccatttttttatatgctggtttttatggattcacttgttgtggtgttcccattttaaaaagagtgaattattatacaaagttttgtattttgctatttattcaggttggggggcgccagtatattgttattcctgggcg

SEQ ID NO: 48928 - DNA, 297 bp, Ricinus communis
  Intron number 1 from transcript 29683.m000479 (locus 29683 .t000017) derived from phytozome v7.0 (chr-ID 29683; pos 1 91814 to 192110)
catcaagcctgagaaacgggacactgatttatctggtactcgaagaattcttatttggccttttgagtttattatggataatgacttgtttggttccgtagtagcaaatttttacaccatttttctttatgattccaatttttagtcttcttttatggatttaagtaccagggagtcataaatgtctactgcaatttgtagatctcattatgtgtcttttaaggtttattctgtattttatgattttaattttttttcttctttttgatacgtgcataaattaatgtagaagtggaa

SEQ ID NO: 48929 - DNA, 324 bp, Ricinus communis
  Intron number 1 from transcript 28842.m000944 (locus 28842 .t000039) derived from phytozome v7.0 (chr-ID 28842; pos 3 67866 to 368189 reverse strand)
accgagaagctgttcgcgccattcgtcttaaaaaggtcagaattgtaatttgttttgctaaacatcaatagtaacatcaaagtgacaaagaaattgatatttttatacatttagtgctttcttctttgaagtttatgcaaaaagaaaagaagaaattgataccccttgatcagaaattgctatttatgcaatgttttcctttgaatatcagaaaggtggaaactttatttcaagagcataattttttctttttaataattctcggcatttagttttgctgtttgtaaaggtagaagaattgaggagcaaagggcttgagcctta

SEQ ID NO: 48930 - DNA, 993 bp, Ricinus communis
  Intron number 2 from transcript 29693.m002025 (locus 29693 .t000063) derived from phytozome v7.0 (chr-ID 29693; pos 5 02701 to 503693)
gttcttgtaagttctaattccccatttctcctctctattaactgttgctgctcacttgttttgattgttgatgccttccatggtattaattataaagttgattagcttttcttgagactgtttaagttgattagctgcagaagattgggtgactacttcgtttcttaataagggttaattataagatttatttctttatttctttttcatgatcattgttgttgaacactgcaacattttgttatattgttgcagtttattatttcatgcctttttgtattacaattagaacaaagtggaccacgaattttttttctttcttttttgttaatttattgttactgtttttaaattattattgggattgttaagacatcagcgtttcaattttaactgttattaaaagaaattttgctactcagcatcaaaagggctcctgttttgaatgtcaatctatcctatctgctgcctagctttcatatttcattttctttgaccttgaattaagtatttggcctcattttctactccgtgtttgcattcacctttttttttttctaaccctagcttaaaactccaagttagagatgtttttgcattcattcggagatcctatttatggttcaataaatctgcaatgttcagtatagaatagacaatagtgcgctgtatattcttttcataagacaaggaaaggtgcatgcaaaagcattaaagcaaccacaatttttatagaattgcagtcttgaatggaatgttgcaagttgataaagctaggactgatctgaagaaacttgttttaggttttagaaccttgataaatagagattgcccaaaatgtgtaaaacttaccatattttgctccagccttttttctaggtttgttatcaaatcattatccaatgggatttttattgtcttggtgtaattgaattagctgtttacctttatttgtcaggtttattgttggcttctttttaggtggcattcctt

SEQ ID NO: 48931 - DNA, 951 bp, Ricinus communis
  Intron number 3 from transcript 29806.m000978 (locus 29806 .t000049) derived from phytozome v7.0 (chr-ID 29806; pos 3 55649 to 356599)
ttctgtattcattgagtaactactgtgcacttcaggtcaggatacagtctcacacacacacaaacacacacacacctattaaagcaaccacaacaaactgtataatgtagtaaatgttgttagcaagtcagcacataatttgtgcaacttgattgcagctgggaaccaaagctgtataaatcaaatatccctcctgccctgcactaatatgttctttccatttgataaaatcttgccaggagcctgatggaattcaaatagctaaagtgctagttttatcactatgacatcacagtctaactatttcttgaaattaattcaaattaacttgctcaatgttctttgattcttttatatctaatacaattcacatcatcataggtacctaattatacttataatcatttaaatatatgagaaattggcaaatagttggtagaaaatattgaattctattttgtacggcatttctttctgtatgtcaatacaaatttatactaattgatccatggaataaacatgcatttggaagaagatgaaggaaatccccgtgcaaggcagagctggaggggaggaaataggaaacacttagtgttgaaatatctgctaatagtacatcggtctttagataactaaatctcatggcattatttttaatgattcatgtgctgttgaaagatacagtttactatttcctggtatccactcatgtaatttaccagggtctttttgtgagtataactattctatttctaagatgagtgccaattttcttttgtttcatgtatatgctggggaagagggcataatactgtgtgggttcagtatgggttgaccgtgaaagctagtggtccaattatgtaacaagattcttgttcttctcaatttgtttggttctttttgattttctatgtaggggtttgttgaggatcaatttggccttggactaat

SEQ ID NO: 48932 - DNA, 770 bp, Ricinus communis
  Intron number 1 from transcript 29625.m000677 (locus 29625 .t000004) derived from phytozome v7.0 (chr-ID 29625; pos 3 5702 to 36471 reverse strand)
tcaaaagctcattattgacaccgaccctgggatcggtgagctttccctttttctttttttcttttatttttttgttgtgaagtaatgatctttaggccttctgttttgtgttttgtgttgaattgtgataatgcaagttttatcttctgtctctttattttctttgtattgttaaatgtgaaacttcggatttgcagagaagtgggtgtggttgagtttaggctctgatggaacttttggaagaaaagtttgaagctttaattgttaaaattgatgttggtttttctttttaggaaagttcctttatttttcgctaaaaagtaaaaggttaaagctgggaatttcagaatttttttgattcccagatgctgaagggggggacttgaaagtcttaaaactgttataatctttttattggcctgatggaatcaattaaaatggaagggatttgatcccagattcttctcatattcactactttttgtaatgcatagtaactgtttaaggaaaaaccataaaaaaatctaaaagatggttgcgtaccatattgactagatgcttagattagttataaatatgtctgattgcaagatgatcaggagcttaaaaaggttgtaattatttttcaaacaatggaattcccttttacttattcgcttttattgtttttatcagctgacttgcattaagaaagtgtttctacctcaaaattttttctactaatctaagtgtttgatttagttattttctgtgtattaattgatctgcag

SEQ ID NO: 48933 - DNA, 894 bp, Ricinus communis
  Intron number 2 from transcript 29644.m000184 (locus 29644 .t000012) derived from phytozome v7.0 (chr-ID 29644; pos 6 5818 to 66711)
tggtatgtttccctcttgatttttgctctgtgtgtttcatgaattttatttactttgatgattgtggattcaaaagtttagtttctgtttatttgggaaaaatgagggtaaactaaggtaaggatttataaagtaaatgaaggtaagatattaggaggtaagatagagtttttaattttactttatttgggaagaatggatggtaaaagaatgttttagaaggtaatatagacttttttaaactataaccttcccaacctactgatttgatgggttgatatttgaagggtcaatatgaaaataagaattgctggtgtttcctgctggtctgttgctagaactatcttttgttccttctgatgaatttatggaaccttgtaaccctggttgttcttattttgcacccatgtttagtttcatttgcaaaagaaaagtatacactgctgaaatggttgtttcaaggttgcctcttgtcatatatctattactcttctatatcccttagagcatttctcatgttgtgaatctcataatgttcaatttaatacttggaagaaatacattccctccttgtgcatcccccaggaagcagcaaagacgaggaaattggaaaataacagcctgttatttggattttctttttggaagtgtgcttgtgtatttatatttatggttttataaatggcaatttagtgaaactactaccttgatcactgctttttaagtgaaatgataatacagacagcatttcttttcttcttgatatgttcttatttccatatattatctggaaaaaggaaatgtgtttcctagactgcattttctttagcttttgttcttttttaatcattattcttctgcatgctttttgctatgtggttgattagaagggcc

SEQ ID NO: 48934 - DNA, 793 bp, Ricinus communis
  Intron number 1 from transcript 29703.m001536 (locus 29703 .t000072) derived from phytozome v7.0 (chr-ID 29703; pos 3 70729 to 371521 reverse strand)
aggcatatcttacttcgaacaaatttcgtgtgcaggtaattagtattattcctctttttctttttattaacggttcaaacatttaacttttatggttaatataagttaaaattagctatatggtgagaatataatgcttttcttgttcttcgtttgaattggtgacgtgatggagtgagctaaagaaaaacacttccatgtttgttttaacatttgtaaagattttaagtcacagttcctttctttcagctgctagactgagaaattattcttcttttttgttttcctttttcagtgtgtgagatagtggaggaatataacagaaattgagcttcccttaaagcttaaagcaagttcctttgataactcacaagcgaatttttagctctagtttttcattttcttctagggtttatgaaaagttagccttgactttgagtcatcatatgctttatacactaacattatcctgctaattataacccacaagtcattaccaaggcttaatgaaacaaaattcacgaattttaatgttgcacgcatggagtcgtaagtatcttacttagtgcaaggggaagaattggtttttcgagaattagcccgataataattgattgcagagtttattctatcaattcaaccctaacttgcctatgtttctcagtgggatcaatgttactttgccttgctcaattttggactttggttacaatatttctacattgcctagggaggaggatcggtttgcatatcataatcttccagcttccatctctgtgcagataagcaacat

SEQ ID NO: 48935 - DNA, 697 bp, Ricinus communis
  Intron number 2 from transcript 29728.m000843 (locus 29728 .t000049) derived from phytozome v7.0 (chr-ID 29728; pos 3 07157 to 307853 reverse strand)
tgcttgtttctcctagcttgtaagtgtttgatttaattattcgattttgaatatacctataaggttgtataatttataagtaatcctgttattatgattgaaggagatgtatactgaccatttctatgaattaagtgggtgtataaaatacttgcgaaaaacaattgctccattaatgaagttcaaagtttacttccccttatcgatgtacatgcatgtgtagaaatatcgatatgggaatatgtatatacacatttttaatgtggaattgttattgttcatcttctatttttgtactaggcaaccagaactatctaattctttataggggcactttcaaactgtgtttagggactcgaatttttaaaaacctgattttaagtgatgtaaaactcaagccacttaaaagctaattttaatttatgtatgatactctaggcttcccaaacccattgaccaagcaccggttaattcgcaaaccccagtgttacacgttttgccttaatttatcacacatttatgggcttgtattgttatgaccgggaagtcaatgtcttttccagaaccttagcacatggttgcaagcttgtgtataggtttgtgcacgcatataaggttgttccttgaatatacaatctcatataattgacaatgtcgtgtagtgggtggtgtatacttcgctgagaggctcaataaa

SEQ ID NO: 48936 - DNA, 874 bp, Ricinus communis
  Intron number 2 from transcript 29740.m000482 (locus 29740 .t000014) derived from phytozome v7.0 (chr-ID 29740; pos 1 00486 to 101359 reverse strand)
actagaagagaagctgctcttattcttggtattaggtcataaattcttctatatctttcctttctccccctcagagctgtacccatttaatgttgtttccttttctgaattgggttttcttttttgttagtattaagcatacgcatgattcaagcattgatggatttgctaatcatatattatggataataatgatttttgaggttgagctacatgtccgttggttgctacagtttaagacacagtttggattttaggagttggtgatgatattatgtttgttcttctttttaaatttatcatactgtcaagtttagggattgtttctaattgcttagattcaatcacaacagatgatagtattatagtagaaaatgatgaagatttgaaaaacttagaaagacctgactttgggaaatgaggaagctaagagacccatactctctggtaatttaaatatttgtttctcatctagatctatgtcgtcgattaaaaaccttataagatgttttctttctatcatgtgaaaatgaacctattatggtggaggtttctttttcagcagttctccaaatgtgcccaatgcccttgctaacagggcttttggaatgacacttgaaagagggaagaagatgcttaagttcatttctagcatcgcaaacaattgtttatgcttcagaacggtgaaattatttatagtgtaaataggactaccatatggactggaggaatatatttcatgctccaaattgatgattattagggagttgcttgtatttaccgaagagctctgccatcatgttatatacttgctttagtttcttctctgttggaaataagttattctgtcctttgatatggtctaacagggaga

SEQ ID NO: 48937 - DNA, 695 bp, Ricinus communis
  Intron number 1 from transcript 29609.m000581 (locus 29609 .t000008) derived from phytozome v7.0 (chr-ID 29609; pos 8 1491 to 82185 reverse strand)
agggctgcaacatttgttcttggtacgtctctttctctttttcagttatataatactatttttttttttttttgatattatagaattcaagaacacatgagatatgtgtgactacgtacgcagttttgcttgagagatcttgctcatatactgttcatggaggttttctcatatacagccccagatttttcttttcttcggacgccgatgaattgagatatacacttacttactgtcaggatcgaaaattcttgtaattaatgtgggattgtatgggaaggttttgaatgacgattgaagaatgagagtgaagatgcttctctccattttgcttatatgaaaaggcttcttattatttatttttaagggaaaaaacaaaaactaatattgttgatgctcattaattagtacatagtatgacttttttcaaattgggtatatactacacaagattgatggtgaaagcaacaggagtcaacagttttgaaaattctacaacataaaatatgaacatgattttctctctctctctctctcattttattttgaccaagtgcttttaagtatcaattaattgttgaaagttgagctcaaagactaatcattaattgttgaataatagttcttgtttcttctttcttttattctttctcaatggaattaactattttgcagggcttcaagcatttgagata

SEQ ID NO: 48938 - DNA, 658 bp, Ricinus communis
  Intron number 1 from transcript 29705.m000576 (locus 29705 .t000008) derived from phytozome v7.0 (chr-ID 29705; pos 1 68514 to 169171 reverse strand)
tcagcttggcaaacctgttgaagcttcacaatgtttgggtgtaagaaattaatgactcatataattataataagatattagtaattaaactctattggttaatgaaagattgtgaattgaatagttatgactattggtacaggttccgacatgaagggttgtaaccattggtgctttgatggaaagccaccattagtctataaataagagttgatcctctctctacctatatcatcaaaattatagcaaatacaaaaactaaaggattagaatatccatcaataagataaagggaaaagggagagaaatcacaccttattaaacatggatcaacgtatgttttctttcttctatttaatggtgaaaaatatgaagttctatatcaatgggagattataatttacatgtggtatcaaagcaagatttaagaaatcatgtttttccataatttcgttggatttattgttcttccggatgcatgcaagaataaatcatttttttagcatataaattaaattgattaattttacataatttggattaagtttaagatttattgatgtcaggttttagactaattttatgtaaatttgttgcattgctgtcttagattaattgtgtatggtttatgattaagtttttgatatttcaggactaa

SEQ ID NO: 48939 - DNA, 594 bp, Ricinus communis
  Intron number 1 from transcript 29610.m000396 (locus 29610 .t000011) derived from phytozome v7.0 (chr-ID 29610; pos 9 0234 to 90827)
tcagatacctgagactgctcatcagattagcagtggtttgttcccttgtttccttaaatttccaagattcttttttttttctttatttaaaaaatgggttgagttagttttcattatggtttgggattttaatattcttatttcttgtcgttttgggttagcttttcaagatataatggctttaatgatttgggattcttgtaaaatggtgcttttgcatgcccttcatttgttgatcattttggatgctgaaagtatcttactttgtttggaatttcagttcttgattgcccttttcaacaacaaagttcaactctttcttgttatattttgagtttgtttggctatttggacgtttatagttgaaaatggtactaaccaaatggagaaaagagagaccataaaacaaaagtactcttcagatatggtttgtctcctctgggcttttgtaaaatgtttcatcagtttcaaaaatgacagggaaaaggtgtttatgtttctggttactctttatattttaacagtaatttgtggtattgagttactgttattcttgagcttattagtttattttcttctggaatttacagattc

SEQ ID NO: 48940 - DNA, 722 bp, Ricinus communis
  Intron number 1 from transcript 29676.m001691 (locus 29676 .t000082) derived from phytozome v7.0 (chr-ID 29676; pos 5 06304 to 507025)
gctgctgactgctttagccgtgccctagaaatcaggtttcgggttttattaccatctctctcttctatttcccttttgattaattatttataaatttctaaaaattgaaaagcaaagaaagaagcgatacaagtcttagtttcttttctttctttttttcccttttgatgatttttctttttaagagtcaagttttagtaattttttttctaattttacagttattattgtttgatagtgtttgtttgctcaagttatccttaatccgaaatcttcttgttctttcaccataaaccctagaatagttttagtgacgggtttaggcagtgtgaagcctttaggtcataagtgaaagaactagatagaaatggttcagtttgggactctatgctacaatttgagcataagttaagtgacctctttgccggaatattcttttcctttttccaagtttagtgcttttgagtaaaagaggtaagacaaccccgagtcatccctcttgcttggcatgctggacttgttttaacattcactgaatacaaggaactaacagatacatcgataaatcattacataatacaaggatagatgctagcaagaaaactgtgtttgatttctattgtatatcccttactcaatccacttctaatttgaagagtctctgggccccctctgttatggaatagtttactaatacttgtaaaattttagggtttcatact

SEQ ID NO: 48941 - DNA, 744 bp, Ricinus communis
  Intron number 2 from transcript 28076.m000415 (locus 28076 .t000006) derived from phytozome v7.0 (chr-ID 28076; pos 4 3535 to 44278)
gtaaagttgttcttggctacctcaattctttagtggtatggttaatctggattccttttgtttgtgatatattataagggtgcgctctcttgtttggtcaaattgttactagttatttttaatctttgaccagtcaggctaataactgttttgttgctgttcaatgtggtggataagaggaaaaatgtttcactgctcattcaaattgattcacaaattttcatttacgagatgaacacattttctgtttaaagacattgaagttattcttgcgactttatctaacatcttaagctttgagggttgaaatggttctttgacaaaatcttcatataagaaatggccgcattttcatttttctaaagatttagtgacacatttctttgctttaccatttaagggtcactactaagttgcttcttggcactgaaatgaactgattaaaaaggttgggaatgcttcttgctagtattttctatgattaccagctgaccttttgattatgtggcggtaaaacatccattttttggaaaactatccatctttttttccctattaaattctaaactatgtcataggaggtttttatgtaatttggaaaagggataggccaccttggctctacaagctgattcttgaagctgagatctctatggctgcagttacactatgctactactcagtgatctctaattggtttaaacaacagggtcctgagagtgaggaggttgctgctgcatcaag

SEQ ID NO: 48942 - DNA, 532 bp, Ricinus communis
  Intron number 1 from transcript 28281.m000366 (locus 28281 .t000005) derived from phytozome v7.0 (chr-ID 28281; pos 4 0368 to 40899 reverse strand)
ctgaacagctccataaagcttttcaaggtcttttttcagtgatgtgtttgccatttcaatggtttctgttatttcatcattgttgatcatgtcatgctctttcagattagtggaattacctgttgttgaaatttccaattataccttgctgcctttcaatagaaatagaatcgattttatctctgaaataagtgatctttgattcatttctcttagattgtatgatctgattgtaagtaaacccacctgaggggttttcatctttgtgcttgttagttgttctgtttggtgttggatctctctttttccttgttcacattgtttagaagaacaagattgatctgttatctgttcctttaaatgttttgccagtttactgatagacatctaaaatcgattgtgaggacgcgatgctttatagaattatctatctttatgtcttaatctggaccaaagtcttatctgttttttctttttaatccctttaaataggataaaccaagacttagatgttctgatcatgttttgcagg

SEQ ID NO: 48943 - DNA, 487 bp, Ricinus communis
  Intron number 2 from transcript 29804.m001488 (locus 29804 .t000019) derived from phytozome v7.0 (chr-ID 29804; pos 4 74339 to 474825 reverse strand)
cccttttgaggcacagggccttgctcactttctaggttcattttatttatttatttaaattactgctgtttgatgttttagggccactttagcatcgccttttgccacctgcatttgatcgtcttctttctttcttttgtttttcgtagctgcttttccaatatacttttggaagtagagtaagtcatgcttttctacaaagcaggttgaaaagcagaaatagtaaaaataaaagatttaaattcttaaatttccaaaagcaggaaccagaccttgtaatgtcaaatataatcattaataagtgtataaataaattctctggtttccacaattaaagaggtgatttgacgagaacaaactttgacatttcctcttttgtttataaaaaatgcattacttatttactattttgtttcattctttatgcaatatgttataaatgttggtactttgatattgcttacaacctttatgttttgcagaacac

SEQ ID NO: 48944 - DNA, 936 bp, Ricinus communis
  Intron number 1 from transcript 29806.m000980 (locus 29806 .t000051) derived from phytozome v7.0 (chr-ID 29806; pos 3 84034 to 384969)
ctgttagtttgcagaatcctcaagctcctgttgaggtctgtgcatttactatgaatttcagtttagcttcttatttctttttttttttaaaataaaattcttaataaaattataatttctgatgttgttcggttcattttttatatatttattcaaattgtggaattttgtacgtatggcattgtttagaagactaataattgaattattgtaaacatatattaattttggcatgattttatttgtttcaaaattaccttttttttttcaatttaaaaaaaaaacagttgctacaatatggactttacaaatcggagaattgactgaataaattcaattcaattgaactcgtatgttttgaaactttttaaacaaggggtagggctgtattaggtttttctggaagcattataatttgctatctagttgactggattgaaattgtatagaaatactttctgaaactgcatggaaatgaaatccgtgcttttaccagcacattaaatgctacatttcggtgaacggcaactcataattgataaaactccttttttccccccaacatattggtagatgtttgctttgtgaatttgatgctattggtttaaactatgaaattaagtcttttgtaattttacggtgtaagtggtattgtgagtcaacatttgaatgacgtgtttatactacacggcatctttagaataacatagaagaaaggacagatgtttcttttatttttaatgatattagttgtatgacgtatacatgtgaatgactcaatagcacacattttcctctttgggctcaaataggaaaaaatagcaaaatttaggggctaaattatgagattttgcttacaagttagaacttttatcaattactttatgatgtgaattgagtttaattatatgtattcaatttgtggtgtaggaattg

SEQ ID NO: 48945 - DNA, 877 bp, Ricinus communis
  Intron number 1 from transcript 29597.m000282 (locus 29597 .t000004) derived from phytozome v7.0 (chr-ID 29597; pos 3 5940 to 36816)
cgccggactgtcaagagtgctccccaaagtatttggtaataaatcttctacctaatcttactagttactaatttaccataatcaacatctttttctgttcttcttttgcctcaaggaatgacatcaatggactaattctgtggctaatactgtaaagaaattcaaagtatatcttcctctgtgcatactacatagcagcatcaagcattaagtgtattcaatcataagcttttgttatgactacattatggactaaccaagattgatttttttattagcatttatatgaagtaataaatttattagcttttgaaaaagaaacaatgaagatactaggactcctagcctgctgttctgaagattaaagttaacattagagcaagtcttgataatgtgagaaattaggataatttgacaagatagcagaactattcctgtttcagaatgtgaaatccatgaaatttccagttcttgaattcatgacagttctgaaacaaaacaaagtttgtaaaactcccccattttttattaaattgaaggatcttataaaatttcagaccaccttagctgggattttaaaggccccgtgtgaggcaagaaaaagaaaagaaaaggatttttcaaaatctatgagatcccaattaattcaactaaatattaaatatcgcgctctgaaaagccataaatcttttccacttatccaaaatctttcagatattgcctacctcagaattgcccctaaaataaacacacttcattggagcttttaacaacctgtcataaatctgaagtatatagaatgtctatggagcttaatgaggtgttaacattcgaattatacatatctgaccacgtaattttaactgataaaacaggt

SEQ ID NO: 48946 - DNA, 739 bp, Ricinus communis
  Intron number 1 from transcript 29576.m000224 (locus 29576 .t000002) derived from phytozome v7.0 (chr-ID 29576; pos 1 9159 to 19897 reverse strand)
aggtttccaggtatgtgctttaatggagatctgcaaataatatacatcattcttttattttccttttctgggttgtttttctttttaactgttttacaaaattttataatattcctgcagtcagattacacttttctatgattttgattagagggatacatatatacaaattttacccttttgctttaaataacttggtttttcttttacctttctttggtttcatttttgagggaattcagtatccactagaaaggaaatcaaatttggacattttgtttatctgggttctgtttcatcatttcagttcattcttgtcttctcttacttttttttttttttccttctatcttttcttttctcctaatgattaattcagatagagagtactaagctgaattgtctttgtaaagaacaaagtcaatgtaattcaatctcaaaggtccctgaatatgttcatcaaatagaacttggatcctatcatttctttctttgaagttagctctaactgtaattttctattgtttctttctttctggatgttaattgtcttaattatacataccattcttgcatgtttattttatgtgtgaattatatatgcttgaagagttatttgtttggactgacgagtacaagatgggagagaaacagttttcttttgtttttgttatcttttcctgaaaactgtttgttttttttaggaagctagcagagcttggttataatcgaagcgcca

SEQ ID NO: 48947 - DNA, 483 bp, Ricinus communis
  Intron number 2 from transcript 29788.m000334 (locus 29788 .t000017) derived from phytozome v7.0 (chr-ID 29788; pos 9 4918 to 95400)
ttagctgtgcaaaaggtcagttcttttttaattttatgcattctactttaggtcttagttacaattgccttctggggtatttacttacttgaggaagttggttaatctcaatcaaaaaatttatggtgattgtgtgaaaaacttttaaagcttgtttatatagccccacattctcttctcatttttcatttacatgtggataataccattatagtaacttaggctcttaaaatggacatttagtttgatgttacaaaatttcagtttggagctacataatgccgccattcataaaagttgtgacttttgtctttaaactagggttgattgcgattgtgggtctagagtcatatagcacattggtttggcatacacatcgtagataaagaaaattaggaagaaggtaaaagctagtttgcttctcagtttatctgattggaacttccagatatcaggaagttgaacggcttcgtggagaaagga

SEQ ID NO: 48948 - DNA, 467 bp, Ricinus communis
  Intron number 3 from transcript 29692.m000533 (locus 29692 .t000016) derived from phytozome v7.0 (chr-ID 29692; pos 2 03414 to 203880 reverse strand)
tttctcgccgattggccaagactcacaattggactgtacttttcttttcttttcttttttactctgctctctattttataatctagtatttgtatgggtccgttactgtgatagtattatactcagtttattatgcactgcctatgtaatcgcacattgatgttggaacttacaatcaggatcagtatcatattagcatagaaggtcatcatttctaaatttatcctctatcaatttttaaatgctgcgaattgatgatgtcctattgagttattaagtctctaatgtgttcttgtgacattgttataagtttttctatatgaaaatccaattctagctgcacatggttttcttgttcccatatcaaaatgagataagattggcttgcattggaagtcttatcatctctaacactttccgattaacaaacaggttgcattgaaaacattgattgtcatccatagatt

SEQ ID NO: 48949 - DNA, 492 bp, Ricinus communis
  Intron number 1 from transcript 27553.m000318 (locus 27553 .t000004) derived from phytozome v7.0 (chr-ID 27553; pos 2 3157 to 23648)
ttctttcccaaaagcttgtataggtcaatgtttgttatatgttttaactttaacttttaaattgtgattacagctcaagcaaatattgtttttaaagttttctctgtgttttggtgcaagcgtaacggctttaggtggatgtgacattgctaagtgatagttctgcatttgctcaacataggattagagtgagaatcacataattaatcacactgaagaatgctaatttaaaattggttgttgatgcttaatgtttattatagctggttaatggatgaaaataacatgaaatgttcattatattattcaactcttttacttctttggatctcttctatcttgcttatgccgtttcctttgaatttagtgaaatcaccttgttgatgtttccaattgttaagttagattcctattatggttctgatcattagatgttgatgattaacttatcttcattctaaatcagatctgagcttggaatagagccaggaa

SEQ ID NO: 48950 - DNA, 811 bp, Ricinus communis
  Intron number 2 from transcript 27553.m000318 (locus 27553 .t000004) derived from phytozome v7.0 (chr-ID 27553; pos 2 3747 to 24557)
aagcctacaaggtttgcttttttcatgcctttattcagtgttagaagttgtatttatcccacattgctcggttacggggcacttatagtgtatctaactggattgggtaccctcttcctttgagctaacttttgggaatgagttctaccaaagcccatttatcatggtattagagcagtgtttatagaaaggggtctggaaatttattttttttgctgcctaatgaagtagtcactgtttatttttttttttggtctgcgatggtgagtttggacccagcctgtttgcatttcacgctaagtgtgagggagggtgttagaagttgtatttatcccacatcacttgagggagggtgttagaagttgtatttatcccacatcgcttagttactgggttgttatagtgtatatagattgggcaccctcttcctttgagctagcttttgggaatgagttctacccaggcccatttatcatttagctgtcctctgtgtggtaatattgttgtacactatagctgtctctactatatgcctgaatcttaatgcaatatcacataagccttgtatttgatggcctaaaaggactattgaaatgttctaatatatttctaagatggtcccttctgttcttagaatgatgttacagatttgcttgataggcggtggtatctaaattttacattggtacatttatttgcacctgaaacgagtaaaaatttgtgatttaatgtctttcataaagctataatagtaatttaaggatttgaaatgatagggtccctaaagaagaagctctgaaattgggtagtg

SEQ ID NO: 48951 - DNA, 981 bp, Ricinus communis
  Intron number 2 from transcript 29682.m000596 (locus 29682 .t000029) derived from phytozome v7.0 (chr-ID 29682; pos 2 01547 to 202527)
cacggtatccagtaagttgcacattatgttgttcttgtattgctatagtttgtgttgcgggcttagttatattagagagaacagatcaagcttgttcactgcctttaatctttgctcatgcttggtttcccttctctgtgtgttgtgtgtgtgtgtgtgtgtgtgagagagatactcaaaatgacataacaagctgttgaaatcaaatttcaccctgttattatgccttttgtacttttaaggggactgttcttgtgccttaacctttgagtaaattttcttgcatgtttgcatttgccattgccaattctttcgactgaaacttcactcacaaactatttaaggcctgcaactattgggtatttttagtaaattgagcagaacatttcattcacttttacctatgttgtaattcttgtattggctgtctatcagtatccagttcacagttaacatcattagaactggaatctgaaatggtaccatagaactaggacatgatttattagaaaacattaaatagatagagggttacaactcttgcatcatctgcgaaggccaacctcaagatagcggcagaaataatggtaacctttttgcaccaaattagttggattttgcataatgatatttcacgaatgtctttcttctgaaaccagaaaggcagtgatcaaagctcttttgcaagcatagaagacttgcatggaaccaaacgatattaattgttaactcctttaactttacttaatggaagactgactagacatacacgtaacttttcaaatcgaatgcaaagtctgttaatttctataattattgctcccttacatttttgcatcagcttaatgatttcaataagtgtttctaaagttttacaggctgaccccaattaatttggtattaaggactagttgaattgaggttctaaagtttgattatattccagccctcaggtgaaagtggttatttcgagatagaatt

SEQ ID NO: 48952 - DNA, 517 bp, Ricinus communis
  Intron number 3 from transcript 29785.m000934 (locus 29785 .t000003) derived from phytozome v7.0 (chr-ID 29785; pos 2 4710 to 25226 reverse strand)
ctgctccagctgaagctgctgcccctgctaaggaggtgtgtgtttttattcatctttgtggtatttattttgaattatgatgtcttgagttcatgtgtaaaagaaccaacgaaattggagatcttttatatgcattaagcaagaagaaattctgggaattagaagctaattgactcgcaatttgattcagctgagtttcactcttcatgtaattaagtgtaaattgttcaaattggatgagtttaaagtttctatctttttttattctttaagtaagaaaaccagtaattctgggaatatgaagccgccagaatgccaatttgattcagttctgatatcactcatcaggtgttgtttgagctactagcggttagccgtttcgcttatttttggttgtcctcttatgtttaaagatcaacactccaatcccctcttactgcaagatatatagatattgctgctgttgtttattatttgtaatttttccccttgctattttaggctgctgctgctggag

SEQ ID NO: 48953 - DNA, 722 bp, Ricinus communis
  Intron number 1 from transcript 27893.m000229 (locus 27893 .t000010) derived from phytozome v7.0 (chr-ID 27893; pos 9 9967 to 100688)
cctctgatgtacgttatcttctctccagatctacttctgttgttttatttttcttcttatttattgttcatatgcatatgtatccttgtgatatatgttgactctcgattactttgcctttttggcatttaattcttaggatttgtgtatggtgttctctttcgcgtgtaagagtagttgtatgtgtttacggactggcttttgcttttcttttgtttaaagatatttttatttttgaattttgagtgaggacttaatagctgaaaaatgatacttattcttcggtctggttttggagttattaagcatgttggatatttgaaaccctaatctgtggatgggaatttgttttaataaaatcccctgttgtgtcggtagatagagctcattttaacaaaattaattttttatgaatctggagttccgaagttaaaatctgtatttggaatggtgttgcacttctaatgtgtaggtaaagtaatgcagtaactgtaaaataaaggctaataactgtgtttctgagagtagataaacctaatgttgttttggtgatttttcttgttgggttttatttgtttgtttgttggattaatgggctaagttagattgattgtgtttgctaaaacatttacttttgtagtaattatgcacgttcttggctggttgctgatgttagtaattttacaggcattggacaaaattagatttgagagcttgacaga

SEQ ID NO: 48954 - DNA, 1008 bp, Ricinus communis
  Intron number 2 from transcript 29635.m000460 (locus 29635 .t000020) derived from phytozome v7.0 (chr-ID 29635; pos 1 17475 to 118482)
gctcaaactggtaagtgttacttgctcaattttgaatcgctacattatgttactaattaaaaatatatctagactaatcgattatttcatagactgactttcatggttttgggtcgtctagaattcaggggaggtgaaagtcagcacataggaattactgcgcaaatgaggaatgttttgtgttaacttgttataggtgatatatagtggcaactgagtgactttcctcttcttttggcttttgttttgcataatacaactgtgagtaagaaagtgatggtgtgtgcaaatttaggttgaagatggaacataggagtggctcatagtcgttagaagcctcacctttatggataagcaacaattcacttaggttacatttgtagacattggaattaggaattaaatgcagttcttgttgctcaaacaaagaaaaaaagaaatgcagttcttggaacacggttctcttttcttgtttggtataagaacccaattttttttttttggaaataacagctacttgtatgtttattttctaataataccatcaaatttagttggttatctcaaaattaatttggatagacattcattttcatttctaaggtatactatatatgacctaagtaatctgtaaattttgaagttggttaaaagttgaaactctttttgaacgcccagcaccaggtgaccctaattctagacccactgtgttgcttctgcaataacacttatatcaatcttcgtcttctaccttagttcaaaatactttccttatcatttttatccttttgcagtgctcctaatttttccccttatcttgtactgacttcactatggctgttcagtctcctgtttcatttttgagatacctgtttttcatgattgccattgtagtcattaccgggttttcctttttatatatatatatatcctcattgcatttaaacaagcattcagctaatgtatgttaaagaaccctgattactagttgtggcctttctcaaggtt

SEQ ID NO: 48955 - DNA, 892 bp, Ricinus communis
  Intron number 1 from transcript 29794.m003460 (locus 29794 .t000159) derived from phytozome v7.0 (chr-ID 29794; pos 1 029428 to 1030319 reverse strand)
atagtgccaagccttcacttgtggttagagatacggtaagtactgattttcttttacctttctttctctcttcttaaaccaacaggttcttgaaaggttctctctttctttaagcttttccttttctgtcaattcaattcttgagttttttttttttttttttttttgtctaaaaaataaagaagctagtttttgattgaataaagttacctaatgttttaattttagtgtttctttaaaagttgatttagcataattaagcaaaagcctcagttttattaaatttataagaaaatttaaatgtaagaaatagaaatcaaaagtattaatggtagtatttgtattgtttttgttttggaaagtaggcctttctttcaaatgtcaagcaaaacccactccaaaagttcgtctaatgaataggtaaaaaaagtttaaaaataaaaaattggtttgacaaagtgtagcaagtctcattgtatttcataacaatttccttactgattttgccactgacttcaagttccaactgttcaaaagaaataggggtttttgtattctaaattacataataacaaaggagaatatcacttgaactttcactttcttgagattcccaagcatgcgcaacaacattgattagaatcatatatatatatatatatatatatatatagaatctttgtatataaataaattgtcactatacaattatcctctttttctttgaatgaaattttcttgtcctaaagaaccatccatacctctaataatagggcagtagtagaggcaattagcccatatacaaaacaaaagtgcaattataattattatttaatttattttgaaagggtttgtttgtttaattgttgtgttggttgaatgttgaaggtgc

SEQ ID NO: 48956 - DNA, 341 bp, Ricinus communis
  Intron number 1 from transcript 27856.m000040 (locus 27856 .t000002) derived from phytozome v7.0 (chr-ID 27856; pos 1 5987 to 16327 reverse strand)
agtacaggtaaacttcatatatggcttcaatcaaatttcctccaattttggcaacttcatgtgctcgtttctttggaagtggaccgctatttatggttaagaaaagggtcatgatttttggttctattactccattattttctttcttgtataagaaattaaaagaaaaaaacatttacttagtaaaagctcctgggtattgtttccttctgaagaacaagattactgttataatactgtatgattatctccatcattaccttcagcacatgtcagtttattaccataatctatcatgtgctaacttagaaaagaaaaaaaaaaaatgttgcaggaaagta

SEQ ID NO: 48957 - DNA, 378 bp, Ricinus communis
  Intron number 2 from transcript 29739.m003624 (locus 29739 .t000060) derived from phytozome v7.0 (chr-ID 29739; pos 3 53849 to 354226 reverse strand)
cccaactctcctcctgccatcgttagtcccctcaggtgcatttcctaaactcgttgaaatttttctaagatattgaacttgtcatgatccaagactagtactgtatatgattcattgataaattaaaatctttccccttttgatttgatatgatgatgatgaagagctctagaagcattgtacatatctcacattcaacaatggaaaatctaaaaatcttgataagaattgaagttggtccaatgcatttgattattcaacaagatgaatgattgccttttcttgtcaagtacattttctatttgaatatttatatatgtttttaatgtaaatgtgaattcagcactttgtgtgatccatacctgaacatattccgtg

SEQ ID NO: 48958 - DNA, 620 bp, Ricinus communis
  Intron number 1 from transcript 29739.m003624 (locus 29739 .t000060) derived from phytozome v7.0 (chr-ID 29739; pos 3 54346 to 354965 reverse strand)
cttcaagattcttcacttgtttgcctctcaaaatcccattcttagaaaattgctatctctctcttctgattgtagcagccatatcaccacccttcaggcaacttttttttttttctctctctctggatatggacatgatatgtttaattacttgtcaaagtttctgtctttgtgcatgagatgtgatggaatcttgatattccaacaattttattacatggtcttctctatttgttgagttcatggcttgatctagttacagataaggaatatgtgctcagtatttaaacttcaatgcaagatgcaattttgaatttatgatcatgtgaaagtgtcactgtttacatatcggaagtaagatatgcaagggtgtgattagtttctgtttatgcttcttattaatgctttttctttttctttctaaattaatgagggacatgggaagtctccagtttgagaaatgattgtttcttcttattcatgggaatgagttttatttggcctaggacaaatctttggctttctacgtctgctatttttggtataagagtatttatggagtttgtacctttagattcaatgcagggcctatagcaattcaaattatctatccaatcaca

SEQ ID NO: 48959 - DNA, 589 bp, Ricinus communis
  Intron number 2 from transcript 28806.m000154 (locus 28806 .t000009) derived from phytozome v7.0 (chr-ID 28806; pos 4 7443 to 48031 reverse strand)
agttgatccatacagcagcttggttctgcaggcatgtctgaagtttcctcttatgatatcttttttcttacaccacatttaaacatttagctagcctcagcagataaacattcatgttttttgtcactggattatgaacattaagttaattccagaatactaagcttggaagtctgatttcaggtgctttgctggctcattgatatctcttttccacttgccaactaattttctgaagtctagatgtccgtacttcacttaattctgttagttggggcaattcttccttttgtacttgttttatcttcagatacacacttctcttttccctttttgcttttggtagattttaggtattttttgttctaggggccatcaggtcaacttaagctaactggaaaagtcttatccttttagggcagtttgtttccgtctcttgcatttgtaatgcatctttgttggattgtataatctttcagaaatcttatctggtgatcttatttcgtacaaagttcttatgatgctattagaggtaattaaatctggttaacatttgactttccacagacagcgttgaagttattagctc

SEQ ID NO: 48960 - DNA, 738 bp, Ricinus communis
  Intron number 2 from transcript 29706.m001297 (locus 29706 .t000027) derived from phytozome v7.0 (chr-ID 29706; pos 2 30290 to 231027)
caaagttaaggacgcaattactggagcctcctaaagtaagcagctttttgtgaaatcatcttaatgtttctgtttctgctaaggcatatattgatggttgagatggaaattggttgtatattcactaatacttgtacatatcttgctttcctctttgcaaatgtatgttgggtgtggtaccatgtggtaactagttttttggatgcttaatctaactaaatcattctcatggaaataatttagatatctgctctgagaagttctgatcataaacttcagtatatgcttgtctgaaaactttaatttatttgaattctcaatgaataatgagtttttggtcaattgtggttaataatagggtggatgtacttctatgatgcatggatgtctgctacagaccttattacacttaaaaattaagtgtatttatggaaacattagttaaaactctctatggtgttggtgctagtaggtatttaaaatgtttttgtaagttctcttcctgttatatgcactatgattatggtcctcaatgcttactaaataaattagtggttgcattgatctggctagctgtacattataaactgcctttattataattttactgtattttgctcttcttgatgctcttttttcatgttaatttcctgttgcttttagatatgctgattatatgatttctattgcttttcttaatcagggttctagtggagctggagagggttttgaagttac

SEQ ID NO: 48961 - DNA, 611 bp, Ricinus communis
  Intron number 2 from transcript 29662.m000456 (locus 29662 .t000010) derived from phytozome v7.0 (chr-ID 29662; pos 1 35868 to 136478)
gcagttcgcaccggtgggaagggcagcgtgagaaggtaggaagtgtattcagacttgttacttttctagatgtcactagattaatctcatggactttgcaataacaactgtaaacaagtaaattaaaaagaaaagaaagattttagctgtattttttatggagggaagaagtctagtgccagtatttagagaataccataatgatgcctttttcttgggtatgttttgaactttttggacactaattcaaatagttgttatcggtgattggtctcttgtcaacttaactaagagaaacactccattggatcagtctacagcttatgaaattgaaggtgttaatctgaagtaataaaatctgtctagattctttgctaaccaaagaagtaatggctttttccatttttttccttttcttttacttgagatgaatgccatatgttatattttttatcttcaagttctgggatttcttttctttttcattgttactttaatttatgtggagtttacattgagatttctggttatacttggttgtggaatctcttttaaatttttttcttctaaccacagaaagaagaaggctgtccacaagactactacaacag

SEQ ID NO: 48962 - DNA, 380 bp, Ricinus communis
  Intron number 2 from transcript 29428.m000325 (locus 29428 .t000009) derived from phytozome v7.0 (chr-ID 29428; pos 9 1316 to 91695)
tgggttatttgggtaagattacttggccaaactctcaaattttgttggaagaatatgagtttttttttattatttttatttaaaagttgtaatgtattttggctttgaattatattttttcaaattttaaatgataagattagattcggtagtgtgaatctatcgtctaaataaaatacagattaagaaattaaatttttttttaagggataggttagattttcttatttacataagttattcaatgtatttagtgcattctatttcaaataaagtttatatagatgtggctgtgaaagtattgaatcatttaaccattattttatttttgttctggcaataacactttgattaattgtagaggagtagtgacccaaaat

SEQ ID NO: 48963 - DNA, 789 bp, Ricinus communis
  Intron number 2 from transcript 29453.m000062 (locus 29453 .t000001) derived from phytozome v7.0 (chr-ID 29453; pos 2 4520 to 25308)
tctaagaggtagtgcttgttggctatcttagctcgactttgctaccatatatttctttattaaaataggaaaacctgtcttgttaaagggaactgttggggctaacatgaattctataattattagcttgcaagaaaaggatacatatataaaccataatgacaaagctaaactgggtgtagcagcttcagtggattagttcaccagtaatttcagacatctgtaacagcttgcaatgtcatggtaggccaatatgctgatatcttatggccgctaacagaacctgatctcaagtgaatatctctgccgcctgcttgttctaaggcttgatgctcattctgcaattatatttagttatagcaatatttaacaactactatgctatgagccttatcgagtggcgtccattcataatctctgtgatttttatattagtgctttaatgcaacttctagtctatttagcattgtggccctaattgctttcatgaaaagcatcctttagatgtattgcaaaaagcagcttgaaactgcaagctgaattggagtttttaaactattaacatatcaaatttgctttttttttcttaatctggaaaaatcccaaaatagactctttcaggttttgctggtttatattagtggtacactattctacttgaattgctactggattggattctataacagaaatgtttctttgctttttgctaatggaatatatgacatttgatccttttgattcattcttacagaacgtcccccatcagaagcccctcttgattggcca

SEQ ID NO: 48964 - DNA, 625 bp, Ricinus communis
  Intron number 3 from transcript 29739.m003642 (locus 29739 .t000078) derived from phytozome v7.0 (chr-ID 29739; pos 4 79836 to 480460)
agcacgatgtaagtctagttcatatgttcttgaattaaaatattttatgcttcttggttatccctgtagactctgttcacacatgttatgctattacaacaattttgtttgaacctcttgtagtggggtttgtctgtgcaatgtcgtgagtaatgaaccagttttgtcgcagatgtgtagtttctatgttgcttagatatagtgtatgtatctctgaaaaagaaaaggttgagaatacctcaaagatgcatttgataatggtcttgtttttcttctaaaactctttaggctagagaactattcaattgaattttccttcagaaccagagaagtcttctttaccccattctccctagactcgtgttcttctagttgcttttttggtcagctagtgagtttaaatcaggtcaattttgaattccacacttatgtttatagttgttgatagataaccagggacagaataaatgaaaagtctgtagttatcctttcagggaacaggcaatattcctttggttataaacttgtgatccttgtttgaaggttaaaacatttaataatcaagtaataatgatgttagtttactattaatgctttatcatttcttatcttgtaggtattggtt

SEQ ID NO: 48965 - DNA, 547 bp, Ricinus communis
  Intron number 1 from transcript 29634.m002079 (locus 29634 .t000025) derived from phytozome v7.0 (chr-ID 29634; pos 1 70660 to 171206 reverse strand)
gctggtaaatttctgttttcttataaatttttgttcttccatttttgctctatgatactgttgctttgagtgatttggttaaagatgttggaattttagattcttggtctcaagtttgttaataattacttgttattgaatagggtaagagcaaataagaactgagtttatcaataacgggtcttttgattagttgttattaaatagggtataggaactgggtttattaataatgggtctttggggagaaagataatctttttgtgggtttctagaggagagagatcattttctgttagtaattcatactgaatagggtaagagcaaatatgaactgggtttatttataatcgttgatggagaaagatattatctagtttgtgcttttctctggtgatattactttggtcttggtaatagtttttctttttggaaatgtggactcgcatttgtgcaaatgttttgaggtagatgttaatgcgccgatattgtgtaaatgttttggaaaacagcaccttcaaaaagaaggctccaaaggccataaagg

SEQ ID NO: 48966 - DNA, 697 bp, Ricinus communis
  Intron number 1 from transcript 27758.m000335 (locus 27758 .t000016) derived from phytozome v7.0 (chr-ID 27758; pos 1 74923 to 175619 reverse strand)
ttctagggtttctaattctgatacagtgctctcaggttatttattttcttacatattgtttttctggttattttttatatatttgcatttcatcgtacaatttgattttggtgccattcttatctggttatggtgtatagtggtttcctaatattagggcttcagtaatttgtgattttgtatgttaacttatcgaagatgccattggagtgtgtatggaggaaaagtgtaattcttttgtttgcagttatactacttgactatgcctgaggaaaagtgtaattcttttgtttgcagttatactacttgactatgcctgtgtctaaaatcttactccactttttttttttttgggtcatttggggaatttcatgttgccaactcttgatatatatagattgctatcatccagtagagtccttaatttacttaagtggtatttatcctccaaacttggatgcatctgatgtgattttgtttgtgccaggttacattgaaatactgagtagatcattttgctgttccattacttgtttttgtttggatatcccactgattcttttgtcatttccccaaattttatgcttggctgggaatactttcaaccatggcatggtcatatttctgattcacaacctcctttgtgttttcccttctctatatcctttttctttttcaaaggaagcagtcaatttgt

SEQ ID NO: 48967 - DNA, 663 bp, Ricinus communis
  Intron number 3 from transcript 29647.m002049 (locus 29647 .t000057) derived from phytozome v7.0 (chr-ID 29647; pos 3 81313 to 381975)
gcgaccttgcacctcggcatactaaacttgagcaggtgtcatttagcgatcctttcctaaggtttcaattttatcatgttatgcagcaccatcttttttattttctcttctttagcagcaaggaactagccgcctgccataaatgtgaggatgtgatattttctatgtttggacgtttattctacaatccacaccttgacttgctgcagagaaaggatggtcattgttgcaacttatttgtttttgtccctaggtttttgtttcttggtttgaatattactatcttggtgatcattgttctcttttcctgtatgttctaatgtttaaacctcattggtcttcttattacatgcaagtgcacacatttgaaaagtatgttaaacttgttgtggcagcaatgggatcttttttctttatataggagatgattttataggttactaaagggattattttcagcaccatatattattttgttgagtttgctcaaaataattttaactttatgatttctttgtttgtttttttccatataaacaactcggttggttaccttctctttttttagcatttaagttttgaagacttgggagtgaaaactgtgactagatgtacatatctcataatcttttttctttttgttgattttacagattttacttg

SEQ ID NO: 48968 - DNA, 568 bp, Ricinus communis
  Intron number 2 from transcript 28623.m000404 (locus 28623 .t000017) derived from phytozome v7.0 (chr-ID 28623; pos 1 35930 to 136497 reverse strand)
ctctcaccagaactgagggccttcgtttcgccgtggtcagttctttatttctttaattcctcaatttttatacttcaatttgaactgaattctgatgccttgttagttgcaataaaataataacaaatagtaatgtaagcttatggttggagacaaagaagaagctgaaacaggtaattaattgcttcgggttccatcggattgaagttttgcttgttaaaatgaaataagataatccgattctatgcttctcacttaaaatttcgtggtttttaatgtctaagtttgtcttaattatagggttgaattgcattcccaactaagctttttgtgaaatattgaccacagttttgaattttgtatttgaacttgcttatccttgagcttcatgatatgtttcaacttgcgccattttacctataaatgtagttcctcaatcaattaaatattaagggatatgctgttttcaattgaatttttttcataattaacttgttctcattactgaaaacttactgtgattaacatgataggttgtagcgcggtttaacgagattgttacaaagaa

SEQ ID NO: 48969 - DNA, 720 bp, Ricinus communis
  Intron number 1 from transcript 29693.m001985 (locus 29693 .t000023) derived from phytozome v7.0 (chr-ID 29693; pos 1 92516 to 193235)
ttgggctttcaccttgttgctctttagttccattggtatggtttttattatcgtttgaccttgatagttcagtttctttaatctcgatttttcatgtggaaattgattctgaattcttgaattctttgtttgagtggcatgttattacttgttgtgtcttgatgttttctcggaaatcttcagactctgattagtttctggttttggtttgttgtgtcatttaattgtgtgagattgtgacttttctgtctttgtattataagacttaaatcatattttactagcgtatgagctcaatgaaggtactcctgttatctgcaaagaattcatatacggtttaaattgaacataatctgtaaattgtcctctgcaataaaagaataaaacaagttggagaaacctgctcctcgtcattgaaagttttccgaatcatgcttgtgttactggatagccaaaatctttccctccaaaagatagccaagatagctgacggagtgcaatttcaggggatgctgatgagcgtctgtgctccgattgctggatgctttcttttcttgtagatttcattgttcaaaaggactcttttgaagtgcctttaagagaccttatatgtttgatatttttgataaatctgttatgtttgaaattaaagagattttaatagtcacctactaaactttttcagaatattttggtaaggcggaagcaatcagttcggaa

SEQ ID NO: 48970 - DNA, 658 bp, Ricinus communis
  Intron number 1 from transcript 29751.m001798 (locus 29751 .t000013) derived from phytozome v7.0 (chr-ID 29751; pos 5 8361 to 59018 reverse strand)
gtaagttctcgaatttgttatctttaattttaattgtaattcagttactgagtttttattttttatttttttagttgtgtagaattaaggctagtggttttttctaaattgttttgggtatgttagggtctctataatcacttcctttttttttttttttttgtggttttgatttggtttcaaagacaattttttgcattgggtaaaagaatcatatttataatttaatgcataaattgaatataaataaaatgttaaacataagttatcaattttaaaattggtcaggtattcattttcatggtcaatagttttaggtatgcttgaattttatgtaattttaaaaataaattggagtttatgttttcttgattcggtagaagatctaatcttttgcgtttgtatttttgtgtttgtatgagtattttactgaaattttatgaatcagtaccacaaatatatagcctaaaacccttaatttcaatcttttaaaagcaataaatttggtaagttttttatttttatggttctctagtttgttttgattgttcacttgttctttgggatcagaattggtagttgtttacttgtgttggttggattctttttctttttgtttatgtatgtgatttttattgtattgttgatgctgccccag

SEQ ID NO: 48971 - DNA, 548 bp, Ricinus communis
  Intron number 1 from transcript 29772.m000310 (locus 29772 .t000003) derived from phytozome v7.0 (chr-ID 29772; pos 1 7403 to 17950 reverse strand)
cggtgcggctcctcctttatttttatttttcttttgctcttttggctgttagttttgactttcgccccttttttatttatttttcttttttaaacccctctttagtcttttcattacttctaggtcctggagtggcaacaacaattgcttttggaagatggaaattttgaattctgtgtgctaggtgagatttcacttttataatgaagataaagtgattccctgttacatagcccaccggccattaagttatctatggataaaaagaaaacacttgaacttgacgccgtgttatgtcaatgaaaagttttgcttttatgggacaccagcctttctctatttgttccagtttgcaccccttatcaattggcagactgcttcagaaagctttttatagatacatgccagctcagtttcttaatgattcacatacaattgtttcttattttctttagtccgagtgcattgcaacttttaattatgtgaacaatattactcaaattacctttgcaggtttcatatttcagaatcattcattcacaaccaga

SEQ ID NO: 48972 - DNA, 490 bp, Ricinus communis
  Intron number 2 from transcript 29640.m000414 (locus 29640 .t000012) derived from phytozome v7.0 (chr-ID 29640; pos 7 0507 to 70996)
aatcagcttgaaaaggtttctcctttttctcattgttattattgtttttcctaattcaatttattttatatatttatgattgcactggtactgaggcgctgggtgttgtgaataagttgacctggttgcctattttcaatgtgcaaaatcaattgttgggatccgctttgcagcttaaagtattttctttgtttttttgctgcctgtaatgcccatacatgtacaagagttttgatttttgagctattttattaacctaaatatcctgtctcttttacatttaactaaactttctttgctactgattgtttgcctgttttgatttttgacaatttttgttattcccaatgtgcttcatgttttacttgattttatttttctggtttggcaattattggtttatcctgtttttcttttccttctcataatggttcctggttcctggtattgtacaggataagaagacgctgaagttggggcctgaagataa

SEQ ID NO: 48973 - DNA, 558 bp, Ricinus communis
  Intron number 1 from transcript 29748.m000389 (locus 29748 .t000013) derived from phytozome v7.0 (chr-ID 29748; pos 2 40950 to 241507 reverse strand)
ttggatcactccctgaagtttttgttgagcttgaggtaaggagctgcaccagcaacaatgtttttctggattactggactatgcttggtatttatgcttcagtacttattttagtttttcaagctagcatttttccatctaaggcacatgtatgtgtgcaaggttggatggactacatgcatgtgagcaggcagtcatgtcttatccttgcttaatctgggatttagatggtttgagtagggtagtatttgattttgttataggtgaatagttaatcctccctcgtgtatcacaacaggggttacctgttgccgataaattatttgagcgtaaatttgctgaaatatatgatactttttgtgccattcttgtatgtttctatagcctaccttttgctacacctaatttgtttttctttccattttggtgattctagattagctttattttttcatttgctatggaagatacttgatagaatttcatgttcctcggatgctaataattttctcttactatgcaggtgaatttctttcttcttcgacgacttattggtgt

SEQ ID NO: 48974 - DNA, 703 bp, Ricinus communis
  Intron number 1 from transcript 29804.m001500 (locus 29804 .t000031) derived from phytozome v7.0 (chr-ID 29804; pos 7 23923 to 724625)
gttcactcctagaaggtgggttgttttttttttttttttttggcttttgcttcttgattagcaattttttgtttctggttctgggttgctgtggcttctcaagagttttgctaaaaggttggatttttgtgtatttgataactttttgtataattctgggtgttgatttgcttggtgggaaatgtacgtctgggttcaaaatttttaagactgaatgaggcttctgtttttactattttttagattctcaattggatgagagtgaagacatgaagagaacaagttatctaattgaagttttaaaactttttaatgaactaatgagaatatagtggcaagtatacagtttcatttccatatgtttgttcatttacctttaatttagaaggtaaaaccctaatgaaactagtgatggcctatatttattttatttaattattttatttatttatttgtaatctttttatcaaacgcagtgggcaaattatctattcatgataagaagccgggtggttttgttattggattgagtgatattgtctgatagtttagaaattttgacttagcattgtatgattctgcagcacggatttgtagattttgtgcttcttgtgtgaagtttgctgctataatggtgtatgataagctctttaaccttatttttgcaggctgctcgttattttttgtatcatcaacttgataa

SEQ ID NO: 48975 - DNA, 690 bp, Ricinus communis
  Intron number 2 from transcript 29804.m001500 (locus 29804 .t000031) derived from phytozome v7.0 (chr-ID 29804; pos 7 24699 to 725388)
cacatctggtagcggaatacagtaagacttgctcctttcttttctttggatgtctaatactctcccttcaccctttgcgggtagccctcctaatggacttaaccacttgatctgaaagaccaacctgagctactttaggtcgccaagatgtgagtccttgttggctatcacaaggccttaaactgtttggttggcattttaactcctttcttcctttaatctcagattgagtggctgttatggcgggatgctaatttctcatatttctactttaaatgtaatagcactactcagcttaattattcaatcttccaatatgcctcttgtgaggaagtttctgtttccttaaaaggaagctgaaaagtaaagactgagaaacctagcttctgaaccagtgtccatccaatgccagtgtaaagtatctgatttttgctacttgcagaatacaattaatctgttttaattggtaaagattcaaactgtatgttctttttgtttcgttccccttataagttctaatttattcttaactgattggaatttgctctcaatattactcttgtaccaccttctatccgcccacttgagaactgtcgcttgcatattttgcagaaactcaaaagcagtttttttttaagtttggtttccttgttgcgtacaggggggactttaatctaaacaattttgaag

SEQ ID NO: 48976 - DNA, 557 bp, Ricinus communis
  Intron number 1 from transcript 29808.m000893 (locus 29808 .t000004) derived from phytozome v7.0 (chr-ID 29808; pos 2 05096 to 205652)
aaaggtgaaactactattaacattaatattcagctaatgtttccatttccacccaactaaattgcttctttagctcttacaataagttgcatttatgttttctggccaaaagattttgttacctaatttgcttgcaagtttatatttcttttgtcatttaggagaagataagggaagaagaaaaacagagaactgctctgttctgagctttagtcaacgcttcccaggagcaacagaaaaattctttcttggttttttgtgacttttgattcaaacttagaatgggagcaggacattgttactggttcatttatttacctgattttgattcagtttagaatacagaagtttctactttggttgatgtcgtgctattagtttatcttaattccgcattttccatcatagcttatgcagattacatttaatttctataattggtttattgttccttgttcttggcttcttccattgtggagaaaaattgactttggtttctgtttatctgtattgtgaatgcagtgaattttctgatatatttgacttggagtatttca

SEQ ID NO: 48977 - DNA, 1005 bp, Ricinus communis
  Intron number 3 from transcript 29333.m001082 (locus 29333 .t000045) derived from phytozome v7.0 (chr-ID 29333; pos 3 22078 to 323082 reverse strand)
agtatcatcttcagtgcatccttgagtataccatattatatttttcttcattgttactttgtgacagttatcatgttaattatttttaaataaatccttgtatgtgtgtttcgtttttgttctattgtttatttgatattatcgccatgcttctattgggcttcaggcttagaaaattgaaggaagaagtagatggagcatcatatgatttttctgttttaaattttctgtagaaaatggatttaatcttggaacttaagcttaagatattgaactcacttgattggatttagagagaggggtgaggacccaatcatgattttgagaaataacttgacatatgaaataaaagagataagtttttaatacttaacatgatttgggggggacatataatttggatgtctttgtgttgtctaatttgataccatcgtggattgtgctatgctatgtgttattacttatcaggccataagagatgctctggtgatgctgtatcattgatgtaatctgttgcatctttttgtgcagtttgtaaaattttttccaacaattgcaacctaagcttctttctgacaatccaatccctattttattgctctcttgtttgtcatctacaaaagcaaaacatagtctgaatcttctttggtcagtgtttaatgttttctcatggaaatagtcagtggcttgtatctacatgccccgagttggtgatatgtggtttccataatagataaccttgacgctaaattctagatttatgagggttttttcctctctttatctcttattttagatttattgcatttttaataatcctagttgagcgatctagtatatatgagaacgatatacatggctaatctgcttaaagcactagttattaatggtcgatgtggatcactgaggtgtaaaaggtgttgtggaaaaggatgaacaaaaagaaagccttgacatttacactagattatgacatgtaggtgccagagaagctctgattgcccc

SEQ ID NO: 48978 - DNA, 591 bp, Ricinus communis
  Intron number 1 from transcript 29598.m000464 (locus 29598 .t000023) derived from phytozome v7.0 (chr-ID 29598; pos 1 18152 to 118742 reverse strand)
tttcatcttctacaacttctgttatcaatgtaagtcttttttctttttctctatctttattatgttttttctcttctgtttcttttgtctaaatgctgctgtttctgttgtctattaactagcatctgctttcttcctttctttgtcttattattattcttattactatgttgctggtgggtttatgatgatgggtggagttttgagtttgtttgtatgtttgctctgtggtggtgctaggacgacaaagcatttgggttgtcatgtttttggattttgttaatggtagggttagcacatgggttatctgttttggtttctttgtgaagttggaacatgtattagatatcaatatgtctgctatttttaaggaacattttcattttcttgctactatgaaagaaaaagggtaattacttatcttgtctttgcattcactactttgtctttaggtatgagaataattatttgttcatcatgaatggtatttgcagatgggtaaaatatgtaaaaatgaaggtttttgaaggctaatttggtcaaaagtgtgattcgtccttggtttgtttgcaggatagagattctgttcac

SEQ ID NO: 48979 - DNA, 866 bp, Ricinus communis
  Intron number 1 from transcript 29773.m000278 (locus 29773 .t000002) derived from phytozome v7.0 (chr-ID 29773; pos 2 4540 to 25405)
aagaggagggcagtactgctcctttccccgaaaaggtattgaattatgtttgtaattttggctgaattggttttatttgacatgaaatttgcttcatttctggtttctagactcctatttatttttagttttagttagtgttgagaattgcacaagtttgtttaaatgtgtatatgatcgatttttaatttattattttaggtgcccttagaggatttgaataaaaaattatatcttacgcatttagctgaggtttctaatttagcacatttgtcagggctagatgattatattgcttaagctagattaataatttatccaatcttcagttattgaggttttagtgtaggtggatattttgttctactttattgttgctgtttttttgaagttctcaagtgcaaagtggtgttttcgacatttagtttcagacatgttagtttggtcatttattgttcagtgcattgctaattgagagttgttgtttgtatagtcttactcttagttctattttgtgttgtgtcccttaaaatttcgttttcgaatgggtttttgcaaatggtttaagcattgttgttgggttggcaacgaagataggccactagttgtgagtaggcatttatttacatatgcatataatagtttatgtatgtgagtttgcttcttttttgcttttttcatttgagtttctctgttgttgaatgggtctataaaatagtagaaagttctggtctaccacatttgaagttaattaagattagcatactctgcttctgatattgcttatttcattattgtaactatagaaggtttattattttcctttccaaggttcaagtgggagggtcacctttatacaagataga

SEQ ID NO: 48980 - DNA, 923 bp, Ricinus communis
  Intron number 2 from transcript 29711.m000333 (locus 29711 .t000015) derived from phytozome v7.0 (chr-ID 29711; pos 2 02109 to 203031 reverse strand)
aacaagttccagctccaagaggaacctcactctgcgtcagtgtttttcttttcttttctttttaaagttgagttatgtgtgattaggtctcttttctgtacaattatttattagttcttagttgattgctaatagtgatgcctatggtatacttaatgttcttctatgtatataaacattcaattatcagttttgtttttgggtctactcttatgtgatgtaattggtattattggtgattgttaattacacgtataaggttggcttacagattactaagtatatttatgtattttcctgtatcaaacacttaaatgaagtaattgtactgttctgtgtttcttggctaatgatatagtttattttagatgtttctcttttttccccaaagcagaaagttgttctgttaattctagtattaatgcgtggccattccttttgtttccttttttctctatggttgcaattctaagtttgactggtagttcaaattaacgaactttctttatttcatgaaaataggttgatatcgattttcactctttttcctagctgtatgttgtggcctttcttgttatatcacttaatgtaaaagcatatatgcttcatgcagataggaaaattgtttcttggtaattctgtttcatagtgtttagaaagtttaaagtatgattgaattctattgagtcaattctcatgtttggaaaggtgatggttactagatgtcaattcttttgatttaaaagaaactgaatcataaaattgacatgattttgaatgattgatttcaaacaaggccctcgtgaattttgatgcatttttctctttgattgagcatcacatgttcattggttgtgcttaagactgattagtcaatgcgtcatagtgcaggtttccagaaggggttccctgggtacggtatc

SEQ ID NO: 48981 - DNA, 400 bp, Ricinus communis
  Intron number 1 from transcript 28637.m000206 (locus 28637 .t000004) derived from phytozome v7.0 (chr-ID 28637; pos 4 3518 to 43917 reverse strand)
acttcattttggtatacttttaattttccctttctctctctatcttctgtttggctcctaagaaaatgtaattaactgcaagaaagactcggttatatttgttattggcaactggtgacatatatctgaaaccagtttcatagtgcttgggtagcctaagaatgcgattcaattgaattctattagtcaattctcattttttgaaaagaataatagttgcaggaattcatttcttttaactttaatagaagaaaacggaaaagcattttgaaggaaacgaaatcatgcctcaattgacattaatttgattgatcttgcaaatgattcaagctgtttaactttctttttttaaaattcttgattaggttgacaatagggattcaactgaacctaggattac

SEQ ID NO: 48982 - DNA, 858 bp, Ricinus communis
  Intron number 1 from transcript 29576.m000223 (locus 29576 .t000001) derived from phytozome v7.0 (chr-ID 29576; pos 1 006 to 1863)
ggaagaggtttccaggtgattgaatttggattttctttccttttcttttccatttttggaaaagatttttatgaaaaaaaattataaagatttgaggtttctgtttcaacttgtgcatagagatctgtgtatgttttatcaccctttcactgaattcttggttttctttctgtttttttattcttttctttcttggatctttcaaagcttatgacattttgtttgcagtgttcttgatttttctggcatctttgacacttatattaatgaataagaaaaaaagaaagaaagaaaggtaatgttggttacttgtcttgaaagagtgatcagtaatcaacaaaaaagaaatggtttcattaattagattctgaattttagatttgttcatctgatttttcttttctccactgtttgttaattataattctactgcataactgaaaaattctttgaaaccaatcgtaagaaaataaacaaattattgtttccttccccttttgattttgctctctataggtttccttttttcaaattttcatttagtctaattcatagtaaagaagtaaaatcagctaataaatgtgtacatatattattattgttactgcttatggcaggttggtatggtttattccatgtcatcatatagtttgttaggtcttctctcatcttttctgggattgtttttacttttcctttctttccttcttgattatataaaatttaattcttgttcattttatgtctccatgcattcttatgatcttgaaatgagtttaattaaaaataaaattcagaaatgttcttgaaatgttctcatcaggaaactagctgagcttggttttcatcgaagtgcca

SEQ ID NO: 48983 - DNA, 686 bp, Ricinus communis
  Intron number 2 from transcript 29776.m000489 (locus 29776 .t000023) derived from phytozome v7.0 (chr-ID 29776; pos 2 05908 to 206593 reverse strand)
tcaagcaatccccaacatttaataccccaagccctgtaagtggttcaccctatgttcaatcttgttctgttcactaggtatcctgttgtaatagagtcagcttcagtatcaccagaatcacgtttccgttgcttggtctttccttgtttaaagaattgtacctgttctttttcttttttctttgtttgaagttgcagcatctgcatgtaagcaccaatgcattttaaatagcctccatgagatgtaatgcccttgtttagggaaaaataagttcataatttaagcagatagaccagcatagatggatgcagtatttcgttagattttggacaattattgttataaatattctatttaatcagatgtcaacttgtggatttggttgctgatgtttattaacttcaatgtttgaagaacaataaaatgaattgtgggctgtagtatatggctcttcctgaaaatggggtcattttaattttggggaaacaatagaaaaggaaatggagacttgggcctcatcaaattgctgctgttcaagtgtcagttgtgagatccatttttcttttcccttttcccacatgctcttgcaaaatttgttgtccatgtcacagcagtgatggaaatttatcgcaattttcttaacgtgcaatttattttttgcctggcttgtttccagttctctctgc

SEQ ID NO: 48984 - DNA, 550 bp, Ricinus communis
  Intron number 3 from transcript 29687.m000587 (locus 29687 .t000028) derived from phytozome v7.0 (chr-ID 29687; pos 1 62389 to 162938 reverse strand)
gcaagtgagtccttgtaattagttgcactctttcagaaagaattttgatttcattctctaaataatactgtttgtctcataacataacaatagaaaaggtttagatttcagattctaacatcaatatatcatttatagcacacaataccagttattcattaattatatttaccactcatgcttcatccctcttcagttttattttattttaccatgtaatttctatttatttcgatttaagttattttttattttgccatgtattatttatctatttatttaattataaattaatgttagtaaaattgtttaatttaaatatgttttttcatgaaaatattataattaagggttgcatgtaagtattaataaatataaaaattattataataaaggtgtgagttccaccgttaacgttctaaatattatataaatataatttaatacctatgcaaatcagaatgcgaccacatgccagattctgacattatgacatctcattcaactcttcataggtttagcccggaagccctaagcgtgcaatcgacaa

SEQ ID NO: 48985 - DNA, 567 bp, Ricinus communis
  Intron number 2 from transcript 29785.m000971 (locus 29785 .t000040) derived from phytozome v7.0 (chr-ID 29785; pos 4 84555 to 485121)
gaggaaggaagctgagaattgtgactgtcttcaaggtatgataataataataataataatgattcatgtttctttaatcctttgatagatttaaggatctacttctgttagattttgtttattctctttaattgttacaggcttttcgtgtgtttggcaagtctaaaaatggaataatttcaattatttggattttatctactcagtctcatgtttagaaagcacatagttgctggagttcaattgaactattttaatagctaagtgatttccaggatccaattcacttatactcttgtttacatgctatattctgaacaacaccttttaaagttcttctgaacaaatcagatttctgatttaaatttcttactaactgtttgtaactaagaattgttttggcacttaaaacagatttaacttaagtactatagtttttgaaggctaaagaaactatagaattggcagtaatttttccaagtaattgtggctgatgtattcttttccttgtttttgccttttgtttttgtaggtttccaagtctgccactcactcggtggtggaact

SEQ ID NO: 48986 - DNA, 653 bp, Ricinus communis
  Intron number 1 from transcript 29668.m000324 (locus 29668 .t000013) derived from phytozome v7.0 (chr-ID 29668; pos 1 93154 to 193806 reverse strand)
aagaaccaagtgctttctacaaaaaggtcaacatgaacaatcttagacttggtctgtagtaagttagagaattgagtttattttttcaattcaatttacttttttccaattaagacagatgagaaatcttttgtgttatctgtatattcacctgtgtacttgatttgacacacttggaagtcgtataaatctcaaactttgtttattatctatgaaaacaaggcttggtaatctattttacattatgcactctgtttcttttatcaaatcttcaatggttaggaaaaatcggcatgaacctgtggagagggtctgttagtttgaatggaacttctagcatgccaaattgcataatgtctagtagtaggagatgagctagaaaatagaaaacccactttattagatgatgaatcatttacagaggatatggtattatcaatagatgaaagaatattagagaagtttcatctcttatgggagtaattatagtgcagtcttacttctccaattttattttatcttttgtgttgcccatatagtttttggtgatcctttatataattttttgtgttttttcatagtataagttatctccaataaaagtatctcttaatccaggatatcccgttgtgggtattgactagagcgacaga

SEQ ID NO: 48987 - DNA, 796 bp, Ricinus communis
  Intron number 1 from transcript 28601.m000065 (locus 28601 .t000001) derived from phytozome v7.0 (chr-ID 28601; pos 7 779 to 8574 reverse strand)
atccaggtactcgttcttttgcttgttttgtttctacttattaaatgatgtgatatagaatgagacttggaatttgggattttttttggattgtttgtattgaattttgttaattatcatgaatcaatttttgggatgcaccattggagcagaaatttaagtgtttacaacttctagttttccctttttttggttcatgaaagggaaagctaattacaaaatgcatttcagtatacaagatcactaagcggcatgggagtatctaagagagaatggatcaaaagttcaatcttcagatttttattacatcgtttaaatttttatcatgccaatacagcctgtttgagattgaacttgaatgtgaatagaatttcttaggtggatctgtgatcctttacctgatgggttaatattggttccactataataacatggataatctgatatcctatatcagattcctcctatccgggatccatgattttcttttctgaaataaaacgatatgcctgtttatcctcaaacaaagaatactgaatcgaatgcttctgatttaggggctcagatttgttcgcaatactaatgtacaataatgatctgaatgttacatccacgcttactgtatatgctggaaagagagctactatgatgatccgacatcaaaattatgtcattaattttaatggataacataatgtatcaatcatgaaaactgttctctgtcaaaactgctatcatgttacagtttgtcaccaatgcagagaacttgggaaagagcgaaactggcaactacttt

SEQ ID NO: 48988 - DNA, 590 bp, Ricinus communis
  Intron number 1 from transcript 29599.m000175 (locus 29599 .t000007) derived from phytozome v7.0 (chr-ID 29599; pos 7 4744 to 75333)
aaaggatacacaaagttcaggtaataggtttgtttgtgtttgaactctgcttttatgagtatattcaaagtcccatttcttatttttgtttgttcttgattttttctttttgtgacttccacagtaatgagttttttttttttttccctctccattctttcgtagcttgtggattttgtgagtaattgttattccttttttttttgttgtctaagctgaggcagtaacgttatttgttattgccaactaactcttttatgatctgagttttgcaaagttttcgagttagtaatttttttctcttgtgctcagaatgcttacttttggcgtttggaaaaaaagttaagaattgccttaattcttcaactttcttttaagtcttaagtttttagttgaggttagaatttttggagtttttctgattattggcattgaattttaaaaggtctaacttttgacggctatttcttttgtttcttcaagttaatgctagttagctgaatttgagaatagtcttctatgattttgcaaaagaaacgattgtagaaaagcctattacttaagttttgatttatcaattgcagactggt

SEQ ID NO: 48989 - DNA, 322 bp, Ricinus communis
  Intron number 4 from transcript 29682.m000589 (locus 29682 .t000022) derived from phytozome v7.0 (chr-ID 29682; pos 1 40422 to 140743 reverse strand)
cagatttcaaagcaaaccaggaataatcctgacaggcatgcattcacttcttttcttttttctttttgggtaatacatatgtgtttcaatttgttttctttaatgggctgggttttgaacttaagactcatgtcaacttattttgatcactttgcttaatgcccacatcatgtccattcagtttttaggtataaccagacaaaaaatgatgttttctttcatgattgtttttatttgtagaaaatgtttaactattctatttctttgttgatgccaattgtatttgttgattttggcattgcaggcaatacttgattaaagc

SEQ ID NO: 48990 - DNA, 763 bp, Ricinus communis
  Intron number 1 from transcript 29657.m000485 (locus 29657 .t000026) derived from phytozome v7.0 (chr-ID 29657; pos 1 95139 to 195901)
accgcaagagtaagtcaaactttgtattttcttaattatttatttgttttgagtaaattatatttgcttttctctaactgttatactaagataatttctaatttctcttgtttatcactgtaaaaatctacttggttatttctgttgtgtgctctgcagaaactatgtgatagaatgacttgttttgtttgtttttctttttccatttcaatttatttttatttttaattagttgaaagaattgagttctagcaactatcacctttccagataggaaaattgattaagtagaattcgatttgttctgttagacttcccaaacactatgtttatgttagcctcccttgttagaaatctgactcctcaagtgtctgcaagtcttttctatcagtttctgaaactttgccacggtgcttctactgctgccatgtagatgcaatcagttaaaagaaaaagtgtttaattctacttggtcatataagccactatgatatatcaagtgctcttctgtagtttattaaacttattttggttgccatcttcttgaggctcacaattcttgcctaattgcttttgtttactcttattattgatgatgaaaaggttttcatgtgctgattccaaattccaaattagcttatggacagcaatggtctttatttttgctgattgttcaatcatctgattttcttttcctttttttcccctattattatgaaatgaaacagagattggcctaggcttgactggatttggcatattt

SEQ ID NO: 48991 - DNA, 647 bp, Ricinus communis
  Intron number 1 from transcript 28592.m000274 (locus 28592 .t000002) derived from phytozome v7.0 (chr-ID 28592; pos 6 279 to 6925)
tcttacttgaaaagggtcttcataaatttggaactgtatgtgtttctgtgcctttccttctttttctttactgctttgctcatatgaattctttttctagttttttcactttagagttctttgcttttccttaattactatagaaattttcattgttttggttggttgtggggtgtttaaaccattaatgctatctatctcttcaactctgtctcaagaattaaagacagattttttaaaactgaaatggagaaaaaaagattggtgggcgtccactctctatttctcttccccttgattgtgattggacttctgcactaatcattatttcactatcttgctattagattaatgcattttgtactttcttctcgcacttttgcctgaaactgtagctttcaatgtgaatttatcatgtcggactaaattaattgcaacatctattctgttccttctttcaatctttatgcaagtaagaatttgttgctgaaatatcacagacttttgatttccttggttgaaagaatagttttttgattttgtgatgttgctgtgttgagttgttgctctaattgtctgtttttccaaactgaataatttcctttaatccagtggttgacacataagcacaagagagctctatttga

SEQ ID NO: 48992 - DNA, 974 bp, Ricinus communis
  Intron number 1 from transcript 29044.m000163 (locus 29044 .t000001) derived from phytozome v7.0 (chr-ID 29044; pos 6 178 to 7151 reverse strand)
gatcatttcgtgactgaaagatatcgcaattttaggtaatttcaattccgagatgtcggtttctttcgctcgtaaatttatattaccggttattacttataattaggctgcttgttgggccttgatcaataatacagtaactttgttaacaaactctggaatgcagggacagttggggtctgatccatgcatgagccttacttttgttctaattttagttgttgtctattcgtttacaatatacattttatgttgtcaaaagcttcttgaagctaaatttgagtctggattcttacaagttagaatttacttgagcaaatttaatattgttaaaggatgactgctgaatacatgtattaagttactattaaactatatgtaatagattttaatgtatgctgcaacaggaaagtgtttgctttactactattgtttgggaagagtgtgtgcaaaaatgaggtccattttatttaaacccatattcaggtcataaaagagcaacctagccgtggatggtcctcaagcttattcatgagtttaacctgaaaattttgaattgattcttaaacgaacttgcatgctaaacttgctcaataatttcttttgtttttttcttcttaaaaaaacttgaccagagagattttagtatatctgttaacattgatgaatgactgtgaacaagtttataacagagtcaagtctcagtgtcacttgcaaacagagagtttattttgtttgtaggcaaacaatttggtactttgccacctaggaaagctaagagagtacaatttcttctatttctgctttttaattttaatttgaacgacatttgctgttgcttgtatatcatacttggaccagtttttgatagcataacattgtagcaatgcgagtacatgcttagcatattgattatggaatatggtttatggcctgcctgtaattaatctattttccatatatgcagcgagaag

SEQ ID NO: 48993 - DNA, 959 bp, Ricinus communis
  Intron number 1 from transcript 29785.m000962 (locus 29785 .t000031) derived from phytozome v7.0 (chr-ID 29785; pos 3 32210 to 333168)
aattttccaaagatcatattaaagctattcttgtaagccaaataattctttgttctttttcactcttctatttatttattagaggaataatgcatcttttcttaataacttttatcataaaagtattgagggataaaggataagaataaaaaagtacgacgttgattaactgttttacaacttttaatatgtattttttttttctagataaagaaatatatatttttttctagataaagaaatatgtcgttataaatcataaaaaaaagatatcttaccattaaaaaatattatattcacaagaatttagctatttttattttaatcagcaatcattatcagatatttacttgtatttgataactcttaattttgttctttgattaacaaattgcgattttaaaagtttttaatataataaaatcgatttgacggttaaatattaacattttgaattattaaactctaaattcaaatataaacaacataataattatgtatgatcggaatgaatatggttgagtccttacaaatcaagactttttaacagtaaaatatttttttattataatttataaccatatgtctcttcttatttaaaatttaaatacatatattaaaattataaaataaaaaaaactacatagtattttttttttttttacttatttcaaatattaactcccaccgttaataatcataaactaaaatttaaatgtctttgcactctcaactactaagaggcccattcttgcgatacaggacaagttgaagtaaagagctcctagtgtactggttttactttgtgaaatttaaatttatcaggctacagaggagaaaaagtgatgaagaaatatgtgttacttttagaaagtcgcatttctttagcttttaattgactatggtacaaaattctttattcagaatattttcttggctggagtggacactggagcaat

SEQ ID NO: 48994 - DNA, 537 bp, Ricinus communis
  Intron number 2 from transcript 29647.m002061 (locus 29647 .t000069) derived from phytozome v7.0 (chr-ID 29647; pos 4 39123 to 439659 reverse strand)
aacaagaggtctctctttctctcttctttattttatatgactataataatgatgataattttctcttctttgatttgtttctgcatagtaatgaatttgaaagcaagtcgctttgagtgagatcaatttatgttttgtgtacgattcggctgagccttattttaattattgcatgcgttgtagaagtaacatagcttgtagctcatctatgccatggtgaccttttgagagaaaagtttgttttaaaatggacactcgttaatgcttctattgtatttattttttaatggttgatctgtaactaggttgtcttttgaacaaagagatttagataaggcttcatgagcctagggatgtttgtttatgtcgaagttttgtggttttagctcgtatgtcttttgctttattgtattgtttctgctttaatgtaattcaattggactacatacttgattgcttttgttttagttttttctaatttgagtttctggattgtttgcagagccggtgagctctcagctgaagagcttgacaaac

SEQ ID NO: 48995 - DNA, 747 bp, Ricinus communis
  Intron number 1 from transcript 28883.m000745 (locus 28883 .t000035) derived from phytozome v7.0 (chr-ID 28883; pos 1 98189 to 198935 reverse strand)
acaactcctggccgtgaatctgagtttgatttgaggtatatgcacaatcctttctgtgggtctgactgaattttcttgatgtttaacttgtctttttaattgttgttatatcttttaagtgcttttctttcgggatgagactgcattattatcataaacctatcctgcattgcatttgtgatatccgccttaaggagctacaggtattgtgtgaacatatgagcatagtagtggggcatttgagacccaaagtgagaggtgctttcttgttttgaaaagcagcttcagatgaaaaatactttggggtatttggttttttgtgtttttatcatctcaagtagaatcactcaactgactaattgccatgttctccttctattagattttcatcttctttagggcaatcatgatagtttagttgtctttccctaccaatttattgactgacaactcaaatgggataacattcccaccttcaatgcccctcaaagtgcctgtaaaaaatttaattccatgccatcaaaattcagtgccatgccacttgaaataacaccgagtgactttacctgctaaacttgccttctttcaaccttctacttctctatttcttgatatgatatatttgttttcttcgttgaaagtagaaaagaaaatgttgaacgatttgctgaagatataataatagttgttcttttctattttcattattcaggaaatcaagaaaaacagcaccaccttatcgtgtga

SEQ ID NO: 48996 - DNA, 759 bp, Ricinus communis
  Intron number 2 from transcript 29706.m001340 (locus 29706 .t000070) derived from phytozome v7.0 (chr-ID 29706; pos 6 17407 to 618165)
ccatccgaatccaaacggctttccgaggcttattggtaaatgggatctcctttgtattttgttttcttgatttacagataggtttctagttttattttacagtttcaggtttttgggtcactatggtttttgagattaataatagctaaatagtgagtgaagttattttggcaaaacagagaaactatttcaagttattagctacagattacttgcagattagagatcttttttattagatggaaattctgcttatgtataattacttagttggatcaattattgcccaaaatagacaaaatgaacaaacaagtaaataaagaaatgaaacaatttatagcttttcaccagatttgatcatcgtaagtacattggaatatgattgcacaacaaaatatgcaaatttccacccatcataaaggggaaaatttttaatgtgctattaattctaatttccagtcaaatgataaatgtttaaacttctttgggtcgagtgtaaattatggcatcttctatcaaaagcaaagacaagaagacacatttgtttccaagtgaagaatcactttgattgttgattcctgagaaggactttgatttatgaaatttatattcatataatgtagttagtgttgtcaattccctgttctgttgctatccgattgcattgcctgaatagctcaggatttctttatatgttactgacatggtgatctattttgggcaggcaaggcgggcgttgagggccttgaaagcagtggt

SEQ ID NO: 48997 - DNA, 822 bp, Ricinus communis
  Intron number 1 from transcript 29792.m000594 (locus 29792 .t000002) derived from phytozome v7.0 (chr-ID 29792; pos 1 6278 to 17099)
tggttttacttaatctttctcgtaatcaacttgaggtatatgtatgacactgatttagttttggccttattaactatttatgtttgtgcaattaaaacagatttattagtgtttttgctatttatttactagtttgtgacttcctataaatacattttgagcttctttgctaagtttgtgagttttttatgctaatgccaaaattgatgtctaaggttaggttagtagtttgtgcaagaacttcgaatatattgtcttggcttaataatcaatctaagaattttttacatcttttgctcttacaaatgttatgctgtctgctttgcatacacgatttttgtgcctgccaattctgacatatatgctgggtcttaacttgatttggggaatctcaggtgtcaaactatggattccatatagtaaaaaaaaggggggacatgctatatccaaaacgtaaaagatatagtaaatatcataaaggcagatgtagtaggggttgcaaactggacggtacacaacttggttttgggagatatggcacttgacatttttcctttagataattctatcataataatattgtactcaacaaggcatatgagaacacatctggtcactagtggtcttagataactaatagcattttgtaacgacaggattggattcatgagatcttggcgtagtcaacaacttaatgtgatttatgcatttgctggttaatactttagtaattggggtatagctttctcagttcttttcttgataacttcttgttttgcggaaataggtccttccagattcaattgcagggcttcagaaact

SEQ ID NO: 48998 - DNA, 523 bp, Ricinus communis
  Intron number 1 from transcript 27889.m000171 (locus 27889 .t000009) derived from phytozome v7.0 (chr-ID 27889; pos 6 3287 to 63809)
tgtgactactacgaacggtcccctcagttttgttggtaagtccaaattcatgtttaattatcggattaaatgttttcaaaacatatactcatgatatgctattattggcatccaatggtggagagaatatatgcatgtttcacgtcaaattaagattaaaatttctcttaattttgtccgattttaaaatcgtctatggaactataagatcttaattttagaattcaagtcaaatctaattaataattagaatattttttttctgagacctaattcactcttaactatacaactataaatttaactattagattttgatacgatagctaaatatttagtactggaagttgagatctcgaatttgagatcacttttttttaaaatataataatttatttttactttatgaaaagagttttatcgtttcttttaacctaacaaagtaatatgctagccatatttaagattaaataaagagaaaagaaaaaactaaaagttgtttcaaacgaaatctggcaggaga

SEQ ID NO: 48999 - DNA, 685 bp, Ricinus communis
  Intron number 2 from transcript 29747.m001059 (locus 29747 .t000016) derived from phytozome v7.0 (chr-ID 29747; pos 1 23325 to 124009 reverse strand)
gacaagcgaattgggcttaaattcgacagagtgaagtaagctgttctacttcagtttaatcataatttgcaattcctttttatgcttcacttggagataattgatttgcttgctgatatttttctatatttctttcttccttcaaaaaattgaaccctatatgtcaagtatttgtgtgtaacaaacaattgatgcttttggctattctctgttctccccttgtccatttcttttttgcttgttggggcagttgttgcaagggataagaatgatcatttgatggaaacactggtcttttggagtaattaaggaatgcaatgcttctctctgtattatttgccatcttctctgtagttagtatttgtgtcttaaagcctcattcttggaggatggcttggaatcaaagaaaatcgtcttttctggtttcacatacacttttgatttacttttgctgcttagcaccttaaagagaatctaaattgtttggcagtggtggtaaactttctttactaagttatgctaaagaaacagaaaactgataaatccatagatattatccacaaagctttttaatgatcgccaagagcgttatcaaataaatatgttctgttcttgtttagtgattctttcctttgttttctgaactgcagttattggttatcagttggtgctcagccttcagacc

SEQ ID NO: 49000 - DNA, 438 bp, Ricinus communis
  Intron number 1 from transcript 29747.m001059 (locus 29747 .t000016) derived from phytozome v7.0 (chr-ID 29747; pos 1 24015 to 124452 reverse strand)
atcccttggctggtatagttttctttttcattatcatccttttgctttctagaatatgtgagaaaaaaagtatagaaattaggagactcaaggttaatgggttccgtttcttctgttggtaaaaactgatatttagttgtttctttggtgatcctcttatatgttctacctgataattattttgttaggctggtaggggttttggtttcatagaatggagaaatcaagaactaactcatctagtgccagtgaaactcaatttgcaaacatatgaaaagtatatcaaatggaatttatgtagaattttgtatagtttgattgtgcgcaagtgtgtgttctttttaaaaattcactagttgctcgtctgataatttcaagcttcttgttaagactgttcttttatttttcttttctcttccatacttttaacaggtaaag

SEQ ID NO: 49001 - DNA, 634 bp, Ricinus communis
  Intron number 1 from transcript 27394.m000347 (locus 27394 .t000008) derived from phytozome v7.0 (chr-ID 27394; pos 5 4375 to 55008)
aatacagggtgtgtttcctgtttcttgatcttgttttagattttttcttcttaatagttttgttttgtctgtttcttgggtcaattgatataggctatgttttcctggacttttcttggatacatatacctttcttgcaaatctttgaaatttttctttcttgtttattttcatttttgttatgatctgcacgtaaatcttgttctttcattcgttttgaatgaccaattttccttagcttttctccttcaacaagaattctccatttcaatcaattcacttatgatgaagtttccaattttgggattattagagcattaagacaaaatatacgtgttaaataagtgcttcaatttctattttccaattgaaccttatgcttcaaggcttcttttctctacaatcttagctgtgtaaatttattttctttctcagaattgaattcctttttcttctttttctttttactgtttatgattattctcaggttttgttaaaagaaatgcataatttaccatacactaattaatagacatataaagtataaacatccattaattaaaaaatcattgtcttcgagattatgattcaaatttacaagtcttttctttctgggttcagataattgtgaagg

SEQ ID NO: 49002 - DNA, 560 bp, Ricinus communis
  Intron number 1 from transcript 28333.m000572 (locus 28333 .t000018) derived from phytozome v7.0 (chr-ID 28333; pos 1 65174 to 165733 reverse strand)
ttttgcttatttactgctacttctgggtaagttgtatataaacatatactaagttcatcattatttcatcaaatgcctgcaaattataatattatccttatatattaaattaacataataaaactatttgcagttattttacttttctatgatagaatatatagtatccttctgttattgttaatttcattttgtttggttggtctacagacctgcattacctataaactttattttagaacgaaaagaaaaaattgtcacaattacatagagctgactttgagccttaaatatggaaaaatagctcgatattaattcagctctgaattgatagtatcagtcatttcctttgccatgaaattatttcttatcaagcttctcctataataacaattttttgattttttatatttacaagcatttgcatgtctaaggctaggtagctttattatcaggaacgaaagaaatgaccagtcctccgggtttatctccataagataacacttgcaattcatttgacagcagggaaatttcgcccattgattactgttcatctcctg

SEQ ID NO: 49003 - DNA, 879 bp, Ricinus communis
  Intron number 1 from transcript 28455.m000358 (locus 28455 .t000005) derived from phytozome v7.0 (chr-ID 28455; pos 5 3507 to 54385 reverse strand)
gatccagtttgcttgatacattgaggcaattagaggtaacattgttgtaaatgctctgatctgtcaacagagagaatcttctaatgttcttgactgactttatctttaattgttgttaaatcttcgtgatatctgaagacattaccttactcgactagaagccttttactaggtttaggacatcactcaattctatgtgcacactgtaatgacagttatgcttgttcatgaggacattctttttaggctttatagcttagctgaattactatgttttttgaattggctactttaattatggcttttgaattgaataaaacaggatgttattcagatatcttgtaacatgttatgctaacagattcccaagtggctatatttctgctgatgatattaaaacttaagatttttttttttgttattataagttattggcaagaaataaacattgttaatggattgagtgaatcaccaatcaatttatcaatagcaaaaatttaaaggactgtgtttcttaaacaaggcaagtattttatgcctttgaaaagattggataacctcagtatttgtgatgtggtattcttgacgtacaagagttttatcctggaattgcactacctgcaaaactagtgacaaaagttgcgtggaaaagttggcattctagtaatttatagggagacatttttgtggactctccagatacaattaattttacagcttatttcggcatcttgtgttttccttttatgttacttcaggccctcgttttgtaaactatttattcttctgcaataaagcttgcataatctgcgtagcaaatcaagaatctcttttccttgtgcaggcagctaatattgaagctgagacgactggaattcc

SEQ ID NO: 49004 - DNA, 746 bp, Ricinus communis
  Intron number 1 from transcript 29739.m003769 (locus 29739 .t000205) derived from phytozome v7.0 (chr-ID 29739; pos 1 254370 to 1255115)
ctgctcttgaaaaagctgctgctaactccaatcaggttattttataaatttatgtatttttttattcattgttcttagaattttaattgttttgcttagtaatttgattgtatgaagtgtcatttgtatgtttttttttgctattttagaacacttgcagtacttatctgatgaaattatttttagctattggctggtcttatcaacagaagactgaaaatttttgacttgtgaaaatatgatttggaactgtcttctatgagcttgtacctgtaaatttaatactaaataaatccttagtcgttcccagtaacatactctagtttctttttctgagatataagtgcagggatagtttctcctgcttttagatgattaaaacaattttaggacttaatacaaactgcttttccatttatgctgctgtatatatatatatatatatatatatatatgctgagagatagagtcataagaccatacgggttgtgtgttttcctggacatttcattatcaatatcttattgctttaaaatttttgctttctctggtaatctaactttgtattgtacatggagatgtgtttttctgttttcactatttttattatgtgattttgtaactctgtatatgcatgcgtatgtgtattcttgcatttccttcattctgatagatggttttctttatcttatctgaaatgtttcactgttcgaattaggatttacctgattttacaactcaagtcc

SEQ ID NO: 49005 - DNA, 639 bp, Ricinus communis
  Intron number 3 from transcript 27887.m000074 (locus 27887 .t000003) derived from phytozome v7.0 (chr-ID 27887; pos 1 2174 to 12812)
aactcatcaaggtaacacttcaattcaaactactcaaatatcataaaaaatactgtgttgcctcaatatggtagttacaaattgacttgacaaaccaacccagctatatcttcatctttaggcttttgatatttcatttatactatcgttcctgaaccatccatatagcctgcactgagaattagaaatttagaacagcttcttgtcatagattgtacgattacttttttctacagcacagtctattttctggcctatgttagatttattgttttatgttttatttatggttaattttattccacaagtcttagttgtcagttaatttctattgagattaaaatgaaaccagaacaatctaatctctcaagtaatataactagaaagggagaaaagaatcattgctatgcattctgcatggtttcttccttatgtcatttctgaggatgaaaaaggcactgttttattaaccaaacaattctatcaatgctactttttaagattatgaaaagaagtcacttggctatttccttggctgtctttattcacatgattgtcaagattcttatgctgttttcattttgatgccgatttgtctatgacaatgcaatttgctttctttggtgggataggtattag

SEQ ID NO: 49006 - DNA, 552 bp, Ricinus communis
  Intron number 2 from transcript 29692.m000527 (locus 29692 .t000010) derived from phytozome v7.0 (chr-ID 29692; pos 1 24768 to 125319 reverse strand)
gttgcatttgtgctttctgcggtttatctttacaggtgagatgttaattggttactaaatgttctgtgacacccggtaccaatattcagtcggtatgggatgcaactttagaagttctaaatgatttactcaatttgacatggctaagggtttaatattgtttcatttgatataagcatgaaaatttgatagtttatccagaccaactccacattgcaaatgggttaatgctgtttccttgataaaagcatgaaaatttgttaatttacctgcaccaactcagcatcaaaaatgagattaatgctgtatcctattataaaaacacatgaagaaggtaggtccaattgctttcactcttccttggttttatgttgaaatgatctactaggtggttatgcttagctataattattagataattaataatgtgttaagtaaaaggaatcaattatttggatactctctgctgtaaataatctgattgctcattgttgttcttccctttgttgtccaacaggctttcagtaagaattttgaaggatccagaagctg

SEQ ID NO: 49007 - DNA, 259 bp, Ricinus communis
  Intron number 1 from transcript 28524.m000012 (locus 28524 .t000001) derived from phytozome v7.0 (chr-ID 28524; pos 7 104 to 7362 reverse strand)
aagttggttgatttgtccaacaagccagagtgaatagcctttatttcttttattaatggtcttggatatattcagttttgagcttgactatagacatggaaaaacaaatatattcaattcttgtatcagtgattaaaaccaaaccgaaggttctcttgttttgttcagtcttcttggtttacattgcaatttattttctttttcatatattccttggtgtgcaggttcttgaaaataagcccggaaggtaaagttcctg

SEQ ID NO: 49008 - DNA, 519 bp, Ricinus communis
  Intron number 2 from transcript 29794.m003357 (locus 29794 .t000056) derived from phytozome v7.0 (chr-ID 29794; pos 3 04938 to 305456 reverse strand)
cagctagcaggggaactgctaatcttgttcagaaggtaataatgtttcttctatttaagagacccattgttttgtttgtcacctcaagtcagtggaataatgagtttcttttagattctatggggcaacattttagctttctcaggttgattccttttgtttttcattcttcattgctgtgtttagtcaatgtgtaggatgtttagttcagtgagaagtgaattctgaaatttctatcaagattatatttatctctatttcatatgcagcactttgattgggggcatgactgatattattttctgcatctctttctctgtgttttttgtgtgtgtgtttgtgttgtgcgtgtgtgtttctgtttgtgtagcatttaaaggttctctggtgctgtcactttgtgtctattgcataacttcaatgcattagcagtagtttaccaataagtaatgagtgatgcctttgtgcccttttctttctgtagtgcaagttttgtggcagggacggaactgtggttat

SEQ ID NO: 49009 - DNA, 1014 bp, Ricinus communis
  Intron number 2 from transcript 29804.m001499 (locus 29804 .t000030) derived from phytozome v7.0 (chr-ID 29804; pos 7 19973 to 720986 reverse strand)
tggagcaacttcttattgcttttactgagtttaaggtgctttgtaaggagatagactgagcctgctacttgtataagtatgctttataccatctaccttaagggaagaaaaatattgaacacttgcataatatgttataggattttgagaatcaaatgagaataaatgcattcgactatgacttttggtttgataacattcaattagaagagagtattgggaatcaagataggattcacgagatttatgagcgtgcaattgctaatgtgcctctagcttaggacaagaattactggcaaaggtacatatatttctggattaactatgctctctctttatagagctcattgcaggagacatcagacgcactcgtgatgtctataaggaatgcttgaaactgatacttcactacaagttctttttaaaattgtggattttagctgcccaattcgagttgaggcaattaaatcttcaactccgctcgagtgattttaggggatgccattggcagagcttacaagaataaaatttataagaaatacattgagctagactccaattttgcaatgttggtcgttgctgtaagctatatgagaaatacttggactagtcaccagataactactatgcttagagaaaatatgttgagttggagacatcctttgtgaaactgaaagagcttgtgggatttttgaaattgcagtcttgcaaccagcctaggatatgccagaggagttgtggaaaacttatattgattttgaaatcacacagggcgagtatgacagaggacgataactttatcggaggctgttggaaaggacaaatcatttgaaggtttgggttagctatgccaaatttgaggcatttgttgtaggaaatgatggggcagactcattggacaaacaaaagttgtgtatttagaaggcaagaagggtagaaagctgacaactactacatagtgtgtgcatccgaatggaaggaggaaaaagcaatacttttggaagagtggttgaa

SEQ ID NO: 49010 - DNA, 647 bp, Ricinus communis
  Intron number 1 from transcript 29599.m000169 (locus 29599 .t000001) derived from phytozome v7.0 (chr-ID 29599; pos 3 568 to 4214)
atcggtcaggtattcgcttctttcgtcttatttgattatttacgatcatcgtaatgctttaactgtttggttccgaagaaaatgaatttaattatttagtttctttttactttttttagttttaaggtgatatctgaaaagtcaacttgacaacagtttctcgttagactgttcctttcttactgtttcattatttatttatttttattctgtttctgttattatttttcaatttcaaacggtggtaggaagaataaagatttggagtttgaattttctttaaattttgttaatttgattgttcgaggaaaagagagatttttttgaatccgttgttgtcatgctattttagtaatttgtcgtcaatttagatactttctgattaacacttttcgtttgtcctccttggtaccgtacaatagcaaaaagaaaaagaaaacgaaaaaaataaaacaagataagaaaagctttagtaagttaaccaaatgaaaccttagttgtgctgcagagtgtttaggctgataatatgttgttttctaatgattcattttggattttgatttagtttttgatttagcttaatagtgatatattgtttttcttttttcttgtttgctatgttgcagattaaacgtgaaatttcaact

SEQ ID NO: 49011 - DNA, 260 bp, Ricinus communis
  Intron number 1 from transcript 29794.m003306 (locus 29794 .t000005) derived from phytozome v7.0 (chr-ID 29794; pos 3 2179 to 32438)
cccagttcaaaacccaggtgaccaatagcttccccgtttatactaagaaccagaatttgccttttatctcaaagttaagaacccggatgctttgattttgatacttgatatcattcttttttattaatattgccattgattattttctattttcatgtttctttgggtttgagaattggattcatttttcatctttcttttccttttggtttgatctgtttgtagattctcagctaaagagagttattatagagaacaag

SEQ ID NO: 49012 - DNA, 915 bp, Ricinus communis
  Intron number 3 from transcript 28725.m000323 (locus 28725 .t000015) derived from phytozome v7.0 (chr-ID 28725; pos 1 48053 to 148967)
agggaatattcaatttcacacttgttactgaaacagtaagttctgtcaaaattgatcatgtttatacgagaattcatattaatctcttattatctactattactaaagtccacaacatcaaaaataatgaaaccccaaactgggtcctataaaacatggatctaaactaatcagtattatgggtcgctagcttgatgagagttcttgcgatttttgccaggcgatgtatgcctttttggtggtctgagaagaaagactataaaattaaagaaaagaaaaaaaaaaatttaaaaggcaaaagtgcattttggctcctaatgtttagttcaaggacagataagtccttgaactaatttttggaacaaatatcttaaaaattgcaacaaaataggttattgaagctgctctttgaatttgcagtgatgtttgaaatataataccttttgtcatatttgatgtggctttttttctaatgagaaatggacccatttaacgtgaaaaagttcttttgacacaaaatccctaactgctatcatccatgtccgcttccacggtgtcaatcaccctgaaccctgctgcttgacggagactggtggtggagggtgaaagaatccaataagaacatcaaattgttagtcagtgaagcacaattcaatgatggcgaccctgtaaatgtaatgatgatcaacaaatacgagaaattggtaatctctcaaagcaaggacctcaaccatcattcaattcttgaaagaaaagatatgtcaaccacccaactcaagaagtctaccatttctcctcatcgcaagactcatactaaagtggttcctgaaaaaacaaaaccacgctggttaaccgcggttattattttaagtaacaatttcgccatattgctttatgttgatatgtttggtttag

SEQ ID NO: 49013 - DNA, 781 bp, Ricinus communis
  Intron number 1 from transcript 29048.m000063 (locus 29048 .t000001) derived from phytozome v7.0 (chr-ID 29048; pos 7 22 to 1502)
catctgtggtatgtctctcaatttattccttacttgccttttcagttttgcctcttatgaaacttgtaactggtagctgcttaatctgtcaagattaatcataaaatccttttaaggttcaaagtaactttagctgttgtttcgaagaatgcagtgaaagagcaaggctatcatcacattttggtaacatgaaccttttggtgtttaaggcagaaacatatatagctatattttgttatccttatctatgttgtaggtctaatatatctaaaatatttatgattctgaagtttaattattaggtaataattttaatttataataatgcattatggaatcaattttagcttttgtgatagaatgctaaagagaagtgacaaaagggttgagctgaggatgcctattagtccttgtaacatttgggaatatttctttaattatatgtccagataggcatgtatgtttcctttgaattggatgcctgcttcttcctacataaatggtgtgaaaataggtgaaatatcattaggtagatgaaatatttctgatatttatctctcatttagttcaatatcttcaaagccccaacactatttgtgttattcccaattggattcttgatttatttgatatatggacacattcatgttataaattttgctgaaggttcgacttgggagatttttcgctgacaggcttacttaataagtaattgttgaacaattttgatgaattcctttggtttcactaaatcctcaggtttggaagaactacctttgcg

SEQ ID NO: 49014 - DNA, 703 bp, Ricinus communis
  Intron number 2 from transcript 29308.m000181 (locus 29308 .t000007) derived from phytozome v7.0 (chr-ID 29308; pos 5 9803 to 60505 reverse strand)
tgcttctaaaaggtaggatttttcttcattcaagttcaataacctttacacatttggcttttacttctcattttctcccttttttgtttcactattataatctgttgatagctcttttcttttgtcttctaaaagctttgttaagcttttaaactttattctttctcttcactatttgattgctgtatttgcttgcaaataatatccacaaaaatattaacacgaaatgtggatttctctctattttttcccccaatttttggtgaattcaaagcttggctcagtagctgagaagaataaatttttttttaacaagagataattgattgattaacataaaacattacaaaactgtttagacaattacattgggctttatttagttgggggtttggttttcacttaccccagaggacgagaagagatgcagctttttcatttctttgtctgtgcagtattacctcctggaccaacagagttctttttagatgatgcttgtttgatgcctttattagcttcaaaagtcagtggtgcatgtgcaataatttataagaattaaagtgtaaatgttgtagttagaatgcttattctcattgatggtgtgatttcttgtattcagctcttacatagtgaaaaaatttctgttcattttgagctattcttattcgcagtttgttgttggtgactgcagataagttcactg

SEQ ID NO: 49015 - DNA, 985 bp, Ricinus communis
  Intron number 1 from transcript 29272.m000044 (locus 29272 .t000002) derived from phytozome v7.0 (chr-ID 29272; pos 2 7076 to 28060 reverse strand)
ttggagagccttgtttagctcaatcccccataaaggttgttatttatacctgtaagactctctcaacaaccaattttgtttgttactatttttattgttgttatgatgttgttgttgttcttgttgattcaagttaatattttctttatttttaattgttaacttttattatttttttctctgatgtttatttgtggtgttctttaagttatttggttatttgatttatacaagataagctcattgtattattatgtctttgtgtgcacaaggttgctatcttgggtggtttatgcttcttatgtaagaatttggcatcgtgcatttaagggacaagtagaaaggaataagaggacttcttatagactatcaaatggcatggccaattgtgtctctttctctcccttttcatcccctctaaatctcttcacaacagcacatggattcattatttttgtgcataaacacagacacatatattgactgttagatgttgtcataggcgagagactgtataggagcaatgggagatacaagatgctgtgaagcaggaaagtgagaagttcttaggtcaggaactagacgagatattggcagcaatggcgtgacttctgtagtggtaggatagatttctgacatcattaaatatttttctttttggatgaagatatcattaacattgaccatgtatcttctacaccagtttgtttggattccaacagtttcggtgtatggtaggatcatagagatgtaagagtaattagttattacatatcttggctgttctactatatattgtttagagtttgaaaactcacttggcatgtggtgtaactggtctagtttcggatgggaatttgcttttcttgattttttatttatttatcattaacattttctcttcatttgtatgaaattctcaaatgggatatatccatgttatgatattctgatataagattctataatggggcaggtaagcaga

SEQ ID NO: 49016 - DNA, 710 bp, Ricinus communis
  Intron number 1 from transcript 29780.m001325 (locus 29780 .t000011) derived from phytozome v7.0 (chr-ID 29780; pos 1 12692 to 113401)
atcttcgccaaaagatcctcaaacaggttccctttttcttttcaagatttgttgctctttcttttgggtttccttctttctctctttctttctttcgttatcctaattcatatttgaattcatggttcaactcttaatgattaattttgagccatccttgtctcattgtagcatggcatcattgcttgcctcgatgaattaaaactaatggttgatttagatcaagcccaaatgttttttaataatcagttcaggtggtcaggagatcgtgtggacaatgattgtaacttgaatgtttgcttttttttttttttaatcagctattgttccattcatatcagtgttcgattaataacatatgcattattagtatcaattaattggcctggcggattgtcttgtactgtaaacgcctaaattgggcttcgctatgagaaaagcatcctaacccgtttacatgcattttgtttttggttgcatactgtaatagcatttcccattatctgcacattttggacagtaacggaattgtaattcattcaatcgaaataggctgttgtttttcattgtattaaggtgttgcttcttgtataccttaatcctgcaacattgatgtcgaaagcgtattttgttcgttataagacacattgagaatctcaaaagttgatcatgttttgtgtgtaaaataggtggagtatcagttcggtgac

SEQ ID NO: 49017 - DNA, 692 bp, Ricinus communis
  Intron number 1 from transcript 29661.m000916 (locus 29661 .t000018) derived from phytozome v7.0 (chr-ID 29661; pos 2 07015 to 207706 reverse strand)
agaaagaccaatcaggtatatacatgtaattggcgaatcttgtttgctaaaagctatcgtatatatataccagctaagactgtttcatgtacagtgtggctcaaaataattttcactaattagcatgcataatcatttatcaggcttagctatgtataggaatttggttgtcgaatttctcttgagtttgctaacgtacatgataagctcataccaatttcaccatttggagtttgtcaccttacagccgtttacttcactattcgcttcgcttgttatttgcctaacataaaactagaaggaaaaagaatgtttgtcctagactgacaatgccatgttataagaactagtaactttattatcttattatcgtgcattctttgtatgtgttaatctctaacgtgtagatgacatattgttctacctttatagagattccactttggttgttgttcttgatgatattttgaattttgtttgtgctaattggtcctcatagtcagcttccacgttctttgttgttctctcctgattgtttgattatttatttccttaaaattgttaccatgattatgatgtttcaatgttcacctgaagaataagtacaaacttaatctgtcaagtaggatcttaattttctttctgttgaaaatgcaggagaagctaaggattgcggttctagtttctaaagc

SEQ ID NO: 49018 - DNA, 571 bp, Ricinus communis
  Intron number 2 from transcript 29772.m000315 (locus 29772 .t000008) derived from phytozome v7.0 (chr-ID 29772; pos 7 2638 to 73208 reverse strand)
ctgttgctctggtaattctttttgtttgtttaacttagatctttagttaatttatttatttatttttattgttggttctcttcaatcttcctaagagaaaagaattcatcaattatgtcaacttggccatattctcaaagaaaaaagaaagaaaaagaaagaaaaaaggccataaccgaaaaaattattattattgggtctgagctattgaagcattctcaccgatattctgcgatatgggtcctcggttgtgcaacttttgtcaagtagtcagttatcacagcatttaaagataagacccgaataaataatgaatgatctttacaaaaagtagtgcatagcttacctaagttaacttgtcaatcagggcactgccactgccactatttagttacccttttcatctagcttagaaatgaaagattcgtaaaaaggcaataattgttgtcatgaggaagcatacattttaatagtggatggttttgatcattatctgaaatgggttttctttgttttatcaaattgtgttaatctagagcggagggccagattgggaagtgaagttagggag

SEQ ID NO: 49019 - DNA, 421 bp, Ricinus communis
  Intron number 1 from transcript 29756.m000509 (locus 29756 .t000024) derived from phytozome v7.0 (chr-ID 29756; pos 1 73808 to 174228 reverse strand)
ccaaactctctctttctctctctagttatctacaggtaatctgttttttttttttgtttacttactatttattagtatttatttattgcttttataaacatttacttcagcttattatatcctgcaaaaccctaataataattattctaagaatgacgaagatctgattttttttttttgttctttcgtgctcttattttatccgctatatgggattttagaattgagatcctcttttttagttactattgttttgcattttattttcgtattagaaatgaaaattctgaattagggttttgggttaatttattgttttggttaagataattgttggtgttttgattgaacggtttcccttttttgattgtttgggtttatggtcaatctagggttttggtgcaaaggcaaataattggaa

SEQ ID NO: 49020 - DNA, 709 bp, Ricinus communis
  Intron number 1 from transcript 27538.m000319 (locus 27538 .t000006) derived from phytozome v7.0 (chr-ID 27538; pos 6 2590 to 63298)
ctgctattgaacttggaaaagaattggtaatacatagaaaaccacttttaactcttctgcttttgctcctctttctcttgtttctttgttttcatttctccctctctgtgtgttcccctgttttttcttttttcggctctgtttttttcttgcacttcttcttcttcttggtttctttttaacctgttccaattcttgatcaagaaaatgaaaagcaagactctgtactttcttgtaacatgtttatatatatgctttaatggttttttctttttttgaaaaacaaaattattaactgatggtttgtgaggatattcaataaatttgtcccaagttcttatactcattgtactactctttctcaactatttttgtcttgttttatataatttcttttgtaccttacttgaattttactttccactctctctttctttgagccacattttgcttatataacatgtcttttctcaaatttatatagttactaattctacatttaaaatactttatttcttcaacagtataatatttaatttctattctcttttttttttttctcttttcaaatgtttttattctaatcaaaatgtacttacatgggtacttcatttcttcttcttcttctttctttttcttttctgacttttccctttttttgttgggtaatatcttaacttacaggttgcaagaaatattgatcttgttt

SEQ ID NO: 49021 - DNA, 519 bp, Ricinus communis
  Intron number 2 from transcript 28822.m000031 (locus 28822 .t000001) derived from phytozome v7.0 (chr-ID 28822; pos 9 690 to 10208 reverse strand)
ctgttgggcttacacttggtcctaggggtaatttcatcatcttgcttaatttaaagcactaattgttcaaagagattggtgtaaatctcaacaattttactggggatttgtaatgatggctatatatatgttaaactgattgctttaagaaaccaagtgggttttacgattcataagatattttgttcaacaagtatgttttctttttgaaccctttatatagagcccaaagtaggttgcacaactgccgtttcccatatttatccttcccaagtgcacagttattaatgggtgttaatttgttgtatagtaatctgatagttttgagtttctgtagtacatacataattcttcccctagacaattatgtgtgtttacttctagttttctcaatggttcaaaatatactcttttttctataattcctgcggcattttatacgaagtctctgttacaacatagtcttctatcattatcgaagttccaacaaacaattatgtgcacgtcttgtagggagaa

SEQ ID NO: 49022 - DNA, 524 bp, Ricinus communis
  Intron number 3 from transcript 29588.m000864 (locus 29588 .t000019) derived from phytozome v7.0 (chr-ID 29588; pos 1 23721 to 124244)
cgcaggattttgtcgaagtattgccacttcaactggtaattaatactctattctgtgaatcttctagttgggatgtgtgatactgcttcacctttttacttggtaatgttaataaggatatacacacttttttcatgccgattcaccaacttatgttacatagcaatagttttaacgtgagactgttaccttttcgcatgaaaatgtgatagctattcgatcttctaaaattattgcttacaagccaaataaatgttatctgcatgtttgtttagaatttagtgaatgttaccatgtttaaggtgaaatatatgttatagagtaggcagtgtttcttttgcttttgcttcatcaaattttatgtctctatttttgatgttgccttgaatactggctgattgctcatgtttatctatttgatctatgtacatatttgcttataaactcctgaagaagagattaagcaacaggtaaattattagagcagcattgattcttaaatgtaggtgatatcattttggggt

SEQ ID NO: 49023 - DNA, 593 bp, Ricinus communis
  Intron number 1 from transcript 29728.m000813 (locus 29728 .t000019) derived from phytozome v7.0 (chr-ID 29728; pos 1 35192 to 135784)
cttcctcgcaccgtttcagatcttcgcttgctcaagtaatgctcttatctgtttcttatttgcaaattccatttctttttagtaaattattactggttttgattaatttatagctgggtacgttgcagattttgattttcttatgatttttttgaagaattataggactttcttttctgggtcctggggaaaacatgttggtttacatcaagtgttgacctttgacaattcggtgttattgattgaaattgatagttattctagtattttgagtgttcaagttgaaatactggtcgcaaagattgtgctagtaccatggctgaggacttagatgattgcatgtggtgagatttagaaatgaggttttattattatgtttggctggcattatacgcggtgttgaagtgcaaaaggtatctttctgtagatctatagtttgaagtttgcgtgtactggttttggttttggtcttctaattctcatgtttgtagtcattttgattttgtcataaaatctttgagatgtttaagtgtaacttttctttccctgaactacattgatcctaatttgtttcagagaccatcttgcgacgt

SEQ ID NO: 49024 - DNA, 921 bp, Ricinus communis
  Intron number 1 from transcript 29673.m000940 (locus 29673 .t000041) derived from phytozome v7.0 (chr-ID 29673; pos 3 07913 to 308833 reverse strand)
atctgttttggttcatttggctcagaaagttcctggtatgtgattcttagtttgttcagtgatgtgaatttttattttaatgttggttttgttaatgtgttattttctttatgctaattgcttgtgttgggttgtttttgagctggttctataacaactttgcttatttataatatcttcaagtgcaaatttggtttgtctgtcattcagttatctggtacttgcttatcaaatagcattgcaatgctcaagttgcttctacgacgctaataggctgatattatactatgttaattcataggtctactgtgacttccatattcatttcttcagctcaataacatgattgaggcttgtaaagtggcattcacaaatgtaagaatgagcactcaatcatcatagagtcttggtatcaattgttacattttgtcatctatttattgaaaaaaaagaagtacaatttaaccaagaactcggatatgaatttttttattttccaaaattttaaggtgccatataattaaaacactttagtatttctggttaggtcatttcttgtgataggagatgatcttatattttcacgatgtagtttaatatcctctcattctatcaccattagctgtcaatgactatatgacttgtgaattgtatgttttttcttcaatttctgtgttagaactcgtttttagtatgccaaataagttgtatatttatgtaagtctttcttacagaaaatagtatatcaattttctgaatagtaatgctgcaaaatcctactgctttatggtatcagcatcatatgggttttctttgcccaatataggttcaaaacctcatgtgttgtaaattaggctgtttacacttttcaatatgagtaaattggacatgtcggagcatttggcagacgaactctgggca

SEQ ID NO: 49025 - DNA, 504 bp, Ricinus communis
  Intron number 1 from transcript 29739.m003572 (locus 29739 .t000008) derived from phytozome v7.0 (chr-ID 29739; pos 4 1215 to 41718 reverse strand)
ctgtcattttgcctcctctctctttcaaactcaaggttgcttttgtattcgttgtttctagtattcaagattttgtttggattgatcggtaaagcagtggactttttttgtgattgttttcttggtagatgtttgatttggaaaggggtttctttcttgactggtttctttaaggtttcattgttatgacgtatacagattggaagattaatgctcaacccatttgtaaaacgggttccttttctatttgcagttttatgattgtattgttagaaatcaggattcaattatttcctatcaattttttatttcggttctttgtggttatagaattaaatcaaattctttgtttgttttaaaatttgtggcaaacaaactatgattctgaagttggtggtggtaaccactattagttaatgatgcataacctgtatgttgctataaagaattttaagttcttctggatactcattgattttgtttctttccaggtgattagagcct

SEQ ID NO: 49026 - DNA, 289 bp, Ricinus communis
  Intron number 1 from transcript 29764.m000759 (locus 29764 .t000021) derived from phytozome v7.0 (chr-ID 29764; pos 6 07521 to 607809)
cttttcctagtgccaaggtatggaatcttgatgttacctcttcatatcatgttcctatttttcttattccttttattccaaattttttaggtttgtcccatatggttttgttttaaaaatgcttggctcaaagacactatgtgtagagaggtggtttctaaagtatagaacaataatgttggctctccaattcaacaaaaaaattaagtattgtgggtaagaattgcaataatgaggtgataaattgattggtccgttcaaaaatcaaattgctaaattgaagcatcat

SEQ ID NO: 49027 - DNA, 607 bp, Ricinus communis
  Intron number 1 from transcript 27471.m000413 (locus 27471 .t000013) derived from phytozome v7.0 (chr-ID 27471; pos 1 08051 to 108657)
gtattagtaataaccaaattcctcggctgcctcaggttcatcatctatttcccctgctcctagtgtactggcacttacaatttgttatgagttaccatttatggtactttataaatatgaattattaacttatcttcatgattattttgcaccctgtattctacaaagtggctttggttttgatgatgtgagagtagtggatgcagtgttgtgtaacattctttgcaggagctaagcagggcagggtccctggactctttcgtttcttgcttgctttagttcttagtgttaaatcatattttattgggagtgatgcttctgaagagttcaaattttggcatatcaaagaattcctctaaaagaacccaaaaaagaaaaaagaaactttgagctttacaaaccagaattaaatcgcgtagaaatggtagcaaatgtactgttcatttgagatttactgttcatcatatcaaaatctgtatcatttaactggagattttcatgttaatcagagtgagatgtttccaattgtttatgaggtttaaactagtactattcttaaccaatgtttcttgctgttgtgtaaaggtaacactgtctggacttctta

SEQ ID NO: 49028 - DNA, 358 bp, Ricinus communis
  Intron number 1 from transcript 29739.m003667 (locus 29739 .t000103) derived from phytozome v7.0 (chr-ID 29739; pos 6 39909 to 640266)
agggtatatctcaattctcattattatttcctttttctttttgaaagtttatgtttttccttttttatatgcaagtattatttagtgaagaatgtacgcgaaggtatattgaaacacgtctccctagtctattaaaatttgacttggtaaacgtttattttgctattgggtggtgatattacattgctttgctggtattttggagattgacctagcatgttgtttatattttgtttagctactggttctacatacttaaacatttgtttactggatttttctccttattaatgttttttttttttctactttctggcaagcagttcttggaaacttcgtatcagctttgaacagattt

SEQ ID NO: 49029 - DNA, 720 bp, Ricinus communis
  Intron number 2 from transcript 29739.m003667 (locus 29739 .t000103) derived from phytozome v7.0 (chr-ID 29739; pos 6 40319 to 641038)
agttcttcaaggtattgaattcacatatactagcatattaaaattatgtactctttctcttaatcagtgaagcaatatagtctaaaatctccttgagttcagatgttaattgcatccactagcatattttcttgcagaatcaggcacttgcctataaatttcaaaataagtagaaagcagatatcaactttttgaaattgcagtttcatgggcgggtaatttaaccattgaatgataagagggttcatacatttgtctctctgcaccaccaattggtgcgtgattttgagactcgattggaagacagtactaaaactggcagtatagcagtgcaaatgctaaatatttcagagttgatgttatttattcagttcaattcatattttgctcttagcctgatgaaataacattgtagagtagtattaccatttgcaatgtgaactcttcttgaggtgtcagaattttccatcatgtgctgttctgttatttaaaagcacattcttggcattttaatttttcactttaactatgctatacactcttaagtcaatacatctatgtgctaaatacctgagttcaggtcaggtgctgtaagtcataccaggggtatctagtttagtttcttaatattgttgtccatttaataataattcttttgcaggaaaccaaacacatagcttttatatctattctaatcctaccctattgtttgttacagat

SEQ ID NO: 49030 - DNA, 997 bp, Ricinus communis
  Intron number 2 from transcript 28226.m000876 (locus 28226 .t000046) derived from phytozome v7.0 (chr-ID 28226; pos 2 08307 to 209303 reverse strand)
atattctttttgacaggtatattactgggctatactctgtgtctaacaactgtgtagttagctccatggtttgttcatcatatttatctcccattttcttctcttaatttatagcacagattttttcttctcacaacctttcatcattttcatgatagattcagttagtgttccattttctttcttttatgtgtgaatatttgcttactataagatattaaattgtatttgtatgtactttccaatataatattacatcaaatttaaggagaagtttccttccattttcttctctaaataatatccaaattccaaaatcagtaacatcactgtaatgaataaagttccaaagcttatatggattacttctttatccctggttgttggcatgctaggttttagctgtctaatttgctaatgattttatgtctgtcttgtgcaatccatattgcaagttactaggtgtgcagtaattcctagtgatacttgtcaattagatgaagggtgagacaataactattttttttgttgattttcgagttttttccatttctacattatcctattgtctggattgtatattatcacttttctttttgcttgactgtttctagcagacacagtccctgagaatcaatgagaagtaaaatagttgttactttcattcttctgacctctaaatttatattctgggaaacagttcttcaaagtggtttgtttgacgaacctgtttaatttattttttgtatttttctggcttctttaacgaacctgctcggttagtatcaacatggaattgaaggaagaataaaattttctattttcctagtcaagagtgcttggttcttactgtaagcaccctttatgtttccttttctgctcagttgcatttggcttctggtctttacatttgtttgtctcacaatcttcgagtttagacctgttcttgacctcctggctattctacactgcagtttgcagagaagggtcaaccccc

SEQ ID NO: 49031 - DNA, 986 bp, Ricinus communis
  Intron number 1 from transcript 28320.m001104 (locus 28320 .t000031) derived from phytozome v7.0 (chr-ID 28320; pos 1 66767 to 167752 reverse strand)
ttagctctaaacacattgcttacaatataaaaaaggtacgtgcatttgacatgattattgatctctatttttgttattcttctgcatggttaatggtcgattagatttttaagatgaaaattcatatgtagctgtttcttgttactgaagtttgaaggagccccaaaaagaaaaaaaaaatggttttcatgctcctaatagttaatcaaaattctttggaagataaagttcatacctagctaatcaagtagcaacccttggttagtgatggattaaacttgaggtttctacttgtattaaagatagaagttatcatcttattataagattagttaatcaaattatatttttcttttctagcgaaaaagagagcaccagttacaaaacggttcgatatttatttgtcagaattgaaaaaagtaaaatatttatttacgggaattgaaaaggtatcgtaatatgtaaagaaatattttcaaatttcttacaagactaggcaagtcaaagaccaaacaactaaaaagctagatttagacagtagagttgattaagcaggcaacacagagaattcaatcttatacagcacttattttatctttaaccaacatcataacatctgtctaaaatgtcaaacatattgcagaatgcaaagcaatggatccaacatcccatgtgatacgatgcagactagctgtagaacctatggttacagaattcaaaattctaaaccccaattatgcattaataatcaaataatacatacacgtattaatgtgtccacagcataaaaagaatactttctatatactattcagttagaatctaatttcagttaatccgtgtgctattctttttaattattttttatcagaatatataatcctatggtgtgactattcttttctttcagctgtttcttgtttttgtttgtgaatgttgatataatcttgacgagtctccatgaatgcaggaatttgacaaggtgt

SEQ ID NO: 49032 - DNA, 359 bp, Ricinus communis
  Intron number 3 from transcript 28176.m000270 (locus 28176 .t000010) derived from phytozome v7.0 (chr-ID 28176; pos 6 0189 to 60547 reverse strand)
acagaggtattcttttttcttcttaatgaatccttttggacaaatgatgtcaattgactgcacaatggctaagtaaaattggaatctttgccaatgttaaaacggaaacttaattttcaaaatctttttgtgcatatccagaatttgattggatcgctctttattggattgatagaatgggtgtttcatataatttctcaatctttgagtttattttatgttcttgacagctaaatgttgctgttattttatcttttatttctctgtgtaagttacatggagatatgtttagaaataaccaatgtttctatgtgtatattgttttgctcagtattgggagaaggcaaagtttccgtttc

SEQ ID NO: 49033 - DNA, 478 bp, Ricinus communis
  Intron number 3 from transcript 28694.m000681 (locus 28694 .t000024) derived from phytozome v7.0 (chr-ID 28694; pos 2 29476 to 229953)
acttgccagtgctgattctcgaccctgggttgctggtatgcctgtcatacatgttcctctataagttattttatttttcttttctgtttatttttaacagagttccttgaattgctgagtgcggtattagttaatttgatccattctaatatactccatggtccatgcctccttggacttatgctcttgttaatcatgttcgcgcttagttgcaagttatgtatcaactgagaataatttaaatttgaatttaaatttttcattgtaaagaagaggattattagctttccctgctagtagattcatcataaagcaaaccttgatattcacctcaatctacacacctgttatcttaaagtctttcttagttgtgaatacgaccagaaccctttttttcccgccttatcgtgctattatatctactttatatgttgtttacctctttatcttaattttctgatgattcaaggtggaccat

SEQ ID NO: 49034 - DNA, 995 bp, Ricinus communis
  Intron number 1 from transcript 29724.m000827 (locus 29724 .t000007) derived from phytozome v7.0 (chr-ID 29724; pos 1 01366 to 102360)
gctactcctgtcccttctgaattaccaaaggaaaggtaaactatttttgctctttctggtatttctggctttagggtttcgttgtgtgcaatttctggattagaggctcaattgcatgtcttgtgtttagattgcaaagttagggtttcttgaagggttttgtttctttcatctatgctttcaagatttttgaatttggtctgaaaatttgtcgttttaggggaaatttaatttttggggttttatgggaaagtaatttacttagtgaatcttgtcgaatagaagtctatcatttctttttctttttctttttaattgtgttttgctactaaaatttacaaccatgactaacaaattttattctccattttggaagttcactgttgctttatacattcaattgttttctgttttcctttcaaggaaaataaacaataatgtttgaagtctatttatactattgaggagaagtgggacttctatatagtacataatagttaagtttttgtttttagtattattggatataaagttatattcaactgaactcagctgttttataggctagaatttagtggggtctaattgccaaaattacactttattggagtcaaaaccaacaaaattgctcatgatttacaagagtttttcttatttcttagaaattcagaggagtcaattgacctcactcatgaatatgactgttcctggttcttggcattttttttatcccgactctcattttgtgctgttgggagatcttgttattcatatgtgttcctgttatggtgataaccacttcatgtttgggtaattttagctgaaaataagcatcctagtctactttaccaagctattgttaattgactttgtttttcttttcaatgttttctgcaactttgcatcacagcacgctttaggggcattagtttgatggtctctattatgttttgaacacagtgctcccgttggagctaaaagaagaggtggcccgg

SEQ ID NO: 49035 - DNA, 490 bp, Ricinus communis
  Intron number 1 from transcript 29729.m002340 (locus 29729 .t000073) derived from phytozome v7.0 (chr-ID 29729; pos 4 10780 to 411269)
atctaaacctccaattatccactgttcccttccaggtaatctttctctcttttagcttttttatttcttagtttattttctttgaaatctaaattcttgcttgttttgcttgagctcgttttctcttttagatatcaaattcttagtatttccgtcattttcttcgtgaccaaacaatggattttggaattaggtttgttctgtctcgaatttagcttactttttcactttttagttatgataagttccaattaatggttttataaaatgtagttactggagtcctgcaatctaagtgtgagtgggtgatgctaataatatgtgaagaaattcttctcctgtattatggttttgactattgtaatggtcattgtatgatttattctcttatcaaattttgggttgttcaaaattaatgatttttaagctctcatggttacaaattttcccaacagggactgtggctgaacccaagcctgcctctgtagct

SEQ ID NO: 49036 - DNA, 1037 bp, Ricinus communis
  Intron number 2 from transcript 28011.m000077 (locus 28011 .t000002) derived from phytozome v7.0 (chr-ID 28011; pos 1 0435 to 11471 reverse strand)
gaagggcttcgtcttttattttggaaaatttacaagtaagtttcttccctttgtattctttactattttttgattttgtttccatcatatgtgatgtaagtgggactcactgtggtgttaacatagttgaaggcttgaagcatttcttaaaggacttttttggaataaattatgtgcaagaatttagtttatttgtatttctgaaaaatctgttaattttgaagtgattttatttctttcaaaatgtactgcttttttaaagtggaattaattggattttagcaactatgagctttccaaacttgagaattgactgaaaaatagaattcattttagttgacgtggattcttgcatttttagactttccaaactataggaaagcaatggactgtgtttttgtttattgtatactatgtttatggatgtagctatgtgcaaattgtggttttagagagttgtatcttttatacctgcatgcttttatattcttagtttataatatatctatctttgaaggataagattgatctttgaaattacttgagtctgctaataaatttcacaattggagttgagaaatagtattggccattcctttgtaaagtaaaaaatggatatgaaggaaagaaagtgtatgtatacagttgatcaacggttatgaagaatgttacaaaattttcaatctagagatagttcctaacttactaatacctgtagctgctggttctatttgttttgaattttgcccataatttatgctctattgcagtttctgtcaccttcttgaaactaaatttaactccaaccccctattttctttctctttctcctcatatcataaaacaggaacattctcttaccataatgcttgttaagtcataatattacactgactttgtgtatatattttgggcagaacttaaatttaggaatcctccacaggtactgcagtatatattgtcctttagatagttttctgtttgttgtgtaacatctttttgttgtggacttgtcaggcggttggaggatatattgg

SEQ ID NO: 49037 - DNA, 569 bp, Ricinus communis
  Intron number 1 from transcript 28644.m000919 (locus 28644 .t000026) derived from phytozome v7.0 (chr-ID 28644; pos 1 36346 to 136914)
ccgatctcctttctcaagttgatcaacctctccaggtttcttcttttcctttttctttcttttcttttttttgtaaaaattaaaaattctcaattggcaagtgctgtatgtttggttaatttactgaggaattggtctgcgtttcccttttcattttcgtattttcaaaattttgttttgttagggttttggtgcatttcaccaaaaaaaattatacaataatgtgttaactaaaagaactgaaacctatttatatatgccatgaatattgtaaaattagagatcgaatttttttggatctaacttgtggacataattactcttaaccaagctattcttattaactagttttgtttcttccataaattctgttgacagataatttattttacaccgttttaaatatggtttttgttttttgtttttaaatatttcttttttgaaactagaagagtctgtagagtggatagaaatcgtaatttattgtcttttgatattaattttcggtactgtcaaagatttctcttcaggttgtaatttcttttatttaaattgagcaagcaggtctt

SEQ ID NO: 49038 - DNA, 865 bp, Ricinus communis
  Intron number 1 from transcript 27985.m000838 (locus 27985 .t000001) derived from phytozome v7.0 (chr-ID 27985; pos 6 856 to 7720)
ccgaacgtgacatcgagcaggtcacttcaatttcttttttttagaatgcaagttctcatttttaatttcttcttcatttcaattttcagctccgtaaaattacttccagagacgaatgcctgagaaatccgtagccttttttttttcctctttgtttttatatatttatctatttttactcttttcgttgagtaaaacaatgatttgtattttcatttgatattaaaatgctatattttggggattttgtttaaggttctgtttggtgtaaggaaaatctctctctctctctctctctctctctctctctctctctctctctcaaaactcttttctatggcatgtaaattaccctgttggtgagtaaaaagtatttaaatgtctttcttattttttaaattgtgctaaatattttcttttcgcaactttttaattaattgcctatttttagcaattcaaatggggcttttgggttttatttagagggaacctttgagataggagaatcgtgcatgtgcctgcctaatttcgtccattgtactatagtcctatttttttggttgtaaaaaagaattgagtgaaatattagttgaatatagtatgtcattgcataaagctcaattttactcaagtgctctgcaaacatataaaggttataggttaataaccaacttgtgagatgtaaaaataaaaataagcaatgatgcacgtttataaattgatgttatcccactggaaattgtttgattgaataaaatgacatcattcatttagtgttctaatggtaagtagactggtggagttgtaaatcatctttctaccctttgcaggcattaattgctctaaagaagggtgctcaacttct

SEQ ID NO: 49039 - DNA, 972 bp, Ricinus communis
  Intron number 2 from transcript 27985.m000838 (locus 27985 .t000001) derived from phytozome v7.0 (chr-ID 27985; pos 7 738 to 8709)
gaaagcctaagttttgtccgtttagactctctaatgtaagtttagctcttgagtgttttatattgagggtactattggatgtcaatgctaaaatgtacttggttctttttgttttaagtgaaattttaaaagtaaaatgtgattcaacaacacttgctgtaataaaagaacttataatttatgatacagagattgatttttgttggtagattgaacttttttgtgctaatatatcttcgacactggaaccaatgattcagctaaatgtttctatttaactatcatctttttattttatattgtattttctgatacataaaaattctcaagtcatctttctctcacatgagctgcaatttatactgagaaaatttgtcattggtaggtagttgctttatgtttgtctgttggaatttctaagaaattagtatacaattgtttgaggttgttattcaagatatattttctgttatgcttgtgcgcatggatgattgtagaagcaggaatgcaaaatagcaagtagtcatgaagaaactttagccatataggatattattcatagggtttattagacaacctttgcatattttttatgcctaagtatatgttgaaattctgcttcaatctcttgtgagttaagaatgcttcaatgaacagttttcctgtttatgatctgcaacttgttaattacgtagtctgcttcctcattaagaggttgtgaaaatcagtgttatgacctaaacatcctgccatgagctatctattgcatgatttggtttttgatattcttatgttttcctactgtctttgtttctctgattgtcatgttttcgacaattcagtttctgattccataattccatgttctgcccttccttcatgtacacaaatatcattttaactatcttattgttacctctcatgtctaaaatcacaggacgaaacaactttaatctggatttcaagtagtgg

SEQ ID NO: 49040 - DNA, 493 bp, Ricinus communis
  Intron number 1 from transcript 27715.m000186 (locus 27715 .t000009) derived from phytozome v7.0 (chr-ID 27715; pos 1 54259 to 154751 reverse strand)
agtttcgtaaattaactatcaaatttggcaggcaagttgcttcttcctaaataattgatattggtgcgctaaaatagtacaatgggttttatctgattttactgggaaactagtgaaggcttatgttgttttttagattatagtgtttgttggggtattgcatgtttggtgtgtacatttgtgatgttatgataatgggtttaggttatgagttaatgaggcaatagaatatttggttcccctgcaattggaaatttgtgatcctactttgatgaaggaatgtttaatcttacgggataggggtttgttggatgaaattgcattgcattgttattgctagtagttagttgctggtaaatttcttggatggtggcttggtgcttgtatttgagttatttccttggacattcatattgtttactctttctttttttctttctaattttatattttcttagtgggatttggttttcattgtgaatttgcagagaag

SEQ ID NO: 49041 - DNA, 512 bp, Ricinus communis
  Intron number 1 from transcript 28492.m000484 (locus 28492 .t000022) derived from phytozome v7.0 (chr-ID 28492; pos 1 61020 to 161531 reverse strand)
ttgatattcatcctgctgttaatcatagattgaaggtatgtttttcatgtctactggagtttttttaaccttttttttccctttttcttttgagtatttcttgatgacattttcttttcaattgtattaaagttgtaacctttgagttagtatccaattggcttcgtgtttgtgacactttgttttcaatctacgaacattgtgatttttctaatttagtgttgcattgttctttttttctttttgacattgtgtatggtgccaatttaagcaatgctagtttttttttcttttcataatttttgctgcttgtgttggtctaattgactatctagcagttaaatgcatcattaattaatatggcttttgcctttgtagtgattgggtatgctactttgcagtgttttgttaaatttaatttgttggtctatatagatgggctttaagtgttaattgttgttgtgtcttggatgataggaaggtgaaactatccgaataaacgtgaagcataa

SEQ ID NO: 49042 - DNA, 825 bp, Ricinus communis
  Intron number 1 from transcript 29648.m001945 (locus 29648 .t000032) derived from phytozome v7.0 (chr-ID 29648; pos 2 50505 to 251329 reverse strand)
taaaggtaaaattcttctgcattgtttatttattcttcgaaactatagtctataagttaattttgaaatttaatgataaatagttcttttgtcatgatattaaagtaattctaattagataatatataagtcaaaattgtgaacatttctttttaaaatgaattccacgttaatttattaatatattctataacatcaaaatatttaattttattattttcattttactttttctctcatgtatttatctcaacttaataaattttcttgagaatattaatttgttatttgtatagtgtaagagagtagagaattattgataagtttgtatactttttttttaatgacaataagtttcataatattaatcggagactgaaattttaaagctgttttaaaaatctgttattttcaacctttaattatttgatttattaaagtgctaatggagaaaattttgattaggctgctcttttcttgatctcacaatgttagaatgtgcatatatgatgtccgacctaatgcttcatgcgagagtagagaattaagagtataaatgtactcgtatacctaaaatatttactattagaatatgatgaaagattttgtgcacctaacctacgtgtcttccatataggtgtgagcttgggttttgtatttgtgttcctggccatttcgctagttcttttggtaatccaaagaaaaagcttggtgaagctaagagaaggatatttcaagcaaaatggtggtttgttgttagatcaattactctttaggaaaaaatattcagtagaagcagcaaaaatatttgcagaaaaagaatta

SEQ ID NO: 49043 - DNA, 706 bp, Ricinus communis
  Intron number 2 from transcript 29651.m000288 (locus 29651 .t000008) derived from phytozome v7.0 (chr-ID 29651; pos 8 0311 to 81016 reverse strand)
ttgtggtatattttgataagcttattgtttcttcagctttgttttttatagtagaacttaatttagagagagtataaatgtttacacctcctgagaattttgaattgacatgttaatttaatgctattttgtaaattttccatgtttggaaaagtaatagttgctagagttcagttctttcgattttgaataaaggaaagtggaaaaaaaaacattttgacaacagtgcagaaatgtgggtggtgaatatagcttttgtttttcttacatgatttctgcacttatacccattaaaatatgcaaaacttttgatcaatcagtagccattaattgttaaatgatatactttttttatctttttggtttagtacttggaaatgcctcacggtgaaattaaagttatgttttgattattgctcttgtatgaagctagagaaaagctcattaactctgagtctccaactacaacttaaaaaagttttcctgttccaagaaatagaactcaatatacgggtttatctaattctttaaatgactttactctttttgttcttgtgttgtatctgaatatctattcctttgaggttggaaaggcattttctaggttcaatgcttatagcaacctctagtttatttttattttatttctaatgtatttgaaagtggaatccaagtatgcgaaaaattggggcatatatttatgcag

SEQ ID NO: 49044 - DNA, 803 bp, Ricinus communis
  Intron number 2 from transcript 29739.m003651 (locus 29739 .t000087) derived from phytozome v7.0 (chr-ID 29739; pos 5 49987 to 550789)
gctaaccaaggtatatacatatataaccatatatatatatacatgtttacgcataaaaccccacaagcatatcaaaccttttctggtaagaaatttactgacaggaaacttaaatatttatgtcttttataagaaataaattcatgaattttaattatgattaacaaaatcaataagtttttaagtcagtgataatagaaacgtctttagaaaagtgatatctcgactttaaaattaaattcattgattaattttgaaaacaagaattacgaaatagaaaaatgaaaagagtaaaaggcaaaaggaaaaagatgactaaaagttgacctaggcatgagaaatactataattgggcaaaaataaagtttgcatgacgctacttaatatagacacgcatcagtcaaataggtcccagctgtgtcggaaatttgacttaatttcactacttgttatatattttgtcttcactcattatgtattacaactaacttaaggattcaattgtaatttatcttattgactcatataattaattttattgactccattgttaaagaattcatcaatatatatattcaaattgcagtattttactttcttttttcctaactttctactccaaagacgctttggaaattcttagaatgaatttaacatttatattaaagaaaaaaagggtcaagtaaatgcatcggtatgttcctctggaactagctataacgactgtttctacattagaattgatggatcttgacatgtttgctttggtatttggatttaaaaaaaggaccaaaaggccaacc

SEQ ID NO: 49045 - DNA, 978 bp, Ricinus communis
  Intron number 2 from transcript 27763.m000041 (locus 27763 .t000001) derived from phytozome v7.0 (chr-ID 27763; pos 1 1211 to 12188)
tttcgattagcaacccaaatcttccagtcaagattgtgagtattacagtcctttttcacattttgtactatatttttttagctattggagatcaatggtaaccaggttcacttttcatgcttaaaaatgaaagaaaaaaaaaagctgtgtttattcaataccagaattggaagttagctattaaagaatacatgtcttggcttgatggatgtttgaggccaagaatttctgcacatctagatctttggttttatcttaaaaagggcatgccaggacacagcaaccttgtgtgtggctggggaatacttgtcatccagtgatacaaaatggtcattgaattctacacttagttttattttggtcataaaattttaattattttatcataattatttaattttaatcgtatttcaatttagtaattttatgaataaaagattgacatgtggcaaaataagcaatggaaaaagagtaattagtagagaaaatgtgacatgtcatttttttattgacaaagtaattaaattataactaaaattgaaattgaatgattgaaatgaaataaaataaaattttatgaccagaacgaaactaagtgaaaaatgtttatgtcacagagtgcaattttcacagctcaaaaccataatcttcttgtcacatagatgcatcaagcgaaatgaatcaggtttagattatatggggtcatgtggctaaaaatgtgagaaagagaaagaagtgggaaggtatgagaaaatcttcgccaaacagcaactgaggttcttcttttgtgagtgtatgcatacataattggggcccggagagtttcagtagagtagtattatagccaacttgttaagtcagaacagaatgtgtaaacaagttcttctatttgctgttccctgaaatgtgtagcattgttgaagtacttctttctatgataaatgcagggagtttacgacagagacactttcagccgag

SEQ ID NO: 49046 - DNA, 948 bp, Ricinus communis
  Intron number 4 from transcript 27970.m000078 (locus 27970 .t000003) derived from phytozome v7.0 (chr-ID 27970; pos 2 8112 to 29059 reverse strand)
tggttcctggcttaactagtgattctacttctgctgtaagttgttctgtgttgaattcttatgttattatcttatgcaagtatagctcaattggacatttgagttaacttggtatgttaggtaaagaaaaggtttcggcagtcgatacagatttctttgtttggacccacacaaaatcatttgaactttgaagtcttttattctatttcatataatgcttgtgtctaagttggacatggaagataatcctttaaatagaaggttagcataattttatacttttttgatgttgaatggttgatattttgtttcactgctttcttattgagttagtccagaaacagacatgcttagtttagttattttctttcttttaaagtcttatttcttgtggctcacactgtttctttcgagttcatctcactgtttttggtttcttacttcctcttggtaagagttcttaaattgattagtgcgactgaccataagaaagggctacaagaataatgaagcccttctatacattcatctggaaatatctttctattatgtttgattatcaaagttctctttttcgaagtcaatacaaagaggagagaggacattgctttttgagatcttggcactaaatattgataatttcactttaatgtggattgtctttctgtgccggaattggtaccattgcatgttattagacttaaatttatgaattgttaactttaaaactcttttattgcttcttgttttgcctggtcaaattggctagttaaattgacattcatatttctttttccttatactactcgacattaagccaatataacttagtgagacattcctgtttggtgttactttcatttcttgtgctaattccttcatctctctattttctcccttcaaatgtctaatattctggaacagtatataaagcgtctcgctttcact

SEQ ID NO: 49047 - DNA, 511 bp, Ricinus communis
  Intron number 3 from transcript 28470.m000437 (locus 28470 .t000016) derived from phytozome v7.0 (chr-ID 28470; pos 1 29495 to 130005)
ttgctggaactaaagggaaggtaaagtctcgatataaaataagacctctagagttggtctgcttatagactgcaaatgcacaccttgttggcatgtaaaataagatctttgtaatgcatacttctaaacttcagggctaaaataagacacccttataatgcatacttctaaagttcagagctaacctttttgttgtatttttgttccaaacaactaagttcctgaaatataacttgaatgtccatataagtattcaaatagaaagtgtagagtttgacttcaatacttggatgttctacccagtaccagacaagaaagaaaaaggaaaaaacagaagagagagtgaataatagttttttgcttcacagcttctacccattttttatgctatcagatttatttgaggactatgtggctataagtgtactgaaacaggttctgatatttaattgcacttgtttgctgacttaaattgttcttcctttggtgcatttacatttcagggttcaac

SEQ ID NO: 49048 - DNA, 329 bp, Ricinus communis
  Intron number 1 from transcript 29726.m004090 (locus 29726 .t000202) derived from phytozome v7.0 (chr-ID 29726; pos 1 149436 to 1149764)
cattggtaagactattcatttgtttacgtagttctaacattttatggacattaattaggtccattaggaggtctcaggtttgaccaatgaacttttgactcaatattattacagtcttgtccaaagttaaactgcgagtctaattaaacgcaaaaaaaataaataaataaataaaaaataaaaaacaaattggtctcaggtttgtgaaattacctccattgtgaaactcatccgatgcatcaaaaagaaaaaaaattactaaaagtggtgaagtttgccaggaattgactagattgtgggttttgttcttcgcaggcttttattcaggc

SEQ ID NO: 49049 - DNA, 214 bp, Ricinus communis
  Intron number 1 from transcript 27660.m000085 (locus 27660 .t000004) derived from phytozome v7.0 (chr-ID 27660; pos 3 3415 to 33628)
tgtcagctgccggcggtttgatttttggatatgatattggcatatttggtgagttttcttcatatatttttttctacttcttgcttatatatacgtacacacataaaatattaatgtgttcatgttgttatactgcaaatgcatgcaggtggtgtaacatctatggctctgttttttagtggattctttccctcagtttatcggaagaaagcat

SEQ ID NO: 49050 - DNA, 519 bp, Ricinus communis
  Intron number 1 from transcript 27561.m000295 (locus 27561 .t000007) derived from phytozome v7.0 (chr-ID 27561; pos 3 6318 to 36836)
cggttcttctactttctctactttttaatttatctttctttaggccttcgtttcttgcaaaaagttttcgcatcagttcattcatttctttcaaaacggtttctctttttccaagttgaaatgaacaacttttccaaatatgaaagttcattaagtacaatttagggaaaaactcaaaaggaaaaaaagaagaaatactctgtaatttgcctccgttgaagaatgagtgttttcgggagaccgttccagtatcaatttatctggacccaattgtgatccattctatgttaacgcggcgtcattgttacactaacatcttaattcaacaatgttagtcagttgcaggtacagggttagcttgatagttggtgtcgatctgaacataatttaagtttcaatgtggagtccccctctcccatatttgtaataaaaacaacgtcagtcagttcagtattaaaatgctaacagtgtaactcactgtctaagcaaaataatgtgtacgtaggtacttcaaggagc

SEQ ID NO: 49051 - DNA, 489 bp, Ricinus communis
  Intron number 1 from transcript 29794.m003428 (locus 29794 .t000127) derived from phytozome v7.0 (chr-ID 29794; pos 8 34445 to 834933 reverse strand)
cctagcaatcgtcagcttcgaactcctcatagtgggtatatttcttttcttttctttctttcttctctctgtgacgggtctgtttggaaagtcaaattttgtaagaactcggtggaaatcccttcttttttcacagtatttcaccttcatgatgttagaaacgtctggaattcgattgatttcaattggaaaaaagaaacatgtattttgaaaaaaaataaaatcacgtaccaagtaacacaattttgcgagaattcagaacttgcacatgaattattccaaacaacaaatttcatgtttaataagtatttaaatgttggaatttgattcttttgagttttgaattaaagaaaaaagttccactagttttgaatcgtgttctggtacgagaatcctaggtaatataaacaaattgggaattatttgatttaattagctgtattctgcagttttagaatgtctttttttccccaattaggtaccattttg

SEQ ID NO: 49052 - DNA, 974 bp, Ricinus communis
  Intron number 1 from transcript 28152.m000915 (locus 28152 .t000044) derived from phytozome v7.0 (chr-ID 28152; pos 2 49986 to 250959 reverse strand)
tgctttgccaacttttgttttattggatcgtggaggtaattgacccttttgtcttttctagttaattttgattgattataatgatatgtgatttaatttgaggtaccattttgtactttaagctaatttggtcgttttttttatgtctatgttgtatggtattgatatgttgtgacgtgttcttgagctaattttggatgaaaatgtttgttcttgagctcattttggtgatccccagccggcacttagattttcgtctgtttgattgttttttgtgatgctttgggcgatttttttaggttggttagtgatgtaacttttttttttctcttcaactaatttgtgttgtcatttcttttgttgagatttgaagtgcttttatttggcttcttatttatctttttaggcctgttcaggagcggtctatttgttgttttgatgatcgggtttcatcttccgaggtttggcttttgtccattggctttgaggttattgtagaagtacccataggttcattggagcaacttgcctacttttggctcttgctttgataattcaggagttgttttttcgggttttagataaatagttaatttgtaactcgttttagagtcactttggcgagtatttcttttgtagttttaaggtgtttctgctggaattagtttcttttggctaatagaggatacaactttttataagggcgtgtctgcatcttttactctacacagatgagtgaatgagaataatcccaatgattctgcatatgtatgagaacaatcccaatgattctgcatatgtgcactatatactgcgtgcatatttttaagaaaacaatgtcttgttctgctttattttctttacttccaacttttgacactctgaagtttcgtttgagttttgagagctacttttttctaattaacaagtatttttgtgctttttagactgcttctttgctttaaaggtttgga

SEQ ID NO: 49053 - DNA, 184 bp, Ricinus communis
  Intron number 1 from transcript 27446.m000481 (locus 27446 .t000011) derived from phytozome v7.0 (chr-ID 27446; pos 6 6912 to 67095 reverse strand)
tcttcaacaacaacgacgcggtttcacctcttcctgtaatatgcttttttgtttttctcgtttatttatttttgtttaattttattcaataacagcactgaatctgtttttcatttcttttcttataatattttgattattattattattgttatttttgttaggttgaaaggaaacctcttgt

SEQ ID NO: 49054 - DNA, 686 bp, Ricinus communis
  Intron number 2 from transcript 27622.m000148 (locus 27622 .t000003) derived from phytozome v7.0 (chr-ID 27622; pos 2 7755 to 28440 reverse strand)
tgggtatgttttccttatgttcccttcttttcttttctttttctcctttcctacaaattacatcgtaatatgaaggtagtttagtcgttgagtatatgggagaacaataaattgtgagtgaagtaaaaagagtgggaagtgtttctcctattctcttatatcatctatatgatttattgatttggattctctcgtgtttggttgaacaggattatgataggtcacgttcataagatcttaaccattcgatttgaaatgaagggttaagattaattttaagttcgtttacacttccaaggggtgggtgattacatattgttagataataacatctcaagatcttaatttgaattagtggtcatgaacaccaaatagtttgagaatcttaccaatcatagtccaaaatgggaaaatcttccttgtaaactttatcccaaagaggcaactagcaattagacaatacatagcctgtgcttacggtaggagcttccattacaataagatgatccaacatattagattctttttcacgtaattttggggttttgaactttgctgctacattgatggtaacatgtggattttctaggtctggtttatttcagtctataactccatttatttgatgaaagatttgtatcattgctatctcacagttggtctggtaatttcttgcagctatctgc

SEQ ID NO: 49055 - DNA, 530 bp, Ricinus communis
  Intron number 1 from transcript 29589.m001294 (locus 29589 .t000073) derived from phytozome v7.0 (chr-ID 29589; pos 5 17530 to 518059)
ccagttcaaggcacttttaatccttttcttgttgggtaaattacaattttgcttctttaagggatgatgctaattctcttcttgggtttcttgtatggattaatgaattgggtttttttttggtctatttttggaaatgtaaatgaaaatttaatgcttttttgttggtttctctcttttgttaaatggttttgtaagtttcatcagttttcttggattttttttttttttttccattactgggtttctgaatttggagtattggactgtgaatgtccttttgtttcttttctcctttttgtcatttgatttgtttttggttgaattatgcttgttcaggcttctatatgaacgtagaaacaagtctaggcaactgggttttaaacctttcttacattggacagacataaactgaaatcttggaaccagttggatattattatgtagtaactttggttgttgatttagtatatgtctcttcttttgtttgattaggctttattttacaagagtacaattgggctctcctc

SEQ ID NO: 49056 - DNA, 496 bp, Ricinus communis
  Intron number 1 from transcript 28623.m000406 (locus 28623 .t000019) derived from phytozome v7.0 (chr-ID 28623; pos 1 41025 to 141520)
agtgttgcaggttagtgaggtaggtaactcctttttccacggatgttaatgaagaacttttgatgggacaaaaacacttttcagttttttatattactcgttataatacttgaatatggaataagagcccaatagcattgcaccttctttctcactgttgtgcaaaagaaggaaattcaccaaccactttacttattttcttctatttttctgaacatgtgaaattatttgcctagatgtcagtaaatttggctcccattcatttgtgatcctcattctgatattatgagctgtgttcttcatccaagtggtttgttgtatctttctcatttccttttaagggacaatttggagtttttcttttatcagctgtttttaaaaaaaataaaaaattcttttccctttgtttttctcatttattctaaattttctgttttctctattcttattggccaatgtagctactgtgaatccaaaagtgctgctggagctcttc

SEQ ID NO: 49057 - DNA, 874 bp, Ricinus communis
  Intron number 2 from transcript 28623.m000406 (locus 28623 .t000019) derived from phytozome v7.0 (chr-ID 28623; pos 1 41540 to 142413)
aggagcagaaggcccaacagattggcaagaaacaggtactccttggagatcatatatgctataacctcaaggattctttattacctataattatgatttaggtaaaggcatgagattttgaaaattggggtagggtggaggaattgaattcttaatgcttctttgatcaaaagaaaatttggacatggtttaatgtctaggttagactgatactaaataatacttgccttaagcacataatcatggaactttactcttttctaaggtccttgtagaactcagatataaaacaagatcacatctaaatgtatttgaagagtggctttgcaaattatatgcggattgtattggtgaagaaaaataagttatgagaatttatgacagtgatggccagagaaatgtgctacgttagctgctagttatacctaaaggtatgatgttttcatgtgacatcagcatcattcctatcccattagtctgattctttagtagatcaagataacatcccaaggcacatgatataatgtcaagtatgagaagctgataaaccgcctaaacttgtttttgtttttatgttttatcctctgtcaatagcttaatgggttatcctgccataacaggttataaaatgaaacagtattctagtttcagtgttagaacatgaaaattcgaaaagcctatgttttaaatccttgtagtgacatgcttttctttttctaatccctttttcttttgagtattggtcatatttattaggctatgcaacttcttttgctattttatgctggagaatactaggaaacttagggtgcttgcactatactgtggtgaaaatcgatgcaggaagagattgaaaataagatagaagttgcag

SEQ ID NO: 49058 - DNA, 647 bp, Ricinus communis
  Intron number 1 from transcript 29620.m000559 (locus 29620 .t000029) derived from phytozome v7.0 (chr-ID 29620; pos 2 47181 to 247827 reverse strand)
tgctgtctcaaatcaatcccctgataacattgaaggtactgttttttttttttttactcttttagagcagtgtaaaagatctcttcttcttcttcttcttcttcttctttttggttttggtttttgtggtctatgcgtttaattacagatatgtgatcatgatgtatttgtttgttattttagttaaatatataatgcatatacctttgtataaatggcttcgttttggatggttatggtctttttattgaacgagttttttggttttggtgaaatatttattgattgatttatttattttttatgaatgtcatattttacttgctgtatgattaagaaagtttatagcttgtttgggctgtgcatttttttttttaagactcttttggtgatacggtggttttttattttgagtgtttttctatcttttctcgtagggagattctgatttcttgttggaatcagaattttctggtctgtatctttcccttttttgaagcattagtttgaattgaattgagtgtgttttagactctttcttacatctggtggtttctggatttagtaaacatgatatattaggtcgtatattgatttggttgagcttcaattgcacattacagaagcaatttggcgattaaaaatcc

SEQ ID NO: 49059 - DNA, 945 bp, Ricinus communis
  Intron number 1 from transcript 29801.m003068 (locus 29801 .t000013) derived from phytozome v7.0 (chr-ID 29801; pos 9 1857 to 92801)
ctttgcctcatttaagcatcaaagacactcccattgtaataaatctctcctctgctttcctttttctttttccttttcttttgctattagttaaagtttggatttttatgtacttttttgaagtggcggagtagagtttgatgggtttaagtaaagatgaaaatgggttttggttaaagttttgctcttcacctatgtttttacttgcatatatcaatttctttaaagtgggtttttactggggttcaagtaaagagtgcttaggttggttttgattttcaacatttaggaattttttttggagtctgtctcttaatctgtttggtgaatgtatttactctataaaattggagtgaacatggtggttgcttttggtagtttggatttcttgccttttatgtttcaagggtgtatttaatgagtgtgatttggtgaaatcattggatgcatgggaatcatatttgtagaatgttagatccatgaaattatttttagctttcttttttttctgtttttggttaattttctgtttggtttgcgagaaaataaatgaaaagtcgaacaaataaaagggttggctggttggttctttcttcttcaaaaatatttagaaaattgagattaatgctctggcgttttcgtattcacatttctcttgtttttcttagcttacatacagatcaaaagtacactgaataaaacagatgattgtttgcttattagcctgaaatgggttttggtagctggcagaattggtgtttggcttttctacaaatatggacagaaaacttcattttctctgttctgtaacttagtcatagtaactgcataagtttcagtaagaaaaaaaaatttattttatttttgttttaaaaaaatattttgtcttctaaaggatgtattatttcaggaaacttcctctgctcagtacatattgcagcaata

SEQ ID NO: 49060 - DNA, 713 bp, Ricinus communis
  Intron number 1 from transcript 29611.m000225 (locus 29611 .t000004) derived from phytozome v7.0 (chr-ID 29611; pos 2 8554 to 29266 reverse strand)
ttcttgttaaggctaggaattttttggtctttcaggtgaacttttaacttttttattgttctttttttttttttttaatttaatctaaaatacttttagttgtgctgttatatatttttggagtatttttgtgttaattaattcatattatatgatttaaatgttcactctatgtggatttaattccatttagtttaagcaattttataggtgtttgtttttattgttatttagtgtttggaaactctaaaatgcaatcaaagttaaacaaatgagggattttgaaagaattgacatcacgccaacaatatttggttagaatgctattcaaattattgcatctgatttattcaaacaagctttttttgttgtttatttggagagtttgatgagcaaattctttttggagttttgcacattgagcttttggttgccttttagcatatatgttactgttgcctatgttcatcatcttgtggttgggttctatatcgctgcccttttttctatatcatctaatggaagagttggttagcttggtgttataatttggattgaaggaacctgtccatagaaactttatatggtaagttattgacttgattgaaagaaacaccggagattgtttacttatcaagtattgtggctactatagttaagtattctagagttggagcttatgaatgacaacatttggtttcttatgtagggtg

SEQ ID NO: 49061 - DNA, 437 bp, Ricinus communis
  Intron number 3 from transcript 27721.m000026 (locus 27721 .t000002) derived from phytozome v7.0 (chr-ID 27721; pos 1 2530 to 12966 reverse strand)
aaacttacggtatgtaacttgtaacaataggcaaagttcaatactgcaattttgtattgtctactgcattattagagctacagataattctcctgaatatttctggaaaattatccttcaacatgttctgagacacctgagccatgatcaacttttttcaccattttgttgtgccaattatgctactactgttggttacctgttaccccgaatgtaacaaaaatgaaaaatatctattctgtttccttgtggtacaacaaattatttggattgttccttgtaagactcttcagtttttccaattttttccattccaattagagaatactgagtcaatagaatgttaattctatgctagacaaatttcatctatctttatacttggtcttttgaattgcttcatgtctctgatgcaggtgaagcagcctggactggag

SEQ ID NO: 49062 - DNA, 504 bp, Ricinus communis
  Intron number 1 from transcript 28966.m000522 (locus 28966 .t000001) derived from phytozome v7.0 (chr-ID 28966; pos 1 2817 to 13320)
cttccggtctctgcgtcgctgcttttaataaaggggttagtatttttttcttcaaaaggaaaatcatttttgtcgttgttttgattttctactgaggtaaattattgatctggatctgtgactgtgaatttacttttgtttcttgttatcaatttaatttcatgttcagtaaggctaactatagctactatgaaattatatgctacttctgtttaagcacctaatttgttcctctatgaaaatgcctgctacatgcatttactttggaaatgctgttgactaattttggaaaggaatgagaattgctttctatatcctctaatacttacaggtctactttgtgggtttgctctatgtagctttttgataaaacaatgttgtaatatcttcaactgcaactactgatctgtattctgagtgatcatgaagagtttttgatcttctatttacttcacgtttatggttttatgggttcttaataacatttgatactcatctaggttc

SEQ ID NO: 49063 - DNA, 681 bp, Ricinus communis
  Intron number 1 from transcript 29158.m000197 (locus 29158 .t000008) derived from phytozome v7.0 (chr-ID 29158; pos 7 6987 to 77667)
ctatccctgctagtggtgactcttatatacggtaataattatcgtttattttctctataattcacatttcaagatgtacatttcagggtttggttttctaatgtcgagatctcttgattttgtgggtaaattttgcttctttctttcttgtctataaatggtaatgctttggacaattccgaggaagaaaaggaattgggtctagcccaaagttactgatttattttgataatttactttttgtgctctaatttgggttagtttgataattgaagatgatacttcatttcatagcagctattttgatttgggtccatatgacttacatggattgctaaattcgttacaatggatgtcccaaatatataagatcgtagcatgctccaatttatgtgttgctaagaaatttgttatccatagttaaatttgagattctactttaactgcccagttggttgctgagcaatgtggtttagaagtgttagcttaaagttctgtttatgtgaaaatgatatccatttatgctgatagcatcttaattcctttactatcatttataacagtatcttgtcttatagacctatgcgtttagtttttctaatttgatttggtttgattcactactttatatggtaacttatgccagttttgaaaagattaagttccggagaactgaggact

SEQ ID NO: 49064 - DNA, 758 bp, Ricinus communis
  Intron number 3 from transcript 29678.m000506 (locus 29678 .t000014) derived from phytozome v7.0 (chr-ID 29678; pos 1 43691 to 144448)
gcatctcaaaggtatgtcgtattcatagtaccatatactccatacaaatttcaacggaacgattaattttgctgaacttcatataataaaattgataataaaggtgctctttgttttgaaattggtaacatttttccagaatgcaagatgagtatgcattctttttgtgctcgagttcagtagcttggatattttatttaatttggaaattttggttgtccagaactccctagcgagtatctgaatgtctagtctgtcgtgcttgatgtctatttaattgagttttattttatcatttaattttcttgtttttttttatcatccaaccttttctatttatatttttttatggttacaactcatgtatgcaattttgttttggtttaacctacctgtgctttccagaacatgccaattctgcactttgtatttccaggaaatgggtagtattctatttttgctttaagggtactttttgtcttctgttaaaagaaatggctttacttttccactggaaaagaatgaaatagactttaatttttctttaaagtggtggtcatcttttagcactgaaatgggactggaaattgctgaatgcatctgtcgtgctgtatagttgctcgttaagtcttagcctgtaattattcatgaataaattctgtatcaggaaactgatttttttattcttcacctcacttgatgtcctgtcgagaattgttaatggatttttcatagcagggaacatatcaactagcaaa

SEQ ID NO: 49065 - DNA, 703 bp, Ricinus communis
  Intron number 1 from transcript 29726.m004054 (locus 29726 .t000166) derived from phytozome v7.0 (chr-ID 29726; pos 9 42531 to 943233)
cgtcgcgcttcagtgctctcacttgtttcatcttggttagtttcattctatcctcttctctagtttgtttttaaaatttttggtttgcttatgttaataatggcatcctgtgtaatgaatgactgtttgtatataatttgctatttattgaattttagtagtttatctaagcatgtttgttcaaaaggaatttttgtattgtttggatggtagaaatcataaacataattatatttagtaaatgtgagatacgtcctagcggaaaattataggatgcagcttttgtatgtacaaaaacggataaaccctaactgttgattacggtgggacccaccacgataagcggtcagggtgtatccattttacgtaccacggttgcatgtataaatttggataccataaaattaatccaggattctacagttaatgcaccagtacatatttatcttaattttacttctgtttctattgcactaagagtggccgattatgtccaaatggagcttttaccgtataatgtgatactagctaaatactgtcttgacattaaatcttacgaagatttgaagagatcgttttaataacaaattgaagtctcattgttcactgctatatatttcttccatacttgacttaatttcgttatttattttgcaatcacttccgcttcaccttttttcagattgcatcggttctgcattca

SEQ ID NO: 49066 - DNA, 901 bp, Ricinus communis
  Intron number 1 from transcript 29635.m000462 (locus 29635 .t000022) derived from phytozome v7.0 (chr-ID 29635; pos 1 35686 to 136586 reverse strand)
tggtcatttttggccctttgattctctgtttatcggtaagtttgtactctgttaattgaatatgaagttcgatttcgaaattctctttctttttaattttttattttaagatctgtgtaagctagggtttgtcttttgtttaatatattttgtcatcaaagcttaatccgataagattctattgaaaattttgattcatgttaagctaatgagaggggtacaaactatggctggaatatgtttttttttcgttgagatattgattttgggattagggcttagttcagtgagttgataaggaaaaatgaaattgaagttgtaattattgaattattagtgcgtgctgttttcttttaagtagtcgtggctgcttaattgctttcagggatgctgctctgagtgaaacatttcactcaattcactgtatttgagaagtttccggatctttgcttcttttctatgttgttggattttgatcaaagaaaaaagatgcatgcttttatttatgatgttgtatgatagtctctattaagaatctccaaggggtcttgttctctcaatattctttttattttggattgtataaggaagtgatttttttttttaaagaaaaagactataaggttaatgcctttttgtttcatgagtgacgaagttccattatatgcgtgcatggggcgtgtgaatcgcgtgtaatttctataaaaggaagtttatgcatgttcccgactttcagtttatatgttctttgttataagtgacagctaggaatgagcatctgttcccgtacctcctacattatatccatgcaagtctagtcttcattatgatgttgacataattgctttcttgtttgttggagctttttcagtctttcttttcatacttgtgtaataggaaa

SEQ ID NO: 49067 - DNA, 466 bp, Ricinus communis
  Intron number 1 from transcript 28470.m000443 (locus 28470 .t000022) derived from phytozome v7.0 (chr-ID 28470; pos 1 93559 to 194024)
aaacaccaggtcattctctcatacatactccttaagattttattttattttattttattattatgttgcttaagttgaccatggcaagctcatatattagtcaataattactttttagtcttgcttattagtcaataattatcatattcaatgttcaaacataacttttgattattatatttcagcattattatgtccgggtgaagtttcctgtaagttaggcgatgcatgccaacgactaaattgatttatatttgaatgtaaatttgatgtcaaatccttggtcaagtttttgacatttatgctaaatctgttctaatatggcatgacaagtttgactttgtaattaattactattaagaatttaatacgccacttcagctgaaatttgtttgttttctttcttttcctgatattttaattacttaacagaatgaaattgcagattttgtagtatatctgggag

SEQ ID NO: 49068 - DNA, 889 bp, Ricinus communis
  Intron number 2 from transcript 29585.m000587 (locus 29585 .t000015) derived from phytozome v7.0 (chr-ID 29585; pos 1 11013 to 111901 reverse strand)
tcctgttcctccattcaacaaagccgtccagctcagtaagtttaaatctttttttttttctttttctgatgaccattttaacattcgttttttactctgttcaaggatccttatctctgggtgtctgccttcaaatgattcatgtgttcttgcttctgccgtttcgccatggctttctctttttttttttttttttttttttggagattctactgctatgcatattcaacaactaaacatgctatggaagatttattttcgccttgtggcttggtcaagctgatttacaaattatattttttactcatccgtttgcaatggattgccaattatattcatgttctcttacacacttgaacttgtacccctcttctctagaaaataggtgtgttaaccatttgagttatacctccgccaccacttgtgccttgatacaatcttttacatctccacttcctcgatgctttatttattgttgaattatttcatttgtaaatttctaatgaatcctcctcattcccctggcattgcaatataatatctctgtcaagtacaaactctcttattatgagctaccaatcaacaattttgcttcgttttttattctcatgattgattgcttaggtttacttcatagtgacttgatgcatctgagagactaggaccactataatattggttatatgtctgtcatttttcaattgagttacatgtgaagtgccttgaggctgagactttttttgctaaaattattatgcactttgaagttgaagtgatctatttgatttcatggaaagtgatttgatgttctgatattgcaaatgtcttctgagggcatcacatctcattcgcaggtaaggctactttttccaagaatcctgcaaagtct

SEQ ID NO: 49069 - DNA, 1004 bp, Ricinus communis
  Intron number 2 from transcript 27613.m000622 (locus 27613 .t000015) derived from phytozome v7.0 (chr-ID 27613; pos 1 10344 to 111347 reverse strand)
ggtctgtcgcccagtgaccttgtagctgcacttaggtcagtctcattgtttggagttattccccatatttcttatgtttctctccttgttatttcaccatacaggtttttacatatattgatttcatataatgtcttacaaatttagcattatagagtagtaattgatggttgagaggccatgtcagtggtcatgatgctgtaacaaatgggatcttcttttcgcccctcatttcccacctaagtggtttgtttgcctaccttgtaaattggagcttaagtcacttcttttcggtccattttggcaaaacacgtgaagaatgctagcaatcatttattataggtattactatttcccctagcgattgcaattttcggccaagcgttgcatacattgttcttagcgattgaaagaattggttgatcctattattgttggagaagtgcaattcttcaagattttatgtgaatacttctttaatctccataacaaattattctcttgagcatctctgataatctttatccacactgcttatggaagtttttgattctgctaccctccttgttctgaaaatttgttgtctctgtcagtactttgacaaagtatagtaacttattggctctttatcggattgttcagattgagtgatttcttgtggttttacattacttatatgtataggtgtcaaactgacctttggaaagttgaaagaacaagacaaaaacacaaaactaatgatgtgctaaattgttttataggatatgaagaatatcttctgcctgctttctcatgttctctctctcacacttccacatctagaatttgtacaaaataaaataaaatatgcttgttatttgcattatatatgagatggttaatttatctgtgagagatacttgtttgtcactctatttttagcttgaaaggcataaagattgagatatatacttgacatgttttaatcagggagttggaggttgactttattcttctagctggat

SEQ ID NO: 49070 - DNA, 704 bp, Ricinus communis
  Intron number 2 from transcript 29666.m001484 (locus 29666 .t000060) derived from phytozome v7.0 (chr-ID 29666; pos 4 78155 to 478858 reverse strand)
aagaaacccaagcaaaaggtgcatcttttagaaaggtatatatatatatattttttttcaaatatctgtttgattcctgtacacaaattcattaaacaaagtcaattatgatgcaatatgtagcacatcaatgtcaatagggtaacttataaaagaactggcctaagatggagatcttagttaagctgttgcttttctttagattgacaatgtttcatgaagaagacttgattccatttaccctcattatgtttaatgcaaatgcatatggtgctttcctgaatgatggtgagagtcaccgaactattctggacgcaaattgtttttggaatcaagttaggacatttaatcatttttctcaatgatggtaatggtaatagaccattcagtacctaatttatacttgctaacagcaaaggttcttcttttttctaatcatgaactccaattgatttagcatatgcatatggaccaatatgcccataatgcatacttatagaggtcctcgctatctgttttgatgtaaaggggcatgtgcattgtcttcaaattagagaaaaagctgtgtgattttgcatgctttgctggagttagaaaataccggtggataatcttggaactcagggatgctcatcttcttcaatttttctcaattatggatacaatttttgaaattttttataatttatttgtcacagtttaaa

SEQ ID NO: 49071 - DNA, 538 bp, Ricinus communis
  Intron number 4 from transcript 28324.m000398 (locus 28324 .t000006) derived from phytozome v7.0 (chr-ID 28324; pos 4 8911 to 49448 reverse strand)
cacaatcaggaaaattttcaagcacaaactctaaggtaaaataaatctctatttgtctttaatgagcaaaggatagaattctattgaaaatagatactacagaacaaagagaacaaacaagctagctgcaagcaatagctttgatctctacaagcaaagacttgctatattgaacaaggaaaccttagttagttcttgcaagcattccttaaattaacaattgtttgttttgattcctgattccgttttatttgcacccaacaaatttgattcttgcaagactttctcaatcaacaatttgcttattttcagcatgtttgcacccaacaaatttagtccctgacccaaccttgacttaggtctttcaagcttataactcaagcaattatctataatcaagcaaactccatttacagaatagagtttcggattcttcttccagtatgcaagaatcacaaatttgtaatatacagaagcaacactaatgcagtcaactaatattttgattactaaccaaacttgcagaaggcggagaaat

SEQ ID NO: 49072 - DNA, 664 bp, Ricinus communis
  Intron number 1 from transcript 27451.m000246 (locus 27451 .t000008) derived from phytozome v7.0 (chr-ID 27451; pos 5 3242 to 53905)
ccctctcggcaaattaaccatcctcgtcggtgcaggttcatacaatttggtctctatttcgttattattattgttgttgttgttatgttcgtacgtgcttcaatttttatttttggtaattgtatttgaattagagtaaaagattacttagggttttgataaacgcgaaattggtaatagatgcggttcagggcattcagctcctccccatgagctggcggccatcatcgttgatgatgtttctaccattagtttcagacagtattttttgtttttagttttgcttcatgttttgcgttgctgtaatttggcgactgactctctagccaaagaagctttaactgtggcagtaacaggttctgctctgattccaatggccaactgtcgtggcttaaggatcatgttggtttctaatgctcttttattgctggaatgaaatatgctatcttctgttaagaaaaagaaaaagaaattcattgatagtttttttgggtacctgattagattaatgaacttattttatttgatttaacaatgcctctaaattcaatatcagaattgtttctgaaggtgtcaagtggaagttagactaatattttttaacaatttgtcatttcatttttctttaggtatacttggctctgttcttgcaaaagaagggcgc

SEQ ID NO: 49073 - DNA, 507 bp, Ricinus communis
  Intron number 2 from transcript 27451.m000246 (locus 27451 .t000008) derived from phytozome v7.0 (chr-ID 27451; pos 5 3910 to 54416)
ccagtgttcccgattttgtttcaggtgcattcaaggtacttacttaactttcaaaatccatgaattccaactattatttgttttcttgctcttattaatcttctatagattgatagagtaaaggaaaaaaagaaaaagaagaagacttgtttgcagtttcttttgtattcttatgttattggaggtccatatctttaggtggaagatggatagtcttttagcataagaaaagacgcaaacattagttatgtagcataaactacaatatgttttgtaagggttttcagatattgatgtgaaattttgagatcattgtagttctgatgcctgaaagtaagttgctgcttcgcctctgcgtgtgtctgtgtgttaatttttttgaaaagtgtatcacatagtggttgcgttctgcataacaaagagagcattagtctcttaatgctaattgctaatgatttttgttctattgcagattgcttttaagcaaatttcacgggaggattctac

SEQ ID NO: 49074 - DNA, 502 bp, Ricinus communis
  Intron number 3 from transcript 28256.m000143 (locus 28256 .t000011) derived from phytozome v7.0 (chr-ID 28256; pos 1 03117 to 103618)
cactgctaaacaaattaacaggcacgttttcagaggtatgaagctgttacccatagtggcataaattttatcctgataatgttcataaaaagttcaagcgaggtagaattacctaatttcagtctttgtttttttaaataaataaattaagagttcgctatgattcagttattaggtaagatacaaccttttcttgtgttagaattgcgcgcttgatttattgaacctaatagttcattcagcttctgttgatatgcttattttataagtgtttaatgtggaatctttatcattcttttcaaaagttttgctcagacggaacaatagtttggctcaacttccaaggattctgttttactttggcctattgtttatgtgttttttgtggctgggaattaacagcctatgctgaatacttggtcactgtaaaacttgcattaggtactttgatctcttgaagactgacttcttttaaaaatatatggcttacaggttgcttcct

SEQ ID NO: 49075 - DNA, 360 bp, Ricinus communis
  Intron number 1 from transcript 29648.m001982 (locus 29648 .t000069) derived from phytozome v7.0 (chr-ID 29648; pos 4 99860 to 500219)
gggctttttctcataatctggatttggattctcaggttattatcattattatttactctctttcgctatttctttgattgcttgctgtttgatgaaatgcctcgctgaactggacttcatactaatatttgatagttaaatctgcgatttttttcattctcttcttttcctgtacttccgaattaagggtattttgatttttagaaaaatagagtgaaaatgtgggggcaaagttgaagtatagcctttgaattattagaactattcacaattataatagtatattgaggcgtcttcatttcaatttaattttgattaaactgacttttgtttattctgattggaagattatccagcctc

SEQ ID NO: 49076 - DNA, 428 bp, Ricinus communis
  Intron number 1 from transcript 29742.m001442 (locus 29742 .t000078) derived from phytozome v7.0 (chr-ID 29742; pos 5 11483 to 511910)
ctcttgttaagcatatcaaagctcctgttcatcttgtaagcgctcttttatagttcctgtttgatctgttttattctttttttttttcttgatttcttcgattttatattaaaatcttcactttttttttggttttgtttttgaatccgtatcgatctcggtttattatgcttcacttcacctttttgtttgttttttctcccccgttttccggtgtcaatttaattttccccttcttgactttgatttgtatcaacatatttttaaataaaagaattaatgattttcgagtgtcatttttttcatagtaatcgaaagcgcggattttgctgttatttttcattgggagtgtcgtattcgtatgcaggacgagggaaaaatggatttttggttgatatgccaattttgtttattgatatgaaataggt

SEQ ID NO: 49077 - DNA, 640 bp, Ricinus communis
  Intron number 2 from transcript 29172.m000214 (locus 29172 .t000006) derived from phytozome v7.0 (chr-ID 29172; pos 3 7828 to 38467)
ttcgtgtggcatcaaggtagtgacttggagatgttgcagattacttaatagtgcttgtgcttttaaacttaataatttaaattccttttaatggttttttaatacatatctgtgatttactttcaattctgtgaattttttgctatagtgtatctgctgaaatatcataccgataagatttattttgcatctaaggatggaattaaaagtcacatggatcacaattaaggttttggccctgccttatggttctagatattgtgttctgttctgttcatatctagaattgctgcaatttatgaaaatgcattaagatgaaaaaatctgagccactcaagtaggaagaaactttgattgtctgttccattttggaccatctataacatttcttaaatcactgtggaagttttctatttcttttttttttaatatttggctttgacttcaattatatgggatttcaatgagcttaattagtttctcaggattctgcactttggaccttctagaaacatgctattgtttatagtatatatctcttattcttaacatatttatgggttcatccttgcagaaagaatgagttttctttccctctttctcagatattttaagggccctgagcttctagttgatctac

SEQ ID NO: 49078 - DNA, 356 bp, Ricinus communis
  Intron number 1 from transcript 29462.m000384 (locus 29462 .t000012) derived from phytozome v7.0 (chr-ID 29462; pos 2 61561 to 261916)
aatacacttcttcttctcgtattattgaaattcaggtagctttttttatcacttcctcttttgcttttggccatatcatagttcttggcaagtctaagaattataagaattcaattatttcaactttcagaagaacaaaaattaatggcattttaagggcatcatcaaagaagccaaaggcgacatgattttgcatgaattcaactgaattggattcttgcaaatgtttattccaaacaaagtctagcatattcactatgttttaattctttttctacttttctctgtttgatttgtttgtttctgtgtatttgttggcaggcaaagctatcagagagagcagtagagcttcttgc

SEQ ID NO: 49079 - DNA, 591 bp, Ricinus communis
  Intron number 2 from transcript 29462.m000384 (locus 29462 .t000012) derived from phytozome v7.0 (chr-ID 29462; pos 2 61931 to 262521)
gagtccctagattactcctcgacattggtatgattagatgcatcttctgcatgtttagatgtaatttgaggttttaatatgcttagatttacacatatgggaaaaatgagatgttatgaatactggtggacacttatttgatgtgatagatctatatttttcttcattagatgacatgaaggagttccagataggtattatcaatttatttttattactgacaagtataaatggtggcaatgctgattttcttaaccaaaaatataatcctgtagctccttttcatttcccttacagctaataatctctttaatagataatcatttgcataatgcatttgtttttgagtagtgggtcatcatttaatttgtctgaatacggttcagtaatgtacagttctagtgtttgaggtttcaatccttgaacttctgatactttttaaaaaaaaaaaatttattgttaggcctaacctaaattaatttcaattccgggatatattagatgattcttttgttgtttgtttgtttttaacattggctgtttttggcttttgcaggttgtggatcaggacttagtggagagacactgaca

SEQ ID NO: 49080 - DNA, 366 bp, Ricinus communis
  Intron number 1 from transcript 29693.m002097 (locus 29693 .t000135) derived from phytozome v7.0 (chr-ID 29693; pos 9 19983 to 920348)
gggaatcttccaggttctttctcactttaatttctttttgttttagattactttatttcttctacttatgtttatattttaattgtcttagataaattttcaccgttctacatcatcaatgtattatatgttcacatgaacttaagttgtttcagaaaccagaacggatgtattgagacagctgccttctagcttttgagtagcttgcagtttaatttcatatttttctccattttagttgataaaattatttttattgtaaaaagaaaaggcttgcagaaacaattagaagtgcaaatatatctaactgggttgagatttgatttcaactttaaacagttggtgaaccacggagttagctctata

SEQ ID NO: 49081 - DNA, 990 bp, Ricinus communis
  Intron number 1 from transcript 29005.m000257 (locus 29005 .t000008) derived from phytozome v7.0 (chr-ID 29005; pos 5 2711 to 53700)
ctcggccatcacaattttcaattgccaaggcaagctcaaaactgtggacggtatatgcataatgattgagaacctgatattcttaagatatccaacattccatctgcaagaggatattaaattatgatttagaaactcaaattacggtggatctgaaaatcaaactgtggatggtatatgcataatgattgagtacctgatatgcttaagatatccaacattccatctgcaagagggtattaaattatgatttagaaactcaaattacagtggatctgtaatgtattttgttctcgttcatggagaagttccatttgacatccgccttttttaagcattgtgggctgttgcatttttaccattatcttccaggattcctaatagttgtgggggatttgggctatatattggggatttgccacagaaattttctcataaagtatatgtggtagctttttgaggttcgcattaagctaattattagcattttataccaagcggcttcattatctgagtattctggaatggaggtttcaccggtaccatcccatcaggacacatataatcacttttcattagtactagtgtttgatgtgctgcttatttagacgggaagcttgtgacggatcctctttctatgtgaaatttcttcgttgcaagatctcagttattctcctagttcatggtgtttttgcaaaggagcttccttcgcttaacttcagaactggagttcacacatataccataacaccagtttgcatatgcagtggatcgaattctctactcccgtctatcgtctaatagctcaatatcctgaagtttggccagatggttgcttgagctttttactatactgcagtttctctttcttttccgaatttactgagattgatattgaagaatggtgatcttgttatgcggttatgagctgacgtgttctatttgctttcatcagcctaatcgcagaatcaggaacctgccttggcagca

SEQ ID NO: 49082 - DNA, 347 bp, Ricinus communis
  Intron number 1 from transcript 29801.m003119 (locus 29801 .t000064) derived from phytozome v7.0 (chr-ID 29801; pos 3 71840 to 372186)
attcctctgagcaaaggtaatttggcttttctttgttcttttctttttgggtgagcgttaggctaattagggaattccctaattaccccatatttttgggtaattatttgttttgttgtttgggttcttctatgtatttgagttttttatagggtaatttggggatgcttttttgtttttgttaggctattaatttttatttttcttttggaggttcttgatgtatgtaggctgaatagggaattctttgtcatttgggaacttagggatttattctgtttcattttagcttgtttgttcgttcgtttgtagggggattattattgtgaagctgcgaagagggcagg

SEQ ID NO: 49083 - DNA, 806 bp, Ricinus communis
  Intron number 2 from transcript 29770.m000336 (locus 29770 .t000004) derived from phytozome v7.0 (chr-ID 29770; pos 1 40918 to 141723 reverse strand)
tggcgctgcatcttcgagtttaaaggtaaataaataatttccataagcattctttcctctttagtctttttcttctgccaaaaaagttggatgggtttcgaattcaggaaccataggctatatgccacatatgttatttacattgaaatacaaaatacccatctagaaacataatcaatatgtattcatatataacaacgtagagcctccaaccacaaattaaatatgtcagtacaaattaaagaaagaaaaaaagaagaagaagaaagctatatatgtatgtgagatgcattagggttttgatccatgtgtgcacttgtgatgacaatgaggtcaataggttgcacaatcatgtgagcatcctaaatttgtatataggtcgggaaggatctttgaaatgcatttggataagcataggggaacctgtggcagttcaaagacttgaattttttgtagtctaagagaagaaaagcatcaagggtctatgcttctttatgttaaatgcattaaggagacagaaagaaagaagcagatctcatcaagtataatcattgttgatgattttatgcgtggatcgttattgtttttagatcttccttttgtcactataatctttctctttaataaagaataccttatcagcatgatatgatgaaagagtctttgattcaagactttaggtgtacttgtatctttaattgtcatgttcctgtttctttttctcctttccgagtttgcttttataaatctttgtattttactgtttcataaaatctaaccaattttttcactgttataggattcct

SEQ ID NO: 49084 - DNA, 749 bp, Ricinus communis
  Intron number 1 from transcript 29736.m002045 (locus 29736 .t000041) derived from phytozome v7.0 (chr-ID 29736; pos 3 29349 to 330097)
tgtctgggttcccgcttcttctgccacaattcgtaattctgtttatttttgttatttcagctagtccaacactctgttcttggctctgtttcttatcgggattggttgttttctgttaaagttcacggactttgttttggatgattatgaaagtatttcctgccaagaagatcgagttactattgccatgtctgtgtatgggatcgtacatttatcctatgctactgcttttaaaatattttgttgactatttgttgaaggtcctgaatttctgttttattaaatcagctgaagcttaaggcgaatttttgtaatcttttgggagatatggtgacctaagtattttttctaacttctgaagatatagcaagcgtttatattacaaagagaaggtttaagctcttgcataaaatttcactttagagttttgtcaggtgtctttacaagtaaatctgttgtttttcttttcttgtgatgtttcactttttgaacagagtctttagtgcatcaattgggtgtttctgttggtggctttcttttgttttcggtttcactttattgctatcggaaatggatgtcaatttgaaggaaaaatccaaacgaaagtcccttttaagttgcacaataaaagactagagatcgcaatagcaaatcatatcgcaacaaacagtaatgggattttgagattgtagtgatgagctgattgtgtttttgaactttttgctgcatttgatgtaggtgcaaagtct

SEQ ID NO: 49085 - DNA, 599 bp, Ricinus communis
  Intron number 3 from transcript 29747.m001092 (locus 29747 .t000049) derived from phytozome v7.0 (chr-ID 29747; pos 3 66419 to 367017 reverse strand)
acatctataaccatatattgaatgtaagctttattgagtttaatttacttaaacatctagtatttcatttgcagatgctcaaatttagttttgatatttcatatatttaagttacgattgaaaaatagaaggttattgtttttgaactgatctttgagtactggcctggctgcagaccccacagagagactttacgattaagatttctggattagagatttataatgaaaatgtcagggacctgctgaactcagaatcaggtcgaagtctcaagcttctagatgacccagaggtatacgcatttctttcttttttttgttttttttgaaagaattctttctggaggttctctcaactactggttattttgttgttgtcatatgcagaaaggtactgtggttgagaagttggtagaagaaacagcaaccaatgatcagcatttgaggcatctgataagtatttgtgaaggtaacctagtgaagaactgtatctttgttttggtttagcttcctttgccactgcatgtattagattaatagtttatttacttattactggttgtgttgcagcccaaaggcaagttggtgaaactgctctta

SEQ ID NO: 49086 - DNA, 437 bp, Ricinus communis
  Intron number 1 from transcript 29630.m000825 (locus 29630 .t000050) derived from phytozome v7.0 (chr-ID 29630; pos 3 03958 to 304394)
aacacaagtgatgttgcctcaaagctaaattctatcagaaacaagcttctcagaacttgagtcaaccaggtagttcctttgtaattgattgatcatctgttttagtatcttccacctcaacaaaagaaaaacaaatgttttccatgaaatctctaaatcttttttttttttcctgtcgaaggggcattacaggaggttgaataacttatcctcaagctgccagttgattcagtggtcaagaaaatgatgctgaataggaatcttgtatttttctttctttttattagtgcactgtttgtcctgtctcgttgcgcttatatctgaaacaatgatagtatctttaatagtgtatcaggattttgggttgttaactgtcaagaaacctattatttgttgatgcagatagtaaaattccaggaacagagcgattagaactt

SEQ ID NO: 49087 - DNA, 1024 bp, Ricinus communis
  Intron number 3 from transcript 27966.m000032 (locus 27966 .t000001) derived from phytozome v7.0 (chr-ID 27966; pos 1 6567 to 17590 reverse strand)
agggacttgcaatacgtatagctgctgaggtgaccttttgcaactgaagcttttatctcaagataacaatgagtcgtgaagattacaaatcattagtttttacttctagaatttcacttcttattccatgatctgaagctaattattagtgttgatgcatgaatatcttttggtggccatttacatgggtatatcccccttgaaagtatattttgctttgagcgattgccggcaagcaagaggagagttcttgagtatatataaaacttctttctctcaacttatagtcttatagatgaatgtgctgtggcatcaagtataatcttcttagccatgtatagatattcaatattagaaccctcgatgaggcagactgctagagtgttggtatatcaggcaaatctagttgcattgtgtcctgactttctaacttatgtggatatttaggtatttgttttttgttcagttgttggaaacttagcactttatgatgacaaacttggaatgatttgaactttgctgcctgcgggtgtgagtggtttggacttgggaggctaaaccacgaaatttgcttttgataaatttttaaactgttttcaatcacgaatgtgtgatatcgaaaatgaaacccagcatgaagatgagagcctcatatacgagatatttgtgggtcagtctggttttctgtggaaggaaactaaattgaaataactggaagttttcatttgttaataccagatctttaaatttagttttatttagttcttgtgttcagacttgatatatatatatctttaggaggtatacaactgatgcagttgaaaaactacattatgcatgtggttaatttcaaagtgaaattattcagcagttgatatataattgatggagaatttggcttctcataccacgtttgaaattatatgtacctcttgagctgtgttgaggtgccagacatcttaagtttattattcttgtgttttgttaaggtggcaggcttttctggcaagaagacacctgctga

SEQ ID NO: 49088 - DNA, 994 bp, Ricinus communis
  Intron number 2 from transcript 29673.m000911 (locus 29673 .t000012) derived from phytozome v7.0 (chr-ID 29673; pos 7 0598 to 71591 reverse strand)
gattttgaaaggcagattctttcacggtatgaggctttattgtagataatgatgaatagctcatttagttgtgaaattgtggttttaatgccaaatatgaggatataatgggtataatatatgactatgaggttaattaatatggtgtaggagattactttttgtttgtttcagtgttgagtttgtcatttattaatttatcaaatgtataactaatgcttttggttggagctattaggtatggttgtgtgtgtgtgtgtggtggaagctagagcagttttagttttttcaaatgcgaaatgatacagagtaacatgacatcttaagaagttgaacacataatataggttaggaaagggaacagtgcattagtaattaatttgcagttctgataagttaatctattgaactttttttctttcagaaattgctttaagttcgaatgatggtatagttaagttattataccgttgtatgtttttgttttgtgagactatgatacttaatattattaatgaatttgaaagtgtgggctgtgaaagttttactcaataggtatagttttgatgaaactatcttctctatattataccttggagactagatgaaagagaatggtcggacataaatttgcacgcttgaaagccatctttttggtttgctattcaaatgtttccatgcactcgttacatacacaagatatggatctttttttcagtttctatttatggttcaaaaatttttgtttgaatgtttggtctgctgatgtttcttttccatatggaggttcttcatttatacaatttcgattcatatgttacataaacatattctatccatacaaccaattttcttacactgtttttcttcatggtgcttaacttatcattcattgttttgcatttattagaatggactaatgtctttattttatcgtcttttctttgaaaactttccagatttcagaggccaccaggaccaattccttcttcaa

SEQ ID NO: 49089 - DNA, 405 bp, Ricinus communis
  Intron number 1 from transcript 28320.m001089 (locus 28320 .t000016) derived from phytozome v7.0 (chr-ID 28320; pos 8 3427 to 83831)
ttcgctgggatactgcttcagattctggcaagtagtaaatgtctctaactgagttgattatttttgcttccacaacccatatcagaagaaaacattctcaattgaagaaccgtggcatatcatggacctctcaataaatgccaaaacatatagcaattaaaattcaaattgagaatgttttcttctgtccccaggtaacccaagaatgaggaggctttggtgggtaatcgtagttccactaatctgtttgatgatattaataagttgggttgccttatattgctttggacgaacaaaatgcagaagtgtcaaagatattctttccaagctcattggccaatgtgcttcctatacttgagcaatagaatgctcgagttgaattaataatttattttccaggagcta

SEQ ID NO: 49090 - DNA, 407 bp, Ricinus communis
  Intron number 1 from transcript 27448.m000066 (locus 27448 .t000001) derived from phytozome v7.0 (chr-ID 27448; pos 1 5703 to 16109)
gataaacaaagcaaacatatagctgtgagtgtttatcagatcatcaactttgattttcactccaagtttttggttgtcttatatttacttgtaaagtttataagctggtttcttctacttgaacttcttatgtttcaagattctaagttgatcattctaaagcatgaaaggacttgcttaatgagtttctctgatggaatgaatagtttgttctggaaatttgggagcctcatttgtttcatttaaatgaatttgcagtaagtaacctatctttgagctgaatcttttgaactaacattctttctgaagctatcattcagaaaacttgaacttacagagtgacttgcagagcttttaggatttcttttttaaattgctgtagctttctagccctgaactactccaga

SEQ ID NO: 49091 - DNA, 865 bp, Ricinus communis
  Intron number 2 from transcript 29647.m002044 (locus 29647 .t000052) derived from phytozome v7.0 (chr-ID 29647; pos 3 47235 to 348099 reverse strand)
gaagttgagatcccttgtcgtgttccaagtgcaaggtactctttcttcttttctttttttgttatttaattctgtttttattttgtaaagtcgggatttttgtttttatttttattaggagagcttaaagtcacgagatttgaactggcttttgcttagaattattaaagtgtccttgattttgaaggaaactagatctgagagatagtaaggaactagagtggtgtttgttttcattttgtcagaagacaaaataatagttcagaaagagtgaggttcgtacatgagctgcgattcttagctgcagtttcactaaattttatctcttatagttcagttgttgtggttttgctaatatggtcatcggtcactgaggatataaaggaccaaaccccagtcacaaagtctctacctttgtgaagtaatttggcatgtacttgatacttttctgtagcatactcgagtaaaaagtttcctttctatttcttcacctttccccccgtcgagattctttttctgttaacttcatgtttaaaattttaatatttttattcatcggtttccccttgcctccttggcagctaacatcaatagaattagctccataatagtcactattactgcattcctgatacgctggcttctttattagacttaacttcagatacatatggaaacaaattagaattacctcaaattccagaaaactgtgtttccaactaaatgtttgttctaggacattttggtgtttaatccatttcacttgtcaacttggtcggaaggactagtttctgttcattccattattttaactcgatgcatcaaattttgcagtgctagtgtgtttggtgtctcagcagattca

SEQ ID NO: 49092 - DNA, 957 bp, Ricinus communis
  Intron number 2 from transcript 29676.m001672 (locus 29676 .t000063) derived from phytozome v7.0 (chr-ID 29676; pos 3 82310 to 383266 reverse strand)
caggtgtgtgcccttcttaactcagctgtgggattatgacattgagtgtcatgcagcttatgctaattacttgataaatcttcacgaagaaaaccttattatttaacaaggaaacatcattgcacatggacttttacacattctctaatattccttgtaatatttttttgttatgattgacattcttatgaggcttattacatacaaacgcctttccagtacattggcttttagcaaattattttcattataggtactataccttgaagacgttgctaacaagattttcatggcacttgatagcattacttgtaaattactcatgacctgaaaatgatttcatgattccatgtcggtcctgttcactcctctaggcgtggaattctagtaatttgccataatactttgaggagcgccctcttaagtactattaaagtgtgatcaaatcattagtagcttttaagttgcagcaagacaactgaatatagtttcttaagaatcaaagaggattattaaagacagaccgatgatggaaacatggtcaattggtgtcttagtctgttaacaaatggattttggagttgatgtggtgatgtccaggttgaatgaagcagctggttaggtggtggaactggttatgctggttggactgacaccagggttgtcacagtcgaatgaggaaaagtgataatatgttatgttggggattttgtgtagtcgacgagaaaaaatgtcgatgggaaaatacacttagaaatgcattttgggagcacatagcatgggacttccattcaaaattgaaggctccttttcccatttcatttaatttattatctagctctaatctgcatgcacttgggttcttaaatcatattctagatatactaaatgtgatcattcacaagacaatggtgctcaacaggcagaaaactctgggtcaccgtactcactgcagca

SEQ ID NO: 49093 - DNA, 443 bp, Ricinus communis
  Intron number 1 from transcript 29676.m001672 (locus 29676 .t000063) derived from phytozome v7.0 (chr-ID 29676; pos 3 83493 to 383935 reverse strand)
ttgcagccatctgggccccttcgccgatcctctaggtaattattttcattactgacccattctgtgaattcttgttttggtatacttcttgtagatttggttattgcgtttgttgatatgagctttactgaactggttcttcttaatatgtctattttatcaatagaagtatttcccgttttagtgatgtgtgtgtttgatgtccaataacggacacacaaagtaagaaatgattttactttcttttatgttatagttatcccagtgagtaacttgtggagattgggattctgcaatgccacaataaggctctattttgtttttgggcaataataataggctgaatttttttttctttttattttcggttcgatgaatagattttatctcattatttgagttttttgctttttcatttctctggattgggtttagattgcaca

SEQ ID NO: 49094 - DNA, 945 bp, Ricinus communis
  Intron number 1 from transcript 29158.m000191 (locus 29158 .t000002) derived from phytozome v7.0 (chr-ID 29158; pos 2 5369 to 26313 reverse strand)
aggctcttcggcagtttcctgattatagaatcaaggtaaaaattttaatttgaaattttctcttgtatttcttcacgtgcctgtcttaaaagtaggtcaagttcttttaattttttcaaaatatcacagatagagatggtaaagtagagtcaaaacttttgttttgactaaatacttttgagttttaactcaaccaaagggaacaattatatgaattagtttcttcgaaactagctcaaagaagacacatgtgaaacttttaaataaagtatactctggtgtagaatgttttacacttaaatcattaatattatggtacttatttttataaaactaatggtatgagttaaaactcaaaagtatatggtgaaaacaaaagaagttggctgcaacaagtgttgcaagaccccttagtttgcagctgcaaattggttttcttcactaagcctttgccttcacccatctttctttatacccctcttctgcaggatcaatatagaattggactaaagatttaatgtataaatgaaatccatgctactgcttgcctaattacctggccaatcttctactattacgaacatgcctgaaactttttgcctatggacattttatactcgttgtcttgttacgagtcccctagatcagcccacaagaagttcttgcaagacacaataagttaattgttgcagtagttatttcccccaaattttttttcgtgccatgtatgtctgaaagttggttcttttagcaaatgcattagaccatgtactgttgcattcttgacacaaattttccactaatttacgggcattaaatttctatttaaaaatagatttttttgcaatccattagaatcatggttcttaatgtgtgcgagttagtgaagttccatttcttgaatataaagattgtaggacattctttgggtggaggtactgcagc

SEQ ID NO: 49095 - DNA, 953 bp, Ricinus communis
  Intron number 2 from transcript 27913.m000019 (locus 27913 .t000001) derived from phytozome v7.0 (chr-ID 27913; pos 8 147 to 9099 reverse strand)
ttggtttcaggttgggccttgttgctactatcaaggtatgctactcatggattcgttcaatatcttattgctgattgagttagaagtcttcttagtgcaaattcatttactcttctgtgcaaatactctttcattggtgtaattcattgagtaagggtaggtgggacttcttgttgtggatttatcatgtgttcaaactatagaaacagtctagtagcttctgcaatggaaaggccatggtatctgatcctctctggaagttgcaatgttgagggtcttgtgcattagtataactttactttagaattatattactactaagttattgactagcttggtatcagaagtttagtttatgttttaatattgtaatgtgtctttacctttcaagttccaattcttaaatggagtagagggaggtagttccaatgctgaggtaatttgcccccacaatatattgtttgtttggatttgctattctacggagtagctcagattcatgatcttgatgaaacacgccttgagtgttctaagagattccattatcatgacaactacttgggttaccatttacaaaaaaaatacaccttctaatgctggttccataattgttctagagtgcagaaatgtgaaacatttcttccttttgcaagcctgcaataattcttaagtaggtgacttaattttgttgcaaagaaaaaactgtccagatataaatgaaatgcttccgcatccttccccctatggaggaggagacaaaattatagtgaatgatggggtgagattgaacgcaattttgttcaatcactcgcgctatttaaaaatctcaattttttatgccttctttgctgcttgcttctttgtttttgttgttcatataattttgagaattaattcctgtagtgatgcttttgttctgacaatagattgtcatgatatgtaggatcgggcta

SEQ ID NO: 49096 - DNA, 470 bp, Ricinus communis
  Intron number 1 from transcript 27913.m000019 (locus 27913 .t000001) derived from phytozome v7.0 (chr-ID 27913; pos 9 063 to 9532 reverse strand)
tctgataggtaattcctttgttttttcttttcgattttttagtttctctttggattgtttattgagtttactgtttggagtttgttagatttgttctttcttaatctgtgtgtaattgatgttgtaattggatcttgaatttttgttggggttattttatatgtttcaagggtacggtattgcccttaatagttggaattgaaggttttgatctttagataggctaaatcatgtgcaaaatcatgccatcttttgtatgagaattgattaaatagaaatcaattgagttggatccttgcctcatatagtctttatctaattgtgtttgagttccttaaaattggtatcaatttttgatacataatcatgtgtttttaagaaacatttgaaatttattgttaatgtgattatttatttgtttttgtttttgattttggtttcaggttgggccttgttgctactatcaaggt

SEQ ID NO: 49097 - DNA, 576 bp, Ricinus communis
  Intron number 1 from transcript 28226.m000850 (locus 28226 .t000020) derived from phytozome v7.0 (chr-ID 28226; pos 9 5574 to 96149)
gccctccctctatctctgatcgcatcgttagtctctctctctctctctctctctcctttctttttcacatggaattttaaagtttaatttgcagtttctgatttctcgacatgtttaccataaaccctaatttccgacactttgcccatattagcaattcgaactttttcgaattccataacattcttaatgttcttagcttaagctaactaacaccttcctcatggggtctattttttagctgtatcgattcctgtcttagcgttactatcagtatccaccatgacacactgtcggagctttcttcaagaccaaattaaagccctcttttcagtgctctcaaacttcagctccagctcaacttgcttaaaaaaaataaaagagttttgcatgcatatatcatgctcccttgacctctaaataaaatatttattttcttgtaattgtttcccttgcatgtctgtattgcaacgaattcatattttctgctaaaccataagcaattatcaaactgttgtaattttagcatgtttgcctttaggttttgatatctggaaaagaggagccagaagccgc

SEQ ID NO: 49098 - DNA, 482 bp, Ricinus communis
  Intron number 1 from transcript 29701.m000601 (locus 29701 .t000022) derived from phytozome v7.0 (chr-ID 29701; pos 1 79672 to 180153)
ctggaaaggtatagtcgctttgacactctttttagtcttgatatagatgattgttcatataattggaaagaaataggagtacataattaaatagtgcatgggaataataattctttaaataggaacgtcatcagtttttgaatcttaagagtatcaggtaaattgaagcctgaccctgaacaagctgtccccaaattagtgctactgaactgcaaaatctgacattctacacgtgtctgctagccttgtattaatttatattttgtgttaggttttgaattttaaccttctccattacaagatcaagattgcactcttaatgctataacggggctattagactttggctgcttattttgatcgataaaacctgttcattttgctacttctattgataagaagagactattagagggctgtattgacttattgtggttgtttatgcaggtggagctagttgaagggtcatcttaccttgggca

SEQ ID NO: 49099 - DNA, 590 bp, Ricinus communis
  Intron number 1 from transcript 29634.m002123 (locus 29634 .t000069) derived from phytozome v7.0 (chr-ID 29634; pos 4 28423 to 429012)
cttgccttttgatccgctcgacgtggttcagtcaggttggttttttatttttcaaattatcgtcttttttcatgttcattgtgattttggcgaaatcaaaatccttttatttgatccatttttactgggtttaagtttctggtgatctcttgtgaaagtatgattccttatatacatatcgcaatttgtgtattcttgttctttttcttaaatagagcatattatttagatggattctgataacaatggttaaagttatgaattttctttgtatgtgttgaattaacatttgattgggggttctatgatctatagatgttaattgcttgtctatgtatgtatatgcagctaattttttgctaagcattgtaggcttttttttttgggaacttgattttcagtcatgtaacatcctaaacatggaagagtatcaatcaatgtggtctaatgagattaatattgtcgctgacctttttgtttttatcttcttctttttcttgtgtttgtcttctgtatgtgttttttatttcgtattttttttctgggtgctggtagttgaatattgaagggaaagaattggtttgctcctt

SEQ ID NO: 49100 - DNA, 734 bp, Ricinus communis
  Intron number 1 from transcript 29610.m000403 (locus 29610 .t000018) derived from phytozome v7.0 (chr-ID 29610; pos 1 25308 to 126041)
cagatcaagagtttcagtttaaagttctcctctaggtatgaatctttcactttgttagtttggatctcagatctttacccattattgattatgtgtctcttgtcttgtttttagtctctaattagactattaaattgggatttagctgagataatctgattttgaatgcttgcatttctgtttttctaagtcttggatcggtggcttaatttgtattttgaagtttatggttattgttagtattacccagaaagcaaaggttaaaaattcaccttcttcatgtctcaattgatgttaattttagttaaagtttaaatttcttgctttgtatgttaaatttgttgtaggagataggtcaagagagaatagggatttattgaagttgattggtgagagatttgggatttagctgtgctaccctgatttccgtgcttgcatttctaatttcttagtctaagatcggtaacttcattcgttttttaaagtttttgattattgttagtactacagaatgcaaagattgaaattttaccttatctgtgtcacaatcgatattgttttctattaaagatttaaaatttctgcttttattatacttcattaaatgaaagactgttctagagaaaaatggtttttatgagttgattagggctttgttgattggatggtgattctgcaagataataaaatagtcagatctaagacatgcacatattcttttgcagctagctact

SEQ ID NO: 49101 - DNA, 1062 bp, Ricinus communis
  Intron number 5 from transcript 29610.m000403 (locus 29610 .t000018) derived from phytozome v7.0 (chr-ID 29610; pos 1 26993 to 128054)
ctacttgtggtaaaactgcttatccactggagaaggtaagatttcataaagactacaaagcatagtgtaatttgatccaacatattaccttgttattattaaatggacgagggatcttcttcatgaataaaggcagtgtttttttttggttatggggaaggagggggaagagatgaatttgatctaaatggtactccaatttgaacctaagtgactgtttttgttctctgtttgttctcatttcttaagctgccatgaatagtactgtattcctttttctggctgaagtttgtagcactttttgattgtcaatagatatatgcatgtcattgcatgaagttgctttaggttctgcaaagatgataactgaaggttatttccaatttaagtcatagaaagtaatatgtgtagctttcttttgtttttttgtatgaaaaaactaacttttggcatttgaattgcactaagaaaattaagttttgtttgctgcagtcctttggtctcaatctacttgaaaattaatgaaattacataagggttaatttcagctgttgagcagaattttctactattaactctaaccaaatacagccaccaataattactggtggttgatagaatagaggatatgtgcttgtgaatttcttttaattccttccattttttgtgcatttgtagtagccaagaaactgattctggtttaaagtatgaggccatcgttcttaaatttggtgtagaaattcccttggacttgaaaatattaaacatcaaaacactgggaaaatgtctcaagaatccggataaaaaaaggggaaagcttcagaattaaagaccagatatttgtggaattagacatgcatatttggctgaaatgctgtgaagttaaaacttattgtgaaattgaattacatataattgtgttgaaattggttcgtttgtctttctagtgaagtctggttgtctagcaaccaatcaatgcagtttggtttgtgatgtggtttgttctattaaataaaaaaaattataggtgacagttgaaagccaagcctatcacaagtcctg

SEQ ID NO: 49102 - DNA, 972 bp, Ricinus communis
  Intron number 1 from transcript 29506.m000169 (locus 29506 .t000007) derived from phytozome v7.0 (chr-ID 29506; pos 4 9450 to 50421)
tttttgatttctctgatatccgtagagaaattcaagtatgtcttgatatataaaacttagttggttcagtttttagtttaatcacgctcaatctcaattttaggtcacatctgtgcgcttatgttttatttttcttttaaatttcttttactagctcgttacaagtgttcatgagcattttgttaaagtttttaattgtgcttaattttaagttcttaggttatgtaggaaatttgcaaggtttaaatatattattgtgtttaattacttctctctttaatataatctttttactagctagttattagagtctaggagctcaatttttttaaggagaattttggatatggaggaactttttgtacggttgcatgtgcaaaaagcatttatacgggaaatttaatgtaagattgattacattgatgaaattaatatgtagtttgattgctatggttgttgcctaaggctggtgagttgcttgtagagggctactgtttgcattgactcttgggagaaacaaagggtggaaaatagttggtgattttgagctttgatacattagcaagcatccttaggttttctcttctccttcctttggtgcattttgtatgttgatttgaaggtggaacccgtcatcaacctgggcctgttcaattcttttaaatacgagctagacttttatagaagtagaagtaaaactaacatagtctagaaaccctgttgcaggattttaacagcagcatagtgtttggactaagctaaacaacattgttttatgtagcctatgttaccagtaaaatgtcggtgaggattagaagtggtttatcatatattttatgtcggtttctggctgtttaagttaatataccttaaaaaattttaaatatcaattatatatggtcctttttaagtgattaatattctgaattggctataggctgagactgctaaagaagctggggacaacaaagg

SEQ ID NO: 49103 - DNA, 940 bp, Ricinus communis
  Intron number 3 from transcript 29586.m000605 (locus 29586 .t000010) derived from phytozome v7.0 (chr-ID 29586; pos 7 9544 to 80483 reverse strand)
tagctcagcagaagaaattggtgttgactcatcaggtacgattttaccattcggagattttatgttgaggtaaaattttctggaatgtgactgtgttttggattataatttttcttctatgtttttggaactaatttttttttatatcattttattatttaagtgggcttacaaatcatctaatcgtttcgtttgaaattgttttctaacaatgcatggatatcagctgtaatatttgatatgttgacatcctttcgctaaatattatgaaagttctcaaatcagaaaaactgaatgtggttgatggcacagttatttgtgtgcttcataatataagcattttaatttggtatacagcttgttgacacccgatttttctatctggaagtatctggttcgattttgtggcctgcagatttttcaatacttcatcattgattctgcctaagtaccgagtaacatggttttgtaatttttagatattgcaagcaaaatgatcaatttgaaggagatttactgcattgtatcacatatatacatcttcaagtattttctcatttctccttattatagctgtcttgagcctgtagcttctactcattagtcacacacttcatctatagatgctgaagtataatagtatggtactttctccaaactttccttcctactgtcccacctttgcgaaattattttttgtatcatcttattgaaagcatgatgtcggattatgtgttgtatcattttacccactctgcaagtcttgagatattcactatttacagaaggatacaaggccaatatgtcctgtttggttcacccaaatttagtgctaacataataatttgaattcaaaatgaatactttgaatcattctggtgcaatatttctcacttttgggatgtctaatttcgtggttgcctggtaataggttttacaa

SEQ ID NO: 49104 - DNA, 429 bp, Ricinus communis
  Intron number 3 from transcript 29693.m002044 (locus 29693 .t000082) derived from phytozome v7.0 (chr-ID 29693; pos 5 93097 to 593525 reverse strand)
gtcttcttcacgcaaaagtgttttggagggtaagcatagtctcttcttgagcttaactttgtagctagtttagttgagtttcatgcgtgagtttcttttttttttttttttttttttttttttcttaatatatatgagaaacctgaaaacaaagaaagtttttgctttttggtgcgaataattttaaaatactaaacaaagtttattgccttcaaatgggaatgatttggaagtgatgaaggatgttgtcaaatatatatcaatacagtccatgcaccatatgctaatgcagcagaattatgttgatatgtattcatcaatgaactttctggtatcagcttaaggtagcattcaggatatgcaaaatgtctatgtatctctgtactctgtgcagaaaggagacccgattacagtaccattgaccaagga

SEQ ID NO: 49105 - DNA, 292 bp, Ricinus communis
  Intron number 1 from transcript 27866.m000223 (locus 27866 .t000002) derived from phytozome v7.0 (chr-ID 27866; pos 1 9106 to 19397 reverse strand)
ttctttgcaacacgttctacagattagaggaagaggtatttaacagtttactttaccagttttttctttaatttttgaagagaaatggtaccaaagacaccgattgtacttcaatttaatcactaattccagttcaaacccagaaaaaataaaatcattcaaaactcaacttattgaattatattttgtgagtcacagcagggatttgatccttatttaaacgcatttgatactagaatttttttttaattacaccgttactgtgggtatttcttattaggtggtggattgg

SEQ ID NO: 49106 - DNA, 933 bp, Ricinus communis
  Intron number 3 from transcript 29703.m001511 (locus 29703 .t000047) derived from phytozome v7.0 (chr-ID 29703; pos 2 14260 to 215192)
gagtcacttaaaaacatcacggtatacattattattgatgcagattggttgctacttgcttgagatattatccgtcttaactctgaagtggggtgcaagggctatataggttcctttatgccttgaggtgcatgtcataacccagtggcaatggtgaagccccattgttttagcttaattcaaggatttgtttagtctgattgatcttactttacttttaagtttatttttgaaattgactcacaattgaagtccatgtggtttgcactcgcaggagattcacgagggcttggacttttctgctgaagatgatgggggctattctttcggaatcttctctgtgaaattttctaatgatgggcgagaacttgtggcaggaagtagtgatgactcaatatatgtctatgaccttgaagcaaataagctgtcactacgaattttagcacatgttgtatgttcacaatcctgataggcatcttatgagtctaagtctatgttgtgtaattgatggcttaattattttctgctcagataacattttcaatacatttattctgcacatgctttctgtaattcctactttaagtaatgggtgactgtgtaatgtaatctaaacctaggagttagaaaaatcagctcttggtgtctatcccaattggtaaatgagatagtgtgccagagtagacctcaggtttaagattttaacttagcattcaaagaaaataattgaaaagcaagaggcagtaatatctgctggccagcatacatgttaaattactgaggaagacatttgatacttttttgtaatagtgaaacagtttgcacacttctaacttgtaccttttatgtctgaaaaatttgtgtgtattgtataataatttgccttcgtactttacagtctaagattcattcggttgagagctctagctttga

SEQ ID NO: 49107 - DNA, 852 bp, Ricinus communis
  Intron number 2 from transcript 29794.m003388 (locus 29794 .t000087) derived from phytozome v7.0 (chr-ID 29794; pos 5 50075 to 550926)
gtgatccagagcttaaagtttgtctttaagtgttttaagccttttcttcattgcttggattgtctttattaagtatctaaaatgcaatttgattcagtagatgcagattttagttatctatgttttattggatgttttggttttctgttaatgccaaggaaggaccagctcgctgaattgcgggactttatcgaatgctgtttgtataatttagtatgcagttgtttgttactttggatgggcttttaaaattatggcagcattctgagtgccaacggtagcatggtaaccatacaacttgaagttaaggcttctaaggctatttaattgttattgggtgctcatttactcttttttagtccttttactactgcaattacttcctgaaattgacttgattgatttcaggctatgacaaaaaattgttattaaaatttttattagtattataaaaaatttatgcaagtaggttggacctacctttgaaaaggaagaataaatttcggagaaactttaatacagaacttcagaagttttgcttcatttcttagaaatggcaagttgatggcaaagattttgaagattctagatgcttggttctggagctatcatggaatttttttgcttctgcatatggcatgtagtctttcttcacctttttgctaaacattacggtgcctagtagcttgttgactatacatggattaaaccaataaacaaatgtaagagaaaggtggagtttgttgcttaacagtgtaactgtttctatagagttgagttctattgatgtagatctggatgtcaaaagagttatctgtctggcaggttctcgtagtcagacaagacctgaag

SEQ ID NO: 49108 - DNA, 521 bp, Ricinus communis
  Intron number 2 from transcript 29637.m000761 (locus 29637 .t000039) derived from phytozome v7.0 (chr-ID 29637; pos 2 78633 to 279153)
ggacttttctcatttcttctgcaatttatcttgtaattaactgatattaacttccaagacaagtattgactatatttttctcttcttctttttggatttcagttttcttttttgagtagaagatggcatgcatcatgcataactgaacacgtatgtggttgttcacagtgaaatggaaaccacatgaacaaccacaagttcatgtgtgtggggaaaaactatctgacttgtaaagacaaagacattaattttgatgaagacattttaattacagatgagagacaagtgaccacatatatatttatggcctcctctttctactttcttattaaaatgttacggttagttattgtctagttactgtctacttaattccagggttgttgcacggtatgctgtacattttttgtttcttgcacggtacaatcatcgttttacaaccacaacgtttgatttttatgagttgaattcccaaatgacaactaattacttgcttcaacttgtacttcaacatataggga

SEQ ID NO: 49109 - DNA, 587 bp, Ricinus communis
  Intron number 2 from transcript 29638.m000528 (locus 29638 .t000027) derived from phytozome v7.0 (chr-ID 29638; pos 1 92105 to 192691)
gtccctattccagtaagtccggaatcaaagtaatgtcagttttattccttatcttttaaatgattccatcatttttatactgatctgaaactatggaattgtatgcttggcatgtcatgtcatatgagattcttttgtacccttgctgaaactggtttaatttagctgttgactctcaagtagttctattctaggttatttgctctgaattatctgggcattagctactttcttctagcctggatgttggttctatacaatagtacttcaaacgaattttacctgtctttttctgtcaattttggcctccattttgttgaggattgatacttttgcatggcaagctcttatacctctgactgcctaagtaaattctatttctccatctccgacttccagaaagttagtttcactataattaatgacagatcaccctaaagactgacaaatgaaatggaaacttagaaatgctacatgcttcctgcgggtcagttgaatatctattacatgcatccgtttcttgtttatgatatcctgaaactgagctgtaatttgtaccttgatatttaacactggctttgtgcagc

SEQ ID NO: 49110 - DNA, 1064 bp, Ricinus communis
  Intron number 2 from transcript 29805.m001479 (locus 29805 .t000010) derived from phytozome v7.0 (chr-ID 29805; pos 4 7418 to 48481)
caatcaagattcaaactgcatttaaaggatatttggtatgttatactatattaccattagtatctattattatctatttttgggtgttgcatggttaagtacatctctgtcactcttcatagattttgtcagctttatattcaagccaattttaatttgatatattgatggagatttcttttccccttctatataatatctctctagaattatgtcacgtattgttataacgttcaagcagttcttttcaatcactaaggcaagacccaccacacttttcttcaggtgaaaaagaacatgaataagtcacttatatccatgcctctctgtcaaaagtaaaactgcaattgccataaatgcaaccatgagaaaacattttgcagttttgcagtttagaagctgtcaatatagatattttatctatttatcagtcaaaattttcataactagtcacttatgtaattcagctttcttattgtatagctttcatagtctaactttattataaatttcttgtcaagtcgcaaaataaatttaattaaggaaaacatgagaaacacaatattcattatgtaatggtatttaactttctccctcaaatacctaatatttatctctttgtgcttgcactcattgtttatgaactaggaaaaaggaggaaaaagaaggaattttaaagaaaaaggaatgagtgaatagatatatcattagaagacatttgtggtgttttttcatgttcaaaacaattatatcctgactcatttggagattcttttatactaagattagaaaggaaaatacattaagcatctaacttcaggatttattgattctctggtaatttagggccttatttccattttaaaacactttattattgttttcctttactggaaggagtgagtgaacaggggagagaggagtatcggggaaggaagtgtgagctcaaacttttatacttatattattttgattgatgagtggacatactgagctactcttgcattctattttgatttccattctcaggcaagaagggcattacgagctttacgagggctggg

SEQ ID NO: 49111 - DNA, 717 bp, Ricinus communis
  Intron number 2 from transcript 29635.m000452 (locus 29635 .t000012) derived from phytozome v7.0 (chr-ID 29635; pos 7 9514 to 80230)
ctgagaatataacttttgagaactcttctcctgaggtaaagtcatgttttttcattttttttaagaaatgaacggggtgtttgaaatttgtgtttgttcttcagtataaattattggctttgctgaaaagattgaacctttagatttatgttctgacagtatcacttttaaaagctcttctcctgaggggaactttttttaattttattattttaatgttgtcaatttaggattggagaaatgtactcaggagtttgagatttgtgtttaggtttagcataaactgctgggtttggtgaacagaagttaatcctgtccattacctggcagagctaaggggcttcatccttagtccttcttgccattgtcgcagggtaaggaagaaaaactttactcattgtgggggggagagagagagggaagggaattgaagctttagattttttatatgagtatattacatttggcaatttaccaatatggggatgagcttttaggtcgaatttatagctttgacttgaaagacttctacttttagctattgacttggctatgtaccgacatttataatctcgaaggttttgtttttgttaagagtgcatctttttaaattgtcaaaattaatgcttggaagagtttaatgattgacttatttctgtttttattctttacctattttcagggttcaggtcaagctgtggcagtcagggtgacagc

SEQ ID NO: 49112 - DNA, 642 bp, Ricinus communis
  Intron number 3 from transcript 29333.m001074 (locus 29333 .t000037) derived from phytozome v7.0 (chr-ID 29333; pos 2 72879 to 273520)
gggttcttgtcaactaccaagcacctttacttgaggtagaaatcttacttaatcttgcagcttcctcatctgagtactttttccttttcattttctgcttctgttaatgttattcatattgttcttttatgaggttgattatgtttgcatctggaaaagtgagcagctttatttggattttggagttttgatgaattttcattttctattggctgagatgtgaattgcttgtgtctctaaatagatagcacttacataagtggattctggaattggttgttggtgagatagggagtttgattgctaagacagtttggttcactatcacatgaactttatgatggaagaattttcacaccctttgtattaaatctcaaagtagtttattgctctatatcttgtagaaattcttatttctgaatcagtgtcttaatttacttaatttgaccttcttcaaaatcaatatgattaagaacattatctcggtgcgtacattttataacaacttcccttccaaattgcttatttatgctaatgagtgctagagaccttatcactcctgcatatcttataaacatcaaatgataaagtgagttaatttaccactctaaatttcagaaagtggtcattgctttcttggag

SEQ ID NO: 49113 - DNA, 681 bp, Ricinus communis
  Intron number 1 from transcript 28320.m001116 (locus 28320 .t000043) derived from phytozome v7.0 (chr-ID 28320; pos 2 50467 to 251147 reverse strand)
gaacctgctttccagcgagtgagttttcccagttctttgcagaacctttctcataaacattgctttgaaagttctcaaatgtttgattgtgtttttaaaagagaccaataattgaaatgcagatgatatatgctatgtatttaactatttgactgaaatgaaagaaccatccatttacaagatatcatgggattatgtaatgacatcatttcaattgaactgctatctgtttactgaaatagttcgctcttcacatttagataatggttggagattaacttgactctattaaaatctaattgtatatgatccctgaagctagaatgtctatgatcaagtcttgtaatgtcacaaaacattcttttatacctatttatgattatgatttgaagctttggttgcatattacatagtgcatgcccctttatttttcctaagcaacacagaccaaatagcagttcaggcagtctggaatttttcgattcaactcaattgttttttaaatttttttatttcgatgagttcagctcttttatctatggagtaattccatgaaaggacttgcacctatgtcaaatataatgtatcctactactgtggcggcaacattttgtaattattacttttcttgcaagctgacactttgttcttgtgttgcagggtgatattttgttcttacat

SEQ ID NO: 49114 - DNA, 616 bp, Ricinus communis
  Intron number 1 from transcript 27647.m000179 (locus 27647 .t000006) derived from phytozome v7.0 (chr-ID 27647; pos 5 0705 to 51320 reverse strand)
cttcgccgttgcctttatcacggttagtttacttttatttggtgttttagtttttttttttttatttttatttaaatgtttgtgctttcatgtttacggttctaataaatggttcaacaaagatgttgactttgtcttagtgttagtggagtgtgaaatgaaatcggtttaaggctaaccggaaaagtttatgaactgaattgcgtaaaattcagcatttcaacggccggctattattcgtcaattcaagtgttaatgaatttgataggtgtctacattagtcttctccttgcaatatatacttctttttgtcacatgcagttcgatatctttttaagacagggtttcatgaggatctggtgttccttagggtctgtaaatttataaagacgaagtctttggtttgtaaatgcgatgctgtgtctcttatgttattaatatgccacttaattttggctaactttacctcatcaactattagcattctaagtgattctctctttctcgtgaaagattgttccttgttgttatagtttgttgtttgagttgaaaggcttacccatttgttttaacgtttgcagtcacaacctgttcccaggccaaagtagctttaaat

SEQ ID NO: 49115 - DNA, 508 bp, Ricinus communis
  Intron number 2 from transcript 29814.m000749 (locus 29814 .t000036) derived from phytozome v7.0 (chr-ID 29814; pos 2 54816 to 255323)
acgatttgcgttatcttcgtgtttggttgcagctggtaattttttttaattaattaattaacaaatagcatttacccattttcttttttcttttttttcgattggaatcgtttattttgttcattttggtttgtgtaattctattgatttttgaactttggttgtttagtgcgtttacataaagttcttagcttttgtttggttgctgataaaatgaataaagagaaaagaaagttataattaaaaagctgctcaaaatggaatcatttatgttgtcaagtagtattttttttttaattagcaattacttgtatgttgcttaaatttaacaaactattggggcgaaaaggatgcaacctttgccacttgtccgctatttgttagtttactttttgattgaacttggccatagctgggcttctggctgtttattcattactaaatgtcaatttattaatttattctcttcttcttttcttttttccccttaactgggcattttgagcag

SEQ ID NO: 49116 - DNA, 482 bp, Ricinus communis
  Intron number 3 from transcript 29814.m000749 (locus 29814 .t000036) derived from phytozome v7.0 (chr-ID 29814; pos 2 55462 to 255943)
taccatttaggtgtgcagaagtaagtttctttgtttctaggttgttaggtagagaacctctttttttctatagtgaattttcattaaatgtttctgttgcatccctcggccaattctgtcattataggtataaaacaaaggtttattcatttgattggatctcttatctagccttgcatttcaagtatataagtaaacaattacgaaatgtggtgtgagaagtttcatttcaagtgtacccttctgactggttaacaatttggaatggtggaagctatactatggtattttgtttaaccgatataggaagcagatgcagagaatttcaagcagtgaaaagaataccatctgctatagcaaattatataatttagatgttgaacatctatgccttcttccaaagtgtatcgtgactttatttattcctgtctgtaaaattgagtctcttgaaccaatgttgaacagccttgcagagcctattg

SEQ ID NO: 49117 - DNA, 893 bp, Ricinus communis
  Intron number 3 from transcript 29647.m002073 (locus 29647 .t000081) derived from phytozome v7.0 (chr-ID 29647; pos 4 95678 to 496570)
aaccttcttgaagatatcagtgacaaaatgtactactctatacctaaactctacttttgcttcatacgtggtgtgtttttttcttcaatcaattaatttatgttttgtttggatgaaaactattaataaattcattccattttcaaatgaattcttatatttggtatgttaaataataactatacatctcatttcaggtgaaatgaatattgtgtttggaataaagtacagtcagaaaaacaattcatagagagaaggcatgagaggaaaaatgagagagaatataagatgaaattgtaaagttgaatgggtattttagtcttatgaaatatattatcttactaatttgaagtttatttagaaattctacatttttttattagaatttagttataaccaattttataaatttaatttcattaaattcttgaaaattcatttcaatcaaattcaatgttaaactaaatataactgaaatgaaagctggcaatttttttagtgattgatactattattttgatgcacattgtgttatgttctttgatattagttacctaagaagacaagtgtgatcttatttaggacctttcaatatgactttgtgagaatagcaaaattctctttgctagcttctttgctttctgttaatattgaattgcatattgttttagacaagaaattctataagaaaaaaaaaaaatcattctaggcaattctcttgaccccttatttgtcttctgaatgatcaagtccaaacagttgtgcaacattctgtgttttagatataattaattggaccacctttatttaaggcttttgtttgtttgcaagttcatttttttcaacttctttgtccagcgataaggcgtactttgtggatctttttgtgcgag

SEQ ID NO: 49118 - DNA, 233 bp, Ricinus communis
  Intron number 1 from transcript 28333.m000558 (locus 28333 .t000004) derived from phytozome v7.0 (chr-ID 28333; pos 2 3921 to 24153 reverse strand)
ccatctataggtaaacatctctaatctaattcccttgttttgctgcctttcttttccttctttctttttcttttcatttttaatgtttctatggcctggatttgtctattatgtctattatttaattgaaagttacttggaagtttgtaatataaattttacatctttaacttggttatttgatttggtgttttacaaaattctgaattttagagatgttaatttcaggtata

SEQ ID NO: 49119 - DNA, 583 bp, Ricinus communis
  Intron number 1 from transcript 29599.m000177 (locus 29599 .t000009) derived from phytozome v7.0 (chr-ID 29599; pos 8 9436 to 90018 reverse strand)
ctcttcagctggttttaatccacaaacacaagaaggtgaatattttttgcttgcacactttcttcttcttctttcattttcattttcttcttttctttttcctgtttttgggttggggtataagggatgctttctctgtctgcatctgtactttttgtctatccattttaactctcggattggctagaggtttaggggagaattgtgacaccaggaggccgttttctactttaaaaatataggaaaaggatagaaattgagatcttgaaaaagcacagttggcggatagaatctcttgagctccttaagttttggttttccttttgtagttttggtaacttcagctttagaaagctcaattgatttggatggttagattttattttatttgtttttcttctttcccagccttctcggtaatcaggcagagggccagtttgctgcatcttttaaattaactacttccccatatcccatctcatctttcttttgagtaattttcattatgatttctaaaatcaccctggaatgaatttggcattttgcaggggagaatagggttttgaattctgaactttggcat

SEQ ID NO: 49120 - DNA, 407 bp, Ricinus communis
  Intron number 3 from transcript 29673.m000947 (locus 29673 .t000048) derived from phytozome v7.0 (chr-ID 29673; pos 3 45849 to 346255)
acggtataatgtccctatcttgcttgataaaaatgttagttatcaattaattaaagtgataaacttaggactctttgctattaattttcacttttatggtcttattaagttttgaaaacctgtttttctgttttaggaaataaagtgacaaataacgaagatgtaacataataatataattaattttgacaacgaaaacaaaagtcaaaagccaaaaaccaaaaactgaattgataccaaacaggcacttaacaaattctgtttcttttttggatggttttctcgcttggagtttatgtagaactgtttttgatttcatggctggagttggaagcctatggtttgttttattgttttcagcagaatttgttttattgcagtatccaacaaaggcattgtctcctttg

SEQ ID NO: 49121 - DNA, 1018 bp, Ricinus communis
  Intron number 4 from transcript 29801.m003122 (locus 29801 .t000067) derived from phytozome v7.0 (chr-ID 29801; pos 4 01963 to 402980 reverse strand)
gatagcacctggacacttcaaactaaaactggcaggtacttacaatggcaacttgcattacatgatagctactaagaatttgttaggtgttctacattgcatatctgctcaaacactaatcttttaaatcagactccattctgttttgttccctcataattttgacgcatctgagtttgtgaagaaaggatttgaagtttgtgctgaacattttcatagcatctcctccgtatgattcttactatcataactgaacactcttcaggatattcaatccttaatatttccttagttctggacccatgcttacagcttatctcctcttcaagtttcaacttgtagtttcaagcgtcaaagagaaagcatatatatgctaaactattcttttttgttgtcctgccgacatatgagataactcgaatgattatcacttgttgagatttggatagactttttggcgaccataaagtgctgctttcgttgtctagttaaaacttttggacatgccaactatttggatagctttcaaccacataattgctaaccaggcccttaatctttccccaaatgagataaattcttgatcacagagcataagagagatggggtttccttttcctactgaaattttccatactagttttcatctctttcagcaagtaattaggtgccatttgattgttgaggaaagtcgctttagaattagaaagaacaagaataactctgtatgcatgattttatgcactgtcaagatttgacttctgaattactaaaaactccatggagagggagctagaaatatcgttttataaatctatgtggagtaattatgatccaatcatttgtctgagggatgtaaaacttgttcaaattccatcaattttgatagaagttgctttaggtttattgaattccacgtaataaagttgtagaattgtatttacaatttgaattccctgtgtggaaaataattttggtgatgcatctctcacaaagtttgtttgcatctgttgcagat

SEQ ID NO: 49122 - DNA, 581 bp, Ricinus communis
  Intron number 1 from transcript 28492.m000466 (locus 28492 .t000004) derived from phytozome v7.0 (chr-ID 28492; pos 1 9314 to 19894 reverse strand)
tgaattcatcaggagaggcattgttcctttcaaaggtaacttcttgtcatgttctgtttatgcctttttcttcaatttctcttatattttagattacctgttgccagtagccaggggagtaaatttaagcacatagatttttctggtttctcctgtaaatttagttacttcagaaatcagtagcacccttttgagtttaagagaattataagtcagatctgttactgcaagacaacatcttttcagattttaactgtaatagcaaacgtgaatacatgatggacaaacatgaaatccttttctaagctaaggttttagaaggtgatgtagagttttataaactacagtgaggaacaactctcccttttataaaactcttagcctctcatcttaagagaaattaacattcattaaaattgaaattcgacatgttcctctattcctcacatgggatcaatgaggatagtcccgactgttcgaaatctaaattcttaatggttagtgctggtgtccttacagcaaatttcaagagcataagttttctggcgacagtaacaatcttatatgctttcacttttcag

SEQ ID NO: 49123 - DNA, 486 bp, Ricinus communis
  Intron number 1 from transcript 29681.m001311 (locus 29681 .t000016) derived from phytozome v7.0 (chr-ID 29681; pos 8 3171 to 83656 reverse strand)
gatagagtatgttttttttcttttctcatttcttgcttatatgtgatttctattctctctttagcaatagaattgcacagagtcttttccatttaatgaaattagtcttatgtggtttgctggaattctgcaattatttgttagacttgagatttcaacttgagaactcgctgccccagagtgaattccaggacagctaagccagacattatgagtaacatactgtcaattcatctattaatttgttgtaattagaataaatactcaagtacttcaagatgcaaccattggacattagattgtaggtttgtgatatttaatgtggtatgtttgttttggtgtctcgagaattagttcagtcttttaataaaagtaaagtaggctgaatctcttattggcaatgcatcaattttgacaatgctagcttttaagaatttgtagcccttgtagcagtaattttgagcagtttctatttggcaggtaaac

SEQ ID NO: 49124 - DNA, 872 bp, Ricinus communis
  Intron number 1 from transcript 27965.m000111 (locus 27965 .t000004) derived from phytozome v7.0 (chr-ID 27965; pos 2 5101 to 25972 reverse strand)
ctaagcttgtctaccaagtttggaagggacgcaatgtaagttttcctcctttttcttgctactgctgcttcagcattttctgcttgattatctgttattattggaatttgtttgattctgtttttatggtcaaatatgatctgggttatgtttagtttcttgattttgctgcttctttgatcaaattgcttgtgcgagagtgagtttcagactgagggcggcctgcttttatttacattatttcaagtttcaatttttggtgttaataattttgttgaccttaaagatgctgaagagagattagcaagttcatattttgattctcgttgaagtttttaatataacttatgaatttttgaaaactggcggtattcatagttggatgttacctttatgcataacaatgaatgcaaaattactcttgatttgaatcattagtactgtaacaaaaagaaaaacttaaattgaaaatcgatgatgaaatgtaattgtctggaccatttccctatttgaaatcaaggatctggacataaagtttggcacgtgaaattcttcttttattaaagttttggcaaatagattctttataggttaccttatgctcaagttgttgaatgacaaagaagcaatttctgctcatcatgaattcggtatcagctgttcatcttctgatttttgttcactttatactttaatgttgtttgttaattcttcactgtaaaagacagtgatctgtaaaattgtttgctttcacaacaagaagaaagggaggggagagaaatatctgctggttgtttggtatgattcctctaaatgtgttctctgaatattcttctctttttggttttatattatgcagatattccttttta

SEQ ID NO: 49125 - DNA, 722 bp, Ricinus communis
  Intron number 1 from transcript 29600.m000550 (locus 29600 .t000017) derived from phytozome v7.0 (chr-ID 29600; pos 3 41232 to 341953 reverse strand)
ggtaataatgattttttcctataatttcggagggtgtttgtttgtttttgttcattgttacttaatcatatcagtaataaatctcaattaagatggatagttgactttggccagtcaaatctgtttgttttttttccttttagtttccttcagtataatcttcctttcaaatcctaggtttgcgaaaagaaaaaaaagaaagaaaattgttttataatagatcagttgatttaatagatattttattattggatttattcaattgttattttatagattacatgtcattttcaatactatttgcctacactttgtgaattaaatagcattgttttcaaataaagcgtttgtgttttgaaataaggaacgcctgtatagtgtttcttgtgaccatatcttgagttctactgcggcatgtgtctactgttttcgtagtattctttttgtggctgatcaatgtattaattcaagctttggcaagagttgaattgaattcctgcaaaattatgtcacttttggtatggttttgtttcttttaaaatgccccttttatggttaagtgggaaatattgaatttcagcaactaaaagctttcaaaaaatgagaattgactaaatattattgaattcttgtatttttagactttctgaacatactctgagtgtttctttatttcttcaattccagctgctgaacatcctttcaagggaatcgtcacacct

SEQ ID NO: 49126 - DNA, 612 bp, Ricinus communis
  Intron number 2 from transcript 29757.m000742 (locus 29757 .t000037) derived from phytozome v7.0 (chr-ID 29757; pos 2 81615 to 282226 reverse strand)
ataaggtaaatcttcaattacaatctttaattgatgcattttcattaactgaatccaagttgctttgtgttgcctacacacatgctttgacctataacttggacatgatggacttggacctgtgttatatatatatatatatatatattgtagactaataataatgattaaaaaatgtttctgttgctattattatacatgtcggaccagaattcagctaaatgagtgtatcattggtctagcccttttttaactgattttatcattggattgaacacatacctaaatgattgaattaagctaaaatctaatgcttccttttcatccatattattgctattattaagataatgattggtaactgccagattttatgatgttacagtatggttgtgtttttcatattctcccgtcatatgtttttttccttttcttgagatttggttggatagtctattataatgctgtggtcctcctgcagcagttgaaatgttttcatgtttgtgattttgattactgaatttcgtttagaagcttctttttctttaaagggtctttgactgatatgtgtctttaggttggagttcttattggcaagggtggagatacaat

SEQ ID NO: 49127 - DNA, 895 bp, Ricinus communis
  Intron number 2 from transcript 29769.m000454 (locus 29769 .t000007) derived from phytozome v7.0 (chr-ID 29769; pos 1 41327 to 142221)
gtcgcactgccattcacgagtcttctggtcatcaggtattgctactatatatgtgaatgtatatatagatatgtatacttatgtagtgctttttagattctgagttatgacaaatgttggtttattaagtgggtatgcaaccaatatgggttcatgggtatgcaaccaatatgggttcattattttccgttatccttcttgcaaaattgatgaaaagttgctattcataatcagaaagcagtggtaatgttataatctggccagatttatgatgttatcccagtataatatagcatatctaattgatgatgggcaaacattggaaaaaagttgatagtattatgtgcataataattggatcaggaaacattttcttactgaaaataaagtgtacaaatggtttccatgacagcaatttgttttgtgaggcacaaaataattaagaattggaaatttaaattcttagctgaattgggtcctcaaacatgtaatttttctctctataaggtacttgcataaatgtaacaggtcttttctttttttcttctactttttgctgaccagacctcgggcttcggaaagttctctttctctccctttctatccatgatttaattcctatgctgtagttagcactattttatcccttgagcatggatgctcctcctatctctgttttaggtattgtcacctcgaattattttgtacatcattataagctactcaaacataagctgttattgggctgagtttgggttagctaattagcatttgcactttgatttcactggtgtagatcttctagttgaatgaagaatagttaagaacacaattaattgcgtcttcttttttatttgtagacatattcggagtcacgtgggcataatttcactct

SEQ ID NO: 49128 - DNA, 449 bp, Ricinus communis
  Intron number 1 from transcript 29638.m000526 (locus 29638 .t000025) derived from phytozome v7.0 (chr-ID 29638; pos 1 75453 to 175901)
cagagaacacccattggagttccattccaaggtaacccttttctgttttctctttcttttcagtgagagactgtttctttgtttgatcacttctgggttttcctttttcttgcatattttttgttaaattgaaaggagaactttatactgtgttaagaaatggccagaaggaggcattttgatggtaaataatgaagcattgcttatttaattttgcaaatgttgctattagctgaaagatatcagtaacacagacgtaaagtattgtgtttagctgtggatactggataccaaatattagttagttaccttgttagggttcctattggaacacgtccttattgattttacattgttaactcgtttagttaggagttttgactcttttaaattcctgtttaagcaaaattaaagaaagtaagggaaagactatacaggaattgttcaat

SEQ ID NO: 49129 - DNA, 629 bp, Ricinus communis
  Intron number 1 from transcript 27383.m000159 (locus 27383 .t000004) derived from phytozome v7.0 (chr-ID 27383; pos 2 1062 to 21690)
cttgataatctcttttctctttatcttcgtcacaggtaataatcatcaaattttttcttttctttttcttttttggacagttaattgaaaaaaagcctaattgtctgtttgtttgataattcaaagaattcgaaactggaatctgttgtctgattgtttttcttgaaattataagatattgctgttcctgtttggggttaaagtttcgatacttaggtttattttttatacgtttgatctttcatataataagtttacctttggtgtttttataaattttttgctgataatcacaaggtcttattactaattaatatgttctcttttgtttttatttttaacttagcttcttcatagtaattattcaaggttatggaggagaaagagtaattttttttttttgtatttattttaatttacactaaaaatgctagagttatgcctgagattcatgtaaatgtggcttgaattgtcatgccttagatttatttgaatttttttgttaaggacaaaattatgattatgatgtggtagcctattatggtgttattacaaattttagtttgtcagtgaaaatttggaagtgcattagattgatctgacggtgattgtattgataggcgcataac

SEQ ID NO: 49130 - DNA, 752 bp, Ricinus communis
  Intron number 1 from transcript 28691.m000034 (locus 28691 .t000001) derived from phytozome v7.0 (chr-ID 28691; pos 6 078 to 6829)
gcaacctgatcattgcaatattccaaggtatggatatttttctgttttcttacaatttttcaagttaataactttgcatctttggatctacattatacataagttttatgttgagagaggtatggtctacaatttcttttccttaattagataccaaaaggtaatatatggatagtttagtaatacttgactaaataattctttttcagaacatctcatcacttcagttgttttaatttataaatgtttaattagtcattacaaatgctattcatataatgtgttattacaccaattattattttttgaactaattcaatcatatcacaagtttattttgcactacataaagtatcaatcctttgtaattgaaaacataaaagcaaaaccatcttttttaagtctttgaacttttatattttattttattgagtttatgaatctttatttcttttaattgggtgtttatatttttattttagattaattaaagattcttacatatattttatgaaatttttgtttgttctatcgaaccctttgatcagaataaaaaaaaaaaacatataattaaacaaaatagaaattaaaagacttatatctataagtagaatctcaactgattcagtttatacatgaaatttattgatacaatattacacccagaacagaattgagatttagcaatttgtatttgacataaatgagattaattaaccttttagagcattaatgtttaatttacaggctga

SEQ ID NO: 49131 - DNA, 388 bp, Ricinus communis
  Intron number 3 from transcript 29666.m001432 (locus 29666 .t000008) derived from phytozome v7.0 (chr-ID 29666; pos 6 1531 to 61918 reverse strand)
ataacaggtattagcttattttggatttggattatggattgaaactgtcatatttagattagaatatataatgctttgaggttcttttattaggttatgctcttcctgtttccttttattattttccatgttccctatcagatatgtacaggagtttctcccattgcatgtgttgcttgttagaaatattgcacatgtaacaaaaattgtgttcatgtcaaggtaatatgaaaaatgagaatgcgcagctatctagaaattcagaaaactgatggctgagatagtcaatacccaagttttattgttaatttgattataataattgaactaggttcttacaatcattatttaattaggatttcagctgaaaacaagattacttctgcta

SEQ ID NO: 49132 - DNA, 862 bp, Ricinus communis
  Intron number 3 from transcript 29661.m000949 (locus 29661 .t000051) derived from phytozome v7.0 (chr-ID 29661; pos 4 15238 to 416099 reverse strand)
ccaagactgcacggttgtcaaggtttgcaatcttgtttttcaccttataagtcccaagaaatatacaatactaaatggtattagaactaggtttttacccatcttgtttaatagatgaggagcatgattcaagatgatttgttttgtcatctctttttgtttaatatttggatataacatgtaataggccctttgtttctgtagattccatttatatgacatatgttaaactaagggcatcacaaaagtaccttctgatatagaattagagatgtttctttatattgaggatgctgaaatcttggtatattagcaatggcatctattataggttccattataaacaaatgtatagttaacagaattccacattcccacttgtgagaaagggatagagattgagacagatgagttgggtttctctgacccaccgagtggagggccactagaaatcaaattttataagaggaaaaggagaaaaagattgcacaggaaaaggttttagtgtttgttttactaacttttgtagctgttaattaacgtttaggaagcagctgtagagcagaagacttaactcccatttgccatttgccattccccattcccaatctagttagcttcccttttggaatccaaactagatgacgtaatgtagttgcatgagtacattgatcacaaactaaagtctcgtgcctagttcttagcttttagttcctttcggaaccaggatctaaaaggattcattaaatacgagaaaatgacttgttaaggaggaaaatgtttcattatttacaagtgtaagtgtttgctttacttttactttacaggttgatagtgcaaacaagcacggcattctattaga

SEQ ID NO: 49133 - DNA, 740 bp, Ricinus communis
  Intron number 1 from transcript 29661.m000949 (locus 29661 .t000051) derived from phytozome v7.0 (chr-ID 29661; pos 4 16383 to 417122 reverse strand)
gagtctgcaagtgttagggctctccctcatcaaaggtaaatgttttcttcttcttcttcttcttcttcttcttcttcttcttcttcttgagttttctttatagaccaggaaaatatcatcaagcgagagctctgattcattatctcattttcttgatattaaccttataaatatcaagaagattatgtgggtttgcgtccagttcaattttcattcaagaacatgaattatttttataatctttgattatcagtcttattcaatcacaagagtctttaattaaatttgacaactgtaacattctatccaagcaattcgcttttttttttttctttaaaaaaagaaaaatcactcttgttgtggagtcctgttgaaacaaatcttttaatttctgcccacacagcaggcagttttggattaaaaacaacgttctttttcctggtatttctcaattaaatctctatattttcattgaaaaaaaagaagaagataataacaactctctggttttcttgattttcaagaaagaggctactcaatattcattttaattacgaatgaaatctttgtagctagtcagctattgttatgtagattttataaaagctttaaagggaaacgccgcactcttatctcctccctacgtttattatgttaacgcgtctgctttgttcctatataatacttatgctttcaataatttagaaggtagcgatcggtgatttcgaagaggatctcta

SEQ ID NO: 49134 - DNA, 766 bp, Ricinus communis
  Intron number 3 from transcript 28543.m000388 (locus 28543 .t000005) derived from phytozome v7.0 (chr-ID 28543; pos 3 5891 to 36656)
gaccatcttctagcttgtgaggtattgtgttctttttgttttttcaacatgaggtttattatatgacagagaggaatatcataaacaaccatttcatactgtgggagaccctaatgtttaaaggaagtaggattaaagttattttgaaccttttaagtggaaaaggcatgtgactaaagaaaagaaaaaggaagagcaggcttcattgctgaatgtagaagttgcaaagttgttttggctattgttctttaatcttagaaatcttgttcatagccccgaccatgctggtatatgtcatccaaatgtacttctgaaatgcttcttaatacataatctacttatttaatacccatctgccatttgcctagtttatatgaagtgcacacctctctcttgtactcgtaggtattctctttcatgaacttttcaagtgacgttttggaagtaacaggattcccttttatttatttgtttattttttgctgaaagaaagctagagacatgttagtgaacagtagatacataatttatgcaagttagttatgcctatttgtttgtttgcgtgcatcatgtcttctcttctccatgtttagtggcttttcccctctcatgtgtttatttcttctagatacacaaattattaccagctaggatcttgtctgatgtgttaaaagaatggaaaggtagcaggagagattctaaatttgattcttatccttaagagtgtgaaaagacttctaaacaacagccttatatgacaggcaac

SEQ ID NO: 49135 - DNA, 683 bp, Ricinus communis
  Intron number 1 from transcript 28447.m000018 (locus 28447 .t000001) derived from phytozome v7.0 (chr-ID 28447; pos 3 767 to 4449)
caaccaccaatctacatcagccttattgcactctggtaatcatgttttctttgagattcttgcttgtttaattcttatttgagattcaggcttatttaatacttatgtttgattgctgagaatgtgtaagaatataattgaagaatgaattatcagaaactgtgcttgtatatgtttagtaattgcatttgtatatgactctgtttcttatcatgggttagtgattaaagttatttattaagactattttgcaagatgtcaattatgtgtcaaaaggtgcaggtgatgttttgggaatacgtaggactagtgcgtagattctttcatattgttaaagaggcatgaaatctaaatatgcatagggtttttaatgtaaacaatctctgtcaagttgcttttaagaaaaacaatcttcatgttcaagctatgaattaattaatttattaatcaaaatgattgttagggtcatattggaacggggaattgccttttttctttccttaatgagaaagaatctgttcttactgttcttctgactcaaaactaccccctattatctacctatacatgtagttataaacactggttttccatatgcatcttgtttataatttttagcaaccaaataaagtagagtaatatacatgtaaataagcatatttaccatgttctgtttcctatag

SEQ ID NO: 49136 - DNA, 709 bp, Ricinus communis
  Intron number 1 from transcript 28152.m000924 (locus 28152 .t000053) derived from phytozome v7.0 (chr-ID 28152; pos 2 82651 to 283359 reverse strand)
agacgacatcgttctggctttgaccgtgagcccaggtgccaattttatctctctattcacaataatgaatagggtttttctgggtctttttcttttcttacggtttaaacatttgattgagtaatttacattttttttgaaatatcaaattcatctcaatgtaaaatttcgaaataaaggtttgtgggcattaaaagatgtagcttttatgtgaatgtagatgttatctttcaaggcaataaagggttctcaaatgcatttcaatgaaccattgaaattgaggttctaatgtttcaataactttatgtgaaatgttagtgtgcctttgaaggcaataaaggttttaacttggtattgcaaaacccagactgcaacttacttgaaattgggatttgttgattctagcagtcttgaaaatgtctcaagttccggtctactttgtaactgaggaaaaccttgcttctcattttctttcttacttttggggattgtaggtatggatattaaaatattctttttctttctatgcctccttttgttgtagtcagaaacatgcaagatttattttttctgaatcagtgatgcatagttaatgcactttgatgaattggattcttctactaatcaattatgtactgtagttcggaattgtattgtggattatgttgttttttgttattttctttcagtcccaagaggtctaggaggg

SEQ ID NO: 49137 - DNA, 837 bp, Ricinus communis
  Intron number 1 from transcript 28748.m000214 (locus 28748 .t000008) derived from phytozome v7.0 (chr-ID 28748; pos 7 8349 to 79185 reverse strand)
tcctacgtcaaagaattatcttcttgggctctcaggttttttttttttttttttaagaaatttctgttaatatctgttgatattatattttgaaagattgaattgagttgttcggtcttgtttgtgggttttattggctgattttataggtctttgttttgttatatttttgagcttttatttgtttgttaaatattgattcttggttatatatatacatacatatatgctggtgtgaaagaaatatactttagtttgggattgttaagtttttctggattagtgagtttggggttagttgttggattattgaggtgacttttgctctaaaacatgcttctttttcccttggcagcatttgttttgccttggggatttacgtagtatggtttcaaaagctggcttaatcctgtgatgtggtcttcgttcagcatttacatgcgcaaaatggtttcttttggacaaaaattattatggtttatgagttttggttaatgtattaatgtttattggcaacatataaaggtattaagaaagagactttaggggctttcttcataataagtgggttttgagccttaaatagaggtttgggttgtggattttgcttattgtggactatctccatctccttttccttttgatattagaaatgggactcaatacgaaactctctttgtatatatttgtgttttatcaggtcttgtaaatgctaagttatgttgaaatgatagcttaagagctgaaaggtcaaaattctctggtgtatctgcatgatttaagacaaaagaaaaggtttcttttcaattacttatttgcattgatgtggacaggtcg

SEQ ID NO: 49138 - DNA, 705 bp, Ricinus communis
  Intron number 1 from transcript 29739.m003698 (locus 29739 .t000134) derived from phytozome v7.0 (chr-ID 29739; pos 8 53976 to 854680 reverse strand)
atctgtaggctcaccagcacctgattctacctcaggtatcattgcttttgtctgtttgtttttgggtcgttttttttttttaaagtttggatctttttgggaattgtgatatgttatgatctgttacattatttttaattaacgtttgcgttgttccttttatcattttttttaatatgtcatctttattagcttgatggatcacaagatgttgaaagttgacatatttatttttaattattgttggaattttttttgatatattgtaattttatttcttactagatcttaatttgatgctctgtgcccccatgggtagatattgaaccatgaactttaatcatgatctaagattatgaaatttcattagtaagtggcccataagctatggaattttgatttttaaaggtctacaagggtaaatggagataattatattcacttccttgcagatctattcaatttcattgtgtttcttttttcttttcaatagctagatctattgcaatgtaaaatagattattctttcgagttcttgatacatgagattatggattgctttttgtttactttaaattctaacaatggcacattatcacattgacataaagttacgatttctttttcttgacaaacttataatttctaatctctgttattttcatggtttgttttatgctcgttaatgtagtggaagaggatctg

SEQ ID NO: 49139 - DNA, 623 bp, Ricinus communis
  Intron number 1 from transcript 29701.m000606 (locus 29701 .t000027) derived from phytozome v7.0 (chr-ID 29701; pos 1 99433 to 200055)
ctcattttgctctcgtcagggacattctctctaaggttttcttttttagtttaaattttgcactttgatctcatattctttcttatacatcgttatgctatatgattatgtaactgtttaaatttcttgtgttttttatatcaagttggtatgtgatggagaattggatataaagaaggtgattgggtaatacccattactgattgttttcgggaaaaagatagagaaaggagccaagtgaaaattaattcacggtggttcttcttttaattttatgatttagactacatttgtttttcttttgggcttttcttgtgatggttgtttcaatgaaaggtgtttgtttattgtacacagtagaggcatgttcatgttgtttatgatgaaaatttgtcctcagtgatcatcttgatacatatctttctattaaagatttgagtttgttaatgtcactgtctcgagaattttgtatttcttcttttgttggttttaaatggaagtccgtcattagttgctgtgttttctgtgtcttgagctgattaaattgatttttagaattaatcgcaacaatgtttattctaatcctttatttttatctttgtttcagtcttttcactgcaagc

SEQ ID NO: 49140 - DNA, 630 bp, Ricinus communis
  Intron number 2 from transcript 29701.m000606 (locus 29701 .t000027) derived from phytozome v7.0 (chr-ID 29701; pos 2 00083 to 200712)
tgtaagtgtttggtgattttttatcttcattacaagttagacttgaacattcatttcatagagttgttactacttgtcttttgcttttacttccttttctgtgataaataatctttggatctaaaatttttggatttgggcttggaatagatgaaagttcctgatgcctgtttgcaggcttatgtgcctatgtttgcgtgaattttattggaaactagtgtcttaaaccttttttcttcccgagtcgttgggtcgatgacctgttgctcccatgacttgtgtgttcttgcatatggttgacttcatttagattattcagatcattaatcattgtagtttgtaggtgccctttagtccttagtagagtaccaaagattggttgctgcggaggaccttgaatgaatcaaaagcttgacaaatgagaatgaaacataacttttattaccttgtacacgttttataaattagaattgggcagtcagtgtgtggccgatcaaatgcattcacacattgcctgctgtcgtgaatataaaattttatttgttttttgtgatagtcaattctccttctgacattgttcaatcccaatgattagtgttaatatcacagaaggagagccagaggatcgaa

SEQ ID NO: 49141 - DNA, 948 bp, Ricinus communis
  Intron number 1 from transcript 29638.m000519 (locus 29638 .t000018) derived from phytozome v7.0 (chr-ID 29638; pos 1 43071 to 144018)
tcaggtctctctctaatcatgttatttacagccgttttatcattgttcttttatcaagttaggaccgtttgattttcatgattgttcaatctattatttttcgcggcaaattgcaagtagtaaatcgaattttagatatctatatgcacagcgaatgttaatcatagattagaaatcagatattgatttcgtaaaattctgaagtaatgaaaattaagcaatctctaggttttgttcataacataatatatatagtttggattttgtgattgtttcgctgcaatcagaaaaatgagagacaagtttgaatttatgatgatgcgattaagcgaaaatttaattttgggataacttgaagcaaatagaaattaacattatttattaaaaatggaagagcagttataattagttcaggttttgtttttgtttctgatgatttggaggtccattgggttttgttgactattacagcttggaataatgttttcgcggcaaattagaagtagcatattcgaattctataaattattaattgttacgcgattaaacaaaagttagaaatcagacactgaatttggtaaaaatttgaagtaatgaaaatttattaatctcaattagagcaaaccctagcttaattaaattagtttaggctcttgtttcttaggcggtggaatatcgaagtttatattatatataaatatgtaagacactctgcttttctagtgcgtgtggcttagcgaaagaaaatatatctgaatttggagctactgtccttggaaaagaatggaaaaaaaagaacaaaatgtatgtttgctttcttattctatgtcatcttccggccattggccttcatcggaatttcaagaaaaagagttagatggtatctactatctgcattaccaaatggtgaatgattgaattgtgctgctttaattttgcagtttgcac

SEQ ID NO: 49142 - DNA, 613 bp, Ricinus communis
  Intron number 2 from transcript 28153.m000285 (locus 28153 .t000014) derived from phytozome v7.0 (chr-ID 28153; pos 7 8191 to 78803)
tcaatatcgaatattcctcctggatccaaaaggtaagaaataatttgctaccaacttcctctgttttaatcccttgtttttggaatttgtgtgcttgccatttttatggaacagagcttcctcaaagctaaagaagtttttccgaagaagaatgtgttaatgtcaaaaataattatttaacctttataatgttattggatttacaattactttgaatataagttgtatggcaacccaacccaaagctttcaggtttagctgctataatgatcagaatatattgaaattttaatttggctcataaatatgctctaaactgagactcagaaactataaacttgcatataacaaggctgcaatctttattacagacagaactttaggtttcttcgagagatttcatttagctggttttacataaagatcatggactccagtgctaggatctttgatttaggttcaaatgacactaacaagagccatcaaattatcaattgtggcaatatagttcatttggaaagtctatttaggaggctcaatttgcagatacatgccccttaattctgtcaactaatagaagccatgttattattcctttcaaggttctgggcac

SEQ ID NO: 49143 - DNA, 325 bp, Ricinus communis
  Intron number 1 from transcript 29801.m003130 (locus 29801 .t000075) derived from phytozome v7.0 (chr-ID 29801; pos 4 51111 to 451435)
gctaatatttctggctgggattcacgagtcaccaggtaaaattaattccttgcaattttagttgaaaaataaagctgtgtttataatttacttaaagttatcaatttttcagcgtagatttaaattgtcgataatttatagttctaagaaccaaatacagatagttatgtatattaagtttttccgaatatggttcatctcaatttacaaatatattccacagaaaacaaaattctattatgttgcgttttatttctgaactaattaatctctgttcttcatattatcagtccagagtctgaacttatcaagaaaataataagag

SEQ ID NO: 49144 - DNA, 916 bp, Ricinus communis
  Intron number 1 from transcript 29579.m000201 (locus 29579 .t000007) derived from phytozome v7.0 (chr-ID 29579; pos 7 1706 to 72621 reverse strand)
aaatagttgctgaacatttgactaggtgaggtaattcaatttccttttccttgtttatcatgatcaaactttatgtatcattaccaaagtgggtgtaggatataatggcccttcctttctttttgtttcttttaagtaaaatgttgcctagtacccagtttaatagagctagttcaaagctgagagcattagtcccccctgtgtctgcaaagcaaatcttccatacataagttcctatactctttttctgttgtggttatgctttatttcttgatgtcgttggtaatagatccagatgtaattcaaattcagaattgtacctagttaactgtgcttttgagaatacaatggggatttatggtaaacttgtttacaccacagggaaaggccatgaaatctaaatttttaactatggtaccactgttgcttctgtgttgttaatattagatatcttctctaaatcataaaagattatggttttacaaattgttatttgttgatatacttggaacattgctgtttttctcttttacagctttgtcaaattgtatgtgttagtagtcatagctgcagcaccatttaatgttttaaggatactttctgcataattttagttgaacattatttagggcaatgagaggtaaatgaataaaatcataacaagctgctaatatttcttttagtgattgaccaacatggctgttcctactgggctatcaaatccttatgctaagtgtttatttcaaatgttttaagaatctacttttggcatgtggggctggtgatgatgtgatgtttgtggatccattttctttaggcatgatgatgttttaaagctaccttttgagtgtaataatatgtatattatgttatattattaggaatattcagttcttcggtctcgagtctcagcgca

SEQ ID NO: 49145 - DNA, 612 bp, Ricinus communis
  Intron number 1 from transcript 29749.m000145 (locus 29749 .t000006) derived from phytozome v7.0 (chr-ID 29749; pos 9 0087 to 90698)
atcaacgtagcaagtgtttggacttctgtatgagctacatagagtcgactgctacatttaacattgaaacatgctttgatttggactctaggtgataaatgtaggcggaatatgaatcaagtaaaatgttttaagagattaggttggtcattattttgacctggcaatatcacttgctgtgcaattaatatcatgatgcttgtcaggattatcttttatgggatgtacgattatgaactactgtatgctcaatacgaatggaaacttgatagttttgtactgcttgtagctctcatgtctacgcataaaaactgtggcacaggtctttcatgaacatcttgatggcttggctgatcagataataaacaagagtcaacaatgtagaccaagtatattgagcaggggaaatatattaactaatcaaattccctttacaccccctccgttcaaaaaaatataacaatcttctgactttgtgttatcttgcagttctttgcctgcatattctgcatttgtggttccttgatttcagatctatgctggataattgacatcttttcagggtctgaacatgttaaatgtttttctaggctgcgttcctatcaggggaaa

SEQ ID NO: 49146 - DNA, 1049 bp, Ricinus communis
  Intron number 1 from transcript 29804.m001546 (locus 29804 .t000077) derived from phytozome v7.0 (chr-ID 29804; pos 1 003980 to 1005028)
caaacaaattcagttgagaagtacttctcgcttttgtaagctctttgcaccttctgatttgtaagaactgtgaatctaggtttcaattaattctgtttagttgaccaaagttaattcacacagaatttctcattttgttatacaaccggatgcataccaatactttacctttttatatgtaatcctgtaaatatttgcgtctcctcatggaggcacttgaatggaacaattgaagaacagattctactttccagtggattttcctcatattggattggagtattgtagtgagtctagatcctaatattgtaaccataaattatcctctgtagatttgtgttctgtaattataaggattttgtatacgttagtgttcaccagctttgaaaatgaaatctggggttctgatggtctgatatcttatgatcttggctcctttataacatgagagcttactgttgtttcttgttaaaattgaatgactttcatcttagcacataaaagtaacttctttttgaaatctttgaccgcgactgtcatgtttatgcttgtacttaactctgatctctgcttactaattaagtgcacgaaacatgtttgatgctccaagctttgattgaagctctgagaaaaccttttggtactttttgataaaaaacacgggagtcaatctacttgtcattgctttccacttatcttttcatgtttcatttcaactatcaagcttcattgactcatgggtgttaccctctctgtatggatattttgacttcgttatttaatgtggctacatgtgttttggtcccttgaaaaagatttcttctagtaaattatgtaccattggaactagaatctgtcttaggctgttattacttagctgttagattagtgatacaagttattggaattgcataatgcacagatggatgaataacctaataccgagtaagcagctatttacttgtgctacttaatccttattaaaatgctttagaacatggcagtggcatgtatcataacttgatttttcagaggtttgctcgagtgtg

SEQ ID NO: 49147 - DNA, 859 bp, Ricinus communis
  Intron number 2 from transcript 28449.m000019 (locus 28449 .t000001) derived from phytozome v7.0 (chr-ID 28449; pos 1 8366 to 19224)
ttaccttataaagcttctcttgatcggcgatagcggtatcattttacatttctgtcctctgaaaattgtgaaatccgtatttatttttactggaatatgattttctcctttgaatgtaattttaggtttgatccataatggttaggtattttgatttgctgagaattcttcttaacctttggatcctgattaatgaggcgtgatttgcctttgcattttactctgactcgactcttaggtttgacaaatgcatttgtgcatgtccctgatggaattgatttgatattaatttttgtttacttttgatttacgctggcactgactctcatttgtaagtgcatgcgggtatctgtttttagtgttgttgcattctattactctttcttcttactcttgtattatctgttatagaatgttaaagaagcattaaaagtatagaactgttggctatggttgctgttttcttagttataatttaggtggattggatatgtgaattagccagtgcaaattgatttcatgatagtttttttctagctgtttaatttatcaacatgaatagagtgaagtggctgctgaactgggaacaatcattattaatgttttcccgttctaaaaagtaaaaatgttgggcttttgaatgccaagatgtgtatgcaacagtatgagcttgcactgctgctagcgttttttctctttaataacttaagcgagtagctaagttggatatgtctttgttttcatcgtgtcctttttaactgaaatttaatggttgttggtgtcatagaaatttcatttattgcttttgaatttgtacatgccaggtgtgggtaagagttgccttctcttacgtttctct

SEQ ID NO: 49148 - DNA, 718 bp, Ricinus communis
  Intron number 3 from transcript 27777.m000280 (locus 27777 .t000014) derived from phytozome v7.0 (chr-ID 27777; pos 8 4164 to 84881 reverse strand)
tgaacgggcagcgcaaaaaggctcctacacctgaggtatttttagaaacatatcctcttcacacaaactatttaattctctccacctttcctgaaaaagaataaaaggtgatgaagaaaaaagtccatataagctgatgtgtatgcattttgattgtgtctgtgattttagttttgtggttttcatgttagaaatcaaattttgagtcgtgaaatgtgactaatttagatgtgaaaacctttttaatccttgagagattgaaaagcatttacaatattcagagtgcattcatgtttaagcttgctctttaacttgcgaattcggtctgattttgattgatgttaaaagtgggatagccaaatgatacttgatgacgcccactacactattttttttttctgttgtttctatttttgctcttaaattttctactgaaaaaaatgaagatttaccaggcatggatccctttgacttgatttcttctttccctggcctgtttctctagataagttactattgatgagtaaatacctagggatcccattgacttctgcccttgctcattcctcctgccttattgggtacctattttacaaagaaaatattgtttattgtatgaaatgattgcatagtttgttacttttattagttttggcaagccatattggttgatgttttatgctgttggttacataattttttattctctgttcaggaa

SEQ ID NO: 49149 - DNA, 249 bp, Ricinus communis
  Intron number 1 from transcript 29772.m000313 (locus 29772 .t000006) derived from phytozome v7.0 (chr-ID 29772; pos 4 6915 to 47163)
ctgtcaagtatattgagagaggcctaaaggttcttccttttttctctctctcagttgttgctgatctttttttctttttttgcttttgggttggaaagtgtataagatgtgtatataacccatgttcttgtttgatttcttcaatatcttaattatggtgggttctgttaatttgaattgtttgtttaattaatggattcattttggtagtcttatttcttgttgggttttgttttcttctttagattg

SEQ ID NO: 49150 - DNA, 786 bp, Ricinus communis
  Intron number 2 from transcript 29588.m000870 (locus 29588 .t000025) derived from phytozome v7.0 (chr-ID 29588; pos 1 64977 to 165762 reverse strand)
cgaacaggtcttctagcttgattgagtaagtttgtttttatttctctactcaaaatatgcaactttgaatttttataatttataatgtcattaaagtctctttctttctttttccttttctcttttttcttttttctttttagtgattcggtttgtgcctaatatctgtagcttattaaagtagtgaattaagtgaaggagctagacttgaaaaatttggaggaccaaaataaaaattgaaaggaagaaaaaaatttgaactaagattatatttatacgtgttgattggcgaaattattgtttatactttaacgatattctatgaaatatatagaaaataaataaattatatttgaaaaaaaaaattgtgggctaagaaagatatgaataaaaagtgaattgtgagaaattgggactccttatggatctcaagacaacatcttaaggagggccaaggtacatgataaaagaaatttatacctaatatatgagtatgtgagttctttaaagatttgggtggcaatatatatacatattcaaaagaatttgtgcaaaaaatgtaagaaaaggtaatgctgtaaaggcttagttttttttttttttttggtggggaggaagggtgggggggaccatgggcatggcctcctttaaggaagtgatatgtaaaatgaaaatgaggaaaccttatggatctcaagataacatcttaaggtttgtgaatgaattctgatgttacaaaattattaattgaacagtccagaaggaattgaaacactgtgttcagat

SEQ ID NO: 49151 - DNA, 771 bp, Ricinus communis
  Intron number 2 from transcript 29650.m000273 (locus 29650 .t000006) derived from phytozome v7.0 (chr-ID 29650; pos 1 07983 to 108753)
catcaggaaggaagccaacagtttgtagctcaactttagctctatttatcgttttctataaccctatcaaattctaatgattttactaattatattcaacaattctgttgtaatgctttccttatagttttacccaaagaacatataagttagtttgatcagtttaatattgttgttggatgttaaaaaaataggtttataatttttttatttaataaattaatttttataatttattttacataaaatctattttttttaaaatgaattaatttacctgatttcttttccgaaaatagctttcaaagtttttaaaaaatacaaataaaagcattttatcaagtttataattttatgtttaatacttcatataattttcttcttgtcttcttttcaacttaattttgatttcatatgtatgtgtagtcttctatattcatgggtgttacagtgatgaatgaataatataatatttaggtacaaaagtttattcttcagtttttaaatgagttaagttaatttagttcaaatcattcaatcaaatcagattaaaatgatttgatttggcttaaagatcaaaatcagatttaattaaatttgttggtttgaaaatgagttcataagacaacttcttcacattctacttaatgttggacctaattgcactgttaaaataatttgatggattcttttgtaaccggttgtaattgattaatgtttaatcttgcaacttgattcagggaaagggtgtataccaatttgttgacaaat

SEQ ID NO: 49152 - DNA, 901 bp, Ricinus communis
  Intron number 1 from transcript 28226.m000835 (locus 28226 .t000005) derived from phytozome v7.0 (chr-ID 28226; pos 2 7780 to 28680 reverse strand)
aggtgagattatttcagtttcattttctctctttagaagaagaaaaagaagtttcttttttctaaatgtaatttaaagaacttagttcattgccttctgggttctggttcagttgcttctttttttttcttcttttggttatatttcactgcaaactcatggattttctgggcttcttgaactttcttgtaatttggtctaatattgcttttagtatcgatcttttatttatttaatcattgacccttgactttcctttgatcaagtttagtggttttattgagcacagtaactgttaaatctgattctcttgttgattctttagttgtcattatttggaggattaatctattttgcttgcaatttctggaaattgtgggtgcattgttttgtaaatgaatatgtaattttatgggcattatttaaacagccatgattttggacttatttatctatttcttgttagggttaattttgattctgtatgatttagatctctttaatgtcagtattactgaagacttatattatgttcatctctgtcgtgtcttgaacttttctttagtttggtttctgatttggaaaatataatgggaactcaagtttatgctatatgataagatcatcatacaagtggattttatttgtgcttcacaaaaaaagttgtaaaatcttgtggatatcacaattcaatcataaactcagttaggaaatccttttcaattctacttaacaatctgagtgctgcttcgaagtaccatttcttaagaagaggctggactgaaatatatttatagtggacagtttactatgtttgtggtttgttttccactggtggtcactgcataactgcttttgtttgttgtttgttccatctgcagctatagctatttggtgtgct

SEQ ID NO: 49153 - DNA, 579 bp, Ricinus communis
  Intron number 1 from transcript 29646.m001114 (locus 29646 .t000062) derived from phytozome v7.0 (chr-ID 29646; pos 3 60832 to 361410)
ttgagcgtgagcgtggtatcactattgcctctaaggttttaattttatcttaaatcctaactttcttataagcaatgcttgctcttctttcaaaatggtattactggatgtttgattcatgtccgtactactttacatttgataaattttagtttatgtgttctttatcaatgtgatttgagtagattttcaatggttcaattgaattctgggtagttaattctcctgtttgggaaactgggggggtttcggggaagacctatgtcgggaacattttgggtgtgggatgctcgtttaacctctgtaatcatctcgttacttatttacctgggtgcactgcgttttcagaagctgcctgttgaaccagcttctatttcattccgtgctggacactatagttgctaaaacttcaattgtttcaacttgtacaaaaagaaaagggagttctggaacatattatatcatgccaaaaggcacataatttgaattgaattcttgcaaatgaattatttcaaacaaggcctggcttttatatctcatgaaggaattattgtatgtaatgcaggttacatccatttc

SEQ ID NO: 49154 - DNA, 961 bp, Ricinus communis
  Intron number 2 from transcript 29646.m001066 (locus 29646 .t000014) derived from phytozome v7.0 (chr-ID 29646; pos 9 0873 to 91833)
tcgccttgaatctgaggtttatctctatctttatctctgatacgtttttcttttttattcaagattttaaagaaccttaagttgattataagttacttgattcaagtttattattttactttcttcttagactttgtgagtcctgaaagatactcaaacttctaataatcccatttttacacaatcaaatttcattaattttcctcatgtttcttggaaaccaatcagagaagtaatggaatatatatatatatattaatcctttctttattactttctacgtgtatttagtcaataaaataatggagattagtgctgcctaatcccgtgatttatgagttacgatccatctttcttttcttgtttttcctttcttttttgttctttttggttcactatgatcactataaaaaaaagtcagaattggggacgagaatagcagtagaaaaaaaaaactaaactaattgcactcgatcttttttactagaaaaaactagcatgacccaccatttttaacgttgcatgagctctaggcttggagaaaagctacgccaggttcttgggtttgtgctaaaaagacctagcacagacatgaacagaattgactaggaacagagtactgccacttccaaggcaacagatgaacaaacagaactttgatccttcaattcattagtattttccgtagaaatgtcgtttaacgttggctgtttctgggccttgacaagaagcccactctgggagtaacaccatttatcttcttcccacatgggatagtgcacgccttgtacgaattttgcataaacaaaaaaaaaaaactgtcaagaatctcattctctcatcatcatatacatctctctctttcacttttcttttattattatttttaaataaaaaatctttcaacttcatatgaaattgagattaatgtctgtgctctttttgcaggtcttgaagctca

SEQ ID NO: 49155 - DNA, 678 bp, Ricinus communis
  Intron number 2 from transcript 29805.m001477 (locus 29805 .t000008) derived from phytozome v7.0 (chr-ID 29805; pos 3 4005 to 34682)
gctgtcgaggagttgaaatctgctgttgctttccagtatgtcttttttttttcttttttttttttccattattaactagagagatgtttgttattgcattactgatcatgcatgtttctagtatatttttaatttgaatgtgtttggaatgtccgaaaatgcaagatttaagttatattgtattctatttaatcaatcaatgctcctgtttggaaacctttatattgctacaattcaattatttcaacttaaggcattttggaagaaaataaatcttgcaaaaagtagttacatgatttgcaatgaacgcctatgttgatgaggttgaagttgaatgtagaattagcaatacattcacttttgctttctccgtgaaatcgaaggttatgataaatggcatactaatattttagctttttctggtattatcttgctttattgttgaagaactatggtttgggtttatgtcgctgtattaagaacaagactaaaaattagattggacaagatttatttggtttttagtaagaattgaaggggcattttctctaatgcttagtttactttatacatgtaatctacattgcttaatgcttgtttgtcttggggaactattattaatttttaacttgaaatttgcttgttttatgatcttgaaccattagaggaaaaggtgca

SEQ ID NO: 49156 - DNA, 656 bp, Ricinus communis
  Intron number 2 from transcript 29790.m000853 (locus 29790 .t000048) derived from phytozome v7.0 (chr-ID 29790; pos 3 95160 to 395815)
cttgtggcattcttcctgaaactggaagttttctggtacgtaaatgcaattattttattttgaagtatacttctcaagttcgaaatcttcttccactttttacagtaataatttcctgtggaataaaaactaaaataaactctttatctttctagaactaataactaatatatactaatcgtatttctgattaaaaagggaaaagatcattcctaaaactgaaatacagtttaaacaaaatatatgattaagataattgaattaaatctgcgctcaaaagtcttaagttccaagttgacacttaggaattaatcactgtaattttgaagcttaatcaatttcgttgatcatgttttttcttcaagaaaattttatctatttaaagtgagatcttaagcttcaggtctagttgatgttcttagcctgtaactaaaagttcctgttccaaaataccatgacaataattataagttaactatgtacacaactaaccactactaattaaatgcagcaattaagaagtatttgactttacagattatactttggaaattttaaatccaattctctactttataccaaacttattaattggtaagttcactgcttaattttgttttgttttctttttggtgtgtggattctttacagggaaa

SEQ ID NO: 49157 - DNA, 699 bp, Ricinus communis
  Intron number 4 from transcript 29791.m000536 (locus 29791 .t000011) derived from phytozome v7.0 (chr-ID 29791; pos 1 00258 to 100956)
atattgagattgtagagaaggaagaccttgatcttgtgagtcacttttttacttctttgtccttgatgcttctaactgtcctttttgagcattggcaatatcttatatttatttggattgattagaattattaggtttaagggctagcctcttggaccaggtttgggaagtagggatcagtaacagcaaaaacctgtataactgttaaaatgaggctataaaatgatctacaagttagaaaagtgaattagacttcagcaactgatgcaactcagccagaagaaatttttgagttttaacaaacaaatcacccacaaataaatgaagagaatggctaaaaagttttaaaagttttctagaattgcttactaatgtctcaggattcaaatctgaagctgaatatatcatcatctatggcttggatcatactgcatacaagatactagaagctgagatttttctctcaactttctcatgattcttgtcgctagacctttctatttttcttaattttattgaacttgagctttctttttgttgactataattttttattcactttcttccctgttcctatgctattgatatttatcatcggtcaggcttaggatgcatcatatcatgaatttgattccttttgtttgttttatgttctcattgacagaaaaaccatttgtctggtttgcgtaaaagatattt

SEQ ID NO: 49158 - DNA, 1012 bp, Ricinus communis
  Intron number 1 from transcript 27553.m000320 (locus 27553 .t000006) derived from phytozome v7.0 (chr-ID 27553; pos 6 1061 to 62072 reverse strand)
gctctccttcctcaaacgacatcgttttcggcaaggtcatttcttaaactattgagcattagttgctgcaactgtttttggctatgaaagtgctttcatttttttacgtgtttatcatttagtagattttacataagaaaaataaaaactggttcccctttgttaataaagttaatctttaatgctaggtgtggttgtaatccattgaggaatttattttatttgagaagaagacatgagagaaagtaaaatataaataataaagttgaaagagatattttagtgtgaaattcatttggaaattctatatatttcattataatttactttagctataactaacttcacatatttgattatataaaattctaaattaactttcacacataaattttagatttgcaaatgaattctgtaaatttgtggatttcaaccaaatgggagtaacttgttttgggaacctttatatgattcatataaaaaaccaaattgctagcttgtttcgctatatacaccttgtttgattgtctaaaaatgcaatatttcatcaatatcatgtttggaagcctcataatggctagaattcatttctttaacttggaaaaaaagaaaagacaactgacatgattttacaaaaattcaatttaattgtttgaactgttgaacattatttgttccagacaaggtctataatgactagcgaccaattgtggatgccttatttgcaaaagataaagaaaacgaaggaagtaattctgttatactgtgtttggaatgttatattgttgaatcgaatttgagggtgtgacctgtacccttagtttgattggtatttaaagctcatattttatcggaattaaatatgatttacatcaggatgggagatgtgtaattgtaaagaaactcatacaaacagttcagaaattattacatgtttctttttttctttttaactgaaagtgatggcatttatgcaggagacatcaatagaattggtgataattggggaaga

SEQ ID NO: 49159 - DNA, 400 bp, Ricinus communis
  Intron number 1 from transcript 29630.m000814 (locus 29630 .t000039) derived from phytozome v7.0 (chr-ID 29630; pos 2 42171 to 242570 reverse strand)
caaggaggtgatacttctgttcctgtgccaggaaggtaatttcttaatatcttgctgagtattattgtgtactcacattctcttctggctgttgtgattttgattctcacttaaaccgaagattttgggtagtggcaagacctagaagacaacttcttaagatagaatgactttttgattgaactgcacaccaggaagaaggattttgagaatgatttgcatataaaaactctagtggcttaaataccaaaaactctcctgccaaaaagaggtgaactcagctgcttatgtcagttaacaagatagtgaatccacaaaagaatgcggtggcctacattaatgatcccagtttattctttgtgcaggcgtctctcttcagccttggttttggcttccgact

SEQ ID NO: 49160 - DNA, 556 bp, Ricinus communis
  Intron number 2 from transcript 28166.m001053 (locus 28166 .t000016) derived from phytozome v7.0 (chr-ID 28166; pos 1 61204 to 161759)
aggttaaggtaaatttttggttgaatttatattatcctcttcacaaaatgatttaggttctacttttgatgcttttttttttaaaaaattctaaaagaaaacaagtatataaatgatgcaaaagaaataattgagctctttcttctaaagacaaaccaaatctacttgacaaggtatatatttataaaaaaaagaattaaaaaagaacatatatcccaaattctcattctgcaataaataagtcaaactatgatccaatctcacattattttaattatttagatacaccacttgacataagcctaaaaaaacattatccacaaccacaaacacaattattaaaatgccattttcactatatatatatatatatatatatatatatatatataaaattgccacttgacctacaatataataatttaacaaaaaaaaaaagaaaaaagctttttttctttttttaatgtttttgtggctaaagataattcttacttaagtctagttaattaataattattctttttaatttttcgtgtatgaatatcagggagtggct

SEQ ID NO: 49161 - DNA, 960 bp, Ricinus communis
  Intron number 2 from transcript 29648.m002006 (locus 29648 .t000093) derived from phytozome v7.0 (chr-ID 29648; pos 6 72714 to 673673 reverse strand)
cattcaggtaactacttatttattaatgctatctctcttttaatgtgcaagtcagctaaaaagtgtggccttttgtgaatgatggatatggtaaggttttatgtaattatttattatgtgaaagaagaatttatttttgctttgctatggaatgtggttttattgttttaaattacagaaaattaagtttggtatattaatctttttgaaatttattagatgtcctgtttaatatctcagtggcaaagcaaaggatgtcagttgaacatgtttataatgctcgaaaagttatattttgaactaattgcagctctgtcatatgatgagctttgtggaggtcacttactaaaacttgcttaaaaagcctttagaggttaactttaatatcaatttcaaggcctgaaaacagtcattacatgaatcatgacgttttcttccttgactctgcgtttaggcattaggtgaccctgctgcaagtcttatatgacctacatctattttattaagtagtgggagcatatctagaagccattatctgatccaaatgcctgtaaaggcttacaacttttgtagattaatattctgatctttagagtaatgaaattttacacaatggatgggttctatattacttgattaaggtcagtaaacatgccgtaatcccagtcaaaggacctcaaactcagtgtagtttttgtatgtgttgatgcgcatatgcacaaacaccacattgcactcagatattcataggcatacatatgcacatgggctcttgtgatatttcttttattaagatatgtgcttttgtattgatcatgtgtgccctcctgggcagattcatgtgggcttgcttggcccttgttaggtttgcatatttatttcatatttattttggtgtgttattgttgggattctttttgttcagattggttttcaccagccactgtaaatagattggag

SEQ ID NO: 49162 - DNA, 910 bp, Ricinus communis
  Intron number 2 from transcript 29729.m002328 (locus 29729 .t000061) derived from phytozome v7.0 (chr-ID 29729; pos 3 39062 to 339971)
agttgctttcctgctctaaaaactcaatttactgggtatattttgttctctgcttttttgttttcttttttccactctgttttatcttgaactatattaaatgaccaacaactgaagtagttgaaggatgaatttctgaatctatgtaatcttgattcgaaagtggaaatgctgatcagaccttagtagtaataagtggatgataaaagacatggcaaattctatttccgggtggtgtgagaagtagcatgtcatgacattcagtttatgatggtgtttgatcggatgctaaatggtaagagaacaaatagtctcgcttggtgaaatgggattggaaataatggctttatattggccttattggatgtccgttagtagtgactttgcataacttgttatgaattcttgagtgacagcttaagaaattccagctacttatgaactagactctgatagcactatagatgcattggtttatacgttctactaaattgagaggatttcatgagaagtacgagctgaaggtataataatagtcattaaagctaaaacatggcttgctttttaagttaacttttacaaattatctcctttctctgtgtgtttcctcaagattatattattaatataatataatgtcaatccatttttctttgagttccctcactttgtaatggatgaacgaacacaaatattaaatttaagggttgaaattgatgattacatggagtagaatttgctgcttaacataacaacattctcctatagttaatagtgtcatttatcttaattacatacaattgtatactgctgtgccattgatttgcacttcttcgccaattctatctatggagatttataagatttatggaagcaagttctctggtcttgccattaatgtaggagtgaa

SEQ ID NO: 49163 - DNA, 505 bp, Ricinus communis
  Intron number 1 from transcript 29739.m003687 (locus 29739 .t000123) derived from phytozome v7.0 (chr-ID 29739; pos 7 60286 to 760790 reverse strand)
taacttttcagctcatatcacacctcaaaatctaggtaacctgattttttttttttttattaatctcaattcacgccgtgctcctttcagtccttgtattatccttgtcaaaaaataaaaaagccctaattttatctgtatttttttttggcgtggtttgtttcaatatattctttatatataatcttccaactagcggccttgactaatctcaattatttgctagaatatgaacctttttgaataagtttttctcttaatcttatagttaatttcagagacttctgttgtccacgtgttgatattgtttctgcgatcataatttgctcattgaaattttcatattaacattgatttggtttccttagtttaatcctttgattgtatttttttctgctgctaagggttaacttttgttgttgatttcttatttttggctttttggtttaactgctagtaattgcagttataacattttagttatttttcttgtggttagctactt

SEQ ID NO: 49164 - DNA, 604 bp, Ricinus communis
  Intron number 1 from transcript 29783.m000316 (locus 29783 .t000013) derived from phytozome v7.0 (chr-ID 29783; pos 2 11284 to 211887)
ttgatttcagtacaagaaaattatcatctgttgaggtagtatttttattccttttcttgttgtttcattttctttttctataaacagatattatatttaatttactcaacatgtagtggaaaattgattaaatttctgaattagttatccggcgggggagaatgaaatttcaaatgaaaataattcatgttattacaatctaaatttctaatttaagaaaaacttagatagcgagttaatctaatatgccatctgtagacaaaatcaattgtacagtaacatataaaattatttaatgattgttgtatttatattggttaatggtggtaaaaaaaaatcagccaatataagtgcaatatttaatatataatctcaaatgttaatatttaatccaatttgtttacaaatgatgtggtatactgaacctatctataatttcaatatgtctaaatctcaccatatgagtttcatatgtacaatatttataaagaatggcatgaagaaccgagcttaggtgctataacttataaatgcagattctgaaattcttaatcatctttgttaactaacaatttaaaattcttgtttgttggatgaagtctgg

SEQ ID NO: 49165 - DNA, 254 bp, Ricinus communis
  Intron number 1 from transcript 29801.m003076 (locus 29801 .t000021) derived from phytozome v7.0 (chr-ID 29801; pos 1 27725 to 127978)
gctggtggtgggcaggagccattggagcagcaaaggcaagttaaaacactcaaaacctcatgctttcaatttctacaagatttagtctgtaatcttgtatttgctatcaggatttcataaaaagaatgagaatccatcttttcaatttgttcagaaacttctgtcgccaatcctgttttgttttgccataaagattctaacttcgtgttcttttctttaatctcatttgatcacgacatagaaaagagttgaag

SEQ ID NO: 49166 - DNA, 426 bp, Ricinus communis
  Intron number 1 from transcript 29641.m000387 (locus 29641 .t000012) derived from phytozome v7.0 (chr-ID 29641; pos 6 7570 to 67995)
cctgtatatatccatgtcacttgtaattattgtttttgttttttgtgctgttcatatacatatttcaaattcaataaattgttgtttttctttaaaaaaaaaattttgttgtaagctaatatttgcactatagctgtactgaagttttacaaaatttgtttaatatctttggtgtgactccatgtgctttactatagaaagaaaagaaaaggattttaatcgtgtttggaaagtcaaaatctgaattggactctatttagtcaaatccttatttttggaaagatcagagttactataattcagttttttcaacttaaaataaaaggattttgcaaacaatgcctatagattttttgtttaaaaaagttcttcttacctgggatgattgcagttcacaagcagagggacattattccactggatatc

SEQ ID NO: 49167 - DNA, 658 bp, Ricinus communis
  Intron number 2 from transcript 29648.m002024 (locus 29648 .t000111) derived from phytozome v7.0 (chr-ID 29648; pos 7 97528 to 798185)
agcttctcaagtctaagttctgccatcctattttggtaaataaaaattgctactactatgtaaatgttgtgtttatatttatatatacattttgcaggtaagcttatttagtgatttgatctagctgtatacttagctcttaatttcgattttaatgcttgaaatttataaaatgtggtgtctcagtggtagttatccttcaatttttgctgctttaatttttttttttaaatctcgaaaagctaatattatgtggagcatatgatatttctatgtgctctgttgtgaacttgttaagaatgatttgatctggctgctgtatttagctctttcttggtttgcatcttgattatcttgcttaaaaggtattctgtaatggtagttatgttcatttgagctgattttaattttgttgctttattttccacgacggagatggttattttttttttaaaatattgaaaatgtaaataaaggtgattttctatttattttttttaaatgtcgagaacctaatatttataatacatattaatacctcataatgcatatcaaatttgaagattaagatacttattatttcaagattttcagatgctaatcgtgcaatttgttttaagattttaatttttcttaatgaattacaggttcgattggg

SEQ ID NO: 49168 - DNA, 500 bp, Ricinus communis
  Intron number 1 from transcript 29738.m001045 (locus 29738 .t000047) derived from phytozome v7.0 (chr-ID 29738; pos 3 89492 to 389991 reverse strand)
tactccacgctattaaaactgttggtactgtaaaggtaattatacattagtttgatatatgaaacgacatgacactacgtaaggtttttcttttttgtcctttgaatttttctattttaatttattgagctattgaaattttagattattttatcgagtccttatatgcttattattgattttattaagaacatttgattcatattttatgagacttttgtttgttctattgagcctttgtatttttatttttgttttgattaaacactattaaatcctcaatatagataaaaataaaagtataaaaattcaatgaaataaaataaaaaataaaaaaataaaagaataaatttaagatgtttaaaggcttaaaaatattttattttttttattttttttctatgttgtaaattgaagagaagtttgtttcaaacctgaaatatgtaaagaaaaatgtatctacagagatttttgccatcagaattcgggcacgacgttga

SEQ ID NO: 49169 - DNA, 867 bp, Ricinus communis
  Intron number 2 from transcript 29804.m001486 (locus 29804 .t000017) derived from phytozome v7.0 (chr-ID 29804; pos 4 31324 to 432190 reverse strand)
taccgtgctggaattgtgcctgtctccttcagaaggtaaaattttttgtttccgatttctaagacacagtaaatcagttactttcaagatcatatttggacaaaaagaaaagttaacagttaaaatttgatctacaagcaatgagctttagttcaaaatgatgtatatgagattctaaatgataaaaagaaaaaaattatacaaatggaataaaagaaaattgctcatgttatatggaacaagctattatcaatgaacatgaattttattaataatttgttccaatttaccacagttttttcaaattaactttaaagtgttattcttttttaatttttaaaaatctaattatttttttaaaaaataataattgagattagctttattttagttataaaattttaaattattctatttcaattatttaaataagttaattattttgtcaataaaagattttagtatatcacatttcttttctttaatcactttttcttattgagtacttttattatataccaattttttatttataaaatgactatattaaaatatagttatatttaaataattagtataaaataaaataaatttttattattaaaatagaattaaatataaaatttaataactgtttatttaatcatcccattgaatttcagtatagttaaaaatcagttttctttaaaattatttttgaaattacaaaattaaaatatgtataattctaactctagaatgctatgttaaaggggactttcaattgtgtaatatttgaaattagaatttgtatgattttctttatcaagaatttttcctaaattgtttcgttggcctaatgaactgctgtggtatcgccagggtgcc

SEQ ID NO: 49170 - DNA, 731 bp, Ricinus communis
  Intron number 1 from transcript 29706.m001303 (locus 29706 .t000033) derived from phytozome v7.0 (chr-ID 29706; pos 2 88736 to 289466 reverse strand)
ggactaggcagactattaaggctattactgctcaggtattgtactttcttgtttctaacttttgagttttctactctctgtttgtttactgagaaaatgttgaaaaaggaccagggaaacataaagcttttatctttttgtttttttgtgaaggaactggaattgacaagttccaagaaataaaatgaaagagttcaatactatactgtgtttctcatctaataaattggtttaattgtgttaattttttcttgttggggtgaaaataaaatactcataactgttcttttgttcttttcttgctgtcctttttctgtggaactacagagagggtaaggctgtgatttcaaacttcaaagtttagatacaaaaataatgtaaacaaataactcaactaagttcctcttacaaagctgagggatttgtttctgttacaaagaccaatttttggaataagaacagttgaataataattgagtcaaaagagaggcaggcctaattttactgcatggagcatggctttattgtttcctattttgtttttgggaacaagaattattctatgctgccaattcattataattcttttattgtttggaagcaaaacatacaaaatggcttttctaaattcatctttttattcttattattgttgtttttttttgaaacatccattttgttagttacaattcttgcaaattgatgattattcacttcttcagataaaggac

SEQ ID NO: 49171 - DNA, 655 bp, Ricinus communis
  Intron number 1 from transcript 29747.m001100 (locus 29747 .t000057) derived from phytozome v7.0 (chr-ID 29747; pos 4 43126 to 443780 reverse strand)
ttaaaaggtaagctgctattcctacaattctagtttgcagaattattgaactgcaatacaacttttcctgaaacatttctgttttctgcctttcatggtatagatatcataattggctggtacattactttcttctatccttgttttcttttctctttctggagcatgagaagaatgacagcatcaaactaaattgtaatccccttctggaaagtgagataaaagagttatcaggatattgaggcggtcattaaacgatcaattgctctgaaaaaatatagctattcatatataaagaaaacgacagagtaattcaagaataaattaggccaaggaggggttatggcagtgtgtacaaagggaggctactagaatatggtcgttctgtaggggtgaagatcctcattgacaaatttacaagggagaggagaagaatttatcaatgaggttgctagaattagtagaacttctcattttaatatagtttctcttttgattccagtcctgaattggcagcaccagttacagcaagaccagtttctctttaaatactaaggtattacaatatttatatggttgcatatgttaattttattttcatcatcattttttcccgtccatatgttaatttctagttccgcccacttatcactgt

SEQ ID NO: 49172 - DNA, 388 bp, Ricinus communis
  Intron number 1 from transcript 29634.m002061 (locus 29634 .t000007) derived from phytozome v7.0 (chr-ID 29634; pos 5 6961 to 57348)
ccacttcaggcaaccatcaattactcataatttccgttttttcttttcttaataattttgactcgatttcgtagttaatttcactgtcagtctgtcatcaatgtgttttgtttggaatggattatttgggagagctcaattcaattgcgttgaatttctcgtaatatcatgctactcgtggaatgatttcatttctttaaaagtttctttttaatttattttttcagtcgaaagagttgaactcttaaatgactaaatagaattcaatcgaactgattttttgtttttaaaagttcagactgcctgaacaatattcagagattgaaactgatgtttttgttttctggaaacaggcattaacggagaacgtcaatatcagaagcaagaa

SEQ ID NO: 49173 - DNA, 526 bp, Ricinus communis
  Intron number 2 from transcript 29634.m002061 (locus 29634 .t000007) derived from phytozome v7.0 (chr-ID 29634; pos 5 7578 to 58103)
gcaagcttcttctcctacctacgactactcaggaggttcactttttccatttcctattattttcagtttttactattgatgcaagtcaaatatgagtatgattttattttattttaataatatgctatgctgcatcttagtattcttgaaagctagagtgactacaactggattatcaatttatcatcaactacgtaatttgcttcctttgatcatcatgatcttttttttttttttaattacatggaaaactgggacctatagttattacattgaaaattgggatctataattacgtattacgaaactagggtatcttcgagtttgactcacagtgctcgttcatcttaagtacttttttccccctttttctattggaagtgcttattaattttatcaaatatatggaggggaatttttgtttgttatgttaattttatctaatacgtttgccactctaatatggtgcaaaattatacttttgtattcaggtttcgcagattcttaaatattgcaattccaggcg

SEQ ID NO: 49174 - DNA, 724 bp, Ricinus communis
  Intron number 1 from transcript 29805.m001505 (locus 29805 .t000036) derived from phytozome v7.0 (chr-ID 29805; pos 1 93831 to 194554)
tcacaactctgttgatcagaccaaacccacttcaggtttttgtcgatttactcataaagtgtcaaccttttttgatgatggatgatttcattgctaggatcaggaatctcttgggatttgttcatggaatcgttttctttgctgattccttgtctgggtttgttgagtataatttattactatttctgttttactgtaacttttaaagaatgtttggagatttaattgcttggttgagtatcatcgttcgttcgctatgttaattagggccttagcataaaatcttatttgtatttttagctagtttctttgagaaatttgcttcatctggcatccgattgtttccaagttgcggttcttctaagctagctgacaaactcacatgggagcattaagtgttagctcataggtggttcttcaatacatcttatgtctaatacatatggattatttttagctgatatatgataatatattacatatatgatgatgatatggatcagtttttgctgcttctattgcatggtattattacagcaaatacttacctattctaggtttatatccctaatagtctgaaagaacatgtctataagtttctttttctttttccccccttttgtatcatatgcaggccctccctctgaaactgtcaaattccttataatgtcccatatttttgtgtacagagaaattgaggagtcattcccgtacaagtgttaag

SEQ ID NO: 49175 - DNA, 520 bp, Ricinus communis
  Intron number 1 from transcript 29631.m001056 (locus 29631 .t000063) derived from phytozome v7.0 (chr-ID 29631; pos 4 23848 to 424367 reverse strand)
ctcgcttgcttcacgcttacatcgattgccagaaggtgaatataataattacatataactcaaaaaccacaattataatgcttcagtttctattttagcaggtatttcctgtttcttttctttcttttcaattatggtgtttttgtgtgtcagtactaactagtacatggaagctacaagaggaaaattttgcatcactttttagttttctcttaaatctaacctaaatagagagatatgtagagagggactacagttatataggctctttactcttaagcttttaaagccgccgattttcttttttttctcatcggttgttacttgatttcgaaaatcggattccatgaaaaactgttttccaagtttctgaaatcaattttctcgcattaggaactcaccttgttttgaagagtaatttcttctttctttttgcttgatgaaaagtatagtttgcttattaaggccgtgtgtgtgacttttaggtaggagcgccaccggagatagcgggattattaga

SEQ ID NO: 49176 - DNA, 519 bp, Ricinus communis
  Intron number 4 from transcript 29676.m001684 (locus 29676 .t000075) derived from phytozome v7.0 (chr-ID 29676; pos 4 47980 to 448498)
tctttaactgttggtatgcatactcaattctgcagcttagtgttatccagttcccacattttttggatatttttctagcatattgcttttggatattatgaaattgtcagagtttacagttgggtgtatgcggtccttgtctccttgactttttgaattccttttgcttcactcttttggtttgatctactggtttttggtctatcattactttacagtcaaatttaagataattatttggaaatcacaggtgaagtgggccactgcagctattacgctctgctgcgcttcactattctttgctgttacacttatatcttcttttgtaacctaatataagcaaaggaaaaaagttatggcagcaagaactggtaccattatacttaaggcgcagaaatgtggtcatgttgtaaaatctcagcatttaaaaaaaaacttatttccagaatcttatacacttatatttttggtaattgacttgcaggtaacttcttattttctttcagacctgaaattgca

SEQ ID NO: 49177 - DNA, 921 bp, Ricinus communis
  Intron number 2 from transcript 29589.m001267 (locus 29589 .t000046) derived from phytozome v7.0 (chr-ID 29589; pos 3 47453 to 348373 reverse strand)
ggcaaggcgcagattgtcactcctactctcctcaagtatgcaactttatctctgcttctatctgctagtatttaattttctgataatttatctgtatgttgtttcgagaatggagttaaagttgtttcggaagtatttgtattagatgtagaccatagcacgtttatttgtgaaatatacgaagtggaagtaatcatatatgagcgagcataatattggtggaagaaggaaacaatgtgataatacagtagttacaatttcaaggatttcctttttgcgtaagaaggttttctcactttcacaggggaaattagatggttaaaaggatgtgcatatatttgggaaagccgtccaatgaacttgtaacactttacatcgattaggcatatgacaaatacttggagcaattcaaaattcaagaaatgttttatacttcaatatgcctctgaaatttggtggacctatcttctgtaggaggggtggactatcatatatcttctcttctagacatgctaaggggaaagaggaaatctggggggtgcttttctaaatgactttggttgagcctcatttctattgtactatcaaaatccatcagtatttactggagagctctgctgtttttttctggatttggtttttcaccatggtgaattctggaactccatcttttggagaggcaattctgatatttgtaacaggaaattctgcttttatagtggatgtttgccatgatttgtgctaatgtcttacaacaattcagttttagtgtgtgaatattattcacttctcctggttttatgcctctaatttatttggtttagtgtgtggctaatgaacgtttttgacggcaaatatatgttgtgatttcctaatccaaaagtaaatggcttttttctctcattgcttattttcagggaa

SEQ ID NO: 49178 - DNA, 767 bp, Ricinus communis
  Intron number 3 from transcript 29634.m002151 (locus 29634 .t000097) derived from phytozome v7.0 (chr-ID 29634; pos 5 88112 to 588878)
tttccctcctcattataaggttttctcccttttttgtttatccaattggatctttgatcttctagcgcttttattatatgagtgcatggttacttctttctttcttttttcaaactttgttttttcttcgtttctgtcccttgtgatttggattgaacttcattagctactggtggttattgacaaagtaaaagcttactttataaaagcaaagttgccatagaattacctatgaatgatgagaaagtggcaattaattttttgtctgtcaaattgctaactttgcttaattttgtgaagttaacatataatgacttgaattggtaatccattttaaatggaattacctcttatgaggcttaagtgcttcaccatattgataggtttcatcagcttaaatagctgtaaatatgatcttttgttttatttttcgtgtttaactaatgatttcctagttaattaggaaatcaatgtttgattatgttgtcctcgtctccattcttcgttagaacaagcgatactgtgcttgaaccagttgtcatttggcatctgtgtagtcttttgatgcttccttttctcttcagaatccttttaattctttttgggtatttttctgaaaatatgcagatagacatctgtggaataaaatttcgaaatagattaatattatgatataattattgttacgcgctgccttcattaattgacaactatgaggttgatgttactttttccataggtggacattaaagtatctcctggatccc

SEQ ID NO: 49179 - DNA, 787 bp, Ricinus communis
  Intron number 1 from transcript 27395.m000083 (locus 27395 .t000005) derived from phytozome v7.0 (chr-ID 27395; pos 2 6921 to 27707 reverse strand)
actcttaaggttcgggcatctgtatttgttattgatttggaccatatagttgattatgtggaattgcatttatatatcagactataatgtagtagaaaatatatataaattacagttttttttttttttttcaaaattattttatgataaatagcaaagtgttgaccaaaattactgcctttgcttgtctagctgaaataacataacctgaccgcaagctaattggttattttgaataaaaacctgcggatttggaaaggaatttagatttatggtgcatgcttttttcgtgctttaatgttgagatttgctgtttgagttgagagagagagagagagctaggcattacagacaaaatagctacccattctagcctatcaactagtgagaatgccactggcgtccctatccaggcatgatataatcatgtttctgttgatatctgagtgcatcgcacatttctataaggtcttatcctaaaagggaaaatctgagttctgagactactgtgaagatcaattgtttgtggatttaaaactagtttcatgtgaaatagtcttgtttaagggaatttcttcttgttaaactcgggcttctggttttatattttctttatttggaatgtggaactaccacactgtaatatttgtgtatgaaacatgctttgtattcaagaggccgcaaacggttgatgtttgcatatgtatttttgtgaagttcagttgagatagattcttcttggtttctcaattatgtgttttcacattgttagttgtgggacatcaat

SEQ ID NO: 49180 - DNA, 903 bp, Ricinus communis
  Intron number 2 from transcript 28076.m000414 (locus 28076 .t000005) derived from phytozome v7.0 (chr-ID 28076; pos 3 6909 to 37811)
atccaggtgttgtttctttgtaagctctctccctctgtgcttctctaagatatgctttccatatgtttagcttgtacatcatttgctcggatgctgtttcttcattataatcagtcagtttgcaagtactagcaggagtcgtgcagacactaatacataacatttatatattatgatatgatgctgttacagtatagagaaaaggaagaacaaagagctaaaaatgttttccctgcttgtgcgaattacaaagaagtcaagtgcataagcattatggttagccttgtcctaaatagaagatggtttagagtccatatctttgactatgtacaagttctcaataggacctcaggttctacctttgtttattattcaaatattttacgaataccacttaattatctggaatatagtcagttgcacggatgtcactaatatacacactactgccgaggaattcatgagatactactactacgatagcaaatgtcttcgcatgaatctcatgaattacatttactttttttgtcattttttctattatcccaaataaattccatcattgtagcttcattacagcacacaatgattctaatgagtgtgctctagtgtcttgtttatatctgtagttaaattgaatattagcttttaggttaagccatttcacgtggaatatctttcacattttgaatgcacactcgttgttacatggtctaattctagtcatcaatttaacaagtctgaagactccaagtgctgccttttcagtacactgggttgttcttctctgccctacctcaaaagacaaaaaaatgaaagaaaaataacagacacttctgcttatactttggattctcatatttcacaggtctccctcccgaagacatctactttttctgaaga

SEQ ID NO: 49181 - DNA, 709 bp, Ricinus communis
  Intron number 1 from transcript 29709.m001185 (locus 29709 .t000021) derived from phytozome v7.0 (chr-ID 29709; pos 1 02955 to 103663)
tcagtgctaccctcaatatactgcttctcttaaatgtaagcatgctcttccttttctgttttattagctgaacttcaatttcccctttttgttgtttcgtctctttctttttaatatgcaaattatatgtctaaacgatgaattaagagacaggagattaccgggtgtccaattacatgtgaactgttcccttatagcttaagcatggtttttttttcttttttttttgcgactataattgatgattaagtagaatacaactactgcaattagggcagaagctacaaattatacaggtgtcttgtctataaaatgtcgatttgacttaaattgtagtaaaactttagctgtgaatggaagtgcattatttttctgggcagcttgtaccgtcgtctaattcattatgtctaagttgtttaagatttgcattattctacatcatgtttccgttattgctttctgattcctctcaaattatctatactgtcatatagttgtcaagttgaattatggcatttagcttattatgttgtattcgctggtaatgctatatgaaacttatgcttatttttagtgagtattgtgtcactctagtaattttgcttttagtctaacattccctagttcttctacactaatttttaaaaggttcctctcaattcaatctcaactttgcaggcctggaagagtttagctcagataagagtaa

SEQ ID NO: 49182 - DNA, 372 bp, Ricinus communis
  Intron number 2 from transcript 29168.m000385 (locus 29168 .t000021) derived from phytozome v7.0 (chr-ID 29168; pos 1 18448 to 118819)
ctgaaacggagaaggataaggagaaagatcatcgggtatataatttatttatcttcctcgtttatttttcattcaaattcattttatgtgttgatgtatcaaacagattttcaacggatcaattagataatctgacttgtatcagtcaagaaacaaaagatttcttccctaaaagaatagatatagccatattaaaacagaaagattattgtttcatagtaaagaaaacaaaacaaattaaaccagaagaagaaaagcaacggataccatttcatttggcccgttctgaagaactaacaaccgtacaaagataattaatattcatgtttggaagtatttcatttttctctatagagattgaccattgtcata

SEQ ID NO: 49183 - DNA, 290 bp, Ricinus communis
  Intron number 1 from transcript 29767.m000201 (locus 29767 .t000003) derived from phytozome v7.0 (chr-ID 29767; pos 3 1386 to 31675 reverse strand)
ttctctctcaagaagtgtcacccactcataaagaggtttctatcttcgtatctctatgaaagtctgaattttctttgtcaaagtttgtttcttttcttcttattctttttaagaatttgattttagcaagtgggtacccgtttttacttactgtttattgattaattaacacagttgagtctcttgggtttacttaaattgtctatgtttagaagttcatctttttagtcaaagaatctaactttctttttttgggggttctttagaagcttggagtggtggtgaagcca

SEQ ID NO: 49184 - DNA, 547 bp, Ricinus communis
  Intron number 2 from transcript 29727.m000490 (locus 29727 .t000029) derived from phytozome v7.0 (chr-ID 29727; pos 2 20143 to 220689 reverse strand)
tttatttgcgtcacttcttgattctgctattcaaggtacttatctttaaatgtgtagtcgagaagtctcaaaatgtagggttgatgcaagaaacgtctttggtggttttactgatgaggaacttttggtgttattccagggaaaggttatattaaaagtgaaagtgatcacttgtttatagacagatcagaactggtgaccaggggatgaatttacttggtttatggtgtgtgtgtgggtgggggggtggggtgtgtgttggggttcattcaggaagttgtttctgatattattcactgaaaagataatttttcaagaagacttgtctgtcctatagtaaatgcttacttaagtttgtttttggttttctaaactacattctttgggtcagttagggacttaggatggggggatgagacatacctacaggcaggaatttttgttcttgaaaaatatttaatttataacatattgcagctgttcataaaatatcattgttacaatgttatttgttcttctaaaattttagaggaaacgtgcagggttg

SEQ ID NO: 49185 - DNA, 263 bp, Ricinus communis
  Intron number 2 from transcript 29644.m000181 (locus 29644 .t000009) derived from phytozome v7.0 (chr-ID 29644; pos 4 3262 to 43524 reverse strand)
aggttgatgaatacaaaatatctagaaaaaaattgaataaaatgatatgcaaatatttaagcaacttgaagaaacaagagaagaactggaaaacaatcaactcgggcaataactctgattcggaaaatgttattgccatgctaaaaggtgttgaaaaaactagtgtgcagtgtttgagtccatcttatctttcatttctctgccaaaggaaaaatcaaagatttctattgtctcaaaattattgaaaccaaagcaggtatcat

SEQ ID NO: 49186 - DNA, 662 bp, Ricinus communis
  Intron number 1 from transcript 28016.m000096 (locus 28016 .t000003) derived from phytozome v7.0 (chr-ID 28016; pos 2 0803 to 21464)
gcaaattcagtgccgtatttgcctcgaaactgacggtaattttaatttttttttcttttctacagtttctcttaggtaattttgtcaaatttttttgccttttatctgtgtattattgttatcagttgtaacttaacctattggtggttaaacaaattgcaaacgtagagatatatgatatcacttgagtctaaagcttgcttttttttttttttttttataaatgagaataaacttgtcttaaaaattatgttatgtttgattttgtttctgttaaaattaaataaataaataaactttgttgcattaaggctttaattactagtttttagcttatgaataccagcaaatttgttggcttttgtttggtaattttgttttagcagtgtttggaacgtataaaaatgcaattgaatttctatttggtcaattctcatgtgaggaaagatcataggtgctagaattgaattgaattgaataatttggtcaaatctatctcaaaagttacataattttgcaggaataaattaaattgaattgagttcttgcaaatgatttattaaaaacaagagccatatatatataatggaccttccagttcagtcacacatttcaggctgatgacatttagtgcataccttaggtagggattttatcgcgcc

SEQ ID NO: 49187 - DNA, 504 bp, Ricinus communis
  Intron number 3 from transcript 28226.m000882 (locus 28226 .t000052) derived from phytozome v7.0 (chr-ID 28226; pos 2 55722 to 256225)
tccttgtaagcctacttttttctcattttactttcgcattattattattattattattactattattgtttattatctgtttacggcaatcattgtggttaattttgaattccaatgtgtatcattcccaccccataattgccaaggtgaaatcttaattttcattttaatctaacatcccgaacccccacataaacacttctctagatcagtacttggtttgtttcgggccacgctaatcaagtattagcaaaataccattaaaagaggtccgatttatactgactgctgccggagaaaaaaggaaaaagaaaacagtaaccttccttttctcttcctgtttcctgagtggtcagatcaagtaaaagagctgtaaataccatggctgtttttcaacttcttgttggtctttaaaaccatctatacctttctcgatccctccctgatgagtttgcgtgcactccctcaggtttactgggggattagcagcatttttgctgttat

SEQ ID NO: 49188 - DNA, 241 bp, Ricinus communis
  Intron number 2 from transcript 29603.m000512 (locus 29603 .t000004) derived from phytozome v7.0 (chr-ID 29603; pos 3 5888 to 36128)
gggaaacaggtttgtttaagttcttgaaatttattttttcaattttttttatccaaatttcttttctcaatctgggttttgataaagctgtactaatttgtttatttcttgagtttgcttatctgggttttgattaaattgaaatcttttttgggttttctggtcttcttttgctatttatggacgaagagttattatgaaggttaactcttggctaattgggggattttttaggccattg

SEQ ID NO: 49189 - DNA, 942 bp, Ricinus communis
  Intron number 2 from transcript 29691.m000283 (locus 29691 .t000006) derived from phytozome v7.0 (chr-ID 29691; pos 1 39520 to 140461 reverse strand)
caaatcactgccctggtatttctcttctctctctctctcttttctttttgaaatttaatcaattccatcgtgccactgataatgttattgaggcttctgctgttgtgctcgaaaatatttgcactcttctgggcatgcgttaggacataaagtgattccatttgcttattctctgtgcataattgtggttgggtgggtgctttagtttacttcttatgcatcatctatatgtatacttgggataattgaaaacaattaaatgttgtttttctgtcctttacctgacatatatctttggttttttctgaactagtgggcctatgaatttcttatatctaacagcaactgtcgtttgattttagttttttcgtccaaaagaatttaaatgaccagttgcaacccataattagatgctttatcttatcagccattatattgattgcactgactggcataatgaggtaccagtaggaatcattgctatttgacccggacctgttctaaaaaagtcgaggcattttcttagtaaaataaatatgtgatttctacttatgtagttggatagtgtgttactatagcagtttcatatggtcatggtgccatcatgctgatatcttagcctgctgatgtcgttgtcgctctaaatatcagacaacaacataattaaataatgaaaagagattcagaatatgcaatcaatttaatgaatttgtatccaggcatacaggttcccaagtacgtatatgttgacatttgaagctggtatattttttttgcattctgctttgtcctctgtttttggggtttgcgtgggggaggggcttgggatttgcagtcttgcttgtttctcctttatatgtgattgatccgcaaatgattttggagaaactccagtcacagatgatcccttgtctggcatggttgtgaacttcaggagctgta

SEQ ID NO: 49190 - DNA, 567 bp, Ricinus communis
  Intron number 2 from transcript 29785.m000968 (locus 29785 .t000037) derived from phytozome v7.0 (chr-ID 29785; pos 4 22421 to 422987 reverse strand)
agaaggtaggaggtgcattcacacttactaattttctagacgtcacgagattaatctcaggagctttgcaataacaagtctaaacaagtaacttaaaaaggaaagaaatatattagctgtatatttgatcgaggaagaggtttagtgtcaatattcagaggataccataatgatttggtgatgggtatcttttgaacttttctaacactaattcaaatagttagttatgatgattatgttctcttaccaaatttcctaggagaaacagtccactgggtcagtctatataaacttatagtgttaatatgaagtaccaaaatctgtctagattctatagcaaataaggatttctctttcctttttttgttttccccttttggttttgcttgagatgtatgccatatgttggattttttatcttcaagttcttggatttcttttcttttccagtgctacttatggaggtttacattgagatttctggttatccttcgttgtgaattctcttttaaatttttgctcctaaccacagaaagaagaaggctgtccacaagactactacaacag

SEQ ID NO: 49191 - DNA, 940 bp, Ricinus communis
  Intron number 1 from transcript 27766.m000153 (locus 27766 .t000003) derived from phytozome v7.0 (chr-ID 27766; pos 4 5622 to 46561 reverse strand)
ggatttctacggtatctcaccacttgctgctctactttgatcttttttttctaatctgctgctgctagtttttctgtttgttcatcatgctagctctttgattacttttcaccatcaatcttggtcattccatctcatcattgaatattttagcatgatcagtaatttgatatttgattatcagtcatcaattctgattttatttcaactaagtttttatagagtttcaaacaaatttctttaagatcatcagatatgatgtttcaaagaaaatcttaaaaaactgtgctttatggttagcacttttgcattttgtgacatatagtttttcttgttaatattattttggatgtgtggttcttttcatattgcattttgattatctcctaattaatatataatgtaacatataatttatggctacatgtatatttagacacttaaattttatccatttaattattttaacactttaaattccgatattatctaataaacacctcaatttatttttttgtgatatttatactatttcagtgtgtttggtatcgttgttagttgttgaaaaaatagattcagaatttctttaatttaatatataaaatttttaaatttttttataaactgttcttcttaaacctatttttagagaaaacatcaatttaccagtttttttctttttcaaaagtaatttctggatcttaaaaataaaataaaataaaaattaaggtttaccaacctcaattatcaaacataagtcatttggcatcccaagtgttacttataatgtaacattagtatggcatgtacttccaagctattaacttatttattacataaaacaaagaaatgtgttctgctttgatgaatattgaatctttgcatgattcttcatactaaaaactttgtatataaatgacattggcaggtatatcatcac

SEQ ID NO: 49192 - DNA, 348 bp, Ricinus communis
  Intron number 1 from transcript 28830.m000226 (locus 28830 .t000007) derived from phytozome v7.0 (chr-ID 28830; pos 4 4186 to 44533 reverse strand)
gcaagatttctatagctcaagcacgcacttccttagttaagaagctatttaagacagcctaacctgattcttccaatatgaaagcagttaatgtccttgtagcttttgttattctggctctgtcgtcctcttttgccttggcctttgatcctagtcctcttcaggacttttgtgttgccagcaatgatcctaaggatggcggtgtgttgcttctttctttctttgtttttctttttgttctttaatgttttggaatgtgtattcagttctatttttactctgtcaggatataaggttttgttgttgatgttaattaacagtgttaacttttgtatgcagtgttcgtca

SEQ ID NO: 49193 - DNA, 803 bp, Ricinus communis
  Intron number 1 from transcript 28152.m000893 (locus 28152 .t000022) derived from phytozome v7.0 (chr-ID 28152; pos 1 19882 to 120684)
ttacttcagctactaagactggaaaggtacagtatttttcaagattttggttcttgtaaagtggttaactgtaacttttgtttctttttcttggatatcagtatttatgttgttcttggtattcttctgatttaattgtgactcttgagagttaaaaccctaaagaactctcttttaattactttatttttattcttctctattattattgttgttttccatattttggtccctggttactgtaaattttgtctcattttcttgattattagtgattcatgttgctgttcttggtatttttctgatttaattgagacccttgaaacttaaaaccctaaagaacttgtctttttaagttttgtttctttgattctttttcttgttttggataaattcatattataagattgaaacaagattgagtttctatcgactctgtaaattgcaattctttttttcccctctgtgtaagtaaattttccagcaactgtctgacagatgcaaagaattctatgttaattgaatgaaaattttcaacttgaatggttaagaaaacactgagtaaattatgatttgattactagattgaagagtagagtttcaatgcttaaaattaaattcttcttttctttttgaagttttaagaacaaaaaagaaaaaaggacttccattggatcttgcatttgttttctgcttttagcaaatcttgttgacataatttgcatgaatgcattggattttgaatctctttctttatgaatagtgcagagtagatcaccaaaaggtactggacaatcaaccct

SEQ ID NO: 49194 - DNA, 763 bp, Ricinus communis
  Intron number 3 from transcript 29648.m001963 (locus 29648 .t000050) derived from phytozome v7.0 (chr-ID 29648; pos 3 71829 to 372591 reverse strand)
aagatattcaacgggtaaattgttcattgattcttctctacaatgttagaacttcggtttgtttatttagtttttatgcttttgcttcatttatttgctttattaccatgttgatatgttgatgcactaacatgttttcaaacttgaaggacacataatgatgttaatttgtaccatatgttttcatattgtatgaaaccaaagaccgttagatgatgtatcaacaaaatgatttatgaaaccgaagatcgttagatgatgtatcaacaaaatgatttttttctcgtttttatctggataatctcacttttaaaatctcattttttatcatcttatagctttgcatagccgaatcaatttaacaggcccttatctcctggttactttctatatgctattgccaccgtctggttcattttttacgcatgtatatgcccaaccaattcattgtcattctagatacaggaatctcatttttcccatcaatcagtgacttctcatgattcattacagcttcagtattataaatagtaatatgataatgaaattatgttgtgcttttggtcatggtcataattcattcaatcaaacatatatactagcaacactaaaattgctgcaagcacatctggttttgtttctgctgatggtgaatacttgctatatgaaacaatatttttttcttttaaaattgtggcaagcatgtgaaaccttaaattctttttcaggtttggaagaaacttcaaggaattggtaacgagtt

SEQ ID NO: 49195 - DNA, 793 bp, Ricinus communis
  Intron number 2 from transcript 29641.m000396 (locus 29641 .t000021) derived from phytozome v7.0 (chr-ID 29641; pos 1 24758 to 125550 reverse strand)
gcaacgaagcaggcaagaatcaagttctgatacgggtatgcaatccaaatatctctagttattccattttcaagatccataatcatttggttccatatcacgttcgtaatttcttataaaaggtcaattttttctaagaaaaggacttgcagagttgaaggcaatcgtggagattgaaagatgtatatgcatttgaattgtcatttacttcaacaagttcgaaactaaaacccaaccagaactacaattctaatcagtttttgcaggataacaatttatataagagaaaaataaatgtcaaaataatatataatgactagaaatggaatgaaaataagtttacaccaggtcaactaaggctagtaagcttcatatgagtaattaacttggtctgatagttgttcttttcggtttataaactatagtaaagggtactttatggcctttaatctcatgaaatgttagtataactttagctcctcttagattttattttcttttatttacttcatatacatctgattgctcttataacaagttatgatggatcaattattttgtgaaacaactgaggtgatttcttttcttttcttccattagactaattgaggtgattagtggagtcaggattgttaaatgattttgttattatctgcaaattaatgacttcaaaccatcaaaaacttgagaaatgcaactccaatcttatattctgtaaaataagcattggactgctgacctgatgtgccgtgcagtatgctaaccttctgttgctgtccttgtgcagattgat

SEQ ID NO: 49196 - DNA, 290 bp, Ricinus communis
  Intron number 1 from transcript 29780.m001324 (locus 29780 .t000010) derived from phytozome v7.0 (chr-ID 29780; pos 1 05111 to 105400)
cttctcttgagttcgttcttcttcttcttatataatcttttcattcaactatttattataattatttttattttttgaaaagaagagctttaatggcttatttttcttttgatcaatcttgattttgattgattgtttttgagactttggcttactggccttgtttcgattttcagcctatgaaataggttatgtttgtttttttagtgctgcagtgtaggttttagttaatgacacgctgtatcttttactatttggatgcagcaattctatttttgaaatcagagtta

SEQ ID NO: 49197 - DNA, 551 bp, Ricinus communis
  Intron number 1 from transcript 28281.m000368 (locus 28281 .t000007) derived from phytozome v7.0 (chr-ID 28281; pos 5 0722 to 51272)
tttcaccgggtaacctttctttcatttcatctactttaggctccggatttttctttttctttattttttcatttctttaggaacatctaattagtcagattttatacctcgttagaaattatttaagaaaaaaatatatattgcgagaatttagttcaattgaattctattttgtaaaattctcacctttagaaatctcatagttgcttgcctataattctattctttcaacttaaacaaacatgacatttccttttggaagagctcaaaatcatgccacaaaaatgactttattttacaattgaatttcaattcttgcacatgattttatatcagcaaacagcgctaaatgcatatcctatcgatgcacattttcgaacagtagtatgaaatagggttttataatttgcaattgctagtaatagctcgttttgaactcatgtattaccttaaatattgaataataggtgagcaattatgtcaaatttctaaaacttttagtggattttcatgcagacgagaagttattgtgactacactagtcttaacat

SEQ ID NO: 49198 - DNA, 852 bp, Ricinus communis
  Intron number 1 from transcript 29790.m000819 (locus 29790 .t000014) derived from phytozome v7.0 (chr-ID 29790; pos 1 56351 to 157202)
tcacaaggtcccatcttcaacatttattctttcaggtaaacaatacctaagcatttttgtcaattctcatttcttgatcttttctgttaaaattagaataaattttatttatttatcacaaatttttgttcttttcaattgttgactggtaatttataattcattttcttgccaaataattgtgaattttgtctttgctggacaaatgaagcaaacccaatttcttgttctgtattttctttgttttgttactcggattatcttttgtttccatcttttctctcacttgagccataaagcaattttgtgtgattatgtcttaataacagaacaagtgaaattagtcatgttagtttctgattagtgttccatgaaaggcttcaatcttaattaacaccaaaaaggaatcatctttaatgtaggatctgattaataaaacaaatggaattaagaagggtagtttctggttgttctgactgggatttttgtgatgttgacaaaggaagtagataaatgaaataaaaaggcaattcttcaccaaaaaaaaaaaaagaaaaaaggcaatttaaggaatgaagatttgcgatttgaacagaacacattgattaactacctgctactttgtcactgtttgttatggaatgcaatcagtgttctaggtgtcttactgtgctcctttgataaagcagtgatgtaaaaagtattttcttaattcagactccatcttgatcatgtgatattatagaacttcaaaattgacacaatgttaaatctccggagtgattgtaagatcttctatattggagtttgatataaaaaatgtgccagcaaggtagcagaccctcgaggatc

SEQ ID NO: 49199 - DNA, 352 bp, Ricinus communis
  Intron number 1 from transcript 28565.m000333 (locus 28565 .t000011) derived from phytozome v7.0 (chr-ID 28565; pos 6 0471 to 60822 reverse strand)
acggttctgattttcgctactggatctggaattaggtattttttcccctaaaaaacagttcttatattttcttttgtttgttaattttactagaattggtgtcaataagttaaatcttcactgaaaagcttactcgtatcataattaagcagaatacgtgatgttattttgtcttctcttctacctgattagattatgctttgttttcttactgaaagtggttatacttcagttcttataaatatacgctttgttcaaagagttctttgcaaatcttctgatgatgtattatcattgtccctattgctcaattgcagcccaattcgatctctgattgagtcagggtttggtg

SEQ ID NO: 49200 - DNA, 1037 bp, Ricinus communis
  Intron number 1 from transcript 29333.m001080 (locus 29333 .t000043) derived from phytozome v7.0 (chr-ID 29333; pos 3 00127 to 301163)
ttaaaacttcactcctcttgccactactcaaagaggtatgctgttcttttctgatctcatcctcttccattgtatttatttatgcttctgtaacgtaatggaatgtccagctctagttattttcctttcttttgatttctttttctttttttggtaagttcttctgttttggttggtgggttaaattcaatgctggattgtgtcggatcactttcttgtttctgatttttgggtaattggcgtttttagtgttgttttggttgcttaaacaaacgaaaaagagtcgttagaatttgaaattaaccccctttcttgctttatttttgtactatcttgtgaatctttgcttgttatgatatgatttatatgtccactgattaattgccatggaagtgtggggaaatatatctgaattctgaaaattttgaaactaaggtaacttttgttactttgaattcttacttctagttcgatactttgaaatcatttcttgtgtgcatcttcacttctcaaatcagcctctctacaaccttctatcttagtggtctcatttgatgggctttgatttcatgatttttaatcatctagactgagaaatcaaaaaagctttttgtttattttgttaaaagttgaattatgttggatctcattgtattgagtttgatcttgctattggatgtttattttcagtgttttaagaccctttactgctattgctgttttagttttagagtacattttatttatgttgattttagtttctaagtatttaactgtgatccgtcattgtatatctgcaccctacttagcttggtaaaataagatcattttgcttgaccaaaaatgtaaaattatgtgtttgcaggagaatctatagtttattttttagtgaatattctccaactcaaagtatgtatagtattcaggaagtcaattgaagtattagctctctggacttatgcgtgactgtagtttgatgatattgccattgtaacattgcagatttcagttcttcgttgtgagaatttgtaaaatat

SEQ ID NO: 49201 - DNA, 664 bp, Ricinus communis
  Intron number 2 from transcript 29815.m000498 (locus 29815 .t000010) derived from phytozome v7.0 (chr-ID 29815; pos 7 9195 to 79858)
gttctcaagtactttctcttattcattctcactgaaatacgtgtctttgtatttgcatgaaatattcatcagaacttaatccatcttcaaaaatcagtaaatgcctaatcaaatgccttatatctctttatcaaatgttatttatttttggcagcttggtgagagttattttgagtgttaggatagggttcaatgtactcatatgttaaaccaaggaaaaagaaaaagttcatttctttttcattagatgtaagtgagatacatggttattgatttttttaagcgaaagtttttttaacatttagcagattgtttaattagtaaattaatgttaaaaactctctacttggaatcatcaaattggaatctttattcatgaagagaaaattagtaatttcttttgtgaaattgagaaaattatagatgaaatttcacttagaatcatacatgcctgtcctgcagttctaattaggtagaaaaaggtaaaagggtttcattattttgttagtttaggtttgactatgctttgtacttgttgtttctcttaaaaaattatatatttatctgccatgataattttcaaggtattgtattgtcatttacttatatactttcttttcccacatcaggaccgagctttgtcgtttcagtggagccaagattt

SEQ ID NO: 49202 - DNA, 681 bp, Ricinus communis
  Intron number 1 from transcript 29586.m000616 (locus 29586 .t000021) derived from phytozome v7.0 (chr-ID 29586; pos 1 58785 to 159465)
actgattgtatttttcgtgtggctagggtttttccttctaatgatctctagaaaaaaagaaagaaagaaaatgcaaagcatctcttgacttaggtattaacgtataagagagttatcgtgaagatcaaatgtgatccactaattcagatcatccaaggacactgcgaggcaagctattcaaaaccccttgtgcgcaagtctcacaaaaccctttattggtctaatgagcacaactccacgtttttgttacataattttttgtttatataataatatgttttttttctttaatacgacccgatctgtaaactcgttattagcattagagaatgggtaagcataaggccactaaatctcgtagtaaacttgatcattcactaactcaaacaaattgaaattcagactcagtccaaaacactgattcacaattaatcttaactatcaaattctagtattcgatttgccggtataatttggcaagatccgaatttatataaaattacagctgataagtcatttgcacagtatttcatttatactgtgtttgacttttcttttatcatttttaccgtttttctttgagtctaaggatcccttcctcctcaccttcttttaactttctttctcttccatcgtataaccacagctgctgtcttgcccaactatttctcgctggtcagc

SEQ ID NO: 49203 - DNA, 961 bp, Ricinus communis
  Intron number 2 from transcript 29586.m000616 (locus 29586 .t000021) derived from phytozome v7.0 (chr-ID 29586; pos 1 59717 to 160677)
atcgttgaagtttggattttgtttttcaatcaaaagtaaggcaagttgttggtgtgcttaggccttaattaaccaatgaaataccaattgaggtagcagttgcaatccaagagtttgaagggcttgcatcactggagattaatgcattattaagagaggagctcaaccaccactatattcttgttttcttatctggatactaaaattgtttttttttttttttttttttatgtggtctttatgcttgggtaatgcttaaaattattgatggatgacataaattatggttagatactagaatttgtgtctagctttgattcttctagatttgaatggttaatataagcttagtttcaaattgggtggtttttgttttctggaatatgcttgagaatgtgaagctttaatgtggagatttcagatttggactttactattttttagtatcaaccccagaaaagtgtgcacacacaaaattttaaaacaaggttatgcaattagaaggcaaataaaagaatttcacaatgagaataaaagctttcttgatgagttctatattatgttctttaggacttggatttcttctttagagtcatttggtggcagagaattgcttgttactgagagtttatttaagtgtaatccaaatgcttgtttggctattatttctaatgccatggattttgaaagagagaatggtcttttaaggccttcttttttggacaaagggtttaatgtgactgcaattaggtatgattttaactatattttcaaaaatacgtatgcaagtcatggtttagtgaattaaagaaaattaatgttgatcctagagatgtttgcccatattctttctttgaattgcagtggatttggttttattattagaaataagtaaagagatgtatcattagccgtgcaagcataattgatatgatagctgattcaacggtggcaaagggag

SEQ ID NO: 49204 - DNA, 548 bp, Ricinus communis
  Intron number 3 from transcript 29726.m003953 (locus 29726 .t000065) derived from phytozome v7.0 (chr-ID 29726; pos 3 89153 to 389700)
tttattgctaaaggaaaggtaagtactttcttgctgtttatgtgcgttattcattttgactagttaatttaatttataaaatacaatatggttagtttttgaagtttcactagatatttatttctatatcagatcaagttaggttttcccttctcttttaagatggttgccattttagaagcaagatgatgttgtatttgtttttatgggtgtgattaaagaatctagctagtaacatatcctgttcaatcatcttaactgaatcattgcaattcattttcttccttctctctctccttatttcatctgtaataagccaatgacttttcattctgttttgatattctgtttcattgttataatgatgctcggaagggcttatcaaggcatgagcgacatatgacttcttttctgcatgaatctttttgattttcgtcatttgcttattaaggcttatatgtgcttgaatcatcatgcgatttctgaacctttttttttatattccttttgtaggatccaatcattgcaggcattgaggagaaaatctc

SEQ ID NO: 49205 - DNA, 451 bp, Ricinus communis
  Intron number 2 from transcript 29646.m001111 (locus 29646 .t000059) derived from phytozome v7.0 (chr-ID 29646; pos 3 51695 to 352145 reverse strand)
aacccggtactcacctgtctgtttttcttgctattacaatatcgctgctctaaagtttcacttcttttttttcttttcaagttatgggtatctaacttatggatatgacatatgcaacttagttcaaagtggattgattttgttaatgtcatatgtaaaattagacccgttagctggtaggttctcgtttcttatttacactggcaatgcatgtttaattgtgaatttgtgagttcatcataatttttcagtgagtgatgaaattaagataggtggaagtcgaagtggtcttatgtgatgatcttcaagataaactttgttcacatgggcttttaattctactaaattaatttactttttgttctctttatttctcagtgaatcatttctagctgccactttgatttttcctacaggaacttcagcctgtcccagaggcaaattttattgc

SEQ ID NO: 49206 - DNA, 197 bp, Ricinus communis
  Intron number 1 from transcript 28565.m000341 (locus 28565 .t000019) derived from phytozome v7.0 (chr-ID 28565; pos 1 11223 to 111419)
acactttccaggtaataatcattttattgaaaaactgatgtagtagtattagtatagacctatgtgtctatgcatataatctgtatccaattcttcttttcgttgattctatgtaaactttgatatgggttttgttttgtttatatgttgtgtaatgcgtagttgttggatcagacaccagcttcatcactggataa

SEQ ID NO: 49207 - DNA, 551 bp, Ricinus communis
  Intron number 2 from transcript 28565.m000341 (locus 28565 .t000019) derived from phytozome v7.0 (chr-ID 28565; pos 1 11448 to 111998)
ggtgaccaagtctctaagcaagctactattggtacaattttgcttcttgttctgtttttaatctctctcaattcttctatttttatttatacttattctaatactttgcttttatatgctctattatattcttttctattgggtatgttctaaatatgggttcctaacttggtagtctttcttcaagttttatcattttgtatagctaaagttattattcattttacactgatttctttttcgaaaaagaggtgtatgcttgtgtaggcagtttgaatgtcttgtgagatggtcgatattaggttggtattcagattagtattttcaaggtttggttttatgcattttgcaaattcatgaggagtaagatgcacagagagaagagtgcttataattttcaacttttcttggggttgcatgaatggggagatttaagaataaccattttttgtttcatctaaaagaagaactagccgcccaattttcttctttctagtgggcagctaaggtgttcgatttattgattttggtccccttacaatgcagttgga

SEQ ID NO: 49208 - DNA, 517 bp, Ricinus communis
  Intron number 1 from transcript 29813.m001484 (locus 29813 .t000036) derived from phytozome v7.0 (chr-ID 29813; pos 2 17279 to 217795)
ttatcttggaatctgagagtcaagttcaaggtaataacagaagaacccatatcaattttgttttttctttttttagtattggatatggccttcaaagttgttgactttgataatgatttaggtttggtttttggggattgaaaagttaatgtctttattgttgtaatgtcacatgtatttatcttaagtcgttaatttgtgccaaggactcatggtaatatagcaactatctcaagaatgtggttttaaatttgtcttaaaagtggttaaattttcatatgttcataggtttactgaatgactgtaatgatgaaattaatgttattattgtagttatctcatgcagctaaatcatcaacagcatctttgagttttttggtagattaataaacatatatgttaaaagaataatttttagatacccttttgtatgttagagaattatctgaaggttattgtttttaattgttctttgacttcaggggaaccagaggactggaagccccgttccagtcac

SEQ ID NO: 49209 - DNA, 442 bp, Ricinus communis
  Intron number 3 from transcript 29726.m003981 (locus 29726 .t000093) derived from phytozome v7.0 (chr-ID 29726; pos 5 59265 to 559706)
cgttatcaagccgaaagcaagttgtgaattcacaggtttatgatttttcttcttccttattttatttatgatcagcttatttgatatcctgtttgcagtagtttattttgacaaggaagaaacagtattttaagcttaattctttcctgttggtgagaaactgcattttatgacaaataaccaagcctgctatttttaatcatgaaggatatcgttacctattgcagaattcttaagaccttttggttttagaacagcgtataaaatcaaatacagattaaaacttttttgagattaagaatggttaaacaagcagcatgaggaaataatttgattcatctctggcaaaataaaagaaccagtgaagttactggcatcttcttatgtcctcaggaactataatagatacattgctgttcactttttggcttttgtagttacc

SEQ ID NO: 49210 - DNA, 986 bp, Ricinus communis
  Intron number 1 from transcript 29724.m000854 (locus 29724 .t000034) derived from phytozome v7.0 (chr-ID 29724; pos 4 77828 to 478813 reverse strand)
tacctaacgttgatctggtaactatattcattttttccttcttttggttttgcaataagtctgattgtttcattagataaaacattaccatacatatgggaactgtttcaggtaaggacttcagaattggatgtgccttgtgccaagcaattcttttactaatcatacataattgttggttgcatttggcattctaaaaaaattgtctgatcaaggtcgcttagctgtattatagaattttgattgttgtatctttgcatctagcattcttcatctcaatagaagatgcagatcaaatatgacatgcatgaggttaggtgcagcaaagtcttgaagagaacaagcatggagcaccttgaggtcaattccatgggttccttgaaatagttgttaaatgtggtctggctcgtaagaaacattttgttcagtaggtacaggtacaccttaagttgtagcgtaaagatactttatttttagtttaattttgctaaccggttgtcaaaccagtgtgagttggtttgttgtagtcaaagtgaatgctgaaatcttggggttggaattcaatttagctgactgggttttcaactcaacatgagttggttcattgtagtagaagcagatgctaaaatcttgtggttagaaggcatggtgccttctgttggatctactaagcattaggtatcttggactagtcactaactctttaaatggacacttgtataagactttagacagaatagagtataccaaaagtttatcttatgccagtgaatgattcctaaaagttttactctcccatatcaatcaaagatggagctttatcatatttttgctattattagccttgctctcaatgcctctaccaaaagatgcgtgttgcttcttttgttcatttccgtgcttgatgtttgcttaagtttgttgtcaatcatttgcctctgtcttacttgtggactttctcctcttcttggctcaggtaatacatt

SEQ ID NO: 49211 - DNA, 863 bp, Ricinus communis
  Intron number 1 from transcript 28583.m000109 (locus 28583 .t000003) derived from phytozome v7.0 (chr-ID 28583; pos 3 0170 to 31032)
atcacttcaagcgcaagttctatcagcgttacatcgtccgtattatttcttttccttctatgtaacagacccatttcttttctttatttctctcttcttgatttttgtttctaattttcttggattggaaattgttaatttccatatgggttttctctagatttggggatttggggttttgggaattttgaaacccttattattattattattattattttggttaatatcatgggactagtgttcatgattagtataactaattgtgttatgtgaaactcgttatctatggacagactccatttttgcttagtgagttgtgaatttgaagtcttgcaatctgtgtaaatgtgggttttttgtacaattcaaatgatcttgcggaaatgttgtaccttcttaatggatgggagatgtcgctgatctgtttgggaagaaaggaaaatggatgagataggaaaattgactatgagcccacggttttgtttcttgtaattgtgggcccaatttcagtttcctctctttcaggacgaatgaatgtgtttggtgctgcaataagtgtaatttagtttcttggtggtgggttctataggaatattgggagaagggagtatgtgctatcatgctctgcatgcaggctgttgtatatattctgcatgagcttgaaatgtctataatttatccattttgttatagaatttgtgttttaataaattattgttggatataactattgtataatgcagtactgatttttctcttgaaggctcttttttctataggaacttaatagtggtgcatgcgcgtgtgcctaactctcggaagttttttattggcaggatcctgaacttgttgttgaggca

SEQ ID NO: 49212 - DNA, 549 bp, Ricinus communis
  Intron number 1 from transcript 29739.m003662 (locus 29739 .t000098) derived from phytozome v7.0 (chr-ID 29739; pos 5 98163 to 598711)
tcctgatcttcaaaaggcagttcaaacttatatcggtcagtttctggatctttatttcttcatttttattctaataatgtggcttttagattatatctatcgaatgctttaattttctgaagtgtattcccagtgtttttagttcattttaaatcaaaatcttttaaaaaaagatcggttgaattgagaatgaataagtgataatgataagttttataaggacaatgtatgtggtgtgttgatatggcttcggcttgtgaaggttgtattatatattgtagtgaattttttgcttttgctgatatttaggagttccatttagctgttttttgtaaaaacaaatcattgaatttgcttttggtggcattacaagtttcatttttattttttgactttctcccatgtatttgtgatctatctgctgggccttacttaacagttttagattttatttataagttttcttttcctattctgtcactgtattgataatgctgctgctgagctcatttgttatatgtttgttttaattcttttatgtttcttcag

SEQ ID NO: 49213 - DNA, 455 bp, Ricinus communis
  Intron number 3 from transcript 28827.m000173 (locus 28827 .t000004) derived from phytozome v7.0 (chr-ID 28827; pos 5 0401 to 50855)
atagtggtgagaaggtattttgcttacatgaagttctttttctattagtgcaaaggattgtatttatgtgttagttttcttccgttatcttgttcatctccttttcaaactttccttatttacggggataagaatctctatgatcatctttcttgggtgatgccaaacctagaaaagaggtggtaaataaagatattccttagtgagcctattgatctatgccacctaggcaaatcattaatcccatgaaaattctacccattttatacatttcttgtgatgacctgtcctgtctcatttgatgttgaatttatgtttctctatgccctagtgattcaattttatcgtaattcagcttgctatttatggatttctttctccagtcaattttcttttatccatttgattatgaatttgcaggtttccatcttggctggtactcttgctcgtttgga

SEQ ID NO: 49214 - DNA, 905 bp, Ricinus communis
  Intron number 1 from transcript 29804.m001528 (locus 29804 .t000059) derived from phytozome v7.0 (chr-ID 29804; pos 8 97253 to 898157 reverse strand)
gtaggcttattcgtggtgcttcttcatcaagggaggtatggttaatcaaattccacggaaatttctgtcatcagaagctatgcatgtgttttatattttaaattatgaaaatatcatccacagttttaagttaaattttcttattaaacctttgttggtgtttaaagaagttaatgcattgataagtggccaataaacaacactagttattacatcatcttgaacttcactttcctgttatttaacttgagctggttttgaggttcttttgcctgttcatatagcataactgaggcatgtctgctccttttgaggtttaaatcatgaaatattttttttcataatcacattcttcttggattcagtaatgaaagtgcggttgccaatgtatgttcactttcacttgtaatgtgtgttgcttttcttttaattgtaaatttaacttatgttgtatttttcttcttgtgtaaaatgacgcaggggtttcgagtcttgtttaaaaacgccttgatggcacatttagctatcatatatgcagaatgctttaattcttttctacagaacaatcaaggctatatattgctaacttgggtacttatcacaaagacaaaaataaagaagtagcactaaatctttgattagattgaaaacgaggaaattttatttgtaagtgactgaagaataggattggtgaaagtttggtttgtttagccaatattagaaaaaacacagggacgggtagcttttggagagttgaataatttattcagcaatttatcttgtgataacaatgaacttgcattggttacgggtaatgtatagatgtctgctaacttttgtggcatgtgtgctctggctctgcttttccagtgtgcaagacaaggttttgcattaggcttgactgt

SEQ ID NO: 49215 - DNA, 694 bp, Ricinus communis
  Intron number 1 from transcript 29740.m000490 (locus 29740 .t000022) derived from phytozome v7.0 (chr-ID 29740; pos 1 61972 to 162665 reverse strand)
ttcaagaagaaagctcctaagagtaactacttttatttaattataaattttgttttttctaatgcattcactattagatatgatagacactttagcttcaataattagccacttttttgctatgagtcttgtgttatggtaataggaattatattacttgataaattaaattcaatagagttaaggccatgttcggtgggcattatattggcatttattttgaagtctaatgcttcaggattgtcactagatttttattgaattatttagaaataggattgaaacccttgggattatgacattcattttaattccaggagaaactaaagaggccgttattgtgttgctttactattttggttgccaaccggaaagggttggtagttaggagttgagactaactttttgatggctaagctgttatgcaggttggtgctttgccacatgctaggatgaaagtattagttaactctatctattgctttttgaagtcaggtttctgcatgtgcatgtagcaaatataaagtgttttaatagggttcagttggaaagtatgggttaatattgattttttattgagattaatgcaggttcttctgtcatttatgtcatagtaatgctgcaattatcttagtaactggattattttgagtggtctgaagcacattctctttttttttctttactgcagaga

SEQ ID NO: 49216 - DNA, 1014 bp, Ricinus communis
  Intron number 1 from transcript 29726.m003961 (locus 29726 .t000073) derived from phytozome v7.0 (chr-ID 29726; pos 4 52450 to 453463 reverse strand)
cgtccttggcctgtaagtatttcatgtatataatttgactgcttagtatcaaaattattacttttctcattgctgtaactcatacgcatgtcactaaagacctaacacaaagtcttatagttatttcaattcttttatctgcttcataattgatttagaattattaggctgtggactcgtcaaattccatgcttcctgctgttatagaagaattagaatgttaagccttggccatgtgaagtcggcgtttggcgtagtccaattccttccttttctcttttgttattttgattcacactggccttgcactgggtaaaataggataagtatcaaaatcccatgaaaccaactcaatggtatttaaacttgcggtgtgatgtctgattcctttagtaatcctttgggcgaatgcctttgcgtttactcgtacactacctccccgtgtttattgagaaatattctatttctcccctaatctcttataaatgggaggaagaaaaatctcctcagaagttcttttacttcttttgttttattgtgtacttaaacacctcagccatttatctaaacaattcttgcacgatagcagatactctgaagtactaatgcacatgatctttcctatgtatacagttgttgagcaatatgaagttgttgcataattgtgtagcaaactttatttttatttatcaaattcctgtttgtctttgtatttttttattattctgcaagtacagttacatgatgcattgaaataattatatgccgactccaattagtttgagattgaagtttggttggtcagttgaattgtgttgcaattcctccatatattcagtgttctgttcatataagcttgcataatccaattaaatatagagcttgttgcatcaaacaagctcaagcatcatggcacaaacatataaagaagtatggttagtttgttccttttctaattctgagatgtttggcattgcaggctgaaagatcttcaccacaggtgcacgaaagaga

SEQ ID NO: 49217 - DNA, 688 bp, Ricinus communis
  Intron number 2 from transcript 29171.m000267 (locus 29171 .t000004) derived from phytozome v7.0 (chr-ID 29171; pos 9 5208 to 95895)
tccttgttgacattgctaaatctcaggactctgaggtaattcttttacctactttcgattgattctattagttttcttatagtatagatcttattgtgctttgtttcctgccagaattgaatcctaaatgtggaataactattgtttggaatattccttttcaatcttaatgtttggttagaattttgaattttatatctaggtagatattaagtagtataagttgaatttcttttatgtataagtgaaaatagctcttcctttcctattctattctattgcaggaactaagcaagatgtggaattgaaatctattttcttctagctgtcatttttccttgcaatgtggattgaagtttaagcatgaagctttgtcacattgtttgaaataaatcattaactgagttcttgcaaaatcatgtcgatttttatatgatttaatttctttgaaatgccttgtaattttgttttgattgaagttgaaagaattgaattctaacaactatgtactctccaaacataagaatcgactatcaattgaactcttacatttttagactttcaaagaaggggtttgtactgcattcatgagatgtatattttagaaaaactccaatgcagatgtgttaaattatattggccatgcgttttgagaaattagatgctctttttgtaatacaggttggtg

SEQ ID NO: 49218 - DNA, 778 bp, Ricinus communis
  Intron number 2 from transcript 29706.m001289 (locus 29706 .t000019) derived from phytozome v7.0 (chr-ID 29706; pos 1 54687 to 155464 reverse strand)
ctcctatactcataaaaaacaagttcagggtatgttcatttatttctatttccgtgtttatgcagtaaaattctaggtgggttttgtatttttatgtgtttgtgcaggtgagtagttgaaataaggttaagcttttttatgcccattttttctaatgtaggtggatatagagattactggttattacagtttgggaagagctcataatttgattaggctgggaagagatataatttgattaggcattgtttggaataaactatgtgcattgtgcaagaaattatattgaattcttttaagttgaaagaaattaattctaccgactatgatattcaaacatgagacttgattaaagagaattcaattacattaaattcttgagagggtttagggttttgctaatccaatgcaaacttgcaaattcttagcctcaattgagttcaaacttgcaagtctagtacataggtgctaaagcctgaaacttaaaggatagaaataattggcatggaaagtttactttttctgaaatagaaaccaattttaattatatgtccttttcttttctttacaaactcatatctatgatgaccagaagcatatgttttatgctttatcagcaaacttcttcctcctagaaagtgccttcagaagggcattttgaagtagtattcatcagaagttgatcttggtctcatgttcctgtatagtggtttcttttcctgggagtgagttttgtcaactgaaattccttgtaattctttgtcctttaattgtgcag

SEQ ID NO: 49219 - DNA, 179 bp, Ricinus communis
  Intron number 1 from transcript 29706.m001289 (locus 29706 .t000019) derived from phytozome v7.0 (chr-ID 29706; pos 1 55468 to 155646 reverse strand)
gctgcagagtctccaagttctgttcgaaaaggtgagtttaaacgatcaaaaacccatctgtcaattttgatttaattacataattatatggattgatcaatataattatctgtcttctaactggattccttttgaaaaaaaatttgatgcagtggttgttcaattaaaagcaactgccg

SEQ ID NO: 49220 - DNA, 725 bp, Ricinus communis
  Intron number 3 from transcript 29596.m000705 (locus 29596 .t000019) derived from phytozome v7.0 (chr-ID 29596; pos 1 34092 to 134816)
ttgtcaacccaatcaaatctgaacttaagggagaggtatctcttatctattgcacgtaatttatttttcttcattttgtgtggaacagcgttataggacagcacaaatgacaagaaaatgcctatgtttttgtgtactattttgtattggagaaagagtatatatacatcagaacgttttgagttttctcttttactctctttctttttggggttggaaaatgaacagtaataaatggattccttgcacagaccgcaaatcagcaagatttagttttccttttccgaaaaatgcagattaaatgcaagcagcaatataaatcttagggaaagaattatctcctcacatttgaagcttgagccatataaaactatagagctgctgtcaagaggcaaaaaaatatatttaacaaagaagaagaagaaaaccaagaccatctatttatttttctatatgggttcaaacaaattcttgatcgtcctgttattttcccttttctcttcgtttttttcagagtttgcagtttcattgcaaacttcagacgatatttatgtcgaccaagagattccacctgctgttacactgcaaattcaagatagatatgtaattaaagaaccttttttaaaagaattagtttttatcattaaaagttcttattcctaagccataaagaggtgattctttttgcaggtggtgttggataacgggttccttcagatcactat

SEQ ID NO: 49221 - DNA, 714 bp, Ricinus communis
  Intron number 3 from transcript 29666.m001457 (locus 29666 .t000033) derived from phytozome v7.0 (chr-ID 29666; pos 2 41846 to 242559 reverse strand)
aacttggtttgtgcatttcttcattcaagtatagtgctttaattgttgaaaaattcttttagttttagtggatatgctaatgtttgaaatcttatgcttaacacctggttctgaaatttaataatgagtacagcaatgcttatgctaaattaggaaatgtttctgtttctattgacattaactaatgcttgttgcggatgtatatcattggttgagaccatgataaacactaacaaaagaaaagaagtttgaattacttcacaactaattattttgttgaatctaaattatctgacaagtctccaatcccttcccagaattaaagacaaatgaaagttttctaacatttgcatcttgtgaattcgctacgaagtatacatgccttaggaggtgtctcagttgacatcaaaatttattggtttaaaccaaaggttatttagatattattaaataagaaactctctaaaatattgccatctgttcttttaagtacaaaagaattttatggtaaagatttttgttagtgtttatggagctgtggttctctgttccggaagtattatgcttaattgctgttttgctctcccatttcttatgctccattgaaagttgctcgttcttaatacagcgtatagaatagtgtaagatgtttattgaatgcatttacttggctagacaggagtacaaattgttgagatttgcttggcaacaaga

SEQ ID NO: 49222 - DNA, 890 bp, Ricinus communis
  Intron number 3 from transcript 29790.m000845 (locus 29790 .t000040) derived from phytozome v7.0 (chr-ID 29790; pos 3 66759 to 367648 reverse strand)
ctggtttgctcttgtgcatatcttgatgttataatttatgctttgtgcttgatgttataatttatgctctatgaggattaagcacttaatttgtacaattctagagatttcttttacatattactagacttatcttggtctcatgattatatgctttgtgggacttggaatcaaattaagaattttgacacagatgaaagagcacaatgtgaatttagcaacgtatcctgatatttatataagtttctatgcaaatcagattggtgtattgcataggttatgcctgcaaacaatttgattcttctgggagctgctaagtgaagcaacatcacatttgagcagcaattggtttcagatgagcactaacacaagttgtaaacaggaatggattataagaatggtctaaaggaattccactattacaagtttgttcatttcatgaaactaaaatagtacttaatactgcatgcttcatgtgttgattcttcttatcatatagtattacagagtgaaccgtgtaaacagtaatcaaaatgtaaactcaaaaattttgtagatagtgattcttatttcagaagattctaacttgacattaccctacatagcccttccgacaaattagctgaatatatttttttattattttatgtagtctcacattttgacattagcaacctcatgctgtctcaagtgattgtcttataatagaccttagagtttatacattttgtttgccgcctttccaagaaaaatataacttcatatgcttgcaaataagagacttaagattgtcacatgagcttttgtttgtttaatagtataattaaacctagagtagtctcttaatactgagattcatgtggcagatcccaaatccctctcaagtggat

SEQ ID NO: 49223 - DNA, 918 bp, Ricinus communis
  Intron number 2 from transcript 28644.m000940 (locus 28644 .t000047) derived from phytozome v7.0 (chr-ID 28644; pos 2 92670 to 293587 reverse strand)
gtgtcactattcactggtaatatcactctttctccctagctagcagtagagaaatcatgcattatgtttgatttgatcacaacctataattgtctagcaattcaatatttcagatcaaatgactggaactaaattttaaaggttgcaatttttctaatatatatggataaaaagctagagaaaatgtataattctgtgttggatgagacgacaaatgatactatttatcaacaataaaataaattttatatgattttttcttaaaaaatctaatattcaaagttatctaaataatttagaacgtgttgaataagacttttgcagttgataaattattattttaaaaagttttaaaatatatatctatatttaaaattcgcactcgaaaccctatttaaatttgattagacaatcttccatattttatgtgaactttcaaattaaggtaccactccttaataatttgagacttttaagtacaattaaattaatttctaagctaattttgtagcttaattaattaggtttccataaataaataatttttcttataaaaaaaatctctgagctgttctacatattattagctacgctttagaagtcaaaagcttttattataatggctacctactgggtagagtgccttcttttaggtgcggatatgcaattatggaaacccattatgaacattaaaaagatcaaaatagatacatactacaaacagacatttctcataggaatttctttttttaaatgatacatattttgcaccataggatcaaagaatatttcactaaaaatacaccaatttatgtagcaagagggtacacgaaatatattttttaggaattattttcctgaagataacaataatacaagaatcactctcaaattctgaaagctaaacattttttaggc

SEQ ID NO: 49224 - DNA, 521 bp, Ricinus communis
  Intron number 1 from transcript 28644.m000940 (locus 28644 .t000047) derived from phytozome v7.0 (chr-ID 28644; pos 2 93689 to 294209 reverse strand)
acttcattgtaagtagtaatttttcttctcagtattaacccattcctccatggatcacagaagcttgacagtatatataccgatttagcatgaatcattttctcttttctgtcattttttttgggtacgtattttggagtataatagtgcatgtcaaagtttcttataccacgaggcatatattcagaagtcagagtttcctcaaaattctaagagaaaatattgagggtgaaagaaggataaattctggattattacaccataaagataacccggacagtgtcttctttccacttggagttactgcattcttttatttagatagaaattatttttctttgttctcaagattttttaacagggagtacctggagaggagtttattactgaaattaaaataaagaaaaaacctggcaagatgcttgatggaaaggaaatgatctaaattattttgggtaacaatttttgaattgtgggtgattgcagctgaaggaaactaattttacaaggctgtgtagcac

SEQ ID NO: 49225 - DNA, 1007 bp, Ricinus communis
  Intron number 1 from transcript 28470.m000439 (locus 28470 .t000018) derived from phytozome v7.0 (chr-ID 28470; pos 1 68988 to 169994)
aataagaagggtacccctcaaggcactgttaaagtgtgagtttttattctaacttcgttttttttatttcactttataaagtgggtatgagttgaatttcgatgcaattgagtttgtaaactcctcttttttctggtgcaatttgatgattgggtttgtgaatcaagggcaacttgcagtttcatatttaattgttgagtgcaaatgtaaattctggtttttgtttgatgctagattgtttagcaacctctcatttgtccatcataaaaatgtgatttggtaattgtttattttcaaagcaatttcattgtcgttatgataatatttatatcattcaacacaatgctggatgcattcacttattttgatgcacatctttgctataaaaatagtttctctctctgaacattctgttcttttctagttgattttgtgtctttctttcaagttaaatatgcaagctctatacatcagctattgtttcaaaatcaaatttgtgattttggttttcttactcttctgtttgtcctgatgtattcttgtgtttgtatcctcaaacaatacaatcgatggtgcttgtccagttaatggttactattgatgctgaatacaaaattcacatatctttcaaggaaatttttacttctattttcagcttttatgtgactgactcttttcaacaagttcagaaaaagttgttgattcaggcttgtgttttctgcagcattgaattattagagataacctatgaagtaaactttcacagaattgggaagctttattacaactgagcagctagatgatcagtattaacactgaagttaaaatcattaggaactgaatatgttttcttttcttaacccattaatgcttatgttttcttttcttaacccgttaatgcttatgttttcttttcttaacccattaatgctcatgttttcttttcttaacccattaatttacattctgcaggcctgagtcattgggtatagttgttggcatagtct

SEQ ID NO: 49226 - DNA, 488 bp, Ricinus communis
  Intron number 1 from transcript 29482.m000179 (locus 29482 .t000010) derived from phytozome v7.0 (chr-ID 29482; pos 8 0966 to 81453 reverse strand)
gcgactgaacctgtaataccctttgactgtttcttttcatttcgatgttcttaatgcattttcaattttcttctttctttttgttattgtattattaattttagatttggtgttgatttgtgattagccacaaagtaaaccaggttgatgagcttatgagcataatgatatgcaaattctagatcaaaatttgtgtttttatatggcatgttggactatttgaacattgggctgtttatcacatactgtgcctactgttgagctcaattctgaactctatttgtttgctgttacttcctgtctaacttctctaccaatgtttggtcgatatccaatgcttgctgaaggttaaattaactgaattagaaaacttgttatgtatgttatccttttattttgaagccacccattaaatttttctgttctttcttttttcttttggtctttctactctcggagtgattaatatagtactttttgtataggct

SEQ ID NO: 49227 - DNA, 872 bp, Ricinus communis
  Intron number 2 from transcript 29728.m000811 (locus 29728 .t000017) derived from phytozome v7.0 (chr-ID 29728; pos 1 23389 to 124260)
taagcttactcctgagcaagttgcccaaatctctagtaagtggcttctccttctttttttttttttttttttttttttttaccaattgcgctggctgaaatgaatttttgttttgtgatctagtggaagattagggtttaaaaaaaaaaaataattctaatcttattttattacatcctattgccagtttaacaggcatggcattttttaaatgtgtttggcacattctaaaggtagagatttggggtttttctggcaatcattgttttaaaaatatcagaaaaagatactggttttgctgctgtaatttgatagtagtgtttcttatttcaagcatgtattgtttcaaatgtggaagtacatcaatttcaccaattgaaatgatcctttttttaggctgtctgtatatgtgtatgtatgtggggctgttaaaaatggtacagaataaagtggcatgtgcttcatatagggcaatatttttttctcaattgcaccatgcttgtgcaaaattgttctcggagatctttttcctcattcctaagttgatttcatatgcatttgcatgcctttcttgcacaattgtcttttctgtttctttatatatatatataatatttggttttttaatttatattcgaaatgctcccacttttattactccaatgtgatttcaagagcattgtatgcatcagttgcactttctacttatgaattcatatctttttaattaggagtgggaactgtgtaatacttccattttgtgccctttctatgattattaataataagaataagaaataatgataacattttcatgctgttatgcttatcttgcagaacaacctggtgttcttcaagttgttcccagcagg

SEQ ID NO: 49228 - DNA, 357 bp, Ricinus communis
  Intron number 1 from transcript 29629.m001443 (locus 29629 .t000094) derived from phytozome v7.0 (chr-ID 29629; pos 6 00293 to 600649 reverse strand)
tagccgctccctttccttgaatcttcttcgcaaaggtacagtcttccactaaaccctaaaattaatttctttattttgtcattttgttatgctaggcgattagcttatttatatgtcggagtttaaagctttataatgggttttttagtactaattgttttgccttaaaccctaaattattttcttttaactgtcagttagttatctttatttaatctttttgttttgtttttgatacccaattgatagctaaatagcttattaccatgtcagaattataaaacttgtgatgggttttgagtactcattgagcctttctaatttattttattgcctctcttaatcagtggtctaaaa

SEQ ID NO: 49229 - DNA, 759 bp, Ricinus communis
  Intron number 3 from transcript 29596.m000689 (locus 29596 .t000003) derived from phytozome v7.0 (chr-ID 29596; pos 2 9045 to 29803)
agaattgaattggtcattacttcccctttgttaaggtattcgctttctgaaaaactgaaattttttattaatgctttcatgattttctccgagtagatttttcaaattttattttaatctttgtttattaaggttatgactcttgttctaaatgtctattacgcagagaaactgtttttttatttttcccctctttggggctccatatggtgttagacaaattggaattatatgcttggttgacaagtgtatagtataataatatggatgttagagaatttcaaatgattgcggaaaataactttaattagcatgcctatatcttttataaggaaagcagccagtaaatgataattcaaaggcagccataataccaaattgctataatttctctttcaatgcttttaagaactcaatttaagttttcaagaagagcctcgtagcatgtgcaatgaaattttatctcaagtttttgaaggaattgctcttgtatatcacattttttaaagaagtaaaacattaactcattcgggctggtttctcatgtattgctgggatgccatttgttttctccacaaaggaatttttatgtctggaaagtctttttgctggaaactagaagttagagtttgtgatgggggtttctattgcctaagtttgttatgttttacttactgagtaaagcttggcatttcatgcaatttctatcaaagatcctgtggttttgagtctatgatctgaaaaatacattgtaggacc

SEQ ID NO: 49230 - DNA, 324 bp, Ricinus communis
  Intron number 1 from transcript 29794.m003396 (locus 29794 .t000095) derived from phytozome v7.0 (chr-ID 29794; pos 6 22143 to 622466)
gcatcttccttagaatttgaggagcgtattttgaagtaaagctctttcctacattattcttttctttttcccttccttttttaattttaatttcccgtctgtttccttttgctttagaatgacttgactttgatgtattttgtatgtgaagggttttggatgataaatgataattttatataagtggtacctatttggactgctctagaagtgctcttttattgtttacaatatagagttatactaacataagtaatgttgtatctatctctttatatgtttatctgttcagggtgagagaagaaaggttaaagaaaaattcag

SEQ ID NO: 49231 - DNA, 597 bp, Ricinus communis
  Intron number 2 from transcript 28094.m000177 (locus 28094 .t000009) derived from phytozome v7.0 (chr-ID 28094; pos 6 1677 to 62273)
aaggtgggtgtgcttttgtgttactggtgcttaactaatttacagttgaatatgatggatgatttcatagtggtatccatgtgttacacatggttagttggactatgtacgagcttcatctaatagaagtccatattctgtcttggctttgtgactactaatattttgatgcacgcttttgctttttccttttgttggttggaattttaggtgggagagaggatgatgctcttcttacatgctatatcaattttttcatcagctgcactactaagacactagaaggtttaaggattttcatttgtttattttgcgtcctcgcatgagcattttgtacatttctagctttttggttttctcctttttcctgcagctactaactaatttttctttttatgttatttccttttctcttctcccttattgttgccaaaacttgtaattatatttgttttaagagggcatggatattagcatagcttgggtctacccattctacattaaattttattaatctaattcctttactgataattttccttttcttttcggtgcattccaggtagaaaaatttccatttccaactcctccaaacac

SEQ ID NO: 49232 - DNA, 1023 bp, Ricinus communis
  Intron number 1 from transcript 29576.m000230 (locus 29576 .t000008) derived from phytozome v7.0 (chr-ID 29576; pos 7 3618 to 74640)
gagtaaccagggcataaggtaactctgtcatattgtcaatgcaaaaaaattgtggtttggtttcttgaaattaagcgaagttctttacagtattactgaaattggagttgtatcactacttacaaaaacttaattgtaattttgatgttaaatttgtttgcgtttagcaaaatgtagtattgccacgaagcatggttgtaatttacatcttacagctttgtaggaaaaaagcaaaggaaaataccttcaaactctaaaattggccgccctagcattttttttttaatatgtaggcaattatatactgctacttcattgctttattctttactaattgtctatgcaccccagtatgcaattactagtttatatagttcttgaggctgaaagcgctgcttttctacatcatgtcctttcttcagttccagcacatgaattttcttatgaagtttaaaatcattgatcgagcataggaattagaaaaaaagaggattcttttgtatattgattgttattattgtaaattctttcattttgataatttctgtgattacatagattatacctatttgcacaaatacctcggcaattcctgcttgttaatgcattgagcccaataagcatatctttagttggtatggaaataggatctgcaatagctggagataagagattcatatgagaaaacataagtaaacgagcctccatttgatccccatactgaatcccttacaaaaactaatggatgtaaacaaatagcatggcctgaagtaccttgcttgttttgtttaaccttcattgcatgttcatacatatttgcttttttttttttttttttcaataaactttgtgttttagatcctggttttctttgaaatattgtcatattgttaaaaatgagctccagctgcttctattttcttcagataattgaacagcttgctgcattttcgtttgcttgccataaatggctaatatcatgttaaatcttcctataggtttagccctgatccagaaacttca

SEQ ID NO: 49233 - DNA, 677 bp, Ricinus communis
  Intron number 1 from transcript 28694.m000678 (locus 28694 .t000021) derived from phytozome v7.0 (chr-ID 28694; pos 2 04852 to 205528)
tccggcgaccctacttcctatcgtgaccggagaaggtatcacatatttcggctttacttttatatccactcttaaattcaatattttctgcttcgatttaagttttcttctttttgaatttttaacgatttttattatggtatgcatagctcctgttatatgtctatattttaatttggtcacataaatttcatttacttagttacccagttgcaaataccttttatttgagactaaagttcataaccttttccttgttgggtattttttgtgcgtttttgtaaagtacctcatatatttatttttgtatcgacttgttctaaaataaataagatggcgcttaatctttttgtttttgtgatatttagttgcagtgaagatataggctttgtagtttattgactgtaaagcacacatttaataaatttgattcttgttctatttcatgttagttttattttgtgttttattttatttttcagcaacttggaaattgccacaaactgtatttgaatttattcttatctgatttttcgtgtgaatttgtgtttggtttagttatgggccatggattagttagttctggtttgtaatttgttttgatttcttcagttggttcttattcctacgagttttgtgtttgttcagtgattcgggtttcggtggggcattagcat

SEQ ID NO: 49234 - DNA, 310 bp, Ricinus communis
  Intron number 1 from transcript 28725.m000317 (locus 28725 .t000009) derived from phytozome v7.0 (chr-ID 28725; pos 1 03065 to 103374)
aagtacatcgagcgtggccataaggtttttctttttttctttcttttttttttttttttttttttttttttttgaatttggaattacaatctttatgtgtacatatttgggtgtggacgtgtgatgcatgtgaaagatcattaatttactttttgttttgaaattgaagttgttatggagaaaaaagaaatggattttgtaggagaagaattatttaaaaaagaaagtgaattttagtttcatttaaggtggaaaatttagttcttttattaatgcttactgttttctttatctatttggtgttagattg

SEQ ID NO: 49235 - DNA, 448 bp, Ricinus communis
  Intron number 3 from transcript 29191.m000028 (locus 29191 .t000001) derived from phytozome v7.0 (chr-ID 29191; pos 1 5244 to 15691 reverse strand)
tagaggcgcagtcacagctttgtgttttagtactggtaacctgttgctcagagcctttaatttatattcattgaagaactgtatttgtaaatagcaatttcaagattaaattgtaataattcaatgtatagagtaaaagacatcaaatctggatttgggcctacgagcttgactagcttatttgtgaaaatttcataaatcttttagtcaaaagtgtcatgtcaatatgcgactgatgtatgtcaattttaagcgcgaccatcactaaattgttgtattattatagtttctatcttagtttgaactaggactactccctctgtttttgttgtttgttcttttattctttttgacctttagatcatacttcattcaagaaatcatttagcaatttgtgtttttggttttataccaattaattctattcattatcatttctcatgtttag

SEQ ID NO: 49236 - DNA, 377 bp, Ricinus communis
  Intron number 1 from transcript 29727.m000470 (locus 29727 .t000009) derived from phytozome v7.0 (chr-ID 29727; pos 7 3334 to 73710)
cttataagaaacttgcgctggttagaccctttctttttaactaccctgtcaaactttcttctctcttcatcaacttgtcctgttctttctttctctttttgttcttatttggaaaaaccaatgaaaatgaatttatgggtttttgatgttacatctaaaaacccaaaaagagactggttttatattattaaagtagtggttttgatatgatttggcaagagaagttttccaaaaaagtaaaaataaaaacatttggtgtttaagttggtttggtgtttggttaaaatcgattttctaggaaagtaatgaaactttcctggaaaattaaaacgttgttatagtaaaaaagatttgtgtttgtgttctgggatatagag

SEQ ID NO: 49237 - DNA, 839 bp, Ricinus communis
  Intron number 5 from transcript 29581.m000256 (locus 29581 .t000004) derived from phytozome v7.0 (chr-ID 29581; pos 6 2476 to 63314 reverse strand)
agaaacaggtcaaggagtcgcagtcctcggagaaggtaaaagttccgttgtaaaattctctctttcctcttgttatgtatcttgtaaagtttaaatttcaagttctataatatttctgtataatgtcaggattgtatcccttggcaattcattttagtggaattcatttctgagattgggtaattgattaaaagtttcctggactgattgatgttatggtgctataattgatgccggtgggtgtttgcgttgtgacctatatttgatctttgtatgcactgttatggtaaacacatgctacaagcattgtagttttatttgcttctaacactattatgttaatgtaagtagaattgaaatattaatttaacttttagaataaaagaagtgaaagaagaaaggaacattactaatatttgattacatatatatcttactatttatgtgcacatttcttgttatctaaacaaactaactgggctaagattgttccccatttcccatccctcacctacctttcctcttcttttactttgtaccttttttcagtttttctttaaccaatcaagccaactgaagatatttagttttttcaaaagctaaggaaaaggtggtgtgggtttgttttatctacttagtcatattaagcccattgatgtaaagtcaatagaagcatttgcttaacctatgtacaaaagtagcactgaggatagttttgcaaaacatgaaagtaaaacataccaagcctcttatgttgtatagttggatatattggtaggttaatctataactaactccttatttcattttttggttttttacatatcttagataccggg

SEQ ID NO: 49238 - DNA, 442 bp, Ricinus communis
  Intron number 3 from transcript 29755.m000430 (locus 29755 .t000005) derived from phytozome v7.0 (chr-ID 29755; pos 9 1315 to 91756 reverse strand)
gtgtcaagcagtgttctaaggtttgtaattgagaattactacactgagatttgtttattaatagttatgggttcagctagtttatttggacttgttgcataattccttttttctttttgtgctgaggttgtctcattttggacaaacaaaaatcttttgatttctaacttgtactggataaataacttttataaattgagactcatttaagaaacaatagataatggtaattaatgtcagcttgtacaacacatgcataaccaactcttatcgtcttctttttcctcttctttagtcttctgttttcttcattttaagtttaagtttgccttggaattctaatattagatggttttgtaacttgaatttgattttgtctgagttttctttgtttgatttctttgtaggaacgactttgcattatttgtaaatcagtcggtca

SEQ ID NO: 49239 - DNA, 278 bp, Ricinus communis
  Intron number 3 from transcript 29737.m001236 (locus 29737 .t000030) derived from phytozome v7.0 (chr-ID 29737; pos 2 52718 to 252995)
acaattgggagctttctcaagcaggtaaaattttttgcactggttatttctttcttcgtttcctttaatgcttgggatataaccttaggtttccttctgcttaagtgcctggctttcactttttgattgttttgccaaagaaaaatctttcttaaaagttacccttttgccttttgacaggacttttttatcactatatgttggcttgtcttgactgtatttcttcttttttatcccgttcttttatatgaaccttattctctcagctcaattagaag

SEQ ID NO: 49240 - DNA, 699 bp, Ricinus communis
  Intron number 4 from transcript 29729.m002338 (locus 29729 .t000071) derived from phytozome v7.0 (chr-ID 29729; pos 4 00269 to 400967)
tttcatcagaggtaactaattggattactttaggccctctttgtgtaatgggaattgtacttatctggagcaaacagggtgatcaaagaaagttttcaagcagtaatcttgaatttggcatattcaattgagtgtgccataaactagtgctatgcaaaaatgagcctgagcatgccattgctttatcaatataattgccattaactttcccccattttatcacctatcatcttaacttcttggaattatttattcttttatattagatcgttttattaagagattgcttgttaacataagagcaaggacacaacagatcatgcaaataaatgtggtttggattaccccgaggtctatgcttgagccccagttgtcatcgatcatgtatttctgtagttgctttgctttattaatgtgagaacaacgatatgagtatatccttttttgagtcttgagttgcatatttctgagcatgtgattatattttatgccatttgcacttatccagttctttattcagcttctatggattaattttctgatgttgttattattgtatagtatcgacgcctttctatcagaaagttgaacttaaattcatgtgcttcctatttcaaaacatgttctgttaatgctgttcatttttccactttggagatttgtaaaatacaaatgaagagtgaatttgtttgtaggtgg

SEQ ID NO: 49241 - DNA, 407 bp, Ricinus communis
  Intron number 1 from transcript 28049.m000301 (locus 28049 .t000009) derived from phytozome v7.0 (chr-ID 28049; pos 5 4031 to 54437)
ctcttacaggtacttcattcgtttcctctttcctttttcttatcttttctgacatgcagaggttgattttcaagaagtcacggcttactttattagcttgcatttgctcgctgcattagtttgttgataatttctggaatctgaaatctcaatgtttttggttttctttattgataattaaattatacatgttgtgcaagctaattgcagttgtaatatgagtaatttatggctgccagcgcattcccattacaataattttgataaaagaatacctctagtttcaaaatccttgaaaaagacaatctattgacagctactttcctctgcacagttgatcaaattcatttgctttgtttttttaatctttatgcagaaattacaatcttggcaactaatagacaggc

SEQ ID NO: 49242 - DNA, 452 bp, Ricinus communis
  Intron number 1 from transcript 29791.m000550 (locus 29791 .t000025) derived from phytozome v7.0 (chr-ID 29791; pos 2 01897 to 202348)
aagttcttgaagaggctcagaaatagaactgacaggttagtttgttcctctttagaatttagtcaatctggtgtttaataaaataaatgaaagtgttcttcggattcagttgttcagttcgtctttatatgtcagcttgacattctctgagcaacaaaacaccaggttatgtgctgtttctcatatgattagtttagatgctgagaaaaaatagtaaaggaaacaaaaggtcaggaattagatgttcatttgaaacttctgcatgatattactgtaaataaagtgcctagaagattttgattgctacatatctggagaatacgaaacatatttacagcataattcagtctagtgatcaaaaagaggttagagttcagatatgacaattatagttgaccaggtgttttactggaacagggtgggaattgagattccaacaattgaagtcagaa

SEQ ID NO: 49243 - DNA, 962 bp, Ricinus communis
  Intron number 1 from transcript 29685.m000504 (locus 29685 .t000026) derived from phytozome v7.0 (chr-ID 29685; pos 2 28284 to 229245)
aagtctctctattgtgtaagtttaagtagagctttctctttccatgcatatgtttggttggttggtgggtacttttaattcttattcgttcttcacttttttgaattttcttaatgttagattggtgctttaatgtgaatgaacttgattatctgctctgttgttgctttatttgttttttgaatgatcaatgatgcttgttataattttgaacttcaatataactgtggcaaggaagtttttttttttaagtggaagcatattttttccgttttctgtttggttgctgagaaaacacggggagcttaaagaaagtaaaatagttttgcgtctttcacgggtttactgtttgtttttcttaaaaaggtggagtgttttgtctctgagagagagagagcagtaaccaaacagggtgttatttttttcttttttcaaattctctccctccttttcttcctcttttcttcttgagagaatttggtgaattttgaattgtaacatgaaaatatctatatctaaaattttctaactttttaccacagccaaacttgagggtagttttaaattattaattgaagttgttgtaagaatgactataatgacattgcttgtaattctatgattatggatttggagttcctaccttattactcaaatttttagctgataagggtagtttatcgccaaagattaaacatttttagttgacatgtttgtaggaaacagatttaaaaggctatctctacctgatagaagtttcagatataaatgtctacctatgatttttggccctttttttccctatcttcccatgttttccccccttctgctgcttttcttgtggtcacttcatgttactatctctaacctgagcaaataacactcaattataatttctcatgctcccttgtctgattatcttttcaggcttctgcttcaccagatcctaagagcagatcata

SEQ ID NO: 49244 - DNA, 633 bp, Ricinus communis
  Intron number 1 from transcript 29676.m001610 (locus 29676 .t000001) derived from phytozome v7.0 (chr-ID 29676; pos 3 634 to 4266)
gctgaatatatctgtttatttaacaaggtgagcagtgcttcttttacttttgaattttttggtgtttctcttgaaagattggaacttttttttttcttttttgttatctgggaatggagtactagcccagattttcacaaaggataatgctttctgggttcgctattttttgcaattttatcagtgaataagctgcctctttccaaggtctttgttcttagatttgtgggtctaaaagatgaggcaatgggtatgtaaagtgaagcttgacaaatgtgaatgtcctgatctgggttttaagctgacttttttcttatgttttggatttgttagcaccgagcttattggtcctaaatccatattacatttatcttttataaaagtctcatcttttgtggctgtttagctaatatttcaggttctatgattttcttccccttattattgttcctggtggagcaatttcgctctattaacttgtgttgggagctaaaacttctgtgtagcctaattagatcagattagagttagactttagctctgatgaagtaattctttttagaataatttaatgcggtctgttgtttcttgtgtccaggatacagtaatcataaaggctcctaaaaaatctcc

SEQ ID NO: 49245 - DNA, 936 bp, Ricinus communis
  Intron number 3 from transcript 28842.m000907 (locus 28842 .t000002) derived from phytozome v7.0 (chr-ID 28842; pos 1 4990 to 15925)
aggtatatataatatatgtacatgctaaatcttttttttttttttgaaggttttgttgctggccgtgagttaaatttcaagattataatttttcttgcagcaaaggttaaacttctctgtttgtataccagctttctgctaatttgtcaagactgtatcactgattgtacattgttttctatgaactttgtattactgagaaacatgaaacagcggtgttattaataagctgtagtagttggttctgattcagttttctgggagagagaggcatattgcaaaggcatattatatccactttgttctcttgcaagtgaccattataaactaaagcatttagttgtttctattattttggttagtggatgaggcaattgagaaaggtgctactgcctttgtgctgtaggattattccctgtgctccctgccttttgtgtagtattattcttatgattgtaaagtctcttttaattagtgctgtgagatttagattcatttgtgtttttcaagtttaatagatgttgttttgcattttaggtatgtctgtacatctcccctactggaagatgaatcaaaataccccaataaacacttttctagtgattaggtacctttatttgagcattgttaaccaaaccttaaatgtttatcttgggattcttaattacccagtctgttccagcaaagctataaaaaggaaaagctaaattatttaaaagagaaaggcaagaacctcaagttcttaacttctattctgagatatagtttaatggcgtctgcttaggtttctggaaggagaaaaaattctgacatgtgtttttccagcagctacgtttctttttctttcttgttgatgaataaggtcatttttaaaacttgcaccattctttggcttttgtagactgcttcaaccactgcagagagcgaattacctcc

SEQ ID NO: 49246 - DNA, 786 bp, Ricinus communis
  Intron number 1 from transcript 27632.m000173 (locus 27632 .t000009) derived from phytozome v7.0 (chr-ID 27632; pos 8 1866 to 82651 reverse strand)
ctgatctcgttttgtcaccgtcagatctgatctgggttcgtgtttctatttttcttatttcaagtgtatttttcatttaccttatctctatgtttcgtttatttcagctttattattattattgtcgtagttattttttttttctttttagtttggggctacaaagacagaaacccagctccaggtttacctgaatttttgattctaagttagggcttagattatgcttttgatataggtcggtgggttttggttttctctaaacggatcttatgttgacttaatggatttagctgtaatgtgagatgcatttgatagtgtaacaaaataatagttcaaaattttttcaggtgtacgattcatcttggtaaaagagaaagagattgtttttacatgtaaactttaaaagattaaatcttgttctttttcattaatttttgctatgacttaaatccatgtgatgctgaaatttaggtgtgaattcagtttattaggatttttattcagtttcattgttatctgagaactttattgcttggaagtattatgtggttgattctattatatagtatacctgttggagggctaaccaaatcttatattaaagttgatcaaaatttgtccttggaaataatatttttcttttcccttctgatttgtttacgttgtattcatttcacttactatgatgtataattttggaaatttgttcttattgtgaagatctaactgttaccttgcttttgatcagtgcataaaaggggtctcttgatagtgattggcatt

SEQ ID NO: 49247 - DNA, 957 bp, Ricinus communis
  Intron number 1 from transcript 28611.m000104 (locus 28611 .t000004) derived from phytozome v7.0 (chr-ID 28611; pos 6 8525 to 69481 reverse strand)
gagagcataagcgatctgaattccttctcaaacaggtcctttttcttttcttcttttcttcttttctttcttttgcatatatatgagatttttcttcatacattcttcttgaattattattttccttacaatcaaatttcccaacagttacagtgaaacaatgtgtccttaagtcatttggcatatgataaaactgaaaattaaatataaaatttaagtgttgaattttaaaagatgaatgtaataaatgctgaattttttaaataataaatcttatctattaaaaatttattgaacatatatcatatactgtaatatgaatttttaagatttagctattaagtatatatttgaaattatattaaaaatttaaacattaaaaattataatcatataatgaaaataattttaaattaatttaagaacatgttaaaaatacgaaagtcaaataaatatttttttggttaattagtcagaaatgaaagatataataaatgtatagatgtcactccactgaaaagttatagagaaattaataacttagtattttaagtataaattaagttaactattttaacttactatttaagtgattttagacttgaatgaaaattttaagttgagtctatattgttatcaaagcatattaaaattaataaattctaaaaaatttaaaatgaagttggattatcaaatagtcttgtagttatcaaaaaacttacttcgtaatatagaagcttatgaacaacagtacatttctttatgaaattttaaagtaatttttcttttttgttcaaatgaaaaggtgacttggtgaaaaattgcaaattcatgttggtatctaaagagtgattcttgtaagctaaaaacaatccgatagctgcatatttattgctttttctgatatcattttctgtttctaatactagccatttgggcaagtcccggtggtagagg

SEQ ID NO: 49248 - DNA, 384 bp, Ricinus communis
  Intron number 1 from transcript 29751.m001806 (locus 29751 .t000021) derived from phytozome v7.0 (chr-ID 29751; pos 1 11220 to 111603 reverse strand)
ttcctgttgtcactggtgtcgtcattgctagtggggtaagaacttgtaagtttttgttatatattttctgtcttttcttcttagcatggaaagtttgagtgtctttttcagcatctccttttgtttatataggattctttctgcaatttaagtttgtgtacttttagtagtcatagtaaaagaagtgtgtgaattcatcattcctatttgagttatttgaattaggtaaatatttcatagaccctgctatacatggtgtaatttggctatgaatttgcttagcaaactttactttgattactgatgctaattttttttttctgctttttacattattacatgatgaaagggagaaccaagttttcatctctttggatttataat

SEQ ID NO: 49249 - DNA, 386 bp, Ricinus communis
  Intron number 1 from transcript 29608.m000205 (locus 29608 .t000004) derived from phytozome v7.0 (chr-ID 29608; pos 6 4304 to 64689)
acacagaaactcgtgagcgcaagcgggaagaaaaggttcttttacattttctttttcttgaaatctttcttaattttttattttatttttctattatattcaattttctgattgaaatcagaaactggggaaattataatgcgatgcatgacaacccattgagctaaattacctaatacattattaaatctatttctcatattgcatgagatcagagtttcagacctttgatctttctagcccttgtaagaacaacaaaaaagatgcaaagacatgagaagatagatatcaggaaaaaaacaaaaaaaagatggcaaatattctttattacataaccagtaatccaatataaagattttgtattgatcatgaacattgttgggcag

SEQ ID NO: 49250 - DNA, 574 bp, Ricinus communis
  Intron number 1 from transcript 29092.m000443 (locus 29092 .t000002) derived from phytozome v7.0 (chr-ID 29092; pos 1 7327 to 17900 reverse strand)
gcagcattctcggtagaaataaaaataaataaattttatttatatatttgattagttaatttgatctgaacttatgcccgtgcatggcggtcctatctattcacttttgctgaaactaactcttatatatgtttctttctcagtttacaagagaccccattgtgaagatttcataaaattctgttttgaaagatttgtggtgggaatttggtcttctgctctcgagttaaattcttccacattgatcttgtgatttatatttttagttagtattagttaatgaaatcttcttgcatacgttactaattaaattaattcctgatgacaaacaggaagaacttggataatgtcctgaattgtctgatgggagaattgagaaataagctattgtttgcttgggtaagagtcattcaagtaataattgccaatgaatatagatgcaatcaaatgatcattagtaaggctataaattaatgaaaggaaaaatgtatagatcacatttccatttgttttatttattcaatttaagtttaaccatttgcaatgcattttcttatgtacaaggacaagaaga

SEQ ID NO: 49251 - DNA, 637 bp, Ricinus communis
  Intron number 1 from transcript 28357.m000097 (locus 28357 .t000004) derived from phytozome v7.0 (chr-ID 28357; pos 3 1977 to 32613)
agactcaattagcttctgttgccaaggcttctgaggtaatgctagttatcatttctctgttgggtatgctccttttggtttctaagaaaaaaagctaaagcttcaagttttgaaattctcaaaaaaattggtggtcttcatttagagtgtgtttgaaaagtctgaaaatgtaaaattctatttgagttgaattatgtttaatcaactcttgtggttgaaatcaattcttgcaacttaaaacgaagcaagaattattttacagaataaaatcattcctaagattgatatgattttgcaagaattcaattcagttcaattgaactgttgcacaagatttactccaaacaaggccttaatgaattataacattttaattgatgattgatctattttaagtaacctacttcgatttattgctttagaaatattaaacttttttttttttgaatgacctgggttttctatctgttcccctggtctatgctacatctattattgagtattatctcttagcagccaaaatgatgatagataatctataattgagtatgactagctgggtttacatgtttacttattgtattatctcttgattttggcagagtgacatattagcaaaaattaaagctgaggcatc

SEQ ID NO: 49252 - DNA, 504 bp, Ricinus communis
  Intron number 1 from transcript 28829.m000073 (locus 28829 .t000005) derived from phytozome v7.0 (chr-ID 28829; pos 2 8208 to 28711 reverse strand)
ctctacatttcctctttcaatccctctcctttacagtgagttccctctttcaatttgttaatttcattttttttctgatttagtagaaacatatagttggtttcattggactgaaattcttgaaaattgtatcgctcagttttgtgtttcttgctcatgttttcttgtctggttattcaattactcaaataatttatttcatttcaattctcgtcaaattatgttaactgtagttatgatttcagtttttaaatttgaaagatttgaattctagcaattatatgtattcaatgagctgaaggttgttactgtgcatttttccatttttattgatcattattttgataacatagcattgttacttgggattgcaattctgcatttttaattttttttttaaaaacaaaaattttgttttcattgtgttgcctatacatttataactaataatttgctctctttttctcagaggaggctataagggtctgcattgtgcctatccat

SEQ ID NO: 49253 - DNA, 797 bp, Ricinus communis
  Intron number 1 from transcript 29706.m001322 (locus 29706 .t000052) derived from phytozome v7.0 (chr-ID 29706; pos 4 81111 to 481907)
cctattgctggaaataaggtattattttttatttggagtcatttgattttcctattatgtgcttgacgacgggggataaataggaggaaaaaagaaaggaacaattatgaatcttatattatgtattttattggtcaatatggatgtcttttttgtttgattaaactgatgatatttgtggtaaatcaagttgtttaattttgccatgagaagtgcttgttgagttttgactcttgtttccgaactatgtattaccatactgttatcatctagcatttgattacagggataagtttaaaagaaaacgaagaggagcgtatgatttgaataatctcttgttttgtgcttgttctccattgtagattatctgattgttaattatgaagaaaatgcaggttaaggaagagaaacacaaagtctgaaatttgtatatcgtgttaaattggtactgaagtaaattgaatagccattctgtttgaagtaactgacgtaaaagaaatataaagattctcactgaaggtcctttctttctttttcttttttcttttctttttccttttctggtgtggacatattttggaccatcgggatgtgctattaaggtccaaaaaatgttgtctgctgatacacaaagatgatttgttggacattctcttcaatccggttaatttaacatcagcttgctcctttctgtcactgttgttctgtttgtccataatttgcatgacaaatgtattcttatgtagctttgcttgtgactagatattccgattggagccaaaaattcaaggagttga

SEQ ID NO: 49254 - DNA, 792 bp, Ricinus communis
  Intron number 2 from transcript 29660.m000756 (locus 29660 .t000009) derived from phytozome v7.0 (chr-ID 29660; pos 5 4276 to 55067 reverse strand)
atctctctcccggtgtaattactaatacctttttcttttgaaaaaaaaaaaaagaattcttttagttagttaatttattagtgtttgcttttcttataactgtattgtttcaaattgcttgtgaaaattacactcttggccttgtttggagtaaatcacgtgcaattgaattgaattcctgcaaaagcatttcactaaagaattaagccttgtttctatgaagaattgaattcttgcaaatatgagctttccaaacgtgaggacggacgaaatagatttcaattgatttaattcttgcatcttttagacttcccaaacataagaattagcctaatttgcaagaattcagttttattaaattactgcaaatttatgtcacttttggctggattttatttctttcaaaatgcctaattgaaagaattaagctctagcagatgtgacctttccaaacatgagaatttgactaaatagctaactgaactaaatttttgcatttttagactttttgaatactatggtattctatctgatgaaccagtaatctaatctgactttagcatctatctggttaagttactttctcttcagttaatattatcaactcagaaataatgagctctccttgtaagtttgaaggcattttccctgattcaatttattgtaattacaatgctcatgttgtcttattcttctatatagcttagagatctctggcactgatgaaaatgcttgcttcaaattttctttactaatgtatgtatttgtttgcagtcatcttttgcacgatat

SEQ ID NO: 49255 - DNA, 908 bp, Ricinus communis
  Intron number 2 from transcript 29776.m000469 (locus 29776 .t000003) derived from phytozome v7.0 (chr-ID 29776; pos 3 1177 to 32084)
gctgttgccaccagaggtatgcatctccttttgattgaaattatgctttctcagtgctctggcaatttggcaactctagatgaatgaaatatcaaatatagaggctcaaagttgagttaattttaatttctacgtactcaacaaatgtcaatgttaggatagtccaacttttgcatttcaaaatcatttcgaactcagagataggcaatccatcacttgaaaactttatttatttttacagatgtattctatataataaaatgtcactatattttaagaatcataagacttggacatcatgactaggatctaaaattgcagctccaatagtatgacgcttaattttatagctctcctcgtcttggttttgaattcatttctccccccgactatccaacataaataagtacattggatcgatctgtcattagacaggtacttgaaacatagagaatcatttctgaaatttggaatattatggatattttgtttctttttttctaaaagtacagataatgatcagttgtaatgagcctccaactttcaagacttgctgtacacttgaagaagaaaaaagaaacataatttgttactggcaggttcctctcttctgcccttgaattttgttcaagacgctatggatcactagatcatgtttcttgaggaaatgcaggcaaacctggaaattagtattcacattcttggacggccttcaaaacaagcagagtgttttgaactagctttaggagtatctttttgagatttataagagagaaattaagcaaagaaacaattccacacaaattaaagctttctgaaccttgcagtgctgctgattatgttttttttcctctttcctcttttgtgttataggtattgaacgtgaaattgcatctcttcaactagag

SEQ ID NO: 49256 - DNA, 985 bp, Ricinus communis
  Intron number 2 from transcript 29634.m002153 (locus 29634 .t000099) derived from phytozome v7.0 (chr-ID 29634; pos 5 96093 to 597077)
tcccaagtgctaaaacccttggcgagtgggctggcgtgagtatttcaattccctagctttttagatgtgtattttgttttcttcagtttctcaatatcatgcttaactgagtgaactgtttcccgtacattcctcattttaatcgttataaatgtgtatttttgttactccctgtagcttttaaaaataaacttatatagtttttcatgaatatgagcataggatttggaagtcttcctctgatgcttgtgtaaactactttgtgattgggctttctcctgtaatttctcatatatcattaagataaaataataatggatttcgcattccttgttggtcttagcttggataagacagatgttattttagtcaattatctgagagaaaatagaaaaggcatcttttgtgctatcgcttgttgcttattttgcagaatacaagagatgacaataaggattctgtttcggtggtagatagtttgtaaatgtgctagtgtagtgagctatcagtggtccttttccattgcattatgatgttctgtctcgttactagatactttgtaatgtgccattctagtgagctatcagtggtgttcttttggttacacaaaataatagtttcctggtatgaatgtaattgtgtctattgaactaatttcgtactcgtgctatttggcatctcccataactaatcacttcaatatctgctatcttatcagagctaataatttgtctttaaaattatgtttcaatgttcttttgcccacgagctacttcttaatttctattgatgtttgtatgtggttgtgttacgtatcacttctgtttttctttttacctttcttgaagtaaaattttcttctgtttctcaatcaaattatggttctctcaagtagctttttgtgatttgcaactgcatttaaacatcatctcatgatttcggtgctgcagctctgcaagattgactcagagggcaaggccaggaa

SEQ ID NO: 49257 - DNA, 905 bp, Ricinus communis
  Intron number 2 from transcript 29729.m002276 (locus 29729 .t000009) derived from phytozome v7.0 (chr-ID 29729; pos 3 7492 to 38396 reverse strand)
cactcctatacacttaaatcttgtggtaattgttactattggttttgttaatgaattattggtttttagtttttactgtagttagttatttttatagcagttctctgttgttgattatgtttatttgctgatctggtaaaaactaggagcattaacttagtattaatatagtcacagtcactttctaagtgttcaagaagttaaaaatgagagaattgaattctagttagtcaattctcatgtttggaaaggtgatagtatagttgttagaatttcatttatgtcaaactaaacatacaaagaattttgaaggcatcttggaaatgaaaatattttgcaagaatggaattgaattcttgcacaagggtattgcttggaataaatcatgtgcaagaattcaattaaaaatgtatcacttgttgtgtgatttcatttctctcaaaatgccttgtttcttcaagttgtaaaactgaattctagcaattctaaatatgagaaccgactgagtggaatttaattgaattcatttcttgaaattttcagacttctcaaatgctatgaatctgttttcttggttatttgaaattttcagacctctcgtttggaagaacttataagagatgctgaagaacataagttttctgtgcagaaagacaacttatgttcttcaaattttggaagaacttataagacaacttaagttgtcttcatggttatttgattttcctacatgattttgagatgctttctttctgattcaacttcctaatgatttgtgcttgacttttgctatgatgactttttcaatgcctggaaagatacttacatgagagattttaattatttgctattaaaacttagaaacagaaataagttccaatattttcttggctaacaggcaagac

SEQ ID NO: 49258 - DNA, 924 bp, Ricinus communis
  Intron number 2 from transcript 29801.m003155 (locus 29801 .t000100) derived from phytozome v7.0 (chr-ID 29801; pos 5 61999 to 562922 reverse strand)
cttcaaactagaggtattattacttgaattcttttatttctatgataatgatcatttgatgttttaacaacttgttgcttcaaaattatattgaccattgtgattgtgatttgagcttgatatgccattatttattctaatacaatttgtagagctttgtcattgtaggactgttccttattaaatgcataattatttgactgtttatcatttctatgttgtttagaatgaacgtgtttactggttattttcgtttctttcatattaatgcttgaatagttaaggcttactttgtattctaagtggctccatcgaatgtggtcattctaataattcaatgttttatgcaatttagcaatcttttccgaggattacttcaaaaatgtttggttgcacattctatcctcaatttcaagatgtaattgaactaatatataatgttctgttgtggaattgcagtttgtttctaactgaatggtttcttttgatctttttataaaactaaattgtttgtgaatgaaatgtttttccttctgaaagtatgccaggaataacattgttttagtttccccatgtgtatctacctgtaaaaagtatgcggtaaccacagaacagtaagttctattttcttttcaggttttgcagtttcttgatttcttaacatctttaattctaaaatgtcttctacacatttcaaaaatgctaaatctttgagtcctcaattgtttaactattcttgttctgctaacacttggaaaatcattcttgctgaagtttgttacattctaatgccgcattgttcactatatactcaagcctacaatagtttgtagtttgtgaggtcaaatcattcattaactgctactttatgttactcttttgcttacaggtgaaaccattatttctcctggatccaggcaaggg

SEQ ID NO: 49259 - DNA, 359 bp, Ricinus communis
  Intron number 4 from transcript 29709.m001229 (locus 29709 .t000065) derived from phytozome v7.0 (chr-ID 29709; pos 3 24626 to 324984 reverse strand)
tttctgctgtggttcgtgatatacgtgaaggtctcaatgcttttcttttatttctttatcaactgtttctcctgtttcttcacattcagaacactgatcatccaaaatcttgctttagttggaaagccttgtcatgtctttggacatatttaactttccttatgcagttgatttcccattttccttttctgttcaaaccactagtcacctttgattatgaagatgcttggttctcccttggatgtgaagaatcttgtttccaagatttagaggaacttagctggtttagaatctaaaagaactcatttccattgcatgcatcaggtaattggagattaggtgccaagttctttgaaaag

SEQ ID NO: 49260 - DNA, 886 bp, Ricinus communis
  Intron number 1 from transcript 29739.m003680 (locus 29739 .t000116) derived from phytozome v7.0 (chr-ID 29739; pos 7 06655 to 707540)
gccctttccctgttgaacagctccaggtaactgaaaatattataaagattcaaactttttccgtttctaatcaaatggatactaacaaattgatcgtaattatgtctataatcacatgggtgctgtccctttttgtgatattttgagtaaagatgttttctttttgttgtgaattgaaatgggtttcatttgcttgaaccccttcaatttactggccaagactcgactagacagttgggttttgggtctttttgtaatgccgtggtagttggcgctttttatctttgtttggtttttggacctcgttgagaaggaattatgggttttacaaaataggtattcttgaatgttcttgtaatgaggaactgaaatgggattacttgctcatattcaggcttaaaggtcaaggttcaactattgaaatgtggtttgcatctttttgagattttgactattgcagtatgttttttaagcatgagtttttctcaatctcaggtgcccatagtgtataacacattaaggttgtgcagaaagcgttatttttattttgctctcaatgggtagttttaccatatttatttgccttcatgtcttttaatcttcaggttggttctccacctgtcatgttgaaccctacttgcttcggtctcatttgcggcttgctttattttgaaacagcatttacagtttctgataatttctagtcttgaattaatatgttatatcaaattgcattctatatattataagaatgttgcactaattggataccagccttcatatgtattcatcttcacaatatgaagttgtagtttctatcgcattttgacacacttaatctccacctgaaggagtcaggaatcgctgcccttgacgttaagaagct

SEQ ID NO: 49261 - DNA, 394 bp, Ricinus communis
  Intron number 1 from transcript 29648.m001980 (locus 29648 .t000067) derived from phytozome v7.0 (chr-ID 29648; pos 4 82842 to 483235)
accttcaccctaaccttgagtctcgccttgctgctgtaagccctatcaatccaatatttacgtctatcactatgtgtatatatacgcgtctctctgtttatttttcttaattaattattcttgaacttgtaatgttggattgattatacttaggtggcgccttaagcagtagttaattgttgttacttccattttttctttttttgatttttgttttcgttttgtcatttggattgctattagtgtggtatttatttatcttgtattatatttcttcgcgagctttgagagttgtatgaaatataatgttgtacaggtggtcaatttacttttttgttgtatgaactgaattcttagttgtgcttgacttttttacagggacaaccaactgaaa

SEQ ID NO: 49262 - DNA, 974 bp, Ricinus communis
  Intron number 1 from transcript 29806.m000947 (locus 29806 .t000018) derived from phytozome v7.0 (chr-ID 29806; pos 1 19552 to 120525)
tacttcttaaggtaaggtatgtaagagctacagattatgacgtccgtcttatgaaaatagtgtaaagactaatagtcttgtaatttgtatttgactatgttatttacataattaaatgcattttacatattgttcaaaaaaggcttagttgccaaagaaaattattttatatttatatttaaatttttaattttaattatgtattttaatattgattcatcaataatgaaaaagagttaagttgatacaaaagagccgtggacttattctattattaaaatattatcatttaaatataaaaattaattttttttaaaattttaaagttatattaattttatatgtttaaatgataatattttcgtaataaaaatactgacttaatctctctctttttcttaatcgctgtcaaaattcatccaactttcataaatttaattaataattttatctgatgttaaaattgatattaatatcaaaatatgatactaaaatctaaaaattttaaaaagtatttattagatttgatatcaaatgtgaagtataagattttattttttttggtaattaggctttcaaaaattattcttttgagattcaaacagttaccaaaagaaatgccgtgtaaaaggtttattttagaaaaaaaagatatgtgatgtaattttctctaaattataaacaaaaatatgtttaaattgtggggtgcacaaaattaatcgggcccatcaagattgaaacttgaaagaacctcccattttctagaatccataggacttcaattatgactgctcatctgtagacaactgcatttaactccagccttataacaagaattattaattagaggaaatttactttttgaatttgaatataaaaatttaattttcaaaagataagaaaaataaatttaaataatatatatatatatgcatgcagtgtgcagaggaaaaccaattgcatcagtattatta

SEQ ID NO: 49263 - DNA, 924 bp, Ricinus communis
  Intron number 2 from transcript 29737.m001231 (locus 29737 .t000025) derived from phytozome v7.0 (chr-ID 29737; pos 2 15443 to 216366 reverse strand)
tagaagaagatacaaaggcacttcaatatctgcaggtgatattctcttctttgtttttccttttctttggctctaatcactaaaccattttgtgctgcatattatgttttttttgtgctgcatattatgttttctctttggtctttctatttcaaattctggcgtatgtctcgtgaataactaaattagaactgttatttcgctaattgaaaagaaaatagtatatggattgatgtgtgttcgagtttggggatcttttggtaattgaatttttaaggctgatcattcatttagctgccttcgttatgcctggttctagtctaattgtcctggcgttttggggtttggtatttgagtgagttgtcagatctgcaactagaaaagtgtgaaaaatcaaaaaaaaaaaaaaaagaaaagaaaggaaactaccaagggtatgttatccaatacttgtattaatccaataaaaataggttatttttagaagtttgctttgcctgttttgtttgtataatttagttttatgattgaggctctaccaaaaattatgaaaggagttcctttccagcacatgctgcagtggaagttactgaacagagatttcactaaaagatattaagagaaatactttaactccatgagaagaatttatcccttgttccccaaagcctggagcttcgtggagtagtgaggggatgatatgttttgttgttcacttgcactatctcaaaagaaaatccagctagacctagagattcacattttctttaattgtatcttacttacctcttaactatttgtttatatattctagctttttacaaccatctcctataattttgcactttgatatcctacctaatatgtgttacatgtcatggcaatgcagccagatttggtgctgttcacaggcaggttttcttt

SEQ ID NO: 49264 - DNA, 898 bp, Ricinus communis
  Intron number 1 from transcript 28162.m000125 (locus 28162 .t000003) derived from phytozome v7.0 (chr-ID 28162; pos 3 8697 to 39594)
cttgggatcctctactagtgatttgtgctcttcaggtaaatcttcttagttgtgattaaagattcaattttattaataattcttttgctaattttgcttgatcatgtctttatttttttttatttttttttctttattctgaacaggtataattaagttttttttatcaattgtactccatgaggttaactgcaaatacgtaatcttgtttcatcatctggcttaatatagcataactttaggattcaaattttagtttttcttttttctttattaaagatcaatggattatatctgatacgtataaattaaatagtttgttatttctttttatagatatttatttgattcttttgtttgtttgtggagggtctcattaatggagctccaacaaaaagactttgataagaatattctcagtttctgttactatgaattatcatctattgaagtgtgcaattattgtgtagaatttctatttctgatatgacttgagacagtaaggtttcatttgttatttattagagttttcatttgttatttattggagaaccattcttttaatttttttcttttcctttttgttattttcttaaatcatttttttcttttacatgccttcccatttctgggctgcactgttttgctttgttcattgaatattggagccaatgtattattataaatacaccatttttgccatttaattgcgaagaattgaacttgtaatttatcctaaatgaagcaactgtcatatattaaagtttttctggtatgttgaaacggatgttgtttccgtttagtactcatacacaagatgctgctaatcatgcatcattttagttggtggtcacttcaacactctatcaatttttctctgcagaatttacaaatccat

SEQ ID NO: 49265 - DNA, 949 bp, Ricinus communis
  Intron number 1 from transcript 29577.m000444 (locus 29577 .t000001) derived from phytozome v7.0 (chr-ID 29577; pos 8 665 to 9613)
gcctccatcccttgctcaagggtttgtttctgttcttcttttttcattctctttatatctcttttagaatattccttgcatgtttgaatgtgtgtattttttcttttaggaaaaagaatcgattgtgttttcttgttaaattttccgggacatgtatgattcaagtatatgaaccaattgaagaattgggttttttttttctttcactttttgctgtatttctctgtgcagtttttctctctttttttttttttttttggtcttttgatagggatgctcaaaatttttcttctctttttcctctttgcaaaggattgtgtagtcatatacaattttgtgagtacttgatttcccaggtagaaattgtctgttagatagcaattaattaaagtgatgtgtaatatactgtttgttttagtggaaaagttgttgagggcttgatgtcaatggttaacatttctgtgtataaaggggctgaggttaataatgaaacagtgaattcaggaaatgaatgtgaagttgggggcataatccaggcgaaaggattcaaaattctataacctatagtggttcatgattggggaacttcacaatatttttctaattattgtaagcatacattgcaagttgaatagtgtggcatatgaagttcagagaccatcatcgccgtaaagacttgtgcaatttttcatagtttttcctggtattatctagtaattcttgtatgcaatgcttggattggataaagtgaaacaattgcttggcttttccttgtcatgtgtgttttatgctaaacaactattctttccttttttccatcatcaagctgatcaccttttacagctttcttttagtattctgctataaacattgcaaaaatggtttagaaccttacttatgttatcatactttaggtgaggagtgggctttgcatacggccaggtgcaag

SEQ ID NO: 49266 - DNA, 613 bp, Ricinus communis
  Intron number 1 from transcript 29269.m000243 (locus 29269 .t000005) derived from phytozome v7.0 (chr-ID 29269; pos 4 5120 to 45732 reverse strand)
attgctacttcttgtttaactgtctcttccagaaggtaatactaatatataccctctctatctttcctcttaatttttaatcatgtttctgctctgcaaatctatggcttctccttgatttccttttagtatggtttctttaatatggttcatttttcaagaaatgttttgactcaacaggtgagcctttttattatggttaccatgcttgtattctttaagcaacaagtagatatgtttcttgtccgtgcagcatagaactatgagagctctcaattggttttttaaggaacacgacattctatctttctccttaatcctacccctatcaaacacatattttctttttctttcttaagaatccgatcatgaatattcattaaaatataaggtttgagttttatcattcttgttttctggttctcaacttatatggaatccagctatttccccaaataatgggattgtttcgatagggccatctcatcaattttggtaatagatttagattacatgacaaagattttgcattcaacatctacaaaactgaaattacataattatgaaaatgggaataaggcattaaagggtgtgctttcagcaagttccagac

SEQ ID NO: 49267 - DNA, 458 bp, Ricinus communis
  Intron number 1 from transcript 27894.m000797 (locus 27894 .t000025) derived from phytozome v7.0 (chr-ID 27894; pos 3 63603 to 364060 reverse strand)
aattgttgagcctatagtagctgacgtcttgtttggtatgatttcaaaagactaaaaaggtatttatagattttctttttttacttttgagaatgctgttttttctctcatgctttttgatacttcccaattctatctattctttctttttcttgataactagtgaagatgaagattaaataggaggatttatcttatagaaaatagtattttaagaaatgaaggttcttgatttacttctttaggggaagtgggtcaggactattatatgattgtttatttggatttcattgaatcgtttttctatatggtgttgcatgtgctattagtcattagtatttctttcctctcaactaggtgatgtctattcttaacgatgctggctttttactgataaatgctgctgctaccaatcttttgcagagaccatcagacctgatacatcggaaaacaccatt

SEQ ID NO: 49268 - DNA, 687 bp, Ricinus communis
  Intron number 1 from transcript 29333.m001072 (locus 29333 .t000035) derived from phytozome v7.0 (chr-ID 29333; pos 2 66083 to 266769 reverse strand)
ttcttcttcctgtgtggaatcatctctaaaacctggtcagtctgtatcaatactgtctactagtctatgcacttgtttttgtgtgtcatagacgttgtttgctaacatagacacagcacaacatagaaacatttacaaaatatgctagttatttttgtaatgattatacttgataatctgaagtaatctcattcaaaatgctgaagcacaagagtgaaaaacatattaaagtcaccatgtgaaggggatctgcttattttctaaccacgttagctcttgcactactattacctactaaaagtaagaaaatgcacatgaagggaagaacataaaatggactgaaattaactgacaaatacttctttctaaaggcatcaaagttgattagtaaagccaaattaagatgtccaaaatagagaacgtggtctggttctctcttgcactgtcagaaattcaaaatagagacatgtagtattagtaattcagacatttcttggacattgtgcaaggctatgaaggcagaatataggttagatggacgtacgacatggacatgactgcaaagcacgggtgtccatgcttcttaggttcaaatttttgcaatctgatgtgctcaatttttggttcgaatgaatgttccgtaatgtgaattacctttgcaggcgatttaccgtgtttacatagatt

SEQ ID NO: 49269 - DNA, 614 bp, Ricinus communis
  Intron number 2 from transcript 28546.m000074 (locus 28546 .t000003) derived from phytozome v7.0 (chr-ID 28546; pos 2 0011 to 20624 reverse strand)
gaaccatcttacaagtgagtcaccaatcaagtctttgcgataggtagttgagtccatgatgcaaactttataaattttcaatcacgcaatgcaaattttgtgaagtgtattcttttataaagtatggtacttcattgcacatgccactccctacttgttcattaaaacttgcagttacctctcatgtgacaacattactctttaaaggaaacaaaaaatagtttctgtcccttcaatttttttgggtgaccactgatgataatccagcatccacatcaaaggatagggtataaatattcttttgcacatctcaacacataatctgagttattgtcaagcatgcaaaatgagatgtcagtgtaacctttactcaaatccatatgtttgatcagcacgcattctttcttttgcagatatgaagtttatttactactagagtatcttatagcttttcgttttcaggtcaaaattcaatgtctaacaccaagagcgaacctcaggtttgtagtccaatgcataaattcttacttttagaccattatgtttttatcggttctgaaagtgttaagctcctttttcaaagggaggagcagtcagaagagacagattcacat

SEQ ID NO: 49270 - DNA, 608 bp, Ricinus communis
  Intron number 1 from transcript 28359.m000273 (locus 28359 .t000001) derived from phytozome v7.0 (chr-ID 28359; pos 2 982 to 3589)
ttaagcaaacaagcaggtacactatgattttagctttagcatacaagtgcttaatttattctctggttcatgctttatgttgtaataatgtctggtaatttgttttttctcttgcagatcaagtattttgtatagatttgtgaatcacccaattttagctttcatatacttctctcagagttgaactgcaataggtctttaatagctcatgattcttgaagtgtgaacttttcattgcatgcttccactaacattatgttctctactaaaaaattcaagttttttttttttgcttttacgtatacatcatcctttttaattatttaaaagcagctgtatggttttaaattgaaaattggtaacttttttttttcttttcagtcttctagtttttcattttatgtgctttctgttttgatcaaaggaaaatggattctgtatattcttgtggcgccaactgagtcaaagacttccaataaaacttgtatatgttgctgctttccggataatgattgtattctaaattgagctaaactatgcaggttgattgttgtatgcaaactgacttatatatatatagaaccaagaagcggtaagagtgacttcag

SEQ ID NO: 49271 - DNA, 267 bp, Ricinus communis
  Intron number 1 from transcript 29788.m000325 (locus 29788 .t000008) derived from phytozome v7.0 (chr-ID 29788; pos 4 7193 to 47459 reverse strand)
ttctgcaaggtaaatacccttttgaattttgatacctaaaaagttgttaatgaatgttcaagttctgatatatttgtatactatgaattctgggttctagtttgatatgttattttgattttaatcttcttctttttcttttttcagtttctttcaatagaatactagttctgataatatgttttagatattcttttcaggattattgatcttattcttgatttgtgtataggtagtggtgtagctggaattgtcctaccagaagca

SEQ ID NO: 49272 - DNA, 832 bp, Ricinus communis
  Intron number 1 from transcript 29625.m000695 (locus 29625 .t000022) derived from phytozome v7.0 (chr-ID 29625; pos 1 26285 to 127116)
agctaagcaaaaccgttcttttaagcttccttcaggtgggttttctctatattttctcttacttcttttaattggatttggttttagataatcttttttccttagttttgtttaatagtaattcgaagtagtgattcagaatctgatgtttgctctctgtttgattactgatatgaaattttaactgggaatgtttttttcttttccatattattggttcttagattagaattagaacaatggaatttatttgtgttgttgatttgttgcttgctgtgaatttctttgcttgtattaagattctatgagcactcgactatttcaagctgtcaattttacttagacaagctttcgacatttgatttggtattatagatttagcttttatgtaaaatctgaaatattttagttgaatagaaccattccgactcacttttggcgcttgaacaaatggattcttctttttcccccttatgtcatctttgccagatgatgatcctatcattctgtaataagtaaactatattgcgttgtacatttgcatcttctgtattatgatattcacatgctagatcagggcaatagcaatgacaagacaaggcatgaaatcgtgctcaaactcacagacattttcaagtaagagtttgtaggactaaattttcagcagcactgaattgcaatttgtatattggtttacgtactgctgttgtgttttctgatttcgtgctttggtacgaattggctcaattctggctctaattatgtcaactgtgtctgattcgaatttaatatttcagggattttctcgaaaatattattggtcttgtttgtg

SEQ ID NO: 49273 - DNA, 869 bp, Ricinus communis
  Intron number 3 from transcript 27999.m000061 (locus 27999 .t000001) derived from phytozome v7.0 (chr-ID 27999; pos 1 0015 to 10883)
ctggcccttctgaggtatccattcagcacttgatgagattgaatagttcactcccataatcatgccatttccttttccctctttttttttttgttttgaaaaaatttcttttatcaatcaaaatgttgcctgttgctattcaagtattctcgctacttggtcacaactaaaagagcctcatgcttggtctagtgtggtcatggaattgacattctcaacatttgtgtatgttagtatcagttatgaacatgcgagggatctaacaattccaaactaatacaagaatgtggatggagattgtataaattcttacagttcattttgagtattgagcgtgtgacattagtagttcttaaaatatgagcaagagctttagatggagatcatttggaaaagattatttggatggaaatataaagttaagaagaagtgataagtatccgatctaggatggaaatagaagatattgttttagaaacagggaataagttttaacagttgaacaaaatatgatatttctggatgaatgtgcaatagtaattttatacttcaaaaacatttcatgcacttaatatcatgtcattttgaaacaagtttttgattgatctcctactgcagtgggaagtgcagtagcatttgctcagtaaaactatgggtggactagaagaaaattgtttcatgtaattgctgtatattatttcccgcagtctgtttactggctggttaaagttttctctaggccttactaacatctgcaaacattgttagagtgattgattttcagagctcgtgaagcttaggagttagtttgattttcccctatgtctgaaacaggtgattgtccgtaagtgggttcgtcaagaggaacg

SEQ ID NO: 49274 - DNA, 685 bp, Ricinus communis
  Intron number 1 from transcript 27471.m000401 (locus 27471 .t000001) derived from phytozome v7.0 (chr-ID 27471; pos 1 2869 to 13553)
aagtaagaagttctcattaatatgtatcactggatttcgtgatccttctgtgtatatataaaaaataatatatgaatgcattgttcttattatttcttgatttccgatgcaagaaaatttcatatcatcagtattgcattgataatcatccttcatttgggtttcttattcttctgcatcactaatataatcatttattggtagcactcatgttttcatcattttattatgcatgtaattgcatagaatgcacatttttcttagtcacattataccaattaatgcccaaaaattacagaataaatttgattcttcagttgatttgagactccagcaccttggctgtctgctgcaatattttaattaatagttgttgtttcctgcattctattggagattgaataacctggtcatttaatgctattaatgtttccaatatttggataatgattggactggaaaaattttaataacatttggattggatgattctctatgctgcatatatccaataatacttgtatgcaattgttccagctggttcagatgaatgtgaaactatatcactaaatatatatcccacaagtattgaactaaatggaaataatttggattatgactgttctaaatcctagttccttctgatgcaggttgttaaggttgctgattttggagttgccagagt

SEQ ID NO: 49275 - DNA, 523 bp, Ricinus communis
  Intron number 2 from transcript 27471.m000401 (locus 27471 .t000001) derived from phytozome v7.0 (chr-ID 27471; pos 1 3606 to 14128)
gctcctgaggtattcctttacttggatgtggacttcatgacacaaatttacagcataaaggggacatctgatcttccatgacaaatgtgttattctatgtctaatgacttgcaataaatgatgtttttttctatattataatcgaaaagacctgctccctaatgatgcagaatcaggcattgattcatggaaaacaaataactttttgaactagtaacattactgattaaataaaatgattctcaattcttccttctgtttctccatcatccttagcatttcatgttgttttgattatatgtaggtcattgaacacaaaccatatgatcataaggcagatgttttcagttttgcaatagtgttatgggagctcttaacaggagaagtatgcccctgcattcttttaacagttttttttttataaaaaaaaaaaggcttttcatgaaattctatattaattgatttgttgtgcacaaatcttctcttgttgataactttatgttacaataatctcagctcccat

SEQ ID NO: 49276 - DNA, 191 bp, Ricinus communis
  Intron number 1 from transcript 29739.m003783 (locus 29739 .t000219) derived from phytozome v7.0 (chr-ID 29739; pos 1 336216 to 1336406 reverse strand)
aatttaaccatctatacaacgttaactatttgacctattttttcatctattgttattatcacataaacacattactgattaattattttttgtggttaaatttgattcttttcgattcggctattggtttcatatttttcttgttttgttctgtgactttgcagtgcttcttggaagcaactcagcaaggc

SEQ ID NO: 49277 - DNA, 959 bp, Ricinus communis
  Intron number 2 from transcript 29804.m001556 (locus 29804 .t000087) derived from phytozome v7.0 (chr-ID 29804; pos 1 095332 to 1096290)
ttcgcctttcaagtcaattctcttattattacaaactccaaacttgtttggtttgcccccagctacttcctagaaaatagacttttttttacaattaataaataaatcattgaaaaataaaaataaataaagctgtacgtgaatgcaaaatttaaattaaaatgagtaaaagataaaaaaaataaataattaaatatagaaaaaaactcattaatgaactaaaattagtaaataaagataaaaataatatatcaaatgaatatttaaatttaaagcaaaattctgtaatacagcaaaaaatacaaatacaaatataattaattaattaatttaaaaaagtacatatagaatttaaattcaaaaaattgttattataacaattatagattaaaaagaagaaaaaaaatgtccctaaaaagttatttatttatttatttatattttaagtgcaagctctaactaattgtcaattgtctagttaaaagcttactttgaagagttgttggaaacactggcgtaccaattactctccccattctacacgaaatgtttcatttttaaaattaaaaaaataataattatttatttatttatttatcatttttatatatttaatgtaatagatttttttctttttaaatattaaatttcttttaactcaaatgaattacaaaaaaataaaaattaatttgtatggaaagtaatgaataatgtgaactagtacattgacttcaatggtaaacattggtttagctaatttatgattttgatcaaaatttaaaaattaatatggcagatgccaattccacatatgtcatgtcaatctatttaaatcatgaaaatttagttagaatgaattctcataaaatcgcactaaaaaaacaaaacacaaatgtttgattttttttatttattaaaatacattttgatctaatgttatcaggaagaccgtattggac

SEQ ID NO: 49278 - DNA, 321 bp, Ricinus communis
  Intron number 1 from transcript 29739.m003681 (locus 29739 .t000117) derived from phytozome v7.0 (chr-ID 29739; pos 7 10789 to 711109)
ccagaggttacaacttcgcttctacttgggaacaggtttcttttctttgacatcttgccgctattttttgataattttgtgctaattaacaggtcaaactgccgaatcttcgtctatttgagttcaattaccagacaataatagttttagtttagatttgaattgaggttaaattaaatgtgtgcaatttcttcactgacgagtgtgatccacgcgctttcgctttgatttcaccatttcgtttcaattacttgtagatttccttctttctttctcttttatgtttcttcttaaaaaaaaaaaatgttctcgcgatgcaga

SEQ ID NO: 49279 - DNA, 908 bp, Ricinus communis
  Intron number 3 from transcript 29706.m001274 (locus 29706 .t000004) derived from phytozome v7.0 (chr-ID 29706; pos 4 7703 to 48610 reverse strand)
gcatcctcccaaacgttaatttttcgtgctttaaggtcacgctaccattccattaccatacgccttttattcacccatcattttaaggtatgactatgaataaagggtcaaatgcccccatcaatttgtagtttagggttaaataatttgaattttaactattttaataaatgaatttataatgtcgttttaaattaacgacttactaacaaaaacattttatagatacagatgaaattttagtttgatatagtaaaataaatgaagatcttattgtattttggaagagtaggaacctattaatataatatactaaaaatccatttaaattaagaattttcaagatttttgataatttcataaaattttgaaactcttaacttttattttaaaaaaaaaattatttagaaggtaaaattccttaaaaagattataaattttataactctttaaattccaatccaccaattcgatagcttgagattgatatagtttaaaaagaaaatcttatattattttttaaaatacccatttattatttttaaataaaaaattaaaaactatactttatttgtataaaatattatcttattttatcctcatttttagcaaatagagtaagtcttaagaaaagaaaataatgattgtcctaataatagaaatgtaatttagccccaattctcttaacaagtataaattattaagatatccataattttagtttattgataaatgaatatctcattttaagtgaaattttaaattcgactatctcacctcttaatttatgataaaaattataaattatcaaaaataaaatcaattgatattgtataaaagttaaaatagtaaatttattagataaatagtaattttttatataaatgtgtttttaatttttataggga

SEQ ID NO: 49280 - DNA, 1024 bp, Ricinus communis
  Intron number 1 from transcript 28192.m000246 (locus 28192 .t000004) derived from phytozome v7.0 (chr-ID 28192; pos 4 0724 to 41747)
accaagctctttggtaggtgcaattttttttatatacatgaacaatgaatttttaattatatgatcagcttagcctatgtttacattgctttaattaattcaaattttattgttacgaagattctgatggatactagctaggatgcaattttgttcatgtatggttgtaaagattcatgaattttagatgctactgtgggttatataggttatggtgattggccggcctggccattggaatattataatcttagaagacaaactctttttaagttcttcaactcatagagattataaatggaaattttttaacaaatatattaagattcagttatattaactttttttctttaaaacaataagactttgcatttatttttcgattatttttcaattatttttagttgttcttcaattattttcgattattttttaattcatttcggtagtttattttcagttgttttactaagaaataatcaaaaaataaaaataaattaaagctgtaaatttaaaaaaaaaattaaaaattatttttaataatttgatacagtaagaataaaaaaaataaaaaacagtaaacttgatataaaaaaacaaaaaaaaaaaagtttttccattataaatcattggaatttgaagtcattgtcctcttatacagtgaagttatgggctctgatgggccaacggaaagaaagtgcctaataacataaaaagagtacagaatccaggcccattgtgtcatttcaataaaaagaaaaagtgattttctgagtcttcgtaactggtaacggccgtattaactgcccatggttaaaagagccagttagaaaccaattcacaattaattacaaatataaataaaaaataaaaaggaatgtaaataacataatactaataaaaagagaactggtgctgtctggtctctgtgtcaggagtctggtcccaatctatagttgtcttaagttttacaattcgttttcagttagccaacctaacaactagacctagccgttggttcctc

SEQ ID NO: 49281 - DNA, 172 bp, Ricinus communis
  Intron number 2 from transcript 29751.m001834 (locus 29751 .t000049) derived from phytozome v7.0 (chr-ID 29751; pos 2 78665 to 278836)
ttagacacagtctctaggcagaaacaggttctgctagttaatcatgtgctttatttcttcttgatctgtttctttgttttcaatatgatattaccagataagaaaaggataaatatcaaagttgcataaaattgaatataggttactatagtggcaaagctttattggggag

SEQ ID NO: 49282 - DNA, 751 bp, Ricinus communis
  Intron number 1 from transcript 29092.m000467 (locus 29092 .t000026) derived from phytozome v7.0 (chr-ID 29092; pos 2 50947 to 251697 reverse strand)
ctccggctgcctcaccttgtcgccataaagcagaggtatgtattgtaactctgactcggctaaacaactcgtgactctgcttactgagtttaaactgtcggcaatttgtggtctttttcttcagttttggccccgagttgacgttaaatgacaaatataactcctcaaattgcgtgacttttgtgaaagatccggttttcttgagggctatagatgtcatttttggatagttgtatgattatacttttggtcatgagtctgccatgcaaatcttttatatttttactagggaataaagggatatgaaaaagtcagtgataaatatatacatatatcgaatattttatgcttaaattaataagattaataaatatttttatttattataactaattaacatgcattacggtcgaaaataatgcactagtagtaactagaaaattttctttttaaagagtattatgtgggaaaataattttccaagaaaggacaaatccctatcttgttttttctgttagatcccatcaccaaaatcagacatccttttttataaagatttgctaaattcagcagtattttctggaaaatgagttctgaatagaagtcaacaaaaataaaccaatcaattttgtaaatgcaaaaaaaaaaaaaaaaaaaaaaaaattaatggatttaattctgtaaacaattaaatataattgtcctaatcaaagttgttgtatgataatttttcattaggtaaaagagaaca

SEQ ID NO: 49283 - DNA, 337 bp, Ricinus communis
  Intron number 1 from transcript 29736.m002047 (locus 29736 .t000043) derived from phytozome v7.0 (chr-ID 29736; pos 3 40635 to 340971 reverse strand)
aagcctctgattttaacagtcttatccgttgccgggttagtcttcttttgcttgttagaattgatgctttgcttttctcaattgccaagtacccaatttgaagaaatgcatgtttaccatttaatgaagccaatttaacctggcaggaattatgtttgatatttggttttgttctttttctttcatgctgtacatgcttatattaagtttgttttatacaacggctctctaattaaaaatcaagttccaaattgtgggtgtttcgacgtgctcattgcttcaagaaataagaatcaggctcgaggttaataaattttggggttttaattgcaggaat

SEQ ID NO: 49284 - DNA, 591 bp, Ricinus communis
  Intron number 1 from transcript 29686.m000864 (locus 29686 .t000011) derived from phytozome v7.0 (chr-ID 29686; pos 1 55202 to 155792 reverse strand)
gcactacttgtggatctctccttctaaaattgcaggtccatttgtcatctgcttgaatttatttttggctgttctccgttttgctagtttatggtttaaatgtgatgttttcaagttatgtttaggtttgtttgctttgaaattactagaaatggtgattaataacggttcttagatgttgtgttggttggtagtgtggatttggagcattagggatttgagtaattgaactctacttaaattttagttccctgattatcaattgtaaaaaaggttttgaatttgtgattagtacttgataaaatgtatcagcattttgtgcgcacattgaagaaaaaaaaaatttcaaattggttataaatgattgttttggatttttatatttaattcactatttcgtaatttattgattgatgtggagttttgaatagaaaccttgcatcatttacttgtgtgtttgtaaattagtagattttttcaaatgttttttttttttttttaaatcccgtccttctggttgtaatgggaatctagttaccttaactattctgatgccttaaattttttgtgtttttatgcagaaaatctggg

SEQ ID NO: 49285 - DNA, 485 bp, Ricinus communis
  Intron number 3 from transcript 28196.m000207 (locus 28196 .t000007) derived from phytozome v7.0 (chr-ID 28196; pos 9 2174 to 92658 reverse strand)
aaggactttgtatgttctttggaatctctgttactgcatttttgttttctgaaagagtttttttttttggtagtattatgattcatttaaaccttaaggctgcagaatcaatggatggaaatttattttcttcttgaagtaaccatgtttattttaagagtgtttactgattgaagataaatagcatgaagttgtagcagattttcgggtagtaaagctcctcttggccctgagtagaagaattttaatgtttcagtaccttttctgctgtttgttctagttcaactctggcaaattggaaactggttctctctttggggttttatctcaatgttttttctttttctttttttatttcacttcacggatcatattaatcaaaccatgcttagagttgggtcctcaaaacacctcttgatatttaagtttaatgcaaacttcattcttcttttctgcacaccaattgacatttctgtttgtaggtt

SEQ ID NO: 49286 - DNA, 842 bp, Ricinus communis
  Intron number 2 from transcript 29681.m001303 (locus 29681 .t000008) derived from phytozome v7.0 (chr-ID 29681; pos 3 9922 to 40763 reverse strand)
taccagtggtcctcaaaacatcagtccccgtattggtatatttatttgctctttctttttactgtttacgacgtcgtttttctttcttcttcttgttcaccgtgtgtttgcgaagtctaaaagttcaatttaattggacttgtaaatactcatttcctgtgtttgaaaagatagctgcttggttcaacttaaagaagacattttgaaacaaatgaaattatgccaaaaggacttctttttttaaattgcacttgatttatcccaagcaagggcattgttattgtacatatgtgtagatattttgtttgttaatgggttgattgctatccataatgttttgttgcatgtatttggatatggtctctataatgttcatgttatcgcatatctgccaacctatgatttgtaatttactgacatacattaacttttacttctttaacttagcatggatatagccttaacatatccagaaatggaaaagcttcatattaatgtggtcacagtacggttgcctctgactccctttttctcctttcctgtttgcttcaaaagggaaaagaatcatgtggacgctttggattgtggaaatatttattaatgtaaaaatggcccttgctttttgttgttgatgaaatttggggaaactcagacgggttttcataaacttgctttgttaacttatgccataccattatagcttcaccctttggctttcatttatctatttattttttactgtgtgttctgggtcagaaaagctttgattatgccatgaagttacacataatgagactttttaaacaggacttccaaaactgcgcaaagactgggttgacagg

SEQ ID NO: 49287 - DNA, 768 bp, Ricinus communis
  Intron number 1 from transcript 29737.m001226 (locus 29737 .t000020) derived from phytozome v7.0 (chr-ID 29737; pos 1 57395 to 158162)
cctgctttagcaaggtttgtttctgtgcaattcattgaccttcttgttattaacttcttgatgactgttccttgcttgtattcttgttatttatgtatgcttatggtttatgcaacatatagtttgatgttgataatgtttcttgggttgaaagattacttacgatcgttacaagaaatctggtagactggactttgttaatttgaatccaaacggggttttgacttgaaattacctggctcagtttcttcatattaaacttgtaattattaacttatagttgcaaaagtgacttttaattggatgccttatccatccataggggactaatcatttgactctgatggcttatgttctctggatctcattcgatcttcaaacatggctgtctcatgtggaatcatgtaatgtttataagaattgcaactttaaggacttgactgaatcgggaagaactatattttgctaatagattaggtgttaacttggttggcaatggcggtggattgcattgacacagtgctgcaaaaactaatattttgtgtcaaatgataaaacttgtatctagtttgttttaactaccttatgtaaacttgtatctagttttattgatgtttggtcaatgtcttgatgcttactttcttcagtttgttagccttatctacccttgtactagtgtcatgtgtcaactttgtgtgtccattccatgatatataagctattcaatatgcagtgtgattgtggaagctttgaaggtggatagtttgc

SEQ ID NO: 49288 - DNA, 478 bp, Ricinus communis
  Intron number 2 from transcript 29737.m001226 (locus 29737 .t000020) derived from phytozome v7.0 (chr-ID 29737; pos 1 58169 to 158646)
tttgctcatctttggagcctttgttccgcagaattgtgagtcgcaattttctttttctatatattcttactgtgcaataatatgtgtcctaacttggtgcaaatttatatagatgaaaaacaaatgacattatactaactttagaagtaattgtgctgctgttatctaccaagttgaaagaaagccattactgaagtcacctattagaccttacctatgattacaattaaattagatgcaaggaagacacatgcggaaacccttgatttcattttgattagtaaatctttgatgaaatttgagccgttttcttgtcatcctcagttcttgttgttgttggttcactttgtcaacgcatccttctggctggatttccttctctctaatttaaattctggaaggttctggtattgttaaatttataattttgaatgaatatacaggttagtgaagaagtggagcgcgctttgacaagaat

SEQ ID NO: 49289 - DNA, 717 bp, Ricinus communis
  Intron number 2 from transcript 29685.m000482 (locus 29685 .t000004) derived from phytozome v7.0 (chr-ID 29685; pos 2 6103 to 26819)
gtggtgagttcttttctcttatatcatttttattttgattttgattttcaagaaattaattattttttgatttaattcattaaccaatcaccgaattttttaatatttgcaaattaaaattttcaggcgattatgttatttaatcattgattatgagaagttaattgcttcactcattctaaacatggaagaatattcttattttacttttctgcttttttttttttttcttcttcttcttataatgtaaatgtctagctgttagtccatacaattgtttataacataagaattctagatgtaaccttaaattgaaaatacaaataaattaagtactgggaggaactttactggtcaggttttaactgtgttgggatatgaacaatataataatagtgtctaaatcatgagtaatattttaatttcaagaaggtgactgcaagaagaagagagagaccaaatgcgatgaatcaacctgaacgtagataagctaccctgaataatatcactagaaacgtagaaaagaagatttaaaaataattgctgtctatttacgtaattaattattaattttctgatattaattaaacaaaagcaactatttaaataaaacaacatcctcagtccttgggctgtctttttatattaattcatttctcttttcttcttttcataatttcaggtgggacttttgccttgtactcactggtgtgcaga

SEQ ID NO: 49290 - DNA, 751 bp, Ricinus communis
  Intron number 1 from transcript 29462.m000379 (locus 29462 .t000007) derived from phytozome v7.0 (chr-ID 29462; pos 1 96087 to 196837)
tgcaaatcctcatttaaggtttggtgcatagtgtataaagttgcatctgccctttttttttctgtcatttatttatataagtcatttgatgaggttttgagatttccttacccattttgttattgttaatgatttgatattttttaactgttacaagtgctattttagacattgacggattaaattgctgatgtattaagcatgttgcttgatttatttattccagttgttacaccttgcatataaggttgcaaatctacagtgcagatacgggagtacagattctattcatactcaaggctcttctgaacacaatcatgtaaattttgagactatgaaggttaggaacttgataaattgctgttctcatgattcagtgcaaatgtgcaatctcttgaagccttgtcctttatatgttttcttttgcaactgagaattgtttgattgagggagttaagagacaatcttgtcatttcatagcactaccaagtgcttctctgggaacagcatataaaagcataatggcgcttctagaatttagatgatattatggagttttgaatttctttgttaacaagcgcttctagaatttaattgatattatggagttttggatttctttgttaaaaattggatttcacaatggcactggtcagcagtttgttatgttaatattcaaaaccttttcttttcctagctgctcttctggttgactgtgtattagtgacagataatattgggttcatcatcc

SEQ ID NO: 49291 - DNA, 607 bp, Ricinus communis
  Intron number 1 from transcript 29506.m000171 (locus 29506 .t000009) derived from phytozome v7.0 (chr-ID 29506; pos 6 8862 to 69468)
accaagagcgaatcgtcaccgttctaaaggtacttgctctaaaaaatcagttatttacgttgtttgttgatataactgtttaaattggccaattaataataataatactagtttgggttttttgatatgcatattatctgtaccgaatggccttaaaaagatgcgtcttttagtgttttcagtgtcaattgtaattgaaaattatttacatgtgagcaaaaaaaatgtattgtcaagttcaaagtgattggaccatcattgaaaattattacgatgaaaaggggagtttttcttttattaatagaagaatttatatatatataaataactgttttttattagtaacaatctagcttgaaactatgaagttgcttcgtagttgcaattctgtttggtgtgcaaaaactttgggacttgggagctctttgttagttagaaggttttgccatttcagatttttcttttgggtgcagtagacaggaaagttttaaaattttaaatttagttatactagaaaagtattcatagctccataagttgtataagtgttactaatgatgtattctttacactctgcaatttctttctttccagtcacagttaggtc

SEQ ID NO: 49292 - DNA, 822 bp, Ricinus communis
  Intron number 1 from transcript 29630.m000805 (locus 29630 .t000030) derived from phytozome v7.0 (chr-ID 29630; pos 1 76602 to 177423)
aggcttacgctgcccatctcaagcgatctggcaaggtactttttttcctgatgaatatattaattatctgtttctaaatattttcttcgtttggttgattattgatgtgctgtataaagcttgggagtcttgatgtgctgtatagcgtgtccaggatctgtttgtgattggtttaaatttcaatgggtgtatatggtttggaactggatttaaagttaacatcttttaaaaattgtgaacttgatttgttgattttatgactattgctttgagggttattaaggattttaaaagagtagacattgttgtgactatgagaaggcggtagcagagtggaacatgaataaatattgtatattttttatctaccatggaatttttttgaggtttggagcaggaatgaactgatagagtgagaagcaaatgagtatctttaagagttcgggagaaaaattgtaattcttgaatgctcctcaaaaagtattttgtaaaatttcatacctatgatggcctttctatagtacaactcaactgctgatgtgggtgggttagtcgcatctctgagcagtatggatgaactttacttttggtcacatttgaatattggtgagccaatgtctagactagtgtttgttcgattgctatttatgttgttggataaatttcgattttggtgattggattttgagttaatgagtagggtgtgtctttatcagtaataagctgcttaattttacttgttatggttttaatttttattagtcttcttacatctcttggatttcagattgagttgcctccctggactgatattgtgaagac

SEQ ID NO: 49293 - DNA, 539 bp, Ricinus communis
  Intron number 1 from transcript 29637.m000766 (locus 29637 .t000044) derived from phytozome v7.0 (chr-ID 29637; pos 3 18735 to 319273)
accctctcgacctcgtttggcttgacactactaaagtaaactctcctttttacttattagttctcgcttttgtttgttttgttctcgttttttcagttatttagtagtttgtgcgaaaatgcttgttttatgtttgtttgtgatttttgagatattattacgtgctaatcgatgcctcacgcggttcttgatatcgcatttcttagaatcgtaattatgaaaaaaatgattggttacgcacgtacgcttgatgtctattcgtgattttctgattattacgcttcttcaatcgaatttcaaaatgagttattattcattattaattgtttgttacttttgtggtttagaaaatgcttgaaatgtgtacttaatctgtttgctccatgtttattgtactcgataatctacaatgcatgctttcgttattgattaaatcaagcgcttgttctcatcattagctattattgatttttaatagttaacaatgatacctttgtcatgcagcttctttctgctgttaattgttggcttaagtgtat

SEQ ID NO: 49294 - DNA, 785 bp, Ricinus communis
  Intron number 1 from transcript 29805.m001512 (locus 29805 .t000043) derived from phytozome v7.0 (chr-ID 29805; pos 2 30556 to 231340)
tccgagcaagagaaacgcaattctcgggccgagaggtatccgcagatctcttcttcccttgttttcttttattctaccattaaaatatttagaggtcattatgccgagttaggtcttagggattttttaaggcctatcccattagatttcgttctattacgtcggacttttgcatatagatttcatggctgccgtcttccaattaggtttcactattatctatttcaagtattttttaaaagacatctattctaactatgaaatgacgcttttaatcttttttgttgactgatagactgttttggaatcataaacacaacctaaactaggccttagtcattttcacttcatattctttttcatgcattaatacacaacatttttttacaatcattatcaactgcaattttggttcgaaaattgtataagctttctatagctgtttaggcttcggtctctgttccttttgtatcagagtcattaacctatgtattcaaactttaaccttccctttaagtgggttcatggtcgagtctaggtgtctttttttgtttttattgaattgtgaatttcttcctctctctctatgtgttactcacacgagcacactcatgcaggagggctttgtatagccggccattgttttaattagtgaagggtggttttaaggatttttcatgcacagagcctgaatttgttttcatatttcactatctaaatctgtttaaatgctaaccttacccgttgcaggtttggaactgggcccactgtaaagagtggtgagg

SEQ ID NO: 49295 - DNA, 387 bp, Ricinus communis
  Intron number 2 from transcript 29729.m002284 (locus 29729 .t000017) derived from phytozome v7.0 (chr-ID 29729; pos 9 1781 to 92167)
ccgcaatttctcatcttcgaaaacaaccaccaaaggtctctctcttttctctcaaaaattaaacttttcattttggaatctttctattttgttttcactgatgaatctaattaagcttcagcaactttctagatgacattactactatcgaggaagatgctgaaagaaagattggatggttattgaaacttatgtttgctgggacagctacttttattggttatcagttctttccttacatgggtaattttcagtttaatggttttggattttgatttggattggatgctgctatttattttagagaattagaaaaaaattgtgtgtgggtgtttttttttttaaaatacaggagataatttggttcagcagtctgtttcactcttg

SEQ ID NO: 49296 - DNA, 283 bp, Ricinus communis
  Intron number 1 from transcript 29703.m001513 (locus 29703 .t000049) derived from phytozome v7.0 (chr-ID 29703; pos 2 31359 to 231641 reverse strand)
gtattgctgatttcacagcttctttatatcgagaggttagtttgtcatgtttcatacaaatttaaatatatatgagtataatttatctgatttgtttgttaaagattgtatgggaagtgttttcttggcatattattaaagctaaagatacaaattttttgatgtgatatgatagatatgatatgggtactcctaactttgaataatcttcaaagttccattttttagagaagtatttttggggtttgtggtgatgggtttttgttggtttttgtaaagggat

SEQ ID NO: 49297 - DNA, 983 bp, Ricinus communis
  Intron number 5 from transcript 29742.m001417 (locus 29742 .t000053) derived from phytozome v7.0 (chr-ID 29742; pos 3 29719 to 330701 reverse strand)
acctgaggcacactggttacattgagcgagaggaggtaagatacgtgtctactgtattaactctttttgctgcaattttgcattgctattgcagtttgatattcctatgctttccaagtaattatgatttcatcaacatattggctgattctttagcttcaacttcccttgcttccttgaaccttccaatcttttgagaacttcattaggtggtgtagacaagcaagatagaatcggactttaacttcctggcagagttgatctagaaaacaagttggacaaacaaaattttcagatatcgtgactgcttttttaaacagaagtttttattcaaaatacaaaagggtgaatagtttcagatgatttgagaaggttcaaggtaactaataaatgatgagcaattaataaaacaaagaatcttactaaaacctcgtctaggagcaaatagtgctgcataagctataacgtttgttggtaggcatatccagttaaactgacttcatgttttatagaagttcaagactgtggcaccttaaattgttgtcatgccattggtgctgtgcagcatttgtcaattatgtcaaggatacagcacttgccgggctgtttgcacaaatttaaatgcaaaaaaggggtgtgttatttaccacgtattgttttttccccctctattatttataataaacactcttggggattagtgcaaaagaagaaacccattatctccttaccttatctagctgggttttttcttttcttgatggagtagttgcactttgcaatggggtagctcccctgtcataaaaatcttcctcactctttctacatggcttgaacatggtatcttcaaaataagctcctaataatagctttcccctataagtttgttttgccaggttctgctgtagttgtaattatgggaaagtggactattcatgaaacaaaatcttgacttatttgatgtttatttgcagttgaaggat

SEQ ID NO: 49298 - DNA, 597 bp, Ricinus communis
  Intron number 3 from transcript 29736.m002117 (locus 29736 .t000113) derived from phytozome v7.0 (chr-ID 29736; pos 8 08463 to 809059)
tcaggtatgcattattggctatgaatttgagcaataatagtagtctccattccagagagagagttaaatccttctatacttacatgctgctgctttacttttaattccttcaggatagagatggaaaagaaattcatttttggtattttttataaccctttgtttgagaagtctataaatgcaagaattcagtttgttcaacctttttagtcagttttcatgtttggaaagcttatagctgttagaattcaatttttcaattgaagaaaaaaaagaaaaggaaagaaaaggccttttgaaaggaataaaatcacaccaaaattgtaaaaaataaggcagttgaaaggaattaatactaaaactgatctgatcttgtaagaattcaattcaactgtattcttgcacatgatttattccaaacaagctaaatgcaatcaacaggatttgtattcttttgcatttgattttgttttctttttgtcgattaaatatctgtttgttcaacatttctaatctatagctgtaatataagcccatgacctccaaggtatatgtgatcttgaccttccaggcctttggcagggtgtaactttggag

SEQ ID NO: 49299 - DNA, 727 bp, Ricinus communis
  Intron number 1 from transcript 29726.m003909 (locus 29726 .t000021) derived from phytozome v7.0 (chr-ID 29726; pos 1 51133 to 151859 reverse strand)
gttcttgctcttctttctgataggtctgaaattacttcctttcttttctaattttttttttttgttctggtgcttttgcttaattgctttgtctttgcatttctttttgagacatctactttttatgggtttccttttctgggatttttaggtgattacgtgcagtttaagtttgtgaagattgaatcttttactgtttacatgtatgtttattgttaataactagctggacttaaatttgagaagtgaaagttcagctgataaagagtgtttttcctttttttcctttttgtttaagcttcaatcagtatcttagagtctatattctgttattacccatacctttttcacaaatgaagagaagtgtttgcttttgtgtaggttatcatcagcattcagtcatgtagctttctccattaacgattgccttgtctttctttttctttttttcttttttctgcttatgagtttatttctgcttgacatttgttggtcttctcaattatttattctcataaaaatgactgtagaatttggaaaggaaacatggagttttgttttttttcaaaattttcttgacataagtcaaccgactaagtcaaaactttgttttcattgcaaaattgagttgttttatacaattccaggatttgtttttctgcttggaagtattgccgacttttattttcccgcattgctaattccttttctttcacagggttattcc

SEQ ID NO: 49300 - DNA, 673 bp, Ricinus communis
  Intron number 1 from transcript 29673.m000923 (locus 29673 .t000024) derived from phytozome v7.0 (chr-ID 29673; pos 1 70175 to 170847 reverse strand)
aagtaattcatgagcagatgatttcttgttttgcacgaatttttggttttaatagtcttatttggaaggaaaataattcagtattattagataatgggaagagtgaaagctatgcgactgataatgcttcattttcatgtaatgagaaaactgtatgagataatagttattgtatacctgacaggtaacctttacactgtgtaatttatttatttatggagaaagtttgataagatttttggatattgttctgttttgtgaaagtcgaatctgttttagagagataagcgatttataatgtgcatgttgagaaacagtaacagaaaacagattacttttggattctagatagccggggatttttttatttcctctgtttagaaatgttggacatatttcaggaattgagggaagagaacctagagaataattataagtccagtcctgggatcagtgccatcaatgagaaaaatcttcttccattttttcggcatcaaggcaatatccatttgttagaaataatgaaactatgttttgcaactcattgaagttaaacatccataaccatgttactttttgaggtttgcagtaatcttccgttgaagaagcctaaaagtcatgctgtatcttatgttcaggttctgtggaacgaaaactcgactcttctacaggt

SEQ ID NO: 49301 - DNA, 756 bp, Ricinus communis
  Intron number 1 from transcript 29579.m000202 (locus 29579 .t000008) derived from phytozome v7.0 (chr-ID 29579; pos 7 9831 to 80586)
agttgtggatttgcatcaaaggtgtttaattaaagtttggtattgaagagtttgcaatcattactggtttgaattgtattggtgaatgcaataagtttagtttttctagaggtcagaatactactattgagaaatattttgcttgtgttaagaaaattaataaatcaattgaagagtgttctttgtcaaaaaggtgtgattgtgatgaagatgtggtaaaaattgttgttttatactttgttaatatgtttttgttgacttctattaaggataagttggttcacaagtctctttttgatataattgatagtggaaagttgaatgattatctatagggtaaagaagtgtttgatgtcactattgattctttgaagaataagtttcttgctaaagttattatgaaacacagtaatttctatcatttgattgtctttcctcttgcatttcaagtttggttttgtaaatgttgctcgtatgttgtcggaaagcttgctgttcttacaagtggtatgttcctcgtattctgaattggagttcatctttaactcattctttcaagtttttaaaaaagagtatatttggtgaatctaataaatttttaaagtgattattcaagatttgctagttctgattttggagataaagattatgaggtatatgttatatactttgtatacttattgtataattaatataacctttgtatacttaatgtactctttttactatttgtacagttttgctataagattgttg

SEQ ID NO: 49302 - DNA, 845 bp, Ricinus communis
  Intron number 1 from transcript 29585.m000592 (locus 29585 .t000020) derived from phytozome v7.0 (chr-ID 29585; pos 1 49167 to 150011)
gtgagttaaagtaccttcctgtagaggcttaatgacgacttgcacagtggagttactgacttcttatgagttaaagtcctttttcgaaggtagcatctgagaagagaaatagaatctcttgcagagctgatcatcattttggtgaaacattaaacttgatatcacagtactcgttcagacaagagaaaagaggtatgtggtttgtttcttcttcggttgctttgttcttcttcacttgctccatttatagacccattgatggagaaatccaacacaccatcaaccagaaatttagtattgagttttttttttttttttcttcttgttttcaaaatggattatgaaaagaatgtctctactaatttaacacaaaaagcctttttctttgttcttgccatttttgcttatgccctttcgagctatcatatgttgttcagcattttctttcaaaataagtttggcttttactttatcccgctgttcggtttaattcaactcatccattttattcctctacttggagcctttatggtttggtttacacgttttagacgattcatgaagaactttgatttactacttacagaatttcgctgtcgattttaaaattattctcgaaacttttctctctgctttggctgcttatatttatctgcaaatcggcactaacattgattggaaaattgttcttgcagctgctggttatgcactaacagcattttgttgggggagaattatttttattggattaaattttgcaccaacttctatttaattgatttctgtttttgtttgggtatcaacctagatgacctaaaaaataaaatttatgcaggtgtggttgg

SEQ ID NO: 49303 - DNA, 746 bp, Ricinus communis
  Intron number 1 from transcript 29693.m001974 (locus 29693 .t000012) derived from phytozome v7.0 (chr-ID 29693; pos 1 37814 to 138559 reverse strand)
atttcagtgcccacaagtaaaagctatttcctctcttattttctttctcatcattagttgttttttatttcttgtaaaagttcttcaattctttcacttgttttatttctgggtttgactcatattatctcaagtgcccataaacatccacgtctcctctttattttatgtattttaggtctattggtaactggatatatcacttcaccgatctttcaattgattggccgtgtagacatgtattttttgtgttcacattttatgttcactatgttaagtggaggattattgtgattgagctcttgttattgtttgttgtattgaatctctctcttggttaaataagaaggcactatcaattttagaaatatcacagataaaccaaagaactggtataatcataactacagaattaattagtcagcaaacttttctatctctctattgtcaagtgttcagaatttcatcgtgatgccagttttgcattcaatttttcggttatctgcaattttgcaccacactcaaacctgcatgcgggtttgtgttttagttggttctggataaatgaaggtataatttgataagtatcagaagtgtcagttgattttagcatttgggctgtggtgcccaagattgtgatagagtagattttaggtagttttaatttgttatactctttagatcaaaagtcacttttctgtttcaatgtagttatcatccagttcccattgtattctcccgagcaa

SEQ ID NO: 49304 - DNA, 465 bp, Ricinus communis
  Intron number 1 from transcript 29729.m002390 (locus 29729 .t000123) derived from phytozome v7.0 (chr-ID 29729; pos 6 72928 to 673392 reverse strand)
tgcgaaagccgttgaaggagctttgcgagagactggtactttgcaatttttgtcctttctttatttttgtttttcggaaagtatctttgtttataaagcaactgtcttctttgtatatttaattaggtttacaagttgagctttactttatggtaaatcccacctctatttgcgttccctttgtgtctgaattattcacaaacctattttttttaagtacatttttcaatgaatccaacacccttaattactagggattcatcaagtttgggattaaacaattaatcaacgtgctaaactaatttgaattgcaactccttccgtagcctttttttattttcccatgtaacttttatttctggtcctcttgttcttctgctgcttagttgcatccgctatgttcacgcctcactgagcttatactctccagcgtgtttcaggtggtatcattcttgcacctgaagg

SEQ ID NO: 49305 - DNA, 744 bp, Ricinus communis
  Intron number 2 from transcript 29805.m001486 (locus 29805 .t000017) derived from phytozome v7.0 (chr-ID 29805; pos 7 7265 to 78008 reverse strand)
agagcaaacataccaaatgtgagtatccttatgtgatgtggggcaatagaaaatactggatcctgttggaataacctcttttcctcactcacaactcattatcgttatagactttatcattttatcaataagcattgcttatttaatcaacactgcaatgaagggtactactatatttccagtcattactaccaaatgaccattgtgcaacagcttttcatttctggtgatttagatttttgttcaatgtgatggcttgaatgtctaggcagatcttatattgtccttatgacttaatatatgttggaagttcctccaaagaggcagtattaaagatatacatttttttctataagaccagtcctcattcctggacaagaacctgtgttttcgttcttcacaaggtgacagtgttggacaggtcaaaggacaatttaagttgggtctacctatagactcaatgggtaaatggtacattatagtcaggagtaaaaaagaaatagaaagcaggcttttctcaaagctactcttttacctaggcttcctactaggccaaattgaattccttccccttaaacatgcacataaagtttctttcattagttcctatgcgatgagagtttgaatttcataatctgactaattgagcaagtcctggacattttatctactctctgcatttctttgtggattatttttacactaacagtgagtttcctttcagccttacagaaggtggagaat

SEQ ID NO: 49306 - DNA, 609 bp, Ricinus communis
  Intron number 1 from transcript 29726.m004052 (locus 29726 .t000164) derived from phytozome v7.0 (chr-ID 29726; pos 9 38045 to 938653 reverse strand)
ttggtctatcaggatttactcaccggtaatttgattatttcctctctaattttgtcgatttcttttcctttttacagttagattggacttagtgttttttaattggtattattagatcttgattttacatcatcaactttctagtcttgaaattttatgttaagtttttggatccggtaatattgtgtagataaagatctgaacttcttcagttgatttactcgaagttagcgttttgttcattttgaatgttttattctttgattcgattactaactgttgcttttagatgtgtgaactgtaaaagaagtagaagttggaactaattgtagtgatttactgtttttgaagccttagtttttactggttatacgtgttattttcatttaattacataaccttgcgattaactgagctaatataacataatccgatgaaatcaatataaataagtgaacctattatagacctgctatgtagctagtgtcttgcatgctgttttctctgtggtccctggattaataggtacgtaaaacattttttttgacaataaaggaatattttgaattaaaagatgttgaccgcatgaatgttaatgattttcaggtg

SEQ ID NO: 49307 - DNA, 460 bp, Ricinus communis
  Intron number 2 from transcript 29590.m000061 (locus 29590 .t000001) derived from phytozome v7.0 (chr-ID 29590; pos 8 711 to 9170 reverse strand)
acgaaaaagttgataaggtatatagtaattctctttttatattaaaagatacttctgagatatttatagtatatctttcatgtttccttttgtttatatataattgattttttggtattattatagagttattgttttagtttgcacttcttatagaacatttttttaaacatatttttagggagtagaaaaaaataagatgatgttgaggatttgaatcaaaatgatgatgataatgatgaagaggcaaaaaagtatgatgatagtgatgaagaagtagaagatgaaaaggataatgatgaaaaaatgagacatcttgatgataattcggattctgatgatgatggtaaaggacctgataaacataatattatcttgaatgaaggtaatgttagtgttgaaaatattgaaaagagtaatggtagtgtgataaagaaaatagaaaagaagttggagggaa

SEQ ID NO: 49308 - DNA, 835 bp, Ricinus communis
  Intron number 2 from transcript 29705.m000602 (locus 29705 .t000034) derived from phytozome v7.0 (chr-ID 29705; pos 5 52653 to 553487 reverse strand)
tgttctcatcatcttcagaggttataaaactctctataacctgatatcttatcttcttacttacacttggtcaggattttccattctaatttgaagtttatggtctgtgttccctattcatttgcttttctttgacatataaactgatagatggggtattagctatatgtatcattttctggtttgtatcagagaatttaagaagcttccgactcggtctttttcttctttataggaaaatactgctgtgttctggtcttgttctattgactgcaggacatgttaaaggagaaaaagggagggtgtaaggaatagttttgaggttgacaatagtagataaaggaagttgctatggacttgccaatgatcaaattgggtttacctagcaatagctagctgtagatgaatttgatgaagctaaacttctaaaacctgtcaagcataaaacatatctagagtgattagtgggtcctaaaatgtgtacatgtgccttctataagatatgatattcagtttatgttataacctgaatttgatttgagttcatccagtcaaatctatggtgcttttctcaattaattcaatgtaccatatgaaattccggattggattaattagtggagaccaattttcccttctgtgagaagactttaactttgcctaaaaatacctgccattttctattattgcttttgaaagactgctgctctattctttcaatgatcttttaacttctaaaatgccaggttaccactagttcttctccctctttgacattttcttaaactattttttccatttctgttgttgatcattcagttgcttgaaaggctac

SEQ ID NO: 49309 - DNA, 248 bp, Ricinus communis
  Intron number 1 from transcript 28978.m000043 (locus 28978 .t000003) derived from phytozome v7.0 (chr-ID 28978; pos 2 8454 to 28701 reverse strand)
taacccatccaaaaaattctcgacttactggagaggtgaaatctttacctttttcttcttctgttttttcttttttctttcaatttattcattgagttatattaataagttgtttgattaaaagtctaaattatattttttttaactaactgtaaaatcgggtcggattgaatagatttgaaaccaatctatatgggtcttgccttttgttgtggtaattgagtggatggaaatgggttaataggtgg

SEQ ID NO: 49310 - DNA, 924 bp, Ricinus communis
  Intron number 1 from transcript 29629.m001427 (locus 29629 .t000078) derived from phytozome v7.0 (chr-ID 29629; pos 4 79774 to 480697 reverse strand)
caggagaagcaggttcttatcgttatgaatatgtttcttctttctgtatatctccattttctaattcatcatttttcttcatatgtaaatatatatatatatatatatatatatatcatgtttttccatggctttttttatgcttttgaatgtctatcttcacgtctttattttcttttaacttctttttcatttaaaagtagtcaataacttttcttgtaaatgataaaatgttataatatatagttagatatttgatgattcaacaattactgctcctaactcatcatcatacaataattgcttcatgttgttgcttcaatggttaaggttaaagcctctcctggtgattcagtttctatttctgtctaggattttctattctttccttgacaaatatataaaagaaaaagatcaggaccatggaatttttcagctccactgtagctaacaggcattaaagttttctccgagatttcttttttcttgaatacccttttgacgctcttgataatcatggactggaccgtaccttttcatgcttcttatactatataaattatgcatgtttcctgaaaaatatttctttttcaagacataattgtttaacacaaatgtttgccatttggcagctgccgtcttcttactaaatcttccattggcgttcatgaatgcttgtctatatatgtatttatataacttacattctaagaatcatatacataaattgaaatatctatatttccatgttctcaacgatgtcctacttcaattcaccaaatgctggtatttccatccatcatgcattagatagatttttgaaatctttgttcatgacttgatgtcttgttttttgaattctttcacatctcatagtcgaaaattataggtcgagcgttggaagatctgagaagctctgtatac

SEQ ID NO: 49311 - DNA, 785 bp, Ricinus communis
  Intron number 1 from transcript 28827.m000172 (locus 28827 .t000003) derived from phytozome v7.0 (chr-ID 28827; pos 2 1454 to 22238)
tcgttcaccccggtatactacctcctcaatgtgttaatttgttttccttttttaatttctatagttatttctcctttttatgctttttctaaaaagtaatttcctgaattagtattgttcatatccctttctttccgagattaatttatcattttagtgattttcttttttccaattaaataaaataataggcggaaaattagagtggtatatttacggttttacccttttatattctacagtagatttttttaatataaataaaaaaaaggaatgtatttattaattaattttgaattttgagttggtctgcagcagtctgcctgaattcataagagagaggaaatgagaaagcctatttatttatttatttattttaatgggagagacaaacactgttgtaaatagacggtagagcgtatgttctcagaaaaaaattcaaaattttatgattgtaaattaattaaataaatgggaaggaggattattgttatgtacagaagtatgtggaaattaaattagagaaaaaagcaaaagaataagtacatggaaaaataaacttaggttcacaattgtagatttattagtgaaattagaaggagggtttttgatatgtagagaaaaatgtggagattaaattagagaaagttgtgaacaaaagaaaaatggaaaaatacattttagcttcataattgtagaaatgttgctattctttgtatttcacatgtctatattcttctggtgaaacaggcccaatagttgcacaagcgatatttacaaatcgt

SEQ ID NO: 49312 - DNA, 829 bp, Ricinus communis
  Intron number 2 from transcript 28266.m000196 (locus 28266 .t000005) derived from phytozome v7.0 (chr-ID 28266; pos 3 8083 to 38911)
gtccgcaagaagctggcatagtgtacctcagccaggtatactaattcatttgattacttgtttaagtttgcatttcaatttcatgatttcattacatgcctgagatttctagaaattgtaaatgcattaaaggagagataagaattgatgataagaaaaaatctgctggcactgtctaactctaagtgtaaattggtgtttactgcgcttgttattttcttattgtctttagttcatgttttatttcctaagagaaatttgaagctttgcccttcttattctaagcttagaatacttaactttaggtgtgccactaaattttttcagccttggaatttaatttgcaacttcacaagaatcagaggacctcataccaacttctatcctctattttatacactttcttttaacatgtatcaaatgaggagttttatgaaatgtgcccgtaactgtcatatatacagcttatacttacataaatgactccccgccatcgttctcctctctcttgcatatactattgttttaaactaaggtttgaggtttgttttaattgtttgcaaaagacatagtactgttttagaaattgccactttgactagagttgcacatgtgataaattgatagatcatttgtatcattatatgaaactgatctaatcatgacctgtgaggtcaattaaatgaggtcctattgtattatgttaaatttagttcttttcatctattgtgaactttctttcatcacttaagactatctattttctttatggtatagattgtgataatgtcaatgttacttttcaggaattgattggtgctcttctggc

SEQ ID NO: 49313 - DNA, 590 bp, Ricinus communis
  Intron number 1 from transcript 29666.m001492 (locus 29666 .t000068) derived from phytozome v7.0 (chr-ID 29666; pos 5 44733 to 545322 reverse strand)
agactgattttgagttttggaagacactgttacctgtaagtagatttgttgggtttttgtttggttttgtagcaaaggatattggaaaatgatgtttttgtttttcattggcatcataaatttgttttagtttttataattctcagttcagaaaattaccctttgtttggttgcatagcaaaagtagtgaaaatgagcgaaagaaaaaatgatagtctgcagtttgtgttttatattattttggttttatgtatataaatttgttacttaaattaccctgtggtcatttactgagaaaaatacttgatttttatattctaattttactcgtttcatatgaattgctattgtacttgatctaaattagattcatttttttatttctgttttcttttgatttctagagtttcaaattataaaaatttgatctaaaaattgttgatttctttggcatttcccgaccccttctgtccaaaagagaaaaaaaattgggttttgaccattattatcagagatatgttgtcaagtactgttttttagtgtgctctaaccctttcttcctaaggttgctgtggcacatacaattgggc

SEQ ID NO: 49314 - DNA, 593 bp, Ricinus communis
  Intron number 1 from transcript 29732.m000320 (locus 29732 .t000013) derived from phytozome v7.0 (chr-ID 29732; pos 7 6707 to 77299 reverse strand)
ttgtgcctccttcccttgttattactgctgactctgtaagttctttttcttttttaaaagctgggttatttacagttcttttgttttgatcgtttatggtttattagattacatttggttgttttctttttttatgtattgataaaaaaaaatgcaatcttggatttcttttaattatatggcctataaatattcttttcggactacattaaattagataagttagcaggccttatatgcagctaatcatatgcaattgcaaaacgttgtcaaattttggcatgattttcatttctatcacaatgcctttttctttttttctgttttgagttgaaagaattgaattttagcaactatgaagttttcaaacatgagaatatactaagtaaaaatcgtttaaaatgagttcctgcaattttagactttccaaacgaggtgtaagagagaggattcagattgctttctagcatttttttttttaaagtaatggcatatcaagtgatttccaatgtaaggtttgtgtacttgtctaactatgcatttgaatgtgtttatgtgtgcgataaattggcatgtttgtataaattttagga

SEQ ID NO: 49315 - DNA, 585 bp, Ricinus communis
  Intron number 2 from transcript 29661.m000921 (locus 29661 .t000023) derived from phytozome v7.0 (chr-ID 29661; pos 2 42712 to 243296 reverse strand)
acattctcctgccgggatagtatttgatcacattggtgagctcctttctttatgtttttgtaatgctttaagtgcttctttgatggagatgtgctgagtcctctaagttggtcatccactaatcttttatttctaattttgcactactcaacctattgatttggtgatggcaatcaaataaggtgaattatctgtttcctgaattatttatgccaagttgaactggaaaatgaagacaagtggtggtttttttgcataatgatcacacccatcatgagtcatagattcaaactttagtgtagatacacaccgtagataattaatttagataactagcaaaacagcagctcacttggagcacatgctgcttctctatacaaatattcttatgcagcagattggggtgccaactattgtagtaaatattatgctatgtaccaactgcaagattgatttattcatgctggcattgaagggggttttatatttgagagttatcattttctggaatcaactttgtaatgcattctgcacacaattgctacgtcgaatataaggactgaagcttacatgttttactgccag

SEQ ID NO: 49316 - DNA, 907 bp, Ricinus communis
  Intron number 2 from transcript 27914.m000414 (locus 27914 .t000007) derived from phytozome v7.0 (chr-ID 27914; pos 6 8104 to 69010)
gagcaatactgctagaggagtgagataatgtcatcacaactcaactggatatcatatcatgaaaaaccatttttcatttttcaaagattaaggaagttgctaatttggttttatcttacaaatagactaaggcatcagataaaagaattactatttagccattaaaacagaatagggttttgaaaacaggcataataaagcaaccaatatgcacaaagtattaactggactactgggtatggtcatccctcctaattattggattcattgaaagtgccaattgaattttgttttatgttaaacttcaaacactttacaatcacagctagcatggaagagtttggttggttggtaaaattattaacaactttatgcatgatgaaagctacccctttttttgctagaagaagaaaagaaaatgtatggttgttgctatgtcccatcttgttctcttcttgttccctgtaagaaatattttccttggagtcattttgttttccttttctaggcaccatatattactaagtaatcttggatctatccttttcttttattatgataattacatatgtaaaggttcatgtgtgaaaaatagtgattctttcactatagtaccatttacctgttggctttgatgagtctcatcatctttgtagatgcatgggaacaaagagaaaaaaaaaaaaggaaaaaaaatcaagttcacaattcaactttctgtttaaataagaaaacaaaaggcatgaagcatgaaggttggagcattgattccttgaattatatgaccctaaattccttatcttctttgtttcctcaggattcttgaaatcatgttagctaccacacgaaaaaagtaatattctttaaattaattaataaagctaaatatatctgtcacaggcaaaag

SEQ ID NO: 49317 - DNA, 649 bp, Ricinus communis
  Intron number 2 from transcript 29751.m001875 (locus 29751 .t000090) derived from phytozome v7.0 (chr-ID 29751; pos 5 08111 to 508759 reverse strand)
gcaagctcaacattctagtaagttgctatttttcttacttattgtctatattcttagtgcatacaaattatccattttgtaaaattatgtttgttcattagcccagtagagaaatgagcttgttgtggctgcattcttgcactgttggattttagtttaacactttaatacaggaatagacagtcatttttggtgaaaagtttaatattcttggctatcaagggaagggaactttgcggcaagaataaaaagtttgtgtcttgaaaccagttggttaataaaatattctatcctttgcactattcacttataaataatctatctaaataatggccaataaaacaatgccactacaatcctggaagctagacttaaagaattgaataaatccacctgaaagacttaaatgatctttacgaattggtgattatttctgatgcatttgaagaatgttatttcattccttgatttgacccaaacttagttcttgcattattgttgatcaatatctttgttagaagctagtcagcaacttgtagtaactggtatctgtttcactgataatataatctcatcatcattttctgacatgttaaaactaaaagctgtaccttttcttttttccttttttgatgcttgtaggttaaca

SEQ ID NO: 49318 - DNA, 698 bp, Ricinus communis
  Intron number 2 from transcript 29634.m002117 (locus 29634 .t000063) derived from phytozome v7.0 (chr-ID 29634; pos 4 05660 to 406357 reverse strand)
ggttcttcttttgccgctgaacctgttcaaggtcagtctcatgatggtttcaacttgagcaaattagtgttttcctcttgagttttggcttcaattacactttcatccttttctttgaaaactgaatcaaattgtccttaaccctagaagaaaatatacactctagttccacattaaattttagtccacttttacattgtgtttattgaaatccatagaacttatgaaattatttaaagtttatatgcttgaatgaagtgagagtaaatttaaaattctacgtaatcaaatatatatgaaattggttacagcgaaactaaattctaacaaaatatgtagaatttccaaaataaattccacattaggaagtcaatatattccataaatatgttttttaattttatcatttatattttacttctatttcatgtcttttttcaaatgaaatgaatttcttaatggatttcaaccaaacatagtattaatataaacttacattgtcaaagactaacaataatctcaatttagtttttaattaagggggataaaagtgtaattaaggtctaaagtcaggagaaaaacagtaatttgcttattacaactctgcatattatatgtttgattatgagcaatttcattttattggatctttacttttcatagggcttgataagttgccgttcaagccagaaggctat

SEQ ID NO: 49319 - DNA, 672 bp, Ricinus communis
  Intron number 2 from transcript 29758.m000638 (locus 29758 .t000001) derived from phytozome v7.0 (chr-ID 29758; pos 2 186 to 2857)
gttttcctcgaactattcgccaagcggtgagtgattattttaattttcttttaaaatataagactatttgtacttgacaattagggtcttccaaggactggaaagaaaatttattttttctgctcaaggaaaaacgaaatttagtcttctgagtaattttaaattttctctttttgcatcttgtccattaacatgtttttaggaattgttaatatgcgttgtggaggagtccttaatcgttatgcataaacttttatgctcaactgtctttaaattttatacggagtgtttgatttggtgagctgcggaacaatggtttcttttctgtattaacagaaacatgttgggcatgagtcatgttagtataaatcaaattggagttttatgaggatctaatcaattacataaatgtgtagtttttgtgcttcctagtttaggagctgcttaaaatatgaaaaaaaagttgagctaatgcgttttgaaagaatgagatttatgatttccataatgttatttgctgttcacatagaactactagaattatgattcttttttgtttttaatctttcccccctttagacaattgcttgtatccaccaatataacgtaattttattttgtgctgcttatgattcaggaaatattggagggtgtaacagatattgacttggt

SEQ ID NO: 49320 - DNA, 690 bp, Ricinus communis
  Intron number 2 from transcript 27504.m000644 (locus 27504 .t000036) derived from phytozome v7.0 (chr-ID 27504; pos 2 56136 to 256825)
ttggggccagcagcagcaaagctgggactaccaaggttagttatttatatttagtctaagaaaaattcactaacttgaaggtgaatatgtttaattatggcaaactagcatgatagtgatagtcaatgaatgtgtaatgagatgatgaataacaaagctgaggcttggaaatgagaaagttgtcacatgtgattgttcgacagctagactatttttttgatggtatatgattttgtcttagttgttatgctatacgatgacgatgattttaaaatgattttttaaatataatttctaatgctcacttgtttgacttaagtttagaaagcaactctgtgcatttgtaatgaggataaaggtaaatagttacacatgggtggctcttatattagatttgttcattagaatgagttgtatggcatgtaatctggaaggatactattttcctatgtcgcctcatcattagaatgagttgtatggcatgtaatctggagggatactattttcctatgtcgcctcttttgtgagcattagtttctctttcttgtatgtatgtttctttctgtagattgttgcttgggcaggcacctttttttttttttccttaaagaaaagaaaaagaaaattcaaaatttataatggcatttgggtttgattatgtgatatgtgttgcaatggcagcccataaca

SEQ ID NO: 49321 - DNA, 445 bp, Ricinus communis
  Intron number 1 from transcript 28304.m000178 (locus 28304 .t000009) derived from phytozome v7.0 (chr-ID 28304; pos 7 6836 to 77280)
tcagatagacaaaaggtcagtttattttttattttgctaatattacttttgatttatatattatttttcatttactgtgttgatagttatacatctattatttttgttttattgttcttgacttaagagtaagtgaaggctgtcaagaaatattttgaaaattctgagcataggcccagggtggaactattaatgatgaagcaatgagcatagttacacaacctattgatttacccattaatgacaatcaaaggagttcaatttaagttgttgaaccatacacttatggaggttaatctgaagctcagaggcaaactagacaactcaaaaataaaggaattaagcatttgggaagagaggtgccatcaagatatacttaacaattaaaaaaaaaatccaagaactgatttgaagctatctttttatatttatcctgactataagc

SEQ ID NO: 49322 - DNA, 799 bp, Ricinus communis
  Intron number 1 from transcript 29807.m000492 (locus 29807 .t000022) derived from phytozome v7.0 (chr-ID 29807; pos 1 70951 to 171749)
ttaggcctgagtttttcttgcattgggttaagcaggtctgtaatcttcattggtttttggtgttttatatgaactattactgcttgctgtgttgatgggcaagtcttttaatttgtttttggattacattatactcgttagatatgttcatacttaactttgttttcaatctttgaggataacaagtatttctggtcgagtaccaattgctatctcatgctgctaaatgagtcttacttccggtaattgaatgtagttgttgattagtagtgggcttagactagtttgtttgttaattggttgtggtttattatattgccttgtttggttttgttaccttgttcattgcttttcgtagtgtatggagagtttaaaaatgccagaattcagttatactgaattctatttggtcaattatcattttcaaaaagatcctgataattctagttgttggaattcaagtctttcaacttagaagaacaagatttatgaaggaattttggaagaaatgaaacgagtccacaagcaacatgattctaaaagcattcaatttgacatgatttatgcaattaacgtctttaggtttagtatcaaattaaacatctgacttcccggagtaattcaatcatatgccaataagtgaaaagaaaaaagaagaacgacaaactgagaaatacaagtaaagcaaaaaggaaacaacctttatcatctcattgttcacattgaagattgaaaccagttcatttggttctggctctggccttatcgattgatatattattgctatagacaggacctt

SEQ ID NO: 49323 - DNA, 281 bp, Ricinus communis
  Intron number 5 from transcript 29729.m002401 (locus 29729 .t000134) derived from phytozome v7.0 (chr-ID 29729; pos 7 27519 to 727799)
caatccaaaggcaggctattccagtcctcctatctgtatggtctttcatttaagctatattctgttatggcggattttccctctttcttaatgtattttcttttcctgattgcttttataagagaaggacaaggaatcagttagataggctctgattaatcaaaattttaaaatgagttggtcttttttgttgtgaaagtttttttttttttgtttttttaataaaaataccattctctttacttcagctattgtgccatttttgtgttttagggccgaga

SEQ ID NO: 49324 - DNA, 677 bp, Ricinus communis
  Intron number 2 from transcript 29755.m000438 (locus 29755 .t000013) derived from phytozome v7.0 (chr-ID 29755; pos 2 49426 to 250102)
agatcctgttccctgtgatcgctgcgcgggaagtaatatatagccatctctttctgtatctctctctctaacttgtgggtttgaatcctatgaaaattgcattgtttcatcaagaatcctacaatgtacaagatggactatgttgctaaattatcttttaattgtagaggatagaccttctgatcaccaaatttatctattttttctttttatgtcagaattgagtttatatgatagagtaaagaaaagaagaagaagatgtttgaatgtttgatatactgaattttgaagattattgcttagactgtcatgaaggatagcgcaacaaaaatactgtagaaaattggacaagaatttttattattgcattatgctgcaaggcctccattgttatttatgaaacttgcattcagtgataccaatcttgtttattagctatgtaatatttacctttgttagtttaaagacctatgctagttatctagtaagcttatataaaagttcccaacttaggctgattacgagatgctgttaactgtcaagggctgataactagcaattttactggatctaaatttcatatccatattctaattttggtcaaaattttgtatgggatagcatatgatgtttccttttcagtcagtaaagcaaaagagcatattcttgatcaagaa

SEQ ID NO: 49325 - DNA, 661 bp, Ricinus communis
  Intron number 1 from transcript 29728.m000845 (locus 29728 .t000051) derived from phytozome v7.0 (chr-ID 29728; pos 3 32747 to 333407 reverse strand)
gcaggtcaaagattgtatcatttttgtttaagatttgaatgttgtcttctggttctcgatttttatgctttttcttttttcttaaattgaattttacaggtatttggcaaccccctggctttcaagtcctaatattcagacttgtttcttgaatttccttggcaggcctcctgtttttaactatagaaggtgattatgtcattgcttttctttttcttgcttctacatttgaatgcatttgattccatacttgctgtgctaaatgccaatggttaatctttttggcaaatgggattctcttatgtactttttgtggctgtcgcacctctggttattattggtccttttcagggttggttccatctcaagatttgtattttataaagagatatattatgtgtcattttccaggcaaatttatcatgcttctgatggtggaaccattgctttggattggttgatgcattctgatggtaagaccttggctgaacattataaatataatgcatgtgtgcgtggcagtagcctttattcggcaactggtggttttagttttctaattgtggtatctatcctttatatctttatcattataaacgactttttggccttcaaatcaataatattgaatttctccacagtttctggaggtgactttgtc

SEQ ID NO: 49326 - DNA, 382 bp, Ricinus communis
  Intron number 1 from transcript 29801.m003199 (locus 29801 .t000144) derived from phytozome v7.0 (chr-ID 29801; pos 7 83963 to 784344)
atcagctttgatcactggtgctgcttctgggattggtaaaatttttcaacttttgctttcttttttctttaattatcaactttgacctgttcttgatgaggctcaactagcagcttcttctgatgctaattaatgtcagttatcagtaaagtccaacactccaacttacttttgtattttgatattggttattctttagttttctatgattgtttaatcaattttaattattttgttgtatgactatgaattcacaaaggttaatggtcttgcaaaagccaatcaagtttgttattctagagaaagtttgaaattttatgactgatgtagcaatggattacatgtagggaaagcacttagtttagctcttggagaaaagggg

SEQ ID NO: 49327 - DNA, 525 bp, Ricinus communis
  Intron number 1 from transcript 27660.m000086 (locus 27660 .t000005) derived from phytozome v7.0 (chr-ID 27660; pos 3 5555 to 36079)
cagctcttcaacagaggcgtttttggtgctaagtggtctgttcatttcttagttctctctctgtttttatgtatttattattattattcattgaactatttaaataatttccactagtttttaatttctttgctcatgctgtttttcttaatgatttgatatgtgtcataaactgtgattctcagagaaatttttgcttgtaattattattgttcccttgcaattctcgttagtcaacttttactgtgcagctcgacgcttttctggaaagaaaaagttatcagatacctattccccaaaaatacatttgggtccttctcagctcaaagttctatggcagcattagtcttgttcattattaattctgtatatggtgtcatgtgattgcaattgcggatgctcttgtcaattattagcttttggtgctttgaaattgaataattgtatcatgagttgctcccttttgtctaaattttgcataaagtatgcagttttgttttgatgaactggcttttgcagcaaaac

SEQ ID NO: 49328 - DNA, 695 bp, Ricinus communis
  Intron number 3 from transcript 29780.m001368 (locus 29780 .t000054) derived from phytozome v7.0 (chr-ID 29780; pos 4 07601 to 408295 reverse strand)
aggagtgatctgggtaaacaaggtattcaatgaattttcttctcacttcttaatgtctttgcaaatgcatgcatatatatattaacaaagatatgaagcactgtatgtttcaattcttgatcaggttatttatcatccatcgttgtctgtgtataaatatgcattaatggcagacttcgtaatattctttcccctaatggttctcatcctcggttcagaatcaaagattttgaatttcacatgtaaacatatcatttggaaaggtgtaatgtaggagcctcacttcatttattatctttcatttctgctaaagagtttttatgccaaaagagttgagaacagaataaacttgtatccttttcagatcttctaatattagcatttcttatgaaacccataaacttcaattgcactccagctattcttgatgttctccctccctctctctcattctctatctttatatcaatgcagtgaacaatttttaatgccatttgacccgtttgcctttactccaccttttaacttctatcaaaaggcacatctacaaagtggagtacccataaagggcctattacttcttatcaaactcgacatcttttttgtatgcctatgcttgtatttatgtgcgtttgtctctcttttatatgtatatgacagataagagctctactcatcaaagaagacaatatttt

SEQ ID NO: 49329 - DNA, 549 bp, Ricinus communis
  Intron number 1 from transcript 28153.m000283 (locus 28153 .t000012) derived from phytozome v7.0 (chr-ID 28153; pos 6 8312 to 68860 reverse strand)
ctaaagttaaaggctttcctgcgtggcctgccacggtatgtcctaggaattgttatatatatatatatatgtatatattatttggctgtaactttttgaatttatttgtgtttgtagaagcttttggagccgattattgttttgtattcgtcataaagatagattttgtagtttgcatgttagtgtttgattagggttttgcgaaaattcaagttctttcagggcttcactttttttttttctggtgcaactgtaataatttatagaagaactatttataagacttaatggcttgtcaaattttataaggtcgttttttttctttcttcttttttcttaatcagttctggtggcattgatgaaattcaattttttttatattaagtgaaattacctgaaagtagccactaataatcagttctttctgaccaaagtaactaagtaaggattctggtcttgctgtttatgtgtatttttccattacgtggtattagctgttcattgagtttataaatttgggttctgatgccaggtaagtgagccggagaa

SEQ ID NO: 49330 - DNA, 523 bp, Ricinus communis
  Intron number 2 from transcript 29634.m002078 (locus 29634 .t000024) derived from phytozome v7.0 (chr-ID 29634; pos 1 66329 to 166851)
gccaggtatatcatgcttcctataattaattacttgcaaatttaagtcagtagtgagattttaactccacataatacaatcattggtgtcatcacaattcctttttttcatgtttaattcttcctagttttatttgcttgatttattgtcaaattgtttttgaactttttcattgagttgggtaattttggggttctattgtattatttggtatcatgtttgattatgtgtttcctggttctgcctttcctcaaacattttgacaatattgagttttcacctggcatataaatatgttgagcaatctgtgacatgaatggagctgggaagtacctagtcaatatccacagaatggtttgggacttaattttgtcaaggaagcatcgctattttctcctgatggagtttatagatagattcctatgttaggctctgcactttctgtcttcatagtatagatgactagttccatatgttataagaagagattcacactttgcagatacagcaagttgtcagacgc

SEQ ID NO: 49331 - DNA, 724 bp, Ricinus communis
  Intron number 1 from transcript 29703.m001478 (locus 29703 .t000014) derived from phytozome v7.0 (chr-ID 29703; pos 7 1573 to 72296)
ttgctggtaatgctttcattctactgcttctttttggtatttgtcaattttaaacttagaagttctattcccttgctgttgaatacatttcttgtttatgttattgaagcagaatggcatattttgtcttttaagtgattattttattagtttctttatgctgttgtataactgttaaggacttctaatgtaattaaaatgaagcaaaaaaagaaaagaaaagactaataagtgtataacaagcaaaaaggtgttctatggagttgccatggatgtctttcattacataccaaagatgatagtttttgtcaaacaaatttgctatagttgctcaaacttctacctgatatatgtaaagctgctttataattccttaatataatctttttttgccatcaagaataataatcttgattctagtctgctgaatcaaaatttgctattgtatatgcatttcttgttttacaaccagagcttcttctttaaactttccccagcttactttcattcctcactgcaatgaccacccatagtttttgattcttaaatctgtgccaatgtgtaaaattatgacggttgtgtcaattgtatactaactactttaccacccattctacaggacctctaaaacaatatataataagtacttttttttcttagagatatactcatgaccaagtcttattctcaaacattatagtgaagatattgaattggggggagg

SEQ ID NO: 49332 - DNA, 886 bp, Ricinus communis
  Intron number 3 from transcript 27894.m000788 (locus 27894 .t000016) derived from phytozome v7.0 (chr-ID 27894; pos 2 64949 to 265834 reverse strand)
ccatataaggcttgtctcgagacctaaacttgaaggttgattattatcaaatgatttcatgagaccatagtgttatcattggttgtattagtgaaagaaggagagagtgacagagagggagaagttttaagattgctgggaccattataattacaatagacagccattgtttcaaaaagagcatggtttttcagtaatgtagttttgtgaatcattttgtttgctgtttctgtttagaaatctataaagatttagaccatgagtaagcatcacgagggaagtgattttaactaagttcttacccagtcatactgaattctctctctctctctctcacacacacacacacacacacacacacacacacacacacacacacacgatgcatctttaccagatcaggtgggtcggttggcaggttaactatagctgcttgtactaagttaagtaatttggtaattcctgccacataaaagaacacgcatcaaacatcaggcagtgtttagaacatttagcgtccaaagttcttccttaattagtatatagtaatcttaatggaattatgccaaaaaattgctaccaaattgtagatgaggaattattggagtatataagcgtaataaagatgatcaatcatgacaccaggttttgtttctctttttatctgacatctttctagtttcaaagcttaactaattggattttaaggttgatgctattgcattgtggatattggtgatgcaactccgaggtgttgcatgtatacattgagaagtttttggttaaattctacgattacttcttctggtgactggctgtttacgtgcactgcagatgcatgttaatttctatcttaattccttttcagaggctaaaaaagaatttg

SEQ ID NO: 49333 - DNA, 327 bp, Ricinus communis
  Intron number 1 from transcript 27894.m000788 (locus 27894 .t000016) derived from phytozome v7.0 (chr-ID 27894; pos 2 66036 to 266362 reverse strand)
agatcgaatctctcgtctctgataagcttgaagtggtaatctccctccctctctctcttctattgtaatccattctttccacttcttgattgattgatatacttttcaccgttgttgaagttttgttttttgaaataagtctaggacttgaggaattagtgtttatgaactttgtaatttggcaattttggacatgatttctattgtttgccatagtttgaaataatgttatcataaaattaattgcaattttttgagcgattctctgaatctaaagtacattgcttttcaggtttcgtacaagtggctgagtcggaattttttggt

SEQ ID NO: 49334 - DNA, 935 bp, Ricinus communis
  Intron number 2 from transcript 29640.m000410 (locus 29640 .t000008) derived from phytozome v7.0 (chr-ID 29640; pos 4 5228 to 46162 reverse strand)
taaatagtgactctgatttgaagacagaaaaccaggtttcacttatatacactcttattttcactatttttacaggcttcattttttggttgctttttctttttctttttcatttaatatgtatgctttctttttgcttcattgtgctttttgttaggagctgacgagttgtagttatttatgttatttcatgggatgattttgtattctgaattctgaattctgcattctgcgttcttggacggcccaattataatctggagctgatgaaaagaccagaatgctgctaagtccttgtacctgcctgctcaagattattattgatttttgtttttttttttttttttttttttttttaattccgttgtgctagaagatgaggatacctttcgaacagaaagacaaacatgacaatagaaaaaaaaaccctcatatgttattcttgtgaaaagagaaactacaaagacaaatccttgtattataaagacaaacatgaaaagaccaatatgaggatgttttctcttttcatgtttgccttggtagaaaaatacatgaaaattgatggagtggaatgcttaaacatgtttctttgaatttgtgactctttcagcatttctgtttatgatctaggcaacataatgctatatctcttcttcttctcttaatatgtctgcctatttgttccaaaattttcaagtcttttgctgaggaaaaagttgtcagattcttggccagttgatttgacttcaaaacttttctactcatgctaagaactatgatcaattaaatatcaaacctgtaatggcacagagcgagcaacttccgctactggaaattttctatgtttatgaaatctagcccattaagaagtcatgttgaatgtatcaactctgcagtaattgactaatagtctatttcgcctgcaggattcaaat

SEQ ID NO: 49335 - DNA, 203 bp, Ricinus communis
  Intron number 1 from transcript 29651.m000281 (locus 29651 .t000001) derived from phytozome v7.0 (chr-ID 29651; pos 2 5076 to 25278)
cttcaaagcaggaacttgtggaagctcttgacttggtaagtgtgcttccttttttctgtcaaagtcatatgtagtgggttcaatgatgaaatgatttgtaaattagtagctttttctattgtttttttctgttatagaacactaaattagtatcagatgtttttcttttcttgaatcaaacacctcagggatttgattcggtg

SEQ ID NO: 49336 - DNA, 833 bp, Ricinus communis
  Intron number 3 from transcript 29634.m002163 (locus 29634 .t000109) derived from phytozome v7.0 (chr-ID 29634; pos 6 51036 to 651868 reverse strand)
ctccgcctgtacaggaggctgaaacacctgtaggttctccatttacttctttaaacaaggatgcttagatgctgtttcagttaatatgattaagcagtggtttgtggtgtttgctggacaataattaagatttgtttgctgatgtgatgcaaatatttgagcttaaccagtagctatcaaaatttggtttgattattgagcattactacaatccaagaatcttcgagtcttttcgattttatcttttggcgattctcactaagtaacaaagggaagctagagctttgtttatatataaagcatatatataaagtattagcttatcctgtaccaaaacatatggatgcttttaggcttctattcatcttcaactttaattcaagcactctacttttcgctttagagaagaaaatttttttgtggtaggttttaatatttgttttggtttaatttgaagcataaaattgactgatttgatttatttataggactagaggaataatcaactaatggatccctttattagcacatatcacttgcccttttccaatacttttcttctacatttttatctgtattcaatattcaaaaacaccaactattttaggtactacgagttgcttttatctccaaagatagtgcatactatctgctgcctgtgatagcttcaagttagcggattgtagttgcatacttgatatatttaacttcttgtatttggcactctcttttttctgtctagactaacctggttctcagatccatgacctttttatgcctcttctttaatggatccagacacaaagaagggctagaattcaccagttgcgact

SEQ ID NO: 49337 - DNA, 662 bp, Ricinus communis
  Intron number 2 from transcript 28806.m000147 (locus 28806 .t000002) derived from phytozome v7.0 (chr-ID 28806; pos 8 442 to 9103 reverse strand)
cagaatcctaaggtaatgtaatataagagtaatttaattttgtataatccttggtatgagttgatatatctgaaagaaaagatactatattttcattgctaatttcctttgaaattatacaagcttaaataaacaaaataatgtggagattctggagtattctgttggttaacatcttaatactggtcatagtggtcgtcatctatattatgattgattcttcagagaatagaactccttagctcctcaactatgaattggtcagcatttgtgcgctatgctcttacatgaaactaatggagtcatctagaggatcattgcattgatcaatggctgagattagcttggtatccaacattttgggcaatggttaacaaaggataggagaagctgcatagagaaatttattcattttggctcctaatttgggttgatacttggccgcactgagttaccaagatgcatcgtaccactcatgttttgaatgaagttctaagctagttaattgttgtgctcggtgctttacagataatgcatatgataagatgaaaatcaaagaaatataaaaaatattttttgatgttattttgcatattttatgattagcatcaaaatgaaaatttattcatttttcgttacaaaatttggctttgcagatcaga

SEQ ID NO: 49338 - DNA, 357 bp, Ricinus communis
  Intron number 4 from transcript 28644.m000929 (locus 28644 .t000036) derived from phytozome v7.0 (chr-ID 28644; pos 1 87661 to 188017)
ttatcagaagcactaggttatacttttgttgacaggttagtattttgactaactgtttgggtttggatcacttgagaattttaacagtaacttgagtttcatcttggaaaatgcataacactacttgttcggagtaggatctaccacttttctggagtagatcactttttctggagttggtgtaccattcttctttcttttaatattttccacaaaatggttacagctagcaattatcttgcattttccaatgtatgctattgaattaggcatgtactttgaattatagttgactgttgatctgggttatacaaattttattaatatagatttttcttgtccgtatcagtgacgaat

SEQ ID NO: 49339 - DNA, 483 bp, Ricinus communis
  Intron number 1 from transcript 29588.m000868 (locus 29588 .t000023) derived from phytozome v7.0 (chr-ID 29588; pos 1 54001 to 154483 reverse strand)
gtcttctctgaaccccccaagcaaaagaagtttgggtattgtatttgccttttgtttttagctttcaatttttgttaatttaatagctgcgtaattttgatcgttaaagctgcgttttttcgcttgggtttcatttaggcatttcgtcaaacaggttttagtgtattgtttgtttatgcgggtgctatacttggaaggcttgcttccaattttgaataatttgattcttctttaaatgtgtgtcagcaatatatcatacgcaaattagagggtttctctagcagagtgataaggattttattatgctatgtttattgtattaagtaatagaattttgaactatctttctagtatagtttgtgctgattaatgattctctcattagtataatgacatctctattttgttatcaatggtgtatattcacatgaatgcatttcatgttcaggatcgatttccatctggtacaactcttctttgcct

SEQ ID NO: 49340 - DNA, 718 bp, Ricinus communis
  Intron number 2 from transcript 29693.m002026 (locus 29693 .t000064) derived from phytozome v7.0 (chr-ID 29693; pos 5 14830 to 515547)
ggaaagttatcttctacctccatctagttttgcaggtaaatttttttgtttcccttctgtaagtcatgcttcagttctcatatattattcaaaagttattaagaaatgaaaaaaaataaaaattgaaaggaatgaaagaagtttgatcttgtggcagagttaatttcacacatctattacacaatattaatgtatccttttagagtaagttgtagtgattatgcgatatcttttattaagttcatcatcatatttcactttaactttaataatgatgtctccaattattttgtttctttttcatttttcccccttcagtagattatttaattagtttcaatatagagtaaatgaaaccagtttaattacccatttttatcatgaatgcttaaaaagcaagaaaaggagtgattaggtgagtctatatcttataaatataaatattttcatcctgaatgtcatcgggaaagaagatttgtcctcatcaatgtgttttgcaattcctaaacatgtgatcgtaatcatttgctaatttattcttacaatttcttgagcactctagtttcaaaaataattgcaatgtaagcaccaagtaaacatgtctctgccattgaagattggtcttgcccaagaaaagttatctccttccttgtttaactcttgtttttgtttccatttgacaggtattgtcagtgctacttgccacggctggtgctat

SEQ ID NO: 49341 - DNA, 472 bp, Ricinus communis
  Intron number 1 from transcript 29582.m000252 (locus 29582 .t000010) derived from phytozome v7.0 (chr-ID 29582; pos 1 24233 to 124704 reverse strand)
gaggatcctaaggtattcttcattttgttaatctttttcttatacttctttgagtaaaacttatccgtttgatgttatttaattgtagtatcatgtagaaagtttaatcttctttttttctttttcctgctgtttcttggccatctgtgcccacaccattactgctttatcatttttctcttacttttcttgttggtgggggtaaaatggtctttgatatgtctctgtccttcttcttcatttagagagagagctttagagtgagctctatattgtcatgttaattcagtatgtattatactatctttagctttaaaacaaaacaaaaaaaggaagaaaaatttagggtttaaacttgcaatatgtgtaatccactattagttttgacagctaaaggtgttattttcaatgatcagttgttggtttgtttgttgcagcacttttcatcaaataagatcatagtgaaagacga

SEQ ID NO: 49342 - DNA, 682 bp, Ricinus communis
  Intron number 2 from transcript 29600.m000553 (locus 29600 .t000020) derived from phytozome v7.0 (chr-ID 29600; pos 3 72173 to 372854 reverse strand)
tgagcaatattcgtcaagttcctgatcatcaggtttgctttaattatttatataattttattttttgccgagagctcgtgatatacatgaatatggtaaaaatgaaaagaaaaaacaactaaattttctgatacataaataggacatttatacttaatcactttcatattgaagaaaggcactgttgggcaagtacgcagaagagcgttcgtattctaatcagctttctcaaggtgataagaggcctagttaacaggaaaagtgaattggttcgacctagctatcaatataggctaactcaaagtatcatacctctttcatgaccatcactttgtacagtattacatcctggctaatattgttattattagtacttggacgattttttgaaatggattttgacctcttccatcaactttggatattcatttggttcactacatggcttattttcaaaaaaagaagcaaacagggcgaattagaatttttacatttatgcttaatgcttattgttattgttggctcctctttttattgtggtatttatgtattgatttatactttgcgaacaattattcatgtagttaatgttctttttctttttctttaaaaaaaaaatgttattgactacttattgattcttttgtggttgtgaaggaggtattcgtggaccctgctcgtg

SEQ ID NO: 49343 - DNA, 844 bp, Ricinus communis
  Intron number 2 from transcript 29716.m000307 (locus 29716 .t000010) derived from phytozome v7.0 (chr-ID 29716; pos 1 05729 to 106572 reverse strand)
gagatacagttcggtatcttgttcagcatcatttggtaagaaactttttttttttgtttctctttaatatgattatggactttctttctatgtgctttaacttagaaacttaggatgcagactgttcttattgtttatgtgggtttgctggttcaattacttgagaagaatccaattgttgatacagatatttagtttctctgggaattggaaacttacaatgtaaatatttgcaagcaaaagataagagtttttgaaaatttgggctcatttgattttgatgagttattctcaaatgctggatttgagaagagaagaaagaaaaaaaacaaatgcaaactgaaagagttattaaaagtttggatgtgagtagtttgatgaattttgagcaaatagtgggttaaatagaggtgatacttaatataagggcttttggattgcagtataattagtttatttatttgaaatattcatcttctggcatcgttttctagatgctttttttaagaaaaaaaataaaaaattctagtttgctcctctttattcatattaaaaatgtttcatgtcattcttctgaaggagttgacttatccttatcttgaggcatgcttcttgacaagagaagctatatatgtatgacatgtataattaattcatgaaaccatgaaacttgtgatcattttattgatatcctgtttgacttaaacattttacatcagacatggttataactcgggtaatcattctaggcaatccaaaccttttgatcacattcttgccacattcttcccatgattctcaacttgatataaggaattattttttgtaacatgagtacaggttg

SEQ ID NO: 49344 - DNA, 934 bp, Ricinus communis
  Intron number 3 from transcript 29709.m001197 (locus 29709 .t000033) derived from phytozome v7.0 (chr-ID 29709; pos 1 54950 to 155883)
gttgggtttcaagactcccagagaggcaattgaaggtttattcccttaatctctttttttctcctgtttacatttgtgttctttttcctggagtgtcttttgtattagattcgcttttaggtttatgtttgggaatgtcgtgggagagtgaacgtcgtagtagtgaacgtcgtagtagagttattataatttattcattttggttgaactgttgcagaagataaatcgttttgttattaaacaaaagccttgatctggatggaccaatttcctgaacttgacatttctccttggacatgattacgaaattgtgtctaagagaattatttggggattattctgtggtatgaaacatcttctttcaaaatgataatgataaaaaatctatgtccattaccctgcaataattgagtggaagtcaacctcagaaaactgcagtacccctcaagtgcattttgctaaactagcttggtcaatctgcagtctttgctgtacagtttgggaactaaaagctaccaaagaaattagcaaccattaatgtgatgtctgcttgatcattgaaaagaagaactttacattaacagtttgggaactaaaagctaccaaaaaaattagcaaccattaatgtgatgtctgcttgatcattgaaaagaagaactttatgttctgtttcgcagccttttctgtagtttaggcttggggttggcttagaacaattgcaactttatgttttttgtatttgacttctaccttgacatacgttacaatatatgctatattggatggtgcacagaatttgattggtcatgtggatgttgtaggctaatttcgtactccagctgcatttcttgcttcattacttcttataagcagaaaaatacgggataatttgatggttgagatctttctctacaggaacatatattgacaagaa

SEQ ID NO: 49345 - DNA, 949 bp, Ricinus communis
  Intron number 1 from transcript 29758.m000680 (locus 29758 .t000043) derived from phytozome v7.0 (chr-ID 29758; pos 4 19006 to 419954)
ggaaaagaaagaaggtaaaggaaaggggtcgaaaccctaaaggaaaaagaagaaggtaagggaaaaatagtgctctgataccatgtcaagatttgggggagaaaagagtttttattttttcttaaacatgtttttttacaatgtttgctatatacacaaaaacaaaaacattacactagctttacacgtgtctagctcttattggttaccatacatattctattagatactaataataatcatcaacagttccacaaagtctttaagcaccgggcagcaccgtacaaagatcaaattaagttaccttctagtacctacactaaagcctatagcaaatgaggcttaatcacaaatctcatatcaaaaacatattatccttgtaattctactactatctaattcaagcattatggtaaaccagttcaagaacataagagagaggaagagatctagtgataaagcaaaaccacaagaagaaaatggtaattatggttctactattactaccactactactactactattattactacattcttagttagttctcatgttatgttcctggcatatttgatctattaaaatccgattgagttggatatttttttcctacatctgttattagcctttttcttttaattggtttaccataatgcttgaattggctttagagtacgtattaatttgatcttttcatggtgctgcttagtgcttgtcatgacctttttaaagaccttactttgtggaactattgctaatgattattactagtattactattattttatagaagttcattgatctttgtagcagttccttagttatcattcagttgatctgaatgcccttcctacttctaaatgttgatatatcataggaatgttaacatgcttatttaatttgatctttgtagatcattcactaagatagcaagtactatagctgaga

SEQ ID NO: 49346 - DNA, 337 bp, Ricinus communis
  Intron number 1 from transcript 27533.m000079 (locus 27533 .t000002) derived from phytozome v7.0 (chr-ID 27533; pos 3 3839 to 34175 reverse strand)
ctttgctctaagcccatttctgagttcttgacaaggtttgccttttttctttttcttttttgtctaattgttctcattctttccaccgagtttggtctaaatgggttattcttttttattattattttataatttgcactagcgtttgcctcttctatttttgtttttaagaagtggtgtgttctgttcatgtttctttttgtctagtttagcttaattggtagctttttattctgttttttaatgattcatatggctttttgaatgttttggctaaatggtttttgttttattgtgattttgcagctctggtacttcaggaggggaaagaaagttg

SEQ ID NO: 49347 - DNA, 656 bp, Ricinus communis
  Intron number 1 from transcript 28448.m000364 (locus 28448 .t000013) derived from phytozome v7.0 (chr-ID 28448; pos 2 31108 to 231763)
ttttcgccagaaagctactgagtatcgcgcccaaggtaccttttttcttctttttttttttttttgcatttattctcttattgtccatagttctattcatagatctgtttctgctccttcttatcaaatgtatgaacatgggtgtgattggaatttcgagtttttttagattttgctgatgggttatgatttcttttcttttcttttttgttgtttgcgtttgattggatttattttcttattccgattgtaagaatagacatgtttctgggcatgaatcataaattctcaattgaggcatgggtatgttttcaatatcaaattttttgtgaaaaaattcattttgttatttggtttacgatttctttttgggaattgtggtgatccgtagagattgatgttgttgttttgttatttggttttttatttttttttctttgcactttatgaactgtaattccgattatggcatgagtgtgattttctgttggtatttatgatactatttttcatctcttgggaattgtagtgatccgcacagattagtgctgctaaacgaaattctaccagagattcttaattactggtcttattgaaagcttttttgtggttgaatttgatggatacagctgcaaggattagagagatattggaga

SEQ ID NO: 49348 - DNA, 497 bp, Ricinus communis
  Intron number 1 from transcript 29776.m000468 (locus 29776 .t000002) derived from phytozome v7.0 (chr-ID 29776; pos 2 6917 to 27413 reverse strand)
ggacctgatattcagaatcttaatctttttgccaggtatgttcttgttcattgtttttctattttctcttttgcaacttttgcaattctttgtttgtttgttgcgatcatatttattgttagtaagacattcaatatcattatagttttgttattgttatgattatagtgcaccagtaattcttgttattgttgtgattgtggttataccagtaagatattcgtgatcattgttcttgttattgttgtgattatagttaaaccatcaattatcagttagatattcatgttcattgaattcccttttattgttttttttttttctcctttttgatatgatactcaacaggacttccttcttcttgttgccgttgccgttgttaatcagtagtctgtcaaaatgatatttctgctattgttttacaagtgattgatgcatttacatgctcaaattctgatgcagcttcgaaacaaaggatcgtctccgagtccgaattt

SEQ ID NO: 49349 - DNA, 914 bp, Ricinus communis
  Intron number 1 from transcript 28694.m000670 (locus 28694 .t000013) derived from phytozome v7.0 (chr-ID 28694; pos 9 0404 to 91317 reverse strand)
gcttttgctgctttacactctctcttcttctcaaggttcttccctatatctttaaccatctataaacctagagagatgcatctttcttttttcttgagtttaacttgttcattcttcttcactttgctcctcagttgtctctttattccttatttcatacagacatacatatatatattatgcatacatattctttgatcaagataatcacttgatagtctgcaaatgaaaatgagctccaaccttcattcttttatttacttctagttgcttatattattctcttcactttgacttgaaatttctggtgattagtattatatatgattatttatcattgatgaagaagcttagttgaaaaccttccttcatcttactgtaatatgagaagaagaaaaagactgtcatttttatttttcaagactgcctgtgcataaactatccatggatccatgataaagttctccttgttgttcttcttcttcttcttcttctccttcattgtattatatatgtattcatggcatttcttcttcttcgaattatgtgtcaatggcatttcttctctttctctttttattctttgacatacaatatgatgatttttcaatataatttacacatataaatcaggacggggcagttggttgttagggcatttatttttgtcattaatttctatatttaactatagctgtgggaagcaattgctagctagctagctagttcaccaaaaattctcttacaaaattacaatttctaattttaagaaaaagagagctgcattttgaggaagacacgtgtataggttttttcatttgatgctttttcctgaaatatttttatttgaagtagaattatctgtagctagaaaagtagaaaaggtgatattgatcattaattgttagggaaca

SEQ ID NO: 49350 - DNA, 258 bp, Ricinus communis
  Intron number 2 from transcript 29760.m000182 (locus 29760 .t000003) derived from phytozome v7.0 (chr-ID 29760; pos 2 28731 to 228988)
cattctctgaggtatgcctaacaatttttcctattgttcttagtttcttttttggtttaatgaactttgtatagtaatgaacctgaaaccttacaacactatctctccagctacaatacaactgtcctaaagttcattggtcagtttgtcctggttttaattttcattaataataaagaagaaatgtttgtcttagtattttagtatttttgatctcttgaaggttgtgagatttggagatcttatttcttacacagc

SEQ ID NO: 49351 - DNA, 809 bp, Ricinus communis
  Intron number 3 from transcript 29760.m000182 (locus 29760 .t000003) derived from phytozome v7.0 (chr-ID 29760; pos 2 29054 to 229862)
agaggacaaagtactgcctcacttctgaggtatacttgcatttttattatttttctgttatggtcctgcttaaaaacgaataagaaaaacattgaaataaggaattacatcccttgttttaatggtatgaatacattcaaaaggaagccaataccgaattaattggctaatgatgtaagcctaacagaactttcaaaatgactaagcaaaggtaaccaaatgtactcatgtctagttcatatagtaatggccacaatttgtctgcaagtgcaactggggtaacattaactatgggatgtgcaaaatggcctacttatctcagtttttatttataaggaaaaagaaaaggaaaaaagaaatgtggatgctacagctcatagatggaaactagatttgtctaaatatatctggttggactactcatgcgtgagccattttataacaattggtagcctgaagaatcaggagtgtaaagagagatgagacttttgctttttgaatatggacttgtctgactaaaagttggcttctacttgcaaaacagaaaaagcaagagacacatgtaataaaaaacagaagaaaaattaaaaaagggttaaccaaatatggtatgcaattttatgacaaaatgagatgaaaattataataattacaataactgaaataaggcatgtagtaaattagttcagtgagagtattgttttagtttctcattaatttttgggcaagattgttaatatagtttatgaattggaattgtattaaaaattgcagatctcccttggagtgatactagccattccaccatt

SEQ ID NO: 49352 - DNA, 1000 bp, Ricinus communis
  Intron number 1 from transcript 29250.m000230 (locus 29250 .t000001) derived from phytozome v7.0 (chr-ID 29250; pos 3 543 to 4542)
tggtgtttcttaaaccggaacaggtaaaaagattataccttttgtttctcctcattgaagtttgtataattatgaattcgagttatatgttattattttgtgggtaataatttgttttacagatataacattgcatatggtccttggaaactgatttcaattaaccagataaaagaattacaatttttgttttttgttttaaaaatcttgttttgggaatgactgagaactgataagtttctatgattatttttgtttctgtgtttgtttttcgacaggaatattgaaactttgttctttcgccaaagacccttcagtttctacggtgaccagattattttcaccaatggtgcaaggcatattatgggtttttgtttttattaatcacccataaaagccttttcaccataaaagctaacatctgaaaaagaaaaaaaaattgaaatcaaatggagaaagtgatagatattggaggaaaaagaattgatctttttgggggttgaaaaaggattggaaaaagaaaaaaaaaaaaaaacttggtgcagtactaatgatccttcttggattgtggttctcattgggctttactattagaaaagataatgatctgactaagaaggttgagtaattaacaatcttgagatactttagaacagaacaatattgaaaaggattgtttgtggtcaatggttttccctttttattttctttttttgaagttttttcctcaattttatgggtcattttcatattttcccttctgcaaatggtggagtttagcccagtagatgggctcctaacatttacagattttacctacaagttcttttcaaatcattcatttgaaaaccttgcattcgttcacatttttttgccggtgggctaacaaatgataaaagctggtaaaaattgtacggaagcatcctttacccaaacaaattttccttttgttattgtaattacaggtagtgaaagcaattggaggactaatcccattacc

SEQ ID NO: 49353 - DNA, 627 bp, Ricinus communis
  Intron number 1 from transcript 29745.m000372 (locus 29745 .t000019) derived from phytozome v7.0 (chr-ID 29745; pos 1 58707 to 159333 reverse strand)
ttctcactcttctcttcgtcaaaacgacgataacggtctctctctctctctctcgacacgcacaacacagtttgtttcaattagttttgcaaatgtaaaatataataaataaaaaaataataaagcacgttaaatattggcgttaaaataatacaagaaaattatttacattttttaaatattaaaaaagattagtttttcaggtttttatgtttctaatttcataagaatttttaaattttcttttgttttatttttctgtaatgtggaagaaattttgaattttggagcttgtgctgctaactacattagcaaaatcctagaaaatagacaaatgctgcttttctttttcttctttttttgcttaattctctgtgattttatagtctgttgaattatatggtaaagtaggttttaaaagttttgatttaaatggaagactttctcgagttgttgaatgaaagagctgaaattgtactgctgcatattatgattgcaacctattaaagctttgttgaaaacagacgatgttaatggcctgatttttgttattattcattttttttattaatttcctttgttgtggccacagattctggaagagtgagagttgcggtgagattacga

SEQ ID NO: 49354 - DNA, 1023 bp, Ricinus communis
  Intron number 2 from transcript 29673.m000925 (locus 29673 .t000026) derived from phytozome v7.0 (chr-ID 29673; pos 1 89084 to 190106 reverse strand)
gtggaaagttgaagtcttgatccaggtattagctagctcatctgattttattcatgttggctgtaaatatgaataaaatatttacttcatgcatatatttgtttatggcagcacttatagatatttgagagctgatgtttttgataatcttgcgtgcttatgttcgagtagcacctagtcctgtatgagcgatttaaactgtgttttgtttgaacatgaaaaagtgggggacgaggggttgatctaagccaggcaaaccttttctcaaacaagttcaacgactgtgaattaattgatctaggccataaagtcaccctttcacttagttaaataagcaatctaggcgacactatatagctcaacggttggatagggcttttggcaatgctgaatggagatttctttttcaacatgctcagatgattcatgaggagttgattggatcttaccatcgagcattgattctagttttccagcggaggttaggttaaacagtgctttaggtttgaggcaaaatggttagctcaagaagatttttcgactattattaataattcttggcaagcagaggttaagggttttaatatgtattggatagttgtaggaaagccctaactgtttggaataagggaagatctaatgttaagataatgattcttcaaaaaaaatccaagattgatgaacttcactcctctccaccctcggataatgcaaggaatgtccttgcccatctcactaacaagttatttgacctctagcaaatggagaacatgcatttatttcaaaaatctggaattagttggtgcacttaggggacagaaatacatcattttcttacgcttccactatatgtagaaggcatgtgaatcaaatagttaaattaaaggatcctaatgggtgttgggtgcaaggggaagctgatcttgataacctcatatgctccttcttttccacactttactctactgaactaattagcatgctataggaagcaattgctttggtccctagcttagtccctga

SEQ ID NO: 49355 - DNA, 713 bp, Ricinus communis
  Intron number 1 from transcript 29673.m000925 (locus 29673 .t000026) derived from phytozome v7.0 (chr-ID 29673; pos 1 90151 to 190863 reverse strand)
gactctaaaggtaaaggagttgccaacccaagcacaatttcaagttcggatgatgacagtttggaagtggaatcaaaaacttcggcccaacttactcctttgggcctcacagaacctgatttgagagatattgggctgggcatcatgaagccttataagtttaagagaatcaattgacctgacccatagattaaggctatgaagagtgttttagaatagataattagtgagccttttattgcaggggaatttaaatcaaaagaggttggcgttgctgatgggaaaaggagcgattctatggaagggtcctcgaaattttctacctatagattagtagttcctaacattatttctattggactggttaagaagaggaggcttaaacaattagctagacagaggaaagtcatccatattgaagaaattcatgacgaaggcaaagtaacaaatcatgaagcacgaaaggaagttggcccgaaaggacaaggtagtagtgtgtttgattctgatggtgctggtagctcgcctaaagccacccatcagccatgagttggataagctggaactatcaaggtttagggtctcgcatgacagttcatactttaaaagaactagtgttctgttggagacccaacgtagttttttttatggaaatgaagaatcattagagttttctagagaagttaagccgtagattacagtttgacgaggtt

SEQ ID NO: 49356 - DNA, 805 bp, Ricinus communis
  Intron number 1 from transcript 29650.m000270 (locus 29650 .t000003) derived from phytozome v7.0 (chr-ID 29650; pos 6 0657 to 61461 reverse strand)
tcctgcttagtgtgagtctttttcttatttattttgggaatttttttttatatggcattcaattcattatagctttgaataagtaattatttttttgttttgagttatatcaattgcatcacaattaattgtgctacttttatagctgtacgtaactttttggtctaatgttcgtgttatgtttctgtctgacctcagaaaatgtggagggaaacaggacatgcaaatgttcttctttcatatagatttcactgttgggataatgaatgattttgagagtatacattgtggacaataatgttttacatatttattatcagaagtttatagtaggttgtatgttgggaattattggtacaggttgcaatctgtgtgctttaggtttctatcagattaagttttgacatggatagctacttttctgcctattctttatcttcagaattttttcctaaattaaactggaaattttttgctctaataacaaaaagaagaaaagagaatctaatttttttagcttcactttccatttcatgttgtatctttcttgtttgacaatatatattacaaacttgtagcatcttatattgagctatttcttttatacattcgaacattgaacccgtaacatttgattgttcattgatgattgtgaatctgaaacttagtatgaagagtgatttttcttctaacttaactagactgaagttaccttggctttaacatttaagttttgataaatgctactgataatgggtgcaatatttcagggaactgcaggagctgctgttcagtatttgggtta

SEQ ID NO: 49357 - DNA, 325 bp, Ricinus communis
  Intron number 1 from transcript 29629.m001400 (locus 29629 .t000051) derived from phytozome v7.0 (chr-ID 29629; pos 2 82779 to 283103)
gcgtgttaaagtcctttccgaattctggtattttaatttttttttttaatctgggtgttgattttttaactgtaaagttttatcctttttactattgaagtgtattttttgcccttcttttactgtctgtatattctgtttcaaatttgaattgtatagtttttctttttttgtcaactatctatttgaagagtaattttttttttaagacaaattatgtatttgtttgtttcaaaaatttcaattggttgatggatgcaagtgggtagttaagaaaatggattttgttgttgcagtccaaagaatccagctcttctgggattga

SEQ ID NO: 49358 - DNA, 680 bp, Ricinus communis
  Intron number 1 from transcript 28067.m000106 (locus 28067 .t000005) derived from phytozome v7.0 (chr-ID 28067; pos 5 9873 to 60552 reverse strand)
actgtcttggggttttacgtaattccactgcttattttttctgtcaatgatagttgatatggtattctttagtattggattttggttttgttttcttttttcttctttttttttttttggttataaagtctccatttattttggttgtttaaggaaatattctgcctcagcttttggtttggtagatttctatgcttttgcttgtttggatgttcattaattttcttgttgttttatcatctatctgtaactaagtatttgttggtttatgtgaattgggtaatggtggcttcttatagtactttgggtagattagccattttaaatgaaattttaatgtgtaaagttatttatttattttttaaattgataggagttcaggttttattcaaaagaggtttatgataataaggagtactactgtcatggggaagctgacataatgggcagtctattccgcagtctgatttgttttcgggattagtcttgtgaagcaaaatgtaatttatatatatatttgttgtatataaaatgtttgacttaattttgttcttgactgttttttattgtttttgatcactttaaatactcatttggttgactgaccaaaagaaaaagaaaaggaaaaatcgaggagatggcatgatttacattcatgctgtttgtttcaggtccggaag

SEQ ID NO: 49359 - DNA, 374 bp, Ricinus communis
  Intron number 2 from transcript 27395.m000079 (locus 27395 .t000001) derived from phytozome v7.0 (chr-ID 27395; pos 6 66 to 1039)
ggtcttaatttcgagagagtcaagtaaggaacttttttactcttctctagaaatttattgtagacgtttcatatgttatgtttatacatttatatctcagttgggtaactttaatttgattgcttgatattgtgatatggttgtgttttatattaggactttctggtttactatttttttttgtaaagggacaactgagaatttcagtagtgactagtctcgactcttattgaattccttttgaaatcctcttcttgatcaaacatatcaaattgataataagtgttaatggaatactcaattggaaaatttcttctgaaaatttgggaaaatataatatggaaattaagtttagggaaggactcttggagatt

SEQ ID NO: 49360 - DNA, 975 bp, Ricinus communis
  Intron number 1 from transcript 29738.m001043 (locus 29738 .t000045) derived from phytozome v7.0 (chr-ID 29738; pos 3 69873 to 370847)
cgaagctacgcagcttactacctagcaccaccaaagtaagtgtccgtataataataataatctttcagaactttggcaaatatgaaggcaccctctaaaataagtttcgttgtatagaataacatgcatgtgcatataacaatgtattgtcataaaactttttgtttggtcttataactataagccccctctttttccctttcaaagatatctctgccgttcttcttaaagattctagttagatgtctggtctgttaacaatccatgaaaacctaatctttacatatgaaaggttgtcacattttctgtcttttgttaccttttcttcttctaatacaaccttcttctttttttcttttggtttatttattataattattattattcctttccttctgggacttgtgtggtagttccgaggagagaaaaactaaaagggaataagcgttaatgtcgctctgttgatatgataaagaggaaccaaagagcagttgaaaagcttccatggaaatttcttgccggatataacagtcaaactaagtagagaagtgagttaaaaagaaaattaaaataaaaagattaaagccagacaagactagcattcttgtcagtgatatagccatgccctaatcctcttttattataacaccacaccattttcactcaccgaaaagaaaaccagaaaagagaaaagattgcttttacatatataaatatgatactgtcttgattaatgtcaagtttaatctactaaaagaatgtgacaagttcacctttattgggtcatttcttgtaacataatatcgatctctatatgtttcattctttcttcctttctttttggttcgatgattaatggacaagaatcatcaaactttaacatgacatattaatattgtcttcttcttctttttgtgtttctgcttgtgatatattgtagacggacaaagcttctttactagcggaggtgatcca

SEQ ID NO: 49361 - DNA, 479 bp, Ricinus communis
  Intron number 4 from transcript 28883.m000741 (locus 28883 .t000031) derived from phytozome v7.0 (chr-ID 28883; pos 1 72172 to 172650 reverse strand)
aaagaaatcaggtttctttttatatataaatttcatttctctttttgggagtctttttctctactgctgcaaatatgctatgtttctttttgttgtatatatgttctgttctcttatttgttttctctaattggaatcttttttctcttttgttggagtaatcgtgggtcagctttggaattgagaatataatcctttgtaatttgtattgtattttgaatcgtatatgaaaatttatgctagattttgcagaataatctgcttttagttcggtaatgaccattcggacttttatagccactaaggccaaagaaatgtacaaggaaatgaacttaattatttatctaaagagagataagacgatattttaaccttgtgaaaattaatttataattgtactattcttttcccgccattaaaagtttaagctactgtttatgagcttcctatttttacttttgtattgattatgtagctcc

SEQ ID NO: 49362 - DNA, 577 bp, Ricinus communis
  Intron number 1 from transcript 29801.m003184 (locus 29801 .t000129) derived from phytozome v7.0 (chr-ID 29801; pos 7 20667 to 721243)
ttgctagattcttcctcgacaagttcatctttcgtgtaagcagtttctttgagtttgattctatctagttaaattttcttttttttaattttattattaagcaagattcgttgttacgctttcttttcttgctactatataataataggaaatgtgagcagtttcatatttctttttaattggaatctgtttgtgtgaaatgaaagatttactggaattatttagttctgttgttgttttatactagattaagtgatgtttcttgctcgtttcaattgtgaattagtaggaaaattaaagaagctcaagattcaaagttgtgcttatctttaacatgtaatgcgaaatgtagaatttcatgcatactgtttttgatcggcatcctttctttgtgaaaaatttgggggaattaagtgaatctgcttagaagaggcttttgatttctgtttcttttcctgtctatatgtaattgctagatattgttaacatgtggttgatatttttcttataaattgttgctattattattattattattttagaggctggcaatttggtttgtgcacaagaaaaaagg

SEQ ID NO: 49363 - DNA, 793 bp, Ricinus communis
  Intron number 2 from transcript 29647.m002081 (locus 29647 .t000089) derived from phytozome v7.0 (chr-ID 29647; pos 5 43224 to 544016 reverse strand)
ggagtgcttttgcacttggacttcttgctgtcaaagtaatcaacggattttatttatcttcatatttgcatatttcttaggttattagcagcataataaactactacattgtgactctgatcagatggatccagtttccgctgttgctatattttatattgactcaatgtcgattttattttttattcattttatttttacttcttttgattatttttatttatcatttacatgtttgttgattaattgttgcaaaaggacaatgagaaacgtctatgatatggttaatactacttcatttgtgtttggaaactctagagacacaagaatttcaattcaattcaattcaattttatttggtcgattattgtgttttttgaaagcccatagttactattctctcaattaaatagaaagacacacaaggcattttgaaagaagtgaaactatgcttgagaaataacatatggtatactccaaacaaatcataaaagttgcctgtgattgttattggttccgtcattcaattggagtgacttaaggatgtccatagtgtatcttgatttcaatatctgttgtcaatctttttccctaatgattcatcttgatgcattcttaaatatagagtttgtatcttcaactttcagggttgagctatattgcaaacattggctttctgtgtgtaagctatgcatatgaaacttcttttttcctgtagttcttaattttgtaaattttctctatcacttgatgagtagcctgagcatcaacaactcatagtagacgccggggc

SEQ ID NO: 49364 - DNA, 281 bp, Ricinus communis
  Intron number 1 from transcript 29748.m000386 (locus 29748 .t000010) derived from phytozome v7.0 (chr-ID 29748; pos 1 96651 to 196931)
ttactcaaaagcatgtaagataagacactttttaacatagttattatctttgattcacttatatgaagaaaaatgaaaaataattgtttgattgagtaagaagtaacaggagaagaaattcctaggcaggacttttgaaaaaatttgtgattatgtgatgaacattctctaacattttggatactcaattatttcttttctagaaccttttttagataaattttcattgatatatgctttcctatgtgtttatagtttttcatgtttaacttgttccaggg

SEQ ID NO: 49365 - DNA, 632 bp, Ricinus communis
  Intron number 2 from transcript 29671.m000298 (locus 29671 .t000007) derived from phytozome v7.0 (chr-ID 29671; pos 1 75298 to 175929 reverse strand)
ttcgaagtaagtcatgaaaatgttagcatatttgtgaatccaaattgacttctatgttcatgtttttatatatggattttgatatgctttttagttttttctcttagattttggtacatttttatggaaactcaaagctgaatttctaatttttcccttattcttttaaaataattgtaatacaatttatgaaattaagcgtcatttaaattgagaaatttctataaaatttataggtttaaattaaatttatcatttagcaaattaaaagaagatgaaaacccataaaatttcttgagaaaattaccatccttttgaattcttcatttttatatttcaactgaaagttcttaaatttgtgaatgaaacaaatgatgggttatgatatttttattttactattattattgttaatgcataaatgttacaattaattccaacttctattcttttcattactcacaaatctaaatttataatttcttttattaaattcataaatttcagaattctcaatgtaaatagagctgaatatttacataaaggagatgttttttccttttcttttataatatctttgatctcatttgttaaatcttttctattttgcagagatcttttctgcaacttca

SEQ ID NO: 49366 - DNA, 590 bp, Ricinus communis
  Intron number 1 from transcript 29631.m001054 (locus 29631 .t000061) derived from phytozome v7.0 (chr-ID 29631; pos 4 05915 to 406504)
cagcatcccaaggtttgtacttctaccttaatattaatcatttctatttgactaatgcatttggactaattatcatgatatcatcacgcgcctagttttatatctttctaaagttgtttaaaacttgaaagtcttacgtgatggatgatagcaaagatctggagttggtggaatatcttactaaaaccgtgaacctattgttcatatacatgtctattgggaagatttaatggacccgatggatagcactcacttggtcttccaagcttcaaaataaaagttctgtttttttttcttttttctttttttattctgttgggctataaattggtttgctatgagtgcaagtataatgcaatcaaataggaaatatacaaatatacttgcagacttctctcacttgatttaaaaagatccagttgtcagtttaaagattgtggagtaggagcattgtagtcagctttttgaaattcagcctttttctgatgtgtgaagcttaacatggaacattgatgtttcttaatttctagagaaaatatgatcaaggtttttattctgttcattctgactatgggtttcatccagtttga

SEQ ID NO: 49367 - DNA, 849 bp, Ricinus communis
  Intron number 2 from transcript 28966.m000526 (locus 28966 .t000005) derived from phytozome v7.0 (chr-ID 28966; pos 6 9983 to 70831)
ttgtcatttgccccactagggaacttgccattcaggtgagtttattattcttctaaccctttgtgctcacaagagttctgttcccgacaataatttatcaactagattactagaatacatggagaaatgatctttaatacaaatagtaacattactctgatatatgagctttttctgtctttttcctcattttgctttgcaaaagtcaaatggaatgactttccttcattagtattgaagatggtttccctcttgcaacctatttatgggcatggtaaggaaccccattttattaagaatgtttaatttcttttacatacttaggaagttgaataccagatcttttgtcgtctcaatgtcaatgtgaatgatcaagtatcctactctatatggattagaatatgggcttccttcttttggtgcagaagctcgaaggcttttcatcatatggtctgaaatgtcaattagtttgccaaacaagaaaaggggttttaacttgtttggctgatttagccatgcttttatatgttgtgaactgctgattatcaatgttagacatagaatgagaaggtgatcctactttttattattctttctttttttctttttggcatctttaactagttaatttgcaactgttgttccagaatgatatttattatcaccctttagtttcctttacttcgttttgtcctttaagatgtacctattggaaggagatataattagataagctcaccccagctcttttattagtgaaaagtaatcaaattatggattcctattccatcctggatgtttcaactcttgtattcataatttcatatgcttatttaacattttagactc

SEQ ID NO: 49368 - DNA, 595 bp, Ricinus communis
  Intron number 2 from transcript 29736.m002010 (locus 29736 .t000006) derived from phytozome v7.0 (chr-ID 29736; pos 5 3189 to 53783)
cagaggttagttttattcattaaaatacttttttgcattttcttttcttcactatagtatatgcacccttttcttgaattgttttttaaggaaaattatagcttgtaggagagtagaacggattttgcatggaaactacaataataattatttgcagttgcagagtaaaatttggagatatgatcaagatcatttctttcttctgtagtttttgctttttgactttttccttctgtaatgatttttataaacctttatttctgttaacttctcgaaccaatcatggctttttggcaaaggttcttttcttgtcattagtgcaactttttgataggttgcttcaaccccaaaaagaaaggccaaaacaactaagagattatggaaaagaaaaaaaaaaaaaaaaaccttttaagtgattgattgattcttcatagtctgaaactaaagactaataatgactcaaaaagatagatagatctctattcttatataatattatttttttagtggaaggattaatgaaaggttcttatgttcatatacacaattttataacaagattgatcttgactggtttaatttattggtgcagata

SEQ ID NO: 49369 - DNA, 807 bp, Ricinus communis
  Intron number 2 from transcript 29794.m003476 (locus 29794 .t000175) derived from phytozome v7.0 (chr-ID 29794; pos 1 162341 to 1163147)
atcacaagaaaattgcttcaaggtaattacttcttaatcttacataatattttatttttacattccattctttattataagttaaaagttacagaattttcctttttccttttttacatctcgtctttttcttaaaatactttacatcaagtgaaaagaaacatagttgttctgggaacaaggcagttgtcgttatgcaggcataggctacaaataatagtaattaaggtttttgtcatcaagcatgataatcaaagtgaatatcatcacgtgaaggtggaatcctaatctaaataaagtcatgctaccgcactatattattcagttaattgaatccatgaccatatttagtatgttggagtctgtattttcttcatgtatgagtaaggctacctctctctgacttcgtgacaatatgttatacatactttagagactggtgactctatacaactaggtagaaaatttttacacaaaggagcaagcagctacgcaacaagtcttaccgccaacatggacaaaataggtatcttagggccaggcgtacatcaatctattcagaatctatccagggttaactgaattcaggcgtgtaaaatttttgaatttctgactcagaatattttaagtatttgattctaagtaagttcgattaaattgataactcctccagcaataattacttcactgcctctgtatcttcatgtctacttaaagtatattctacgaggcttttaatattaatgccatatttctactacagtgaaccatttctgaatctttttttcccaggtatctcacaagctt

SEQ ID NO: 49370 - DNA, 1018 bp, Ricinus communis
  Intron number 1 from transcript 28166.m001091 (locus 28166 .t000054) derived from phytozome v7.0 (chr-ID 28166; pos 5 00641 to 501658 reverse strand)
tcttctagcaagctcaaatctgtcgatttttacaggtcggttcgatcttcattgctttgttgttaatcagattatttatttgttttaagtaagcattttgtacttatggatctgaagtgtgaacagcacggattattagttgtagtcattaaccaggttttaaatgtaatgaaataggataatttgatttagtgtaatgtaaattttctgttattattttgaattttggctattggcatagcataggaagctattagtgttccttgtctagctttggtgtattagtttaatagttgtggttactggtttgtttctatgtttcttgaataattatgcgacgccgagatttgtagcctattataggtttgtgatgataattgcacaaaaattaatatttgtgggaagattgaagatcttcttcctcattttttgtggttatcataagatttaattatatgaatatagggatataagaagaacacaaaaagtaaaaagaattgatgtagtaacgtgtgtaatttaacgagagaagaactttgaagtaatgacacagcaataaataagcatatgagatgcgtctgtaactgtgataagatattctgagcttatttgagagaaagaacactgctcttagcttgggattcttgagcgctgcttctccttcaaatgggtttggacttgacactttagcatgatctccctggtttattacggattcattatctaaggaaccaccatgtactcataataagggtacactaattctttgaattttttaaggactgattggaaatattaaaaaagaaaaaaggacaatgccttgttcatatttctttcttcttttcattttgcttttggtggtagataagttcaaaccaaatgacagctgcactactgctgtaactttgcatgagcaagtcataattgcagcataactttatgcactaaaattttttttggctcactccattttctgactataggaaaattccaagagacttgactgaagcatcattat

SEQ ID NO: 49371 - DNA, 608 bp, Ricinus communis
  Intron number 1 from transcript 28718.m000037 (locus 28718 .t000001) derived from phytozome v7.0 (chr-ID 28718; pos 1 6656 to 17263)
gccaattccgtaccactctcttaccttatcccgatattcttttcattttatctgttcagtaattccgagttgttatttcaactttattaaccgagtaactaattacttcattccttttgtttttgataatcggatatgtttagttgctataggatatttaacattaatagatttcatttggagtagattttattgttttcttttcaagcacttgattttatacataaatcatgctattaatgtatgcgtctttactaattgaggtctaacgatcattcttttctaatttttagtttttctttttcccgagtgcaaaaggcaaatggaaattattttatgtgcttttgtaattccttgtatgctatgttgatgttggcagcttatcagctgcaaaattggcattttaagttgtattagattcctgcgataagtgaaatggtgttgcttgcccttagtacacatgtttgggcttttaaagataattagctaatcaaaagcacaacatgattgaagtgtcttgctcttcacctttacttcttttttttttttttttttttttccattattatgtagccaaaaagtggagtgtatacagtgggtgattttat

SEQ ID NO: 49372 - DNA, 308 bp, Ricinus communis
  Intron number 1 from transcript 29693.m002035 (locus 29693 .t000073) derived from phytozome v7.0 (chr-ID 29693; pos 5 44895 to 545202)
ggtaaccatttgtttccacttctcttttccttttatagccttttaaattatttttcttttggcttgtttcttttcaaactcaccctaactattcaaacagtctttctcgacacttgcatctggtttttgcttttttttttttttttcattgggtctcaattgatgaaaccttgaagatagagatagttttgatttctctttgtattatatgttactaaattaagttgctgattagatgaatttgtgcattttttcgtttcctcttctgtgtagtgtcaaagataagagagcaaagcctaaaaggatat

SEQ ID NO: 49373 - DNA, 698 bp, Ricinus communis
  Intron number 1 from transcript 28179.m000468 (locus 28179 .t000013) derived from phytozome v7.0 (chr-ID 28179; pos 1 13020 to 113717 reverse strand)
cgctccgatttcatcgattctggtgaaaattttaggtaagcgacctcttttcttatcatttttcctaatttaattcatctgattttggatctgtttttttttttcttttacttttgaatggaattacgattcgtgttttaacagttttaactgatattgaaattcttctttttgcaaagaacatattttcttttggaaatgatccgattctagcccgatttggatcatgtttgttcacatttaaactattggatttgcatttctctcaatttccttaaaaaagattggtaagcaaatccaatcctttaagatctataaatgtgtttttttttttcttactttctcttttttatggttatttgttttttgtgataatcgataccaaaccaaggaatttatagaattaaaaaaaaattaaggttgtttattgatctatgttcttattacgaatagattaattttggcttggaaaaccgattttctgagctaatttaaccgagtattattaaattatggattgcttaattcccatttagcttccttgtatttttgacattgaaatgctccctgaataaagtaccagaatttttggtctagttcaattggttaacttttgctcatgccgtctaatttttttaattaatgtctattttcacatttcagacgttcattagttgtaagcagcagcgcattgatcc

SEQ ID NO: 49374 - DNA, 940 bp, Ricinus communis
  Intron number 3 from transcript 29815.m000507 (locus 29815 .t000019) derived from phytozome v7.0 (chr-ID 29815; pos 1 45331 to 146270 reverse strand)
gtgtcttatatcaggtacttatctagaggtttgttggtatttggtcttccttgacatttaactttcattttctagtagtaatatcttttctcattttaactggatttgaaatttgtaatacattagtaattttggattttcggggctgtttggttgctggaattcaactttccgatccacaatcactataccaggaaagttgaacctcatacaagtaattccagggatcagcattaccctgtttggttaaacataaattttttatccaaatcttgattattatgttcaattaaagttaaaagatgaccatattaccttttatacaataaatatttttgaacatttaacaattagaaaagtttaaacttcagctaaattttcataagaagtatattataagtatataacaattatgtactgaagcaacataaatatcgttcaataaaatattttaattatctaatatttgaaacagaaaatttggaataaaaagaaattaataaaaaatccacaaaatgtaattttttattttgtaagtaataatagttagagggttattttagttgatatgatatctcttagtgttacattcccattggaagtaaattttcatggggaactagaggtggagcctataagttcaggaactcaactttcttgagaattcaatttttgttaaaaaaaaaaaaatcactagaaagttagacttctgagcattccgccaaccaaatgcctccatatatccactctaatataatgagcagctgctaaagttattatcaattgaaatggcatctatttctttgacatttgacttctaaaacatgtctattttgttatgtttatttacctgaaaatttcttttagttatgttctgctgtattttaattttaaaaccaaaccagttttcccctcttgatacacctgctgctgtggacaa

SEQ ID NO: 49375 - DNA, 442 bp, Ricinus communis
  Intron number 4 from transcript 27401.m000275 (locus 27401 .t000001) derived from phytozome v7.0 (chr-ID 27401; pos 9 947 to 10388 reverse strand)
gaggcttactataataaagctttgtaagttgttttcttttaatccgcctagtcttttttctttttcaatttattatgtttaattttgtgtgtttatagatgagtttcaaaagtaacccattaaagatttgatttccattattatctaatttttatatttaatttattcttatttccctaattattcattgaaaagttcgcttttatttggaagtatgaatttggtatttatgcataaaatggaagatggctgtatgctaaacatggataaaactagctttgcttggatcgttattttcgtggcatcatcttatatgcagtctcataacctgcaagttggagaattttagacagcaaatagataaagaaatgatttagtttcttacttggtgctacatgctccctcaggtctgctggaaaaagactaatctctctgattgctt

SEQ ID NO: 49376 - DNA, 814 bp, Ricinus communis
  Intron number 1 from transcript 29080.m000175 (locus 29080 .t000007) derived from phytozome v7.0 (chr-ID 29080; pos 3 2628 to 33441)
gataaactgcaattgtattcctggttgtgaggctggtaagtatcttgcacaatccataaacatcttcccctgtaatcagtcattcctcctattattatttttcctgaaaaatggtgacccttaaggtttgtatttgttttagcaattctgttgctccatttcaactagataatacaattccacgtgtaaaatttgttactaaaagcagcaatattcgcttatacatacatatctgtaatttactgcaataataagctttcgtatatgataataaaccgactatcaaaataagatcatattgatgatagatgtcaattctgcaataccttaggaatgttcttctcctttgagaggtaacatggttgaatatatagttttgatatgcaccttgtatataaatataaaaaagaaaaaggtgatgctttgaaaaagataaaatgaaaagtttatactgcatctcctcctctacaccagtagttacttttgtttcatgtctcttttcctgatagtaaagatcttgagaatagtatcttttttttattatcttggattgaggaacgagacatgtgcaggcctaggtgacaaattagattcctacaccataatcgaccacatttataacttttactctatctgtatacttaaatatctgctccaagtaattccagtaaaatatattgtattttcaagatttaaagtgagaatagcagttcttttatcagtaaaatattgtattttccctgttgattgttatacttcatgttcccgacgattattggtgactaatgagaaattattgaatgaaacagataga

SEQ ID NO: 49377 - DNA, 1015 bp, Ricinus communis
  Intron number 1 from transcript 27732.m000278 (locus 27732 .t000006) derived from phytozome v7.0 (chr-ID 27732; pos 4 6755 to 47769)
tccgccttagcttcctcctccactcctccttcaaggtaccctttcatttcttttcaatttatcactgtttgttttttgatacatattttgttaccagagttttagtgtgtgtaatgggtatgaactcttagttatttttgtcaataattgattggatgctaactgaatgaataaagaatcggagatgcccactatgataattcttgtatcaagagaggaaaaaaaatgagattattaaaagtaaacgtaaatagaacaactgattgaaagaattactcaaacttggttttctttgcctggaatatttcttttccccttcagctgtaaatatgatttgaagtttgcaagattgtgatttcctgtatacattatatataacttatctttagattaaacttttaacttgttggacttgtaaactctttcctctaaaaagaaggctgttgttttgtttttcttattgttaatggagattttgtattgttcttgaataatttgggggaatttgtctttatcttgctactgttagcaatcaacatttgtttgtaatagagttttctttgttcttctgagtggagaagatctgtctacattcttcctacaacatatatgtatttccatttgaaatgttataaagtagaacatataattggctgtttgctgcactttgttccccatagagcttaagaaatgaaaatgctattatgatgtaatgggaaagaagtgacactgggtagctttcagccttgagtaggcatgttatatgcattttctttatattttatcattttcatattacttagttaatggtgttgtcaatttttagttgtgttaactttttgctaatactctctacaatatatttaaagaatctggtgactgaatactctctgtgtaacacacatgttgcaaaattttccttcttgtaatgtcacaacttgtttatgtgctgagagtatttttgttatttagcttttgatctctcctattggacagaaactctctcatctctgtc

SEQ ID NO: 49378 - DNA, 922 bp, Ricinus communis
  Intron number 1 from transcript 27964.m000365 (locus 27964 .t000020) derived from phytozome v7.0 (chr-ID 27964; pos 1 68509 to 169430 reverse strand)
caccacaccacaaaaacctaaataaacactcactggtacgccaaattctcactcacttattatgccttttaatttctctttttttgcctttctgttgcccaaaaggtttatgcctttacactttgccctattcgatgctttattaattttattttagagctcattgcattccaaatctgctaaattttcagtttttgttttagggttttgggttcaaagcacctgctacatgatcctttttatttgttttagatttatctgtctctcctacatagggtttggggatgattcgtgcctccccttcacccttgctgtctttttagataacccttaattaagggtcgaatcagttagcgtttgtgggtattgttgctgctttcgtttttgaattctgactattaaattttggattggattttttgcaattactgtccggcttctttagggttgagcatcaaaattctgtctttgatctaaaatatgaatattttttccctttttactattgattctaccctgcccacttgcagcaatctagctattcctcctttttcttggagtatttgaaagtgaattaaaagataaaatttgaaaaccttatcttacttcactcgagtaaatcactggtatcaccgacagctttccacctcttcaatggaaaatttagcttttgtattttttcctctgtcaaccagttcgagcaagtggaaattagttagtccgtcctcaaagtatatatcatatttgatgtatcactatggcaatgttctcatagctgctgctattcttagcagctacaattctgtagtttccctgttactatccgacccatggagagttttcagactctaagtttcttccagcgttttgttcctctgtgctattttccttcatcagttcttgtgcattttgcacaggttcc

SEQ ID NO: 49379 - DNA, 420 bp, Ricinus communis
  Intron number 1 from transcript 29795.m000032 (locus 29795 .t000002) derived from phytozome v7.0 (chr-ID 29795; pos 7 977 to 8396 reverse strand)
agagcaaagcgccccgttcttcctcgttacagtaatttattcctttcacactgatatctgattttatttttttaagtgtatgtgtgcgtgttttgattggttgattttgttatttgttcatgcattattatttttgtaaaagaattggcttgtgtcctaaatttgtaagaaaggagcaatctctcttatctgtgatttttttctttttgtttaatgtgaagtgtactaatttgatttcttactgtaattttactttgtttgttttaaacttaaaactgaggaaaggacaagtttttgggcttttttacatttattgatttttatcgatgtttcgggggttagcttttgattattgatatttttttttcaaattttaattttcaagtcacagattgtatttagaaaggagaaaccagagga

SEQ ID NO: 49380 - DNA, 812 bp, Ricinus communis
  Intron number 1 from transcript 29620.m000539 (locus 29620 .t000009) derived from phytozome v7.0 (chr-ID 29620; pos 7 6404 to 77215)
ttgagattgctgataaaggaagagcttctgttcaggtatatgttttatttaagcttgttggagttatggtaactttttggtgagcggtggttaatggcataatgagttggttttatctacctattttacagttcttgaactcggttgcttttttgctctgttcagggtaaaagtttgagttgctttgttgtgttatattgattatgcaagtaccaagtaaagttgctgatgattaaggaaacatttgcaattatgaattgtgtttggaaagactgaaaaatgcaagaattaatttcaattaattctattagtcaagtttcatgtttgaaaagactagttacacgaatccaattcgttcaacttgaaaaaaaaaaaaggggggggtattggtgtttgaaaatttgatacattcaattatagttagtgtgctaattatggctcttaatctatttgaattggttgcaattaggttggggtttttgtagcttgtggaagagtttacagcttttcttttcttaaattgagtttcaattgattgtggtgggaattaaatattgattattacttttggcactgaatgcaatgtgcatttcagctgcattgttcgtatacttgtgtttatgatatattttggcaaagaacttgtttttgtttaatcttggtctcatggttgtagcctaactcacttttatttgttagtttagttgctcttttcccttagttatttcttctacatgtttgttcgctcatattttatctgccttctaacaaagggaaattgatgaatgctgcttgtgggtaaggttgaaggc

SEQ ID NO: 49381 - DNA, 770 bp, Ricinus communis
  Intron number 4 from transcript 29729.m002352 (locus 29729 .t000085) derived from phytozome v7.0 (chr-ID 29729; pos 4 90548 to 491317 reverse strand)
accgtgagcccccacagaggttcctcaggcgcagggtaaacttcatttcttttcttttatcttcttatgtttttgttttagtccgattaccagtttcctatgaaattacagtttgatgataattttgggttctggttttttgtcgtgttttaatttcctggccatgttctccattctctgttagtatctcataatttataagtgatttatcctgaaaattaggctcttttcaacctaagtaatgcgtgaatagggtatacatttactgccacttaatttttcaaaattatattctcattccctattaaggtttaatggtctgaaagttgaaagcttgtttttgtttgacccctgtttccttctttccctacaatttacatgtctttggtaatgtagctgaatggcgtggttgtctaatgtctagtgcaatatctaatatgcaaaagaaatataaatatggttgccatgatttattttattcaatgtgttaattaagtgtagtcctgttactttatcttgaagctgaactttagattatatctatatactgattaggctcgctgcctttatgttggattaatatcctaacaaagataaaatgaatgtgttgctatttttgatcttcagaatatatatactatcttggctttctgctccttttattgggtttgatgttctgtgaatagtgtacatcccttgatttggcttgtgctgtgtatatcttaatttgtcacaagttattgatttgctttgtggtttttaattgtagg

SEQ ID NO: 49382 - DNA, 632 bp, Ricinus communis
  Intron number 1 from transcript 29785.m000958 (locus 29785 .t000027) derived from phytozome v7.0 (chr-ID 29785; pos 2 93354 to 293985 reverse strand)
caacctccctgtgcggtactatatctttctcaaaggttgtgttctcaatccttccttcccaccctctctcactttctcaaataatctatccatatatcattttgattcctttaggttctcttcctttttctttaagttattgtattttctgctatttacatgtgagaatgaaattgctgtaatctcaatctgaattctgcttagtttctcatccatagtgtttggagagattatagttgctaaaattaattattaattcatttcagattatcctaattttgaatggacatgattattagatgtttggaatcttgattcaggaacaatttctgaagcccactttgctaaataatgccacgttgtggtctgccactgccattaacttttctgctttgtcccacatgccactttgtcccatcaatcatagctattgttggaaagagttcgattcaattgagtttctgcaaaatcatgttaatctttgcatgatttcaagctgaattaagttgcagcacagaccaatgatttgaattctaattgacattgttgttctttttggtagattaattgtgcctgtatgctatttgtggagtagagcaatatctcgagacagtgacaaagggtttcaaaca

SEQ ID NO: 49383 - DNA, 477 bp, Ricinus communis
  Intron number 1 from transcript 29726.m003999 (locus 29726 .t000111) derived from phytozome v7.0 (chr-ID 29726; pos 6 53160 to 653636)
cttctctttctggccttctttattgtcagaggtatcaagttcttcacttacaaatcagtctttttctttgtgtatgtgatgttttatactgatttcgctctttagttacaaagaacgtgcataaagtttaatttaccattttcttttccttttttgtttgctgataataaaatttggtgtttgtgtgtgcatttaagtggtgtcaattctttaacaagtacaagctgcatcatgcatcactggacaaattgatctatctgttttacagtttagtttttcttttatgaaaagtatgatgataataccagcatttgtctgtattttagatacttccaagaattagtttgaactttgagttcatttatcacccagcttattattcttgaatctcatcattatgctcatctgttgctcaaatagttccaatttattttctggtggttgctcattatgatttacttgcatatgtcaggtacg

SEQ ID NO: 49384 - DNA, 534 bp, Ricinus communis
  Intron number 5 from transcript 28011.m000076 (locus 28011 .t000001) derived from phytozome v7.0 (chr-ID 28011; pos 3 816 to 4349)
gacaattgagctttagaggcaagagggttctcgaggtaatgaagttaataaagaaacttttgtcacttatttttcatgctttggatatatgttttaaggtcttcctgatggattacagtcgggaggagcctggtcatttactaatactgtgcgtgtgcaaatgtgcttgtacattgatagacactttgaatagcagtagccagtatttgtttatttcgttggttaggacaagatatcattaccttatcatggaaattttaaaagaatgcttaattagatggcttttggattcagcgcaatattctggttgtggccctgaagctttttcccctgaaatgttttaattaacattctctatccaatattagacatacattcaagaaaatttatactttcccttccataaggatatttaggagctataagcagttcttgatatcatgctgctgtgataactcttttctcatttgaagtaatataattgtcagctgattcttgatctttctatttgattcttgcagcttggttgtagct

SEQ ID NO: 49385 - DNA, 642 bp, Ricinus communis
  Intron number 1 from transcript 28431.m000052 (locus 28431 .t000003) derived from phytozome v7.0 (chr-ID 28431; pos 1 8807 to 19448)
aggtacttttttcttttatcattttcattattattactattatttcttttcttgtttggttcatgagaaaataaaagcacaggaaaatgtgacgaaaacagagttccgaagttttagcatctgattttttttttttttattcgctttttcgtcatccaaacaatggactgataaatttacatagttacatactttttgtgtcttttaagttccctatatatggaattaatatttgatttcacatctacgattatttttatatcatagactgttgttactttataaattgtagatcgctgtggcgctgctgctataagtagctaggaaaatgtagaatatgtccaatttatggataattttcaacagaaacctaataatgtaacttggatatggatcaagtatttttgtagtgctttttgaatatatgtttgtttcgtgttatgcgtgtttatctcggtatatgctactctgatagtaattgcatatttatggtaagtataatttgactctggaatttactgcgcctccaacattgtccggggggattatattttgtttctagtatctaattgatgcgtcgtagctaacaagtgattttatgctgcagcttttgtgcttaactgacttggaagctgaccacat

SEQ ID NO: 49386 - DNA, 371 bp, Ricinus communis
  Intron number 2 from transcript 28431.m000052 (locus 28431 .t000003) derived from phytozome v7.0 (chr-ID 28431; pos 1 9594 to 19964)
cggtaagtttaactctctttttatgataattattaattagtgctcacactgaataccaaagtctattttcaacaacgagatgatactatacatttgggaaattgatgactagcaatatttagctcgctgaatggctattgtctttttttcagttgatgttgttacaagctgtgttgaaatgatatgatcattcacttttcagtgagtttaactggtagaaacaggtgtacaagtgaaaaaatatgccgacttcttagcccattgtgacctctgttgtttcttctttgagctttctattcttgcgatattgtacctgaaatgtggctgttctattttgaaattcaggttttggaaacgggagcatcttattg

SEQ ID NO: 49387 - DNA, 692 bp, Ricinus communis
  Intron number 1 from transcript 29794.m003447 (locus 29794 .t000146) derived from phytozome v7.0 (chr-ID 29794; pos 9 44892 to 945583 reverse strand)
ggtaaattcagctccttatttgtatcccatctcacgtgttttcatagacgcttgtcttttggaacatctttaatcattagagcatggaacatctttcatcattatagcacagacacatttttcatagcaactgctatgtgcatactttggttgctgctggttagcttctgtgcaattgtttctgtagctttcctttattttatgccacttacaactacaagctataactaatagagttaaaaagcatgacatacatagttttaatttctttcttgctgctgcagttatttataattgctggcatacatttccttactttatgcccctctacatgatattattattttgttcttctgttcctcttcttggaatatgaactttttatttgcaagctttttaaggattgtaaaatggtcattctttacaatggtcctctacatgatattacactattttgttcttctctttctcttcttggaatatgtagtttttattacctagtagtttaacattttaaggattttaaaatggtttttctttacaatgcttactcttatgttgctatgactcacatttctttgattgagagaatgacattatttattcttactaaattgggataacattatgtaatttatactgttgttttatttgcagaaggaccagtggcccagcaaggcgttccacaaagg

SEQ ID NO: 49388 - DNA, 816 bp, Ricinus communis
  Intron number 3 from transcript 29801.m003113 (locus 29801 .t000058) derived from phytozome v7.0 (chr-ID 29801; pos 3 41463 to 342278)
actcgagtgcttttcagaactttaaatactgataggtaaacgccatcgatttcgttgtgaaaagttaccatgtctctagtggtttactctgaatgtctgagctgaatgaaacactggggttgggttccaatgtattgaaattgcaggacaagacatttctggttttgttttatatttgcatttgagtctaagtataaccgagatgacaattcatgggagagattttgggtaatgtgttgttcacttgaaagaagccgtagcattcctcttcaaagacatcttcataaattcctggtacaggatcaccctgtttctgtccttgaagttagcaatttgcataaattgttgcagtatgcaatgtttggtataaggaattctatatggaaaaggagcaagtattttaaagggaccaaaaagtacaaataacttaaaagcaagagtaatatgatacaaattatgttaatctattaaaaaccaaatacttgcaacttggcagcttagaactcaactgcttgaggagataaatcttttgagttacaaatgagggaaggaggacttgaacttgaaacctagtttaaattgagatatgtatctactattaggctaaacctgtgtgtgcgtacaaataaatttattctgtctaaggttagttctttcaaagttgtgtttcttaaaaataactctttaaatttatttgtatgactagcaaaattatagataatttttgagcttttgttgtatcccgaaggcataattgtcttcctatgaatttcagaaatatacatgaaattagtatacctctttttcaggaagctt

SEQ ID NO: 49389 - DNA, 910 bp, Ricinus communis
  Intron number 2 from transcript 28617.m000213 (locus 28617 .t000010) derived from phytozome v7.0 (chr-ID 28617; pos 7 9249 to 80158 reverse strand)
gtcaaggttctttttgagcaaattctcattacagagtacgtattcttttttgagctgttttacctaaatggttttgaattttgcagactagagtataatttgattggcatttagagtgaaaatgtgggaaaaggtagtgggggaagataattatcaacagtacttttgttcaatatattgggttcaatttcatcattcaaatgtgatttggcttgaagcaggggggtttgagggatgagtttgactgaatatttgaactgaaatttagcttataaattgatgagcactatgcacataaatatgcatggctagaatgtacaagtgactggccattttttcaagtgtgcatgcatagttaactttctaatacgaaatgtatagcattatgaaactttcaactgtcctttcgttggaaaggaaaatgaatgaaaggaaaatgacaatgtcgtaggaacctatgtcaaaaatatgttttcagatatcaaatgtcatgaatttttagccactctggcgaaatggccattattttgagataaatgaagttagctcaagatttattagtcgagaatatgggtgtgctttgtttaagtatcaatgttaagcacattattaattcatgtgaatttgttggagtgaagatctctggagctaaaaactttgatgaactatgtggctaagctgtttattgatgttggaagtttagttttgtctttattttggttatactcaaagctttatttgaacccaaattaaagttgagtgatatttatatgacacatataagttgtctttactagttgatatgtcaagcagattgatgttgatggttagggttggaaaaataactttgagatttcctcttatcctcatggcagggggaactctttgaaggacccagcttccaaggcct

SEQ ID NO: 49390 - DNA, 901 bp, Ricinus communis
  Intron number 1 from transcript 28748.m000212 (locus 28748 .t000006) derived from phytozome v7.0 (chr-ID 28748; pos 6 4155 to 65055 reverse strand)
tcttgcttgtcgtttccacactgcccattttggaggtaattaaaataagttagtggttttaatgaatgcaatcatctttataatatttgataaagattcaattattttttttatgaacttttactgttttcgtatccaaatgtgtaatgggttcagttgttgcaatcttgtttagttgttttggttttgggatttagcttacatgtggtgaagggtttctgttctttttactaatttactaatttatgtacttgatgtgcttattgtactaatttatgtattctggattgaatattatacggatttcatgtaaatgctttcaagttaagagatagaaggttccttttgtttcaagaggagttagttacagttgagttctaaggaggatagcaacaatgcagaatacataaacgaggggatcatgagttatatattccttagccaatatggacaagacaatgaggtttcattaaagaccagcaaatgcactggggtacggaaggttgagcacatcgaaagtttcaggttaaaagtagacaaggggtcgatctaggatgctatgctgtgagatagtaaaaaaattatttagcagctctgcacctttctttatatatagctctgaattaagtagaatagatgaaatcatacacggaccccaactagaatggaattagaataagttgagttatatcagttttgagcttcacaagtgagcattgggttgtcaacatcaagatgaatttatatactagattattttcagtctgaagaatatctagatgatgtataatgttacctgtgttcttttttaatttaagaatcatgtttgcttatgttttcaccttgttctaaacttaacttttcaggggaaaccaagaggaagtttgaaagtgtttactcc

SEQ ID NO: 49391 - DNA, 581 bp, Ricinus communis
  Intron number 1 from transcript 28108.m000142 (locus 28108 .t000002) derived from phytozome v7.0 (chr-ID 28108; pos 2 3263 to 23843 reverse strand)
tacaccgttgggcttacattcgattccttaaaagggtaataagattgatcatctgcatttacttctttttgttatttctttgtgtgttggattgtttggatgcaatgtatgtggtgtttaggtatgcatgtgttataaataaattaagggcatttttagttttattttattcagccttttttattctacttttacttttgttttgattgaataagaacaaaagtacaagaagtcaatagaataaataaaaaatttgataaaatatgtataagaagacattaatcaaactagaaattaaaatataaggatctaatagaacaaaataaatttgggcttaacaataaatttggccttaatttaatgaatgccagctattaattagctctgagcaactcaatattattggcgtgaagttcaaacctttcaaaattaaatgaatgccaatattatattactaattgctttcttaatttattggtgcatatatatttatatattgaataataaatgttttttttttcttttcttttctcacattcttgtttttatgtttcacaggaactggtcggaagtggtaacaa

SEQ ID NO: 49392 - DNA, 969 bp, Ricinus communis
  Intron number 2 from transcript 29669.m000839 (locus 29669 .t000048) derived from phytozome v7.0 (chr-ID 29669; pos 3 00649 to 301617 reverse strand)
agtaatttaagaaaaagcatctttatttatttgttttgttatcttaaattttgtgtttaggagcttcatgtggttatattgaaatgacttgtgaaattgattagggttctctattaggaaagtgaaccttttgctttatgttttcttggtcttcttgagcttgtgtttttcgtgaaaaggaagactcaagggtctgttcccgttgggtttagagaaggaaagggaataaatgatataacaattgttttggtaatttttgcttttgatggaaacttcaaattgaccatggtagctttgtatgtacctgctatcagtcctattggatggagaagttccaattacaatcataacttgctgataccaagttgattgcgttctgcttttccacaaatttctcttccgagtttagcttcaattggaaaatgggtgtagtcataagttcatttgcttaatatctattaaaacctgtatgatattgaacactctcatggattgctgcttcatgctagagcccatgcggatacattttgaattctgtagtaaactctgtggtttccattatctgaaacaactgaaagatattataagctaattgttgaaaacgtttactgctacctttcatacatgtgagttctgtgacatgagaagagttatcgcctggcctctgtttcttgagttggagggcagctgataattggttctccatggagtttgatcatatgtttttttgatataggaacagctcaaattatttcatcatactaaacagagctgataaggttttatatactgctttcttgtggaacttcagatagttggtgtatattattaggcaaaagaattttccaatgttttactgaattcaggtcattttcttacattcgtttaacaatttaaagctgatgataactttctagttgtcttctgttttcaggcttctgacacctcctggtacccctctgttccctt

SEQ ID NO: 49393 - DNA, 1005 bp, Ricinus communis
  Intron number 2 from transcript 28320.m001127 (locus 28320 .t000054) derived from phytozome v7.0 (chr-ID 28320; pos 3 03549 to 304553)
ttcagattgtaagtttgtcttctttacatttgcattttgttcaattatgcttggtcttgtcttggtgttgttttgtcattctccactagctgcttgcaagtcaatttatgtttataacatgtttattttagttttttttttttattaacaacttaattagtcttcttgaatattaggtcaacgttttacattttatgttaaccatgcacaattgggtgcttcatatgtagattttacaaagtaagggattttcgtaagaaatggaacttaatgcatcaaaatgacctacttaaaaaactccagctatctgtgtttcactgctctagagacccttagatttgattcttgcacgttctacttaaccataagagccgattcacagttttggttataccatttccattaagcaatcgtcttatgatgctgaaccacacaatgttgtatttttatttgcatgtatatggtctaacatgattgatatttattaaaatcatctaaggtttagttattaaaatcatctaaggcttaattgttgattgataactagatgaaagccatacaataagtccctaaccacagtctttttcttttttcctatttgaaaaaaattctttaatcaatcaaggacttacagagtgggttatggccatctacgttaggattgaacagagactatatagtaacatcttagtggtgctaagtgctgaattctgctgtgtgatcaatagatgtgctagtgcatcaatgtgctagtcctctgcattttcccctgcactaggtcaaaaaataaatatttttgttttggtagctgtttcattgttgatatgagtaatgaaagtatgtaacttgtactgagacgtccagtacacttgataagttatgcgattttgcaattcctattagtaaagaccttgattttttaagtatctgaaataatatcagaagtttgatttgcattctcttttcttgctcaattttggttgatataggctttgaaattgagtg

SEQ ID NO: 49394 - DNA, 691 bp, Ricinus communis
  Intron number 1 from transcript 29629.m001413 (locus 29629 .t000064) derived from phytozome v7.0 (chr-ID 29629; pos 3 76714 to 377404)
cagccatcaagaagacaagacctcattctgcagaggtatcaatgcttcttctattatacaaagagagcatctaattactactttttttggctttatactatatcgattacttaaacttgtaccacatcctatgtttgttgaagcttaatttatcagatcaaatcatatagcaatcatgtgtaaattcaatgcagacttttatttgtactgtcatatgtatgagtgaagcacaattaataaactctattaatatggtttaatagataatattgttctaaaaaatcaattcttggatttgatggtttttcttttcctttgagctattttcatcatcatggtgaaggtcacaagtaaagttgttttcttattatctgggcattcatcttaaaaaggttatagttattagaaataagagtcctaatgaatctccacttctagctgtagatgatcatgtatgtggtttgagtaaatcaagtgaagggttgaaatatagatgatcatgaatatgatctagtttaaatgaagggttgaagtaatttctttactctgattctgtcatgtaatattctccccccatacccaccttcatatttacggcactcacatgcggtactctcatgttagcttaactgatttcttttgctccattcctgaagagagttttggcaaaggagacacagcttcacctggc

SEQ ID NO: 49395 - DNA, 589 bp, Ricinus communis
  Intron number 1 from transcript 28649.m000223 (locus 28649 .t000012) derived from phytozome v7.0 (chr-ID 28649; pos 6 3917 to 64505)
ttggcgctaatcgcaatcaagcttttgtggaattcgtaagcttctcttttttctatgtttaagagatgattttttttttttttttttgtagttttgcttgttaacctagaaaattttggaacgtgtctgtcgtcctttgtgttgcattttctactaatctagtgtcgagtaggttgctttttttttttttgttgtaatttgatctattttttttcttctttctagtgataattgaattggatggcattctatttagtaaatgctaatttttggaaagcttataatagtttggtttctattctttcaacttaaaaagaaagaaaaagtatgcattttcaaggcattatatggaagaagtcatttgtaagagttcgattgagttgaattcttgcaaaaaagtaaaaataattgaattctggaaagtctaatatttctaagcacaagaattgactcaacagaattcaattgaattaaactcttgcatttttaggtttccaaaatctcgaaattgacatgatttgttcctaaaaagcgctaaaggggataaaatattttctttttgcaggcagacttaaatcaggcaattcaa

SEQ ID NO: 49396 - DNA, 383 bp, Ricinus communis
  Intron number 1 from transcript 29637.m000762 (locus 29637 .t000040) derived from phytozome v7.0 (chr-ID 29637; pos 2 83078 to 283460)
gagagcttgttggttcatcgtaggtaagtcatcacatctttacatattatatatatagttaatgctcatgaaaattcaggatcatatacactgcaagagaatataggaattgctgctataagtatatatgaatataagaagacaaacatttggttgcgagtattttgcaacaaaatctatatgtcatcgtttatatgtaatatcatggtaagatctttgaatcttattgaaaaatgtttaagatggctcttgcatgcaagatattaatttctgagatatcttaacttgtgtatatacacatatagattttgtctgggatgttttttgaatttatatatatatatatatatatatatatatatatatatatatatatataggat

SEQ ID NO: 49397 - DNA, 961 bp, Ricinus communis
  Intron number 1 from transcript 27798.m000589 (locus 27798 .t000010) derived from phytozome v7.0 (chr-ID 27798; pos 8 3476 to 84436 reverse strand)
gacgcctggtaggtctttaggtttttgttctttgctttttaacttcacttttaattgtctcatccaaaactgttcgtagtccggtttagtgaggaagaattaaatgaatagtttagaagaaattcaaaatggccattttttttttttttgccttagattcctgtgactagtttgagttgcactcaggcaaactagataagattatacgaggggaaaaagtgaggagagagggactgcttcatgtttggtcgtatactgctactcgaacactcaatttgtcttccattgatatctgtaatctccaaatacttgctcacttttggctaatttattcattgtgaaaataatacataggaggcagatcctatcatcctgtttcagtcagactgcttattttatggtcaaatagttgatcttgccccatctggttctacagaagattagaaattcctttgatgttttctttcaaatactcgagtttccacttagttgcatgttggaaccttatgacaatgacatttcctgtttcagttctcttatggagcttaggcttatagctattatggtctcatctgagttgtaaagttatggaaatattagaatgcccttaagtttcaagcattgatttttttctgctctctacacacctttagtaggatactacaacatctgaggtctaaatttcttttattagtcattcaagcttttcctttatttggactcggtttatttttggagaaggaagtacctcatttatgcagcctttcaataagtttacattgtatatcctgcacaaaagtacatattattgataatttgatgtcctatttggcaggatgtgtgccttcgaggtctaaatttgatcttcccattaatgctactagtctatgagtgttgcaggagtaggagagcctagttccttttactaactagttcatttttttgcagagcccctgcgagc

SEQ ID NO: 49398 - DNA, 630 bp, Ricinus communis
  Intron number 1 from transcript 29635.m000459 (locus 29635 .t000019) derived from phytozome v7.0 (chr-ID 29635; pos 1 12253 to 112882 reverse strand)
aattgactagtggaagctcatctattgacagagaggtaaggattcagggaacacttttactctttgatatcaatctggagtacatgaaaatttcggcaaaaacatttccttctcaattctgggagacgacaaacacaaacaagatggacatatgttgtgtatgaatcatttatttaatcaaaaccggactgtttattgggtttatgtcagttgatccaaggccactgagagagaattttaccaacaagaaaactattctatgtgtgtttcagaggctttagattggcctttgagttaagctttctggagttcagccttcagaccaggcaggcaggcaggctgtaataggagttttctttttatcactgccgtagtttctttaacttcagcatgtctaccaaaagagaaactatttggtttagagatctaaatatattttaatcagtcgctagttgcaacaagtagttcaggcatgaaaccttgtatgaacgttatgattatataagttccaagttgagcagcctcagtaagcctattggctgctgagattggcatatcttccttgttggtttatgaagttcatctttttatgcaggttgatacactggtcaaggacaaaacttctggaag

SEQ ID NO: 49399 - DNA, 575 bp, Ricinus communis
  Intron number 2 from transcript 29794.m003345 (locus 29794 .t000044) derived from phytozome v7.0 (chr-ID 29794; pos 2 41243 to 241817)
tgctggagcccgtcttgcccatcatccccttactggtcactctttaatttagataaccatacttttggtcttcctgcatttttctttcaagggtttgattatagagtagaggatacactttctttaatagttaggctggctagtacatacaatccgtattgttaaggaatagctttttctgcaaacttctaaaactgtgttttaagtaccttaagagttgcgaggcataggtcactgcaaggctaatgccatttttcagcttcatttgttataagctatataagttctgcataaccttgatctacacttggcagttgaaaaattcactgaatatcattaatcccaaattataccatgcaacttagaatccatcctgaatgcatttttgtgggtttgatattacagttttagcgaggtctaggtgggttacaccacaacactgtttagtttttggtacatcatgtaacatgatgcttttgttttgtagtagtaacacagttggttactctttctgtgccactgaaggggtccatctgttttcttctttctttcttttttgtttcagagttctgaag

SEQ ID NO: 49400 - DNA, 772 bp, Ricinus communis
  Intron number 1 from transcript 29729.m002288 (locus 29729 .t000021) derived from phytozome v7.0 (chr-ID 29729; pos 1 11874 to 112645)
ggtactttctgtttcttgatctaggaattatttatttgacttgattctcaatttttattttttttgcacttattgttcgaaaaattgcttcaatgaatactctttacatttgttctactcggtttctgtggcatcaactatacatggctcagttttttcttttcttttcagacataggcttagcatatgctaatcaagaaagccttatctggagtgaattgaattcttgaaaaaatcatgtgttttgtggctttatttaatatctttaaaaatgcgttgttttattttcaagttgaaagaattaaattctagcaaaactatgacctttccaaacatgagaattggctaaatggaattcaattgaattgaactctggcaattttagacttaccaaacactatggaaaggaattagatgaaaacattcttttacctatagtgagttagtattctaatttaacttgtaaggatcaaaggcattggtggacattttacttgcattactattttggctagagatagtagcggtgctagacttaggaggcaggaatttagattgtgcataattctatcaagctaatttagacttagcgtttatgaaaaagatgtttcatttgggaaaagatggttccttttgcagtattaatccaatgtggattctgttggattatgagatctgtagtgatttggttgtatgcatgtgcatgttgtttgggttcaattcttagcaagatactcatttttctgctgtaggttttataaggtcgcagcga

SEQ ID NO: 49401 - DNA, 953 bp, Ricinus communis
  Intron number 2 from transcript 28567.m000054 (locus 28567 .t000003) derived from phytozome v7.0 (chr-ID 28567; pos 1 9169 to 20121 reverse strand)
aaggcttaactgagtaagcaatcttttctgacacatactatatatagtactccatgctatcattatttaaccatctggctatagtggagttcaattggatatgagtttgaggtaattctgttttgggtctgtctatcttacaatttgttataaattaatacaatatggcattcaagttaatgataaaactagcatttctatctcacttttatttgcaaaaatgtgcataagctcttgaagtatgttttacatttgcataatagcagaaagtactgaaaatggttctaagctagcatcataattaaaatatgaataagcatttcttgtgtgggaaaagatcaaaagaaattgtcctagcaccataatatggatgaagggtatctgaagtggtgacttaggatctaatgttgggttcttgctgctggaaaagacactttctgcattttaaatttaaactcatgatccgaatgaaatgaagagaaagatcagtatgctagttgagtgcaaatgatgaaaaatttgtgtattcatggtcatgggtgtttctgtgtccattgataatctgatctattcttatagaaaatcacaaaattaatccaagcatgaaattttgttgtcgaatatctggcgatcacgggaacataattgcgcccgtgcatgaaaattaaaaaaaaaaatagaaaaggaagaagatattggggtcatagtactattggacaactgggaggtctagtcttttgtatctagctgtgaatgctgctgtttgttgacttccttttctgcttgataagacttgtgtacaactatttgttgcttttcagccaaatttgtagaatcagggaaattagaggggagaagtggacatgaacatgttactattgaaatacctttctttatgctttcattgacttggtttaaattctctgatgtttctttttggttttcctacagtg

SEQ ID NO: 49402 - DNA, 527 bp, Ricinus communis
  Intron number 1 from transcript 29709.m001191 (locus 29709 .t000027) derived from phytozome v7.0 (chr-ID 29709; pos 1 26915 to 127441)
cttactggtattctcttttattcctcgtcttcttcttttcccttcaatttaatttttttactcataacaaaccaaaagccctgagctactaaaacttttcaaagaaaggaaaacaatttgtttttctaatgaatggatatttgagctattctacatagccataattccttgtctaatatcaactttgtcgtagttatagaatgaaattgaaattaatgattcaggtgtattcaagaattcaaagttaccctctaatacctttcaacagctggtgttatctggcatatgattatcaatcaacctctcactgcattgcattattcagcaacaaaaatggcgccaaaaagagagtgcagtaaagtggtacccaattatagcttagcagtaccattatttttaaccttgcattgacagatgaattccctcgtctcttattgcttttatgtttctggccatcaatatatactgtttcatttacattttgtcttgtagaagaggaaacagacccctatagaattcctactaag

SEQ ID NO: 49403 - DNA, 513 bp, Ricinus communis
  Intron number 1 from transcript 29585.m000579 (locus 29585 .t000007) derived from phytozome v7.0 (chr-ID 29585; pos 5 4745 to 55257 reverse strand)
ccattgcccgatttcaggtttatttatttatttattttgttaaaacttttttagctttcttgacttaataggtatggtaggtatgaattaattgaagtagttatttgttaagtttttcttaatatcaaaaggtgtgaattgagttgattttgttttaaagtttggacttctggagttgaatattaattatatggagacccaatttgtctgcatttctttcttgttagattagtcggttgaaaaggtatgaaaaaatttattctgtggctcaacgtttagacctttggagttgaatatgaatgatacggagaccttatttttcttatcttgggttttgccactggcattttggatcgtatctttttagttttttcatttataaggttgaatgatctagtggaatgtagatatggggtagtttctgtggttgctctgtaccctataagtggctaattcttgctgcttatataactggcagaggcttttaggaaagaaagttatatttgtcactgg

SEQ ID NO: 49404 - DNA, 613 bp, Ricinus communis
  Intron number 1 from transcript 29742.m001428 (locus 29742 .t000064) derived from phytozome v7.0 (chr-ID 29742; pos 4 09943 to 410555 reverse strand)
ctaaaagattgaagatttggtaagtgtcaatgattgatttgaattatttttaatttgtaaaatgtatggatatgtttcaaatttgaaatttaatgtttacatttgagttacttagttactattagtaggtattcatgtgcacatatttggtttaacttggtgtttctttgggagttctacaaattcagtaattccaatgaattttattctattcggccaattgttatgtttcaaaaggttagagtagctttgtttcaattcttttaggaaattttttttgaaagaaaatcatgccacaagtgaaatgatcttgaaagagttcaattgaatttcattatgatatatgatttattttaaaacacatttaagtgaatcatggaatgcatattagtttgaaatttttaaggaaggtcttagaggttggctggatactgtttttaatttccacagggtgacatttttttcctaacaagttcaggagaggggttaggtaacgaaagttgcttgcatgtgcactttttatatttttaatatctgtgctgtaaatgtctgagttgcttcttcacacatcccaataattgaatttctgatgattgagttcatttttgctagg

SEQ ID NO: 49405 - DNA, 729 bp, Ricinus communis
  Intron number 1 from transcript 29666.m001435 (locus 29666 .t000011) derived from phytozome v7.0 (chr-ID 29666; pos 7 1499 to 72227)
ctgggtctggcaagactcttgcttttgttattcctgtgagttgggtttactattgcttttgtttttctatgagttggttttccttttttttttttttttttttcttttaaattgatggaagcaagcggtaaaataccaaagtaattttgagatagaaaattgattttttggggagcgaaaagaatcaatacttagggaagaataagtgtttgttgagtacaaatttttaatgcgtttgggggtttttcttttgttgggtttagttgttggtttttgtcaggagctggagacattacatttggttcagattcgggttaaatgatttaatttgtttatgatgtgtttatgtttgttctggaatcagctgcttagttatataactaaggaaatgaattgaactttagataacaaaaagatagtttttgaatgggtttatgcaactccatggaaatactttatttcgtttattcttttgcttctttaaattttctgattagtaaagtaaatgtattttggttgccaattttttgtactctaggacaggatgtaggagtattaacataaggttctttatgatttttgtactctactgtgaagtatcctgtaaaattgatttaagttgttcagacagaatttgctctatagtctaacctttatgtgctagtttagtgcatttcttactagctgcaaggttgtatttcaggtcctggaaaagttgcatagagaaag

SEQ ID NO: 49406 - DNA, 960 bp, Ricinus communis
  Intron number 2 from transcript 29706.m001320 (locus 29706 .t000050) derived from phytozome v7.0 (chr-ID 29706; pos 4 65374 to 466333)
acaaagcaaaaaggatatccagtcatctctgtgaggtctgaagatgaaattgttggaatttgaacaggtcagttttgaaatggaaacatgtttgacattttgcattcaactgaacaaatctgacactaaattggatctgcattaacaattcctttcttatggtttgcgtggtgatggaagatggattattccaatgaccttgctccttggatctagcaacaagagctagaattcccttttgcagtcaaaagttgaaagggtggacatatctgattgtgtttcatctcctgatggcaattcaagctcatcaaatgaacataaagaagagaaaggtgacggaaaattcatggatcaaagataacattatctagcgggggcttctgtagagtaaagtatgaacaaaaactgtcagctgactgaggaaagctgtagagtacaatttgctttcagcagcatgtaaatttggtatatattcattgttgaacctaactatgcataaaacgggatgttgccaggttagacttacttgacagattgacagtctatggcgatgcacttgtagtatagaacactaaccattctagtttgcaagtatatttatgggacttttctctgtcttcctgacatgataggaacccaaaatcaacttgctcccttttcacacgtttctccttttttctgctgaaatacgtataattactacacataagtcgcgcatccagtgaaagcaatttcattaatgtgtgggctaattatttatattcaaaatggtagtattcaataaattaatcatttagcttttccaaccatttactattcatgtgagtgactacattcaacatgaatggttcttaattatcgagcagactaatatttaaattttctgctatagaactctaagccattatattttgtgcagaaaattagattaggaatcagaggctggacagagccattcga

SEQ ID NO: 49407 - DNA, 824 bp, Ricinus communis
  Intron number 1 from transcript 29801.m003124 (locus 29801 .t000069) derived from phytozome v7.0 (chr-ID 29801; pos 4 14328 to 415151 reverse strand)
tgctgttgttcctgttaaggatcaaggccagtgtggtaagatttttattttgtttttaaatttttcaaataaagttttgatttctttttcagtaaaatctttgatgttgtgggctttgaacttttgattgggtgaacattgaccgtgggaccaggatagcatgtttttccaattatgttcttagtgtgattgttgctgctttacaagggatttgttttgacttggatactatcatcatcatcatcttttttttttttattatatctgtttgtgtaattatttttatttttacggccagaaatttcatggggttttgtttgatgggaaaagatcttgatggaataagctaatacgaataggaaattttatttttgagattaaaaaagttgttacctttaattgtttgtgcttttgggtattggttgacatggttgttcttggcttataagatattatttgggggttactgaggaatatggacaaggcataactttcataagactaacatgggctgccgaattttcaatgtctaatagaatttaaaagtttatcagggattttccatggagtagaggaattgtgcatgtttagcttgcactagctatgtagtttgtgcttaaaaatttgtaagttggggttgcaacgattgactaattttttatgaagtcttccttcttgcacctttggcttgttcaatattgttgtttccttgtaggaaggaaactgcaatatgtacaattatcttttgggaccttcttaatctaaattagttgcttgttttggatgaagggagttgctgggctttctcaactgttggtgcagta

SEQ ID NO: 49408 - DNA, 808 bp, Ricinus communis
  Intron number 1 from transcript 28152.m000891 (locus 28152 .t000020) derived from phytozome v7.0 (chr-ID 28152; pos 1 09983 to 110790 reverse strand)
tttattcttaggtaatgtacttggtgtcttaagttaaatactggctgttttattttcgattatcaacatataactgtattatttacatattattcttttaatttaaataatcatgctagttcatgtttgtttaatgccagtttgctgtcattccacccttcactttacaccttttaccacttggcatcctgacattttctttctttttctttttcaccatctagatgtttgaacaggcttttcttttttccttttaacaatccaacggtgaactgctgctgcgatattaaaaaggccagttttaaatatgtaaattttaggtgcatgcatatacgcattagcccgtttatttttccattagagatcaaacttcagtgcaatcgtgaaagcggtgatctttatagaaagtaagaaatacttttttgctaaaagccgatccttccacagccatattctttggttctagcgattcaaagtcaaaaatgttcacagttcttctgtaagaatatgcttcattaatcctcaaattattgatgtttgggtactatcagaacctatttttcaagtggaagtaattttcaaattccaacttttgcttgacaattctgtcacgtgtgtatgtgtttgtgtatatatatatatatattcttccactgtaaagctttacttgatttgacaaagaacttattcatctaaagcattataaaacaagactcgacactaatatgaacaccgtatctcaacagtaatattattatttgcctgaatgccagggaagcaaagcaagtccagggccattttagtagtt

SEQ ID NO: 49409 - DNA, 512 bp, Ricinus communis
  Intron number 1 from transcript 27538.m000330 (locus 27538 .t000017) derived from phytozome v7.0 (chr-ID 27538; pos 1 70572 to 171083)
ctctctctctctctctctctcacacacactttaaggtatggttaattcagatcttcaattctgtttgtttcccgagaaaataattagataataactttatgcattattagctttaattcctgctaatttgtgtgaataacacttcatcatcattctcttgagaatttctttcattctctcaccaaccgaacagctttatatcgagaaacctttattgacaaacatttacttatttttgcttcttccgttacctgaaatacagtgagattgttttttacattgagaaacgcttttatttttactgatttgaattgaattgcatggataattaatcagtttctgtgaagaacatagcatccttgtgtttttctatatttaggatttccttcatttctctcagaaaccaaacagctttagataatcaacgtttatttcacttgatatgctgtaaagatagaaggataattaatcaattgaaagcaattgttacagttataagagaagagaaggca

SEQ ID NO: 49410 - DNA, 826 bp, Ricinus communis
  Intron number 2 from transcript 27538.m000330 (locus 27538 .t000017) derived from phytozome v7.0 (chr-ID 27538; pos 1 71303 to 172128)
accactagtgatttcccttctgtcactgccttttggtatattctcattttcctctatcaatttcggtgttcttgtagtagatagatggaatggaattgttattcaataatctagtgatttgtgctttaattcaactgagttacttttagtcgattctcttgttttgaaaggtccgagttgctagattcagttctttcaactcggacaaggctttgtaaaagaaatgaaatcatataaaaaatgacatgataattcttgcagatgatttattccaaaaagagctctaaatgatatctcagatgatattattggaactcggatattacaatatgaatggtatatatggtactgtttattacacatttcggtcaggtcaacagcatgaagatggtagtctgtaatgttagatctcttagcttatcctcccttcatatcagttttgaagggaataaatcaaacatcttaatagtgttggatcatacagaaactcttgcaatgtctctctgacatatgttagattagcaaggttggtgataagtagttttaggtcaacagttgagtggtttgtgtttcagtttgttgccatatgccaatagtattgctgcaaataaattttcatgaccattcaggctgcaagtcttatgaaagattatatgtttactatttgcaattgacattgattcttgatgaacaggtaggtttaggatgtcaatatgcacaacatctgctttcattttctatgatttaatatcctttgtctatcaaatgttttctaatgtatgctgtatcagctaccttgttgcggctgctggtttgcagtttttgt

SEQ ID NO: 49411 - DNA, 918 bp, Ricinus communis
  Intron number 1 from transcript 29726.m003929 (locus 29726 .t000041) derived from phytozome v7.0 (chr-ID 29726; pos 2 64769 to 265686 reverse strand)
cctccttttgctcctctgcatcgtgccttttgtttgtatgtcaacaattttagatcttgctttttcttattaattattgtgtttttatttgtttgtttttgtctgattttaggctagttaattttgggtttgccttggatttattcgattttcttttatcatatacccttttaaggatttattagaaaagatgggagattcgatgagaattgtacttttattattggcaagacggaaaattgatgggaattttgctgctattgttggcaaatatggaaaatttgataggaattatgcttatcttgatgatgttttcctgtgtctaaagagggatttggatttttttgaggcaaggatattgaaggatttataatggtattggtttataataggttctttagcagatttctattgatgtaaactggaaagtagattcgcttgttttctgctgttcaaaaatctggtagcattagattgaactttctgttcatttctttgttttctcgaatcacttatgtgatgggatattatagaaaattgggtgggagttcggatgatacattggaatgaatttgacttttatttcatgatgttacctgtgttaaaagagggatctggacttttaaagcaaggatgtttgaggattatactattggttttccatcctaatcaaatcgccattgaggttgatcagaaattgaatttgctgattttctgctattcatagtacttttagcactagcattagattaatcttttgaatctcttattttctttttctatctattttcttcttactatagtataatattttttctaatttagttggttgtatgttgatgtgctgaaatatggagtagtgtcttatctcaagttctcaacaactaactcaaaaaattgcagtgctgtggcccttgc

SEQ ID NO: 49412 - DNA, 358 bp, Ricinus communis
  Intron number 2 from transcript 29739.m003777 (locus 29739 .t000213) derived from phytozome v7.0 (chr-ID 29739; pos 1 301983 to 1302340 reverse strand)
atttcgacagatattggaggaaggatctagtagtaattttattttctgttgagtccctgtttagaataaaccatgtgaaagaattcagttcagttgatttcttgcaaaaagttctggcattgtcttttctaggttagaagaattgaattttagcaactacattataagcattcccaaacaccagaattgctaaaagaattcaaattcaattttttgagactttccaaatcaaaggggttgaatttgagattattgggcaaattggctttgatgtaatcttacctcgactttttattttatgtcatctgatcgtgacagttttttttttctttttttctttaataatttgcagatattg

SEQ ID NO: 49413 - DNA, 234 bp, Ricinus communis
  Intron number 1 from transcript 29739.m003777 (locus 29739 .t000213) derived from phytozome v7.0 (chr-ID 29739; pos 1 302341 to 1302574 reverse strand)
aacaagctcctctcgatctctggcttataattgctgttcgtttctcttctttcacctttttgtctccttttttgcttcaattttgatttcgttattacttattttttctttaaaacgaatttagcactaatattgacagtacttagacaaaacgaatttaattcgttactaatatttttatttgatttatatggtgcagagagagtattttaaacaaggaaaacttgaacaatt

SEQ ID NO: 49414 - DNA, 509 bp, Ricinus communis
  Intron number 2 from transcript 29813.m001460 (locus 29813 .t000012) derived from phytozome v7.0 (chr-ID 29813; pos 8 0097 to 80605 reverse strand)
gtgaagtaattagtggtaggatttctcttcaatcgtatagttcattattctcttactattcataaccttgtattgtgaagacgtgctgtgttacttccatcttattttttgtcaattttgttttgataattattaaacttagtaataatactgggtccctaattgtgcatgttgaagaccctaattaagtattacatcctgtgaggattctatttcctcggaattcgtacatttatttgataacttttctgcaatcacctgacagcttattgggcatgcttactagatgatccttcagtgtctagtattcaacatgtcaaatggtggatctatgctaaagttcatttgtagtttaagttgaaggatgctgataaagagaaacaagaagaatcactgtagtagcaatcagagtatatattatagtttttcaaatacaagatcaattcttttagtgattcttgtaaaaagtgcatcttttgatgattgaattgattcttttgttttcagat

SEQ ID NO: 49415 - DNA, 713 bp, Ricinus communis
  Intron number 1 from transcript 28708.m000174 (locus 28708 .t000001) derived from phytozome v7.0 (chr-ID 28708; pos 2 578 to 3290 reverse strand)
agtttcatagcccaagaaacttgcttttggctttggtatgtttttccttttgccctctaaataaaaaggtctcgtttttctttttctttctatgtaattgtttttatcaattatcttctcttctctgcctttctcatttcatcaattttatgggtgttctttttcgtttgtgggcttttgtttgttttctggtgaatccaaggaagaatcaagaatatgatgagataatggaattactctataattgctgtacttttctttcgttttctatgtgagttttctttttcttttttcattatttgacttgaacggatacgactaaaaccagttgggattatttgaaaatgttattgatttcttgttctcaactcattttgttaatgaaaagaaccgacttcaagttggcctttttcttttgttttatctttcaattacttgcttcaatatcaagttagggttcttaagctctttttatccatgtctgatacctttctttctaatctctagtcaaacttgaccaactgtgcaaatatatcatttttttttgttcgttttatcgtagaaaacctttttcactatccttttaacttatcttttggttttttgcttttctgtcgtaaaccagaaaataaaacaattttctatatggtttaaactcatattgattgattaaaacaggtaggtgaagttggagaactatcagagatatttca

SEQ ID NO: 49416 - DNA, 599 bp, Ricinus communis
  Intron number 1 from transcript 28223.m000095 (locus 28223 .t000001) derived from phytozome v7.0 (chr-ID 28223; pos 2 3669 to 24267)
aagaggggctttttgcctcgatcaccctctttctggtacttttgacttctttgctattattatattttctcctacaaagcgatgctgtcttcaagtaaattaaattaggaatggtcttttttgatcttatacctaacaagcctgctgtgttttgtttgtgaatgtgttcctcagctttcatggattctagtatacagcttggcacacttctgattggcttggttcagcaatttggctgctgtctctatcgcgaagcattatttgatcttaatcagctgtatgaggaaccattaattatgccctgaaaacaatgagaaagttcatttgcttaactacgccttcattttccaacatcttaattttgcagagcatgacaatgctaaacatttcattgatggaaattttagttcaacttctcttcataaatgtcctccaagatacagcaattttatgggcatcgcatatatgcatctgtttgatgatagaaaatgtgattaggtagatcatcatggtataattcgcctgcacacaaaattctgaaatggttcaatgacaatgattaattttgtttttatagaaggatttaggaacctggagaa

SEQ ID NO: 49417 - DNA, 613 bp, Ricinus communis
  Intron number 1 from transcript 29634.m002069 (locus 29634 .t000015) derived from phytozome v7.0 (chr-ID 29634; pos 1 18201 to 118813 reverse strand)
ttgttctgttcattctttacattgcttattcttaatagtctcaggttagttaccattagatccttttgctaaactcttattcattttttttttattcttgtctaatgttattcaatttctctctcttttttttccctcagttattatagtacaggcatttgggactgcatcaattattgtacccaattccagttgctatgttcttgataattctagtcgcctcgtagattttgtatcctgaaactgatatgggtttgcaggattatgcaataaatgtctaaaattttcgtcgttagctgttttactgtttagtaaaattgttagttcttcaggatttcttatagtgacagatatttttctttttccaaattcaaattgttgaaatttcttctgttttaggtctttttgagtggctagttatgcataaatagtaatttactctccctgggtttcattctttcaagtgaaggtgaaataggtttttgtatttgttttgagtatattgtctgctcctttatatgtttcaattgaatttattttaagtcaatatttgttcaatgtgcttttctcttaatttgttattagagcagctggattgggcagcattttgagt

SEQ ID NO: 49418 - DNA, 960 bp, Ricinus communis
  Intron number 2 from transcript 29646.m001118 (locus 29646 .t000066) derived from phytozome v7.0 (chr-ID 29646; pos 3 88175 to 389134 reverse strand)
gtgttaatattggcaatttcacagcttttgaagatgtaagatctccttcttaggttgacttttatgttccgggatgctattcaggaaactgtagaactttttcatactctgtttgctaatatttatatgatgtcatgttcaatgtcttaaaaattagaatccaattcctataattgaagataaatgaaaatttaattttttcatgtgtatttgatggtttctcatgggagatttaaaaggagaaagagaggaaaatcatatattataagaatcaggcagcatataaaaatgaaagtgtcaagaatggtttctgaattatgtttcttaaagtataatgcatttttacatgttttactttggaactcaatgcttctgtttgtatgcatgtcctataccttggaggtcttattctcttggtgcattatcatacttctgtgaaatgataactattacttgaaccgaagcctatatagtgaaatcaatttaggataatgatcataaaactcatgtagtatcaaatttcctcttttgcaagtctactgatattacgccttatttatacagtccaaacaatttttcatgtgaaacttcaagatcaaccagatgagattgccaagtatgcagtgatactttgtgctgatttgatcttgttcatgtatttacaaagtctttggatgcccagtgtggtcaaacttgaccaaaggcatgattgatgagtagagccgaacttaatggcttgatttgacattgactttgacttcttttgtacttttgttcgtcattttgtcattgccagaggctttgatttggttgatcgcttccatttgctgaatatgttcttcttaagagctccttgagtttttctgatcttgtatatttatatatatatacttagtaacgactaataagaacacttatttttcaggactacttccgaaacagtgacactcaagtccatag

SEQ ID NO: 49419 - DNA, 277 bp, Ricinus communis
  Intron number 2 from transcript 29648.m001975 (locus 29648 .t000062) derived from phytozome v7.0 (chr-ID 29648; pos 4 35366 to 435642 reverse strand)
aaggtttctgcaacctgaaacaggtttgtttattttgtttttttcaataaattaccttatcttctttcttttactaattttggttcctttttcttttctttctgaatcttcacatgttgtgattttattcacacatatgatatgcttggttggtgagaaaatgcaatttctcggactattcaaattttcttttctgtttcaatcatcaaacgtaattctgaattgttctagatttggttgggggtttttgtttttaggtggatctcaagttgaagat

SEQ ID NO: 49420 - DNA, 585 bp, Ricinus communis
  Intron number 1 from transcript 29784.m000373 (locus 29784 .t000019) derived from phytozome v7.0 (chr-ID 29784; pos 1 61077 to 161661 reverse strand)
cttctggtgtggctggtttcactgctgcttattgggtaatttgacatgtattttgctgatccttttttctacttctttgtttataattagttcctattagtaaactactagtaaactctttcgcacaatgcatacaaatttaattacaacaatctctaagagaatattcattaaatgaaatagttataaattgcatagaaatataattattttcaaaatatcttctaacatattagatttgtgagggaaatagttacgtatcagagcttctataataaaaaaaaatctagacttttatttagtttattaattaaataatttaatataaaataaaataattttgtgcttgtttacgcttcaaacttaataattaattgaatatattcatcgaattaaataactataaatgtaattgataaagtatatttattaaattaaataactaaataaacctcatttttgcattccatattacttaacttatgtcattagagaccctaacattcaaaagaattaatgatttgattaaatttgtgaataatgattgctgatgatgatgtacttaggtaggatccaggcattcac

SEQ ID NO: 49421 - DNA, 538 bp, Ricinus communis
  Intron number 1 from transcript 27561.m000302 (locus 27561 .t000014) derived from phytozome v7.0 (chr-ID 27561; pos 8 9010 to 89547 reverse strand)
attttattcaggttagaatcaattttagttattgatttattattattattattacttgtttcttgtttgagtggacaagaatttcttgattgctaaaaaaaagaaaaaaagttgaccctttttgggatcagttcaggatgaaaatgatagaattgaatttgattaaatttgattgtccaaataagaggttgaatatggacaactgaaactgtatttggatgattactgagatctcttttaattttatacatgctgtgaattgaagattaaggtttaggaattaaaacgtgattacaagatgggtgatataattaagaacttccagaatttccatgaattggtctgaattagcttggatttaaaagaccacaagactattctccagaaagggtcatcagatttgatattttttatggtaactttgttgttgttaacaaagtgaactagttttgcttacatttttggtaataccttaaccctctaagtgattgttctgttttgaaagttatgtcatgaatttggctctaatgggcaggtg

SEQ ID NO: 49422 - DNA, 592 bp, Ricinus communis
  Intron number 4 from transcript 28166.m001072 (locus 28166 .t000035) derived from phytozome v7.0 (chr-ID 28166; pos 3 40141 to 340732 reverse strand)
tcttaagtggagtcattagaggggccctagaggtcagtttctttctctcttctacagctcaccattcatgttttgtaatggtatttgtgaagtaaatcatcaaatagaggttttctttgtcagtaataattataattctttatagtgttaataagtttattgcctgttaaggctaaataatgccaacatggtgaagtctattcaaccaaaaaacgaagattatgcagcaattgaattttacattggtgcctgttatttttttagtcaaagggataagcatcagttgcattcagtaatggatggatatgctgtatattttacgaaaactttcattgtcagtcttctcttcaacatggtgaattgttgcatttagcagacagtaaattactgtgattagtatgactctttcgaacattgagccagcttcaggtcatgcagatattttgctggtccaaatgttacttgttctttacttgaaaaacagaagtataatactttagtcaacttttgtctttgcttttgctcttgttttgctcttttcaatctgcctatcttgctatctgaatcatgttatcttatggtttaggtgtcg

SEQ ID NO: 49423 - DNA, 355 bp, Ricinus communis
  Intron number 3 from transcript 29600.m000548 (locus 29600 .t000015) derived from phytozome v7.0 (chr-ID 29600; pos 3 06134 to 306488 reverse strand)
aggagaaatatcctgataacaaagctgtctctgctgtgagattcgaattctttatctctttttgagtcattgattttcttttctattcaggctttcaaatgtttcatctattaattgactcgttcgttcatttgtttggtctataataatgtacgtatactgttattattattattgttattagtaataaaataaataatcgaatttttttagagattattttctacgttttttttgctttaggctaagctattaaattttaaattccaaagttgaattgcatttgattttctaaatagaaactaagatgtatgtgcactgttattatgcaggtggggaaagctggtggtgagaa

SEQ ID NO: 49424 - DNA, 427 bp, Ricinus communis
  Intron number 1 from transcript 29600.m000548 (locus 29600 .t000015) derived from phytozome v7.0 (chr-ID 29600; pos 3 06687 to 307113 reverse strand)
ctgtgatcgctcaaaagaagccttcctctaagtaatctctctctctctccctctgtcgtgtgtgtgtttctctgattcaatcttttctttttggtttaaattttgtttgttttgttttctctatgaaactttgtgatattgcgcttttattgtttgttcataagtttaatcgattttcctcttcttaagtgttttaagtcgagagagattcacgtgtatctatcatgtttgtttgttactaattatgatgattttgtgctttattatgtggtgtttaaataggattttacttttggttcgatttaatttcaaacgattttcagagaagtgtggatttttttttaattttttatttttaaaaaaataattttagtgtgtttttgtcattgaagggtgcttaaggcacgaaaagctgagagcaaacctg

SEQ ID NO: 49425 - DNA, 607 bp, Ricinus communis
  Intron number 1 from transcript 27516.m000174 (locus 27516 .t000007) derived from phytozome v7.0 (chr-ID 27516; pos 8 0129 to 80735)
cttcattcttgtttactgcactgctggtatttctggtcagttttctcttcttcttgttccttgttctgtttcttttttttttcttttttgcttcttgattcttgaaatggaaacacttctttcttcttcttgtttcttttttgtacttccctctcttccacttcttatttttcttgtttcttgaaatggaaaatgtttttttttttttttcattcttgtcttctcttgtacttaccttttcttcttgtttcttgaaatgggaagtgattctaagttcttatttttcttgttttcttttgtaatatttcccatttcttcttttttattcaaagaaggaagcattctttgagtttaatgtgcatttcagttttctttgtcatccaattttcttgagaaacaaacatatttactattatattcactttgcattaactatctttatggaatgatatgctcgtttatcttaagctatagatacatgaataataaaaaggatgtaccttttaaagacacatcttttaagcgcaggttagcagaagctaacataataataataatgctattgtgcgcaggaggacacattaacccagcagtgacattcgggcta

SEQ ID NO: 49426 - DNA, 294 bp, Ricinus communis
  Intron number 1 from transcript 28345.m000114 (locus 28345 .t000005) derived from phytozome v7.0 (chr-ID 28345; pos 6 1279 to 61572)
ctgtgtcatccatcggagctgttaacagagtaccggtactgtgattttcccgcccttttttcttcgttacgtaacgatcagtttcatttgttttagtttttatctagcagactcatatatctctttgtttttatcgctttcttactttgttataaagaagcatattattttagctgcattttgatcggttctgtttatgttctgttgaagtaaaggactttgtactttctttatattattgttcttagactattgacaagagtgtttcttttttttctttgcagttgaatttga

SEQ ID NO: 49427 - DNA, 647 bp, Ricinus communis
  Intron number 1 from transcript 28226.m000874 (locus 28226 .t000044) derived from phytozome v7.0 (chr-ID 28226; pos 1 98418 to 199064)
tttcctttttatttaccggttctgtttataatcaggtatgcatttcatttcgattttgtcttcgatttggatgaaatttcatcctttttcttttatcaaaattttcatttattaagctctacctgattagcctttccgccatattcttttactcttttgtgattttgatcgccctaattttgactctaactccctgatctataatcttttgttttcttaggattttatacttttatcctgatatttgtatttatatataggcagctttcatttttctacacttgcctacctttcttgtttttctatttggatttttctgagtaaaatatcaatcccaatatttatacaattcagtttttcctttttctttctttctttttatgttagtaagagctttgttccaaacaataatattttttctaaaaagaaaaatttaaaataaaagggagctttacttaattgaactagcaatgaaagcttaatttgaagattcttgtattagtttgtggagttctcaaagggctttgctttttattttttttatgaatcttttggtttacatgattttaggttaactatgacttacaaagttctcttacatattggtttttttagggcactcctttttcagactttgaagcctccaa

SEQ ID NO: 49428 - DNA, 373 bp, Ricinus communis
  Intron number 1 from transcript 28693.m000104 (locus 28693 .t000002) derived from phytozome v7.0 (chr-ID 28693; pos 1 3206 to 13578 reverse strand)
aaacttatcgcttcagttctcttggattgtgagtctttcttcttcttcttcttcttattagattttgtgctgtttttatagtttcctttcatagttgtttcttgatttggggaattggatttttggagttcttttgatttctactcgttttactccgtttggttgctgagaaactggaacaaatatgaaagaaaatagaagagagccaagtcgaacgagcctagcctgcattttgtatttttttttttttaattgtgtttgaaaagtcttgaactttctgggaggggttaaagtaaagtttccttttttagttaaatgattgatgttttgtgttaattatatctattaattttttattattgcagtttacatt

SEQ ID NO: 49429 - DNA, 1042 bp, Ricinus communis
  Intron number 2 from transcript 29728.m000818 (locus 29728 .t000024) derived from phytozome v7.0 (chr-ID 29728; pos 1 66975 to 168016)
atttccctcctgattaccccttcaagccacccaaggtacactacaggtcttattgtttcagtaatatgttctgttctatgttggattgcaaagccttgttcttgtttgatgtgggtgattcatctaatacttggcctgtgactcaaatcagtgcaataactaaaaaattttaatgtggggttcttgtgatgtgttactctataatctgaagtgttacaatgttatagagctctagttttgacagaagggtattttttttaacttctgaagaaacaaaagggtaacttttgacttctgaaattttatgtgtattctgaaggtgtattcaaaattgaacgttgtttgaaagaagaaaacccaagattttcataacttttatgtgattgtcaaaatgttaagtgtgactgttattaaacaagttgaatcagatattctataatttctcgataaatagattgttttactaagatgtttaaagatttagcactaataacagcaattgagcaattagagacaattttgtttgtatggctgaacttcatccatcattattgattttgagctctgccacaaagattattaatgtccaagtttggtaccaaagaagtaatatgagcaaaatttgggtcatttattgctgcttttgacttggcaacaggaaagggaaggaaactaagggtctattttgatcatggttgcatagccaagctattactaagacaaatacctgaacagaatgttgcttttatgacttaattgataattcttttttattttaggtgaagttatagatgaaatttaactgtgactgaatccacacctatggttgaattgtttcctcagagataacatgaccaccaatatctggtttctttaaattgtttgcttggactgtattcttgtttgtttgcttcataaaagttgtcatgcatctaaaattgaagggtgaactgtctctgatggtgttacttataatcaaatgaatcatttttttttttctctgtcaggcttccttcaagacaaaagtttaccacccaaacat

SEQ ID NO: 49430 - DNA, 564 bp, Ricinus communis
  Intron number 1 from transcript 29709.m001176 (locus 29709 .t000012) derived from phytozome v7.0 (chr-ID 29709; pos 6 7126 to 67689)
acatgtaagttgttgaatttccttgcttatggggagtgacttttacaatcttggatttcatttcttggaatttgatgttcttgaattctgctgagaatgtgcttccgaaaacacttgaaattcttgcaactgatatcctagatttgcacgtttctttttacttgttcgacaatgttctgtcttttggttttcgttactttaaattgattccatcggtcaattagaacttcgtgtgtcttttctctgtttctaatgatatgggtttggtttctttcatcttcattgtcctgtttatgcaacttcattactcccatatgaagaagttctgttttttgtcaaattgtttatttcaatttgaattatacatcaggatttgtattctttccttagccatgtgacaccttgctggtttaatttaagctagccagtgtagatgcacgatacttcaccaagcttgtgaatagtttaaaattgtttagctgtatgaaaggccaaaaaaaggtttagttattaaaatggtggctaatattgtgggtgcttatgtaattttcaggtattacaaca

SEQ ID NO: 49431 - DNA, 699 bp, Ricinus communis
  Intron number 2 from transcript 29791.m000552 (locus 29791 .t000027) derived from phytozome v7.0 (chr-ID 29791; pos 2 20858 to 221556 reverse strand)
tgtaagtattgaagggctcaaggatattcttagaggtaagtaaactatgatgctgataaatgatcctgcagccccttgtttgattgtcaaatactctcatttactggtggatgacaaaatgattttcatcttttgcattccaaaaagaaaagaaactatttctcatcaaaattatgttttcacatggttttcttttctcaactttgcaacttcttttatgaattcaaattttttgaccatgccatttatgcatataattctaatgatcccccattacagttttcctattctacctaatctgatcatttctacgtattcttaagttctttctgttcattcttaaaattcctggacctttttattttcttggctatcattatcacagagaaggttcttttccaagtttcaaatggtttcttttgaatctttcactagttttagaacttggaggagaatgtgactcagggttctatgcagagccagtgcacttgtcatttgacaggtttcgcatgcatggcatacttcagaactgacttgatgcacttctgacctttacaaccaaccttatttttgtggctgatgccaaaagatcagggcagcacttgttggttttgttgtgtagcatcttttttcctgtgtgatgcgtatcttcttccttttttttgtttcttgtatttcctttgcatgataattgcaggt

SEQ ID NO: 49432 - DNA, 1042 bp, Ricinus communis
  Intron number 1 from transcript 29680.m001751 (locus 29680 .t000094) derived from phytozome v7.0 (chr-ID 29680; pos 6 30414 to 631455)
gaggctaaaaacaagcaaaatcctaggggaaagctgtaaggaaaatagcaaccttagccataattaatgtgttcctatcttaagttgctgctagttcattgctttactgagtttgaaaatcttgcatctggaccaagcctgttttttatgagagtcaccaagttagcctaatttttatagaagctgatagagaaatactgagtttctcaatggttatctacttcccatttcataataagttaaatatatttccacttctttaactttcttttcctgtggatcacaccttcttgatatgggtattaatcatatgttaaattgtacatttacttctcagaggggcctgtaattgcagataccattatttaggtacaaaagttcctatgaaattgggatctccttaaggataagtatatttctcatggtgcttcatatcacaatgttgatatcacaagtaaccgagacaacaaacttgtcttatccaaacattggttacactatttttatccggagattgtctgctaaataaagttgtttattcagttttgattatggcaaatactttattgcttgagctgtgagctttttcttcatttttcttatttttttcgggtgaaaatgaaaacaggaattttacgttattgttttgccttgagaggatccctgatgaagtaattctagaaatctttatgctgttcctatgaacacgtcactgtgttcatctgaagctgttctggaagatgagcacttcagaactgataatttcatggtctcttttcagcctagtcaaagaacggtagatagaatgtgaaatcttgatccactttcaaacataaccttttgaaataggagggccattgataatatactagtatttcatatttcattcaaaatcgaaacatagacaaaagaagatggctggatccgagttttattctattacattacctaagaagtttactggttcatggttgctttatgcgtgtctatatttattgcttccccaggctatttcaggagatagttgacaacattgtttttc

SEQ ID NO: 49433 - DNA, 964 bp, Ricinus communis
  Intron number 1 from transcript 29625.m000713 (locus 29625 .t000040) derived from phytozome v7.0 (chr-ID 29625; pos 2 01531 to 202494)
tcagctgctgaagtggttcaagactctgctgacaggttaaattacacagttgtttccctctttcttgcaagtagatttttttttttctaaagaaaatatattgttgcctttattttgtgtgcttgataaagagcagtgaaattttgatttatgaattagtattattcagagatttttttttttttggtttttgttgaaattgtggtttatgagggaatattgttggtgttcatttgcaattgcttattttgaaaatttttgccctttcttttttcttattctctggtgcgtttgggagttagtgtagtctagaattttgggcttattttgatattacgtattttgatttcagaagctcaatatgattgtgggcaccaaagatttaataacctgtctatactataataatgcaggattgtggtttatgagggaatattgttgatgtttatttgcaattgcttattttgaaaatttttgccctttcttttttcttattctctggtgcgtttgggagttagtgtagtctagaattttgggcttattttgatattacgtactttgatttcagaagctcaatatgattgtggacaccaaagatttaataacctgtctatactataataatgcaggatgtgatgaattttggtgtttctgaaaaatctagtgtaagcaattgcatttaaaatagtcctgttatggctaactgacagacctaaaatcttctctggccttttgattttttggcagaagtatatttgctgggctagttaaatggtatttagtttagaactaggaacatgataatgtttttgcgagcataagcttctctcatagttgcatcattcattcaactgctaggtgtgataccgaatgattttggcccttatattaacatggcaagatataaattataaatattgatagatttataccactttaataagattttggttcaatatgcagg

SEQ ID NO: 49434 - DNA, 787 bp, Ricinus communis
  Intron number 1 from transcript 29653.m000295 (locus 29653 .t000006) derived from phytozome v7.0 (chr-ID 29653; pos 5 5762 to 56548)
attgtaagtttcttcagaaaccccattttcaaatcaagatttttttattttctctttatcttttcaaatcaagattctctagttttctttcttctcttgctactattattagtaattccattggtttattagattttagtctgataattgccatatatttatattaggtgttttttaggatttttatttttattgttttctttactttatttttcattatcaaattatgaagtaatatttactttacaaagataaaattagtataaaatcctcctaaagatttcagtttcattttgagatttctcttgtccaactcaattaatgttaattggatctaattcaggaaatgataggttgtactcattgactacattgtttacttggaaatctgttcttaaaaggaaaatctattattagattccattaggatttctattcttattctctatgtttctcaaatatcatttataatatttattagtttttttgttggtccatatactatttcatcaattgcattaaggctattttatgttaatttttttttctgacttatttaataaaaattaactttattaaaaaaatatgattcggtaaattgtagtgacccattgtagtatatctgaaagaagtttattaaattcaattgttttactatttaaataaattactaatatgatctttgttgaaacactaagcttaagattaagctaattgtttttcttatttatttgtttgtttaatgggtgcagcaccttcgccagccagtccagctgtgacacctccg

SEQ ID NO: 49435 - DNA, 581 bp, Ricinus communis
  Intron number 1 from transcript 29620.m000537 (locus 29620 .t000007) derived from phytozome v7.0 (chr-ID 29620; pos 6 1128 to 61708 reverse strand)
ggtctacgctaagccacctctcttttatcaataaggtatctttctttgaattttttcattttgttttctccaatcgaatttaggtcagttagtcttcaattttatcagaaacatctatgattatttctcttttgtgatcaatattattatggtaataattataatattaagttcttgattggtttcaattttgtttctgatttgttcttttgcgatccagtttattctttctgttattgtataatttatgaagtagaaatcctgaacattttttgggagttattaggtttttgtttttgctgtatcttgactaaaatctgcttactggataaacttaaattctttcaagaattttcttggattgttcataattttatgctaggttaattattcttgatgctataccctaatttaggtttcattttcttgtgtgttcttgggggaaatagaagtgaacaatcaagttgttgatatctctgtgcaagaattcttggcttgaaaggaattagggttttcagtttgcagtttttctatagttgtaaaatgatttcgtattttcttttgtagcacgaccagaaacc

SEQ ID NO: 49436 - DNA, 635 bp, Ricinus communis
  Intron number 1 from transcript 29693.m002082 (locus 29693 .t000120) derived from phytozome v7.0 (chr-ID 29693; pos 8 12601 to 813235 reverse strand)
caacactaacaccaactcttcttcaaccatcaatagtaagtttttgtttaaaggtttttcttttcctccctttgctttttgggtacaataacaacccatcacagcaatctattgcttgccaatctgtcacttttacacttctttcattcatctctttaatgtctgtccccacttttcttttggggtgaatctgaggtaaggagtatttatttgttagtgagtattgttctctctgtgaatgttcaattgagattcttgcagttgggttttgttttgataatttatcaaatgggtaatttttcccgtatattattttgtttatgctttttatcagttggattgttgtttgttgcttttccttttatgtgcttgtttcttttttttttttttttacttcgattcttcaatgggattggcattttttatctgattctccttttatagcttagttttgattagcactcttgagggttttggcgttttcgggaattcttggttattttgtttgtatgttgttgtggatacatgtgctgggtgtttcttaatttcttttctatacttctattaattctattttattttgacaattatttgagtgacatttttgcgtgttgatcaaatggtattaggaaata

SEQ ID NO: 49437 - DNA, 532 bp, Ricinus communis
  Intron number 2 from transcript 29693.m002090 (locus 29693 .t000128) derived from phytozome v7.0 (chr-ID 29693; pos 8 67457 to 867988)
ttggtgacattctggaggtaattcttacccaccatttctcaaaaaccttaagttgagaccatgaaaacttcaaagcaatttatcaacaatttaaacttttgacaagttaagctgaacgttttattatgtaattattagaatctcacggttgatggataagaaatattatggcttgtaactatcccattttatatcaaatttttgcatgatatttcaacttagtaccattgttttttataccaatctttttattttagtttcgaattggattgcctaaggatattttggctaactatgtgttaagttggtgctaattaaattgtccattcacatagtaaacgggaaaagcatattctcacttcaaaagttacgtcaaaattgactgaattcttttaggtaactcattctgaaaataaaatagaaaatttggtgctaaaaaaaataaaatcagatgaaaacatagtacaaagttttggtatcaaatatgagagttaccctcttgaaatttgatattatccgcaggttgtgacaa

SEQ ID NO: 49438 - DNA, 594 bp, Ricinus communis
  Intron number 1 from transcript 29200.m000170 (locus 29200 .t000007) derived from phytozome v7.0 (chr-ID 29200; pos 2 9670 to 30263)
ctgatcttgaagttagcgaaattactcttggaactgtaaggaacgcttatctttttcctcgataatattaattgggttttgcttctttcgtgtataactgaattggatggactgttttgtaactttattatcgccaatgctggttatcttgttcagtttttatgttcgattcatgttgcctgaccctatttcaagattggtagaaaagtttgaaacttcagagaatttcttaattttgagacattaagagtttgtaggatggttcttatagtttggctgattagcaaaatttactgaaatggaagtttgtctgcctctagccataaagctatatactactccactacagtattttattatatggtgatagtctattaatttgcttgctacacttgtttgctttgctttacttatgcgttcttgtagctgcgtgagatgacttctgcaactcccttaccttctttctatcagtttcttcttactaatttttgacattgttcttgatttgggttgtctgaagactctggtctaagaagcatagactgtgcatagccaaatgaacatctttaattatatttctctttaatgtttcag

SEQ ID NO: 49439 - DNA, 757 bp, Ricinus communis
  Intron number 1 from transcript 28859.m000327 (locus 28859 .t000013) derived from phytozome v7.0 (chr-ID 28859; pos 1 41024 to 141780 reverse strand)
tgggcatcctctacctgctgtatcttcccaaggtaggttcttgatctctcagtttctgttttctgttgttttctctttgattctctgattcgtagtttttggataatgtttgtggttgcaatggttcattgcttgtttggctgttaattaattctggtttggtatatacatgccatggcccaacctgaaaataggaagcttgaattgacatttttaacaactgttttttcagtggataaaataaaacataaatgggaaggaagaaactcttttgacattgagaaacttcatcagctttaggctccatttgtttctcataaagtaacttgtttttagatgatgttttatagagaaattgtttttctgaaatataactttatttaccattatttggttacactacggaaaactaattgccgtttttttggtgcttagagcataattaaaagtatttaaatatttaaacttattagaacttgtattttgaattcataattaaatataaaaagcttgcattaaagtaagtaaaattaggaactttgcagtggtcaattcctggtgctatttccacttgagctcagtttaagtgtagttgatatactaatagaacagaggaagcctcagcgtaaccctcacatgatagtgttgtggtttacagtattactttttatgtagaaatagactttctctttcttctgttctattacttaatactaacgtttggggtgagattatgaactaggtttagctgaaaatc

SEQ ID NO: 49440 - DNA, 520 bp, Ricinus communis
  Intron number 2 from transcript 29688.m000267 (locus 29688 .t000014) derived from phytozome v7.0 (chr-ID 29688; pos 9 5325 to 95844 reverse strand)
ccgttgtcactatctcttcttgtgtctcttttctggtagtactcttctcttcctaactcctatagctctgcaagtatgtagtcatagaaatagaagaacatgttattctattgtctgtggatgagtagttcagtggtagaatggatgtcttgtagtaggaggttaaacgttttaatctcgcactcttatcctctcaaaaaatctcctacgcaaggaaaagaaaagaaaaaaatcaaaatatagacaaaaactttgatatgtttattatattatgatcgagttaatagttcagtggtggtcgagtttctatctgtctctggatataagaggttaaggacccaatcgtgcatgatgattgagttaatagttcagtggtcgaatgtatatgaggttaaggattcaactctgcatgcctcgttctcttttacctgaaaatttccccatatatgagaaaaagaatcaacaatcagtgtttaaacatgcagggagtggtgcttttggtcttaacttcactacttga

SEQ ID NO: 49441 - DNA, 433 bp, Ricinus communis
  Intron number 2 from transcript 29688.m000260 (locus 29688 .t000007) derived from phytozome v7.0 (chr-ID 29688; pos 5 7713 to 58145)
atcgtaaaatagttacttcttctgctgacggtcaggtgaatttccttataatcaatttcttgatccctctttttacttaagtgtctgggaagtttaaaagttgcaagtattcgatttagtcaattatcatgtttctaaagatcatagttgctagaatctttagacatgatttcttccaaacaatactcgtgtgctctttaagaggatatctcaggttgtttaaaaagggaaccagtgcatgaggctttcttaattcatttatcatgtttagacttctccttgcatttttgcacaatccagtgtatcctataaattttgagctatttgcagtcattttcttttgtctcatcatattttatccaaaaactgcattgagcttgtgtattttatctgtttttatccctgcaggtgagagttggccaagtcttggaga

SEQ ID NO: 49442 - DNA, 808 bp, Ricinus communis
  Intron number 1 from transcript 29216.m000253 (locus 29216 .t000005) derived from phytozome v7.0 (chr-ID 29216; pos 4 5150 to 45957 reverse strand)
gcctgtgtggttcatcttgcaggtaagctggtctatttttgtcctcttcttttatttgaggttataggcaacattttctcttagcttaatctcccttctgattttaaagattttgtgtgtgcgtaatgttgatcggaatcattatggctttctttcttgcctaatctgatatttccaatgcattcgtgggttgtgctgacaagtttttactggccaatttatatgtgtggtgcagcttaatgtttgcatatatagttctctaaagttcaattttgacagctaattttcaggattggaataaggagttttagagatttgaataaggtgttttcgttttatcttttctagtttgcagatgctcattatctgcaaaggtttcacctgtataggagcaatagtaaaaagtcactttttaacctggtttattagttgtgcgctgccgttagattgttgaattagaattcaattgaagaaacttgaagcatttgcttgatgtagatgctacttttatgctttcccatctggcttgatgaattttaaatggaggatacataatgactccacttgcataattttgctcgagcggttccccttctttggcagaatgatttgtatgcttatacaataaattcaaattttttccagtcaaaactgtatcatctagggaaaattttatttttattgtgaattgtggggtttatttagcattagtgatgaatttgacagttatcagttagctgtacgaaattataggtattagccacttttttcaggaaccggggaccatacttttgaacgtagattgcga

SEQ ID NO: 49443 - DNA, 411 bp, Ricinus communis
  Intron number 2 from transcript 28166.m001061 (locus 28166 .t000024) derived from phytozome v7.0 (chr-ID 28166; pos 2 07136 to 207546)
taacaaaggctaaagttggcaaatttgagataattgttagtattctttatttaatttttttagatgtttgccgattacttttagtgtattaatttgaattatgtgaatttggtttgcataaactttcccttttgtgaacttaattttacttgtgttattttactgaaggaactttagaaatgccacgatgccactaaatatatgaattaatattgttttgtttggatttattttgaatttgtgaattgaaaacagtttcaatttaagtttgacattcttcatttaagaattatttatttacttttttttttttctttggaagcgaaaaagatgggttttttgtcttttgatttataacttagtttacttgctctgtttcttttcccttttcttttcggtctcagcttcctt

SEQ ID NO: 49444 - DNA, 438 bp, Ricinus communis
  Intron number 1 from transcript 28180.m000380 (locus 28180 .t000005) derived from phytozome v7.0 (chr-ID 28180; pos 2 7373 to 27810)
aggtagcatctcaattttttcatttagttgtcactggcactgtagcatttcctcagtttctttttgcatttatttttgtgtgtcaacttttttgttgaacaacaaacttagttaatataaaatgtctatattaattaatagagggtattataaacaattacataataaactaaaaataataatttaaaaagaagactgagcggaccaaacaaaacaaatactaagaattatgcagttatttgctattagggtaatactttgatagtcaagtgattgttttatagtacagtcaagcaagaggttagtagttgaactcttaatagttagctttacaactaattaattttatgggagtgtttttgactcactctactttcttttatttttgagcactcttttatagggtctggaattgttgaaggcttctttgcagtcaaa

SEQ ID NO: 49445 - DNA, 556 bp, Ricinus communis
  Intron number 1 from transcript 28077.m000081 (locus 28077 .t000004) derived from phytozome v7.0 (chr-ID 28077; pos 1 2122 to 12677)
ttaatttggttgctagaccacttcggaggtaaatgcagcttcttcaagtttaatttggtgtcatatgaaatgagtaatttgtatgtgtgtgcttgtggttgttagtgtattgatttttgtttttgcttctaattagttgtttgttccatcttaatactaatttctaatgaaccactgtaggaaccgttaaatgatcattcttgctgttttcttttgatgatggtttcatgggtaggctaaattcgcagttggctttcttttgcaatttgtgcatgcacaagtgttctgctgctaataccattctgcttgtaaggctggttttagcaatggcaaccggagtgattgtattgtatgacatgatgacctgaagaatttgaaaagaaatggatcatcaagtgtttcattttaattacactgaattgtttttgttttgtaaatagaggattattttatctgcaaattgttgttatggataaatgataagtggtgtaaaaggacctctgaatggttttcaaattacaagtcttaaatcctctatgcagatattcaccaggca

SEQ ID NO: 49446 - DNA, 780 bp, Ricinus communis
  Intron number 1 from transcript 28166.m001068 (locus 28166 .t000031) derived from phytozome v7.0 (chr-ID 28166; pos 2 67242 to 268021 reverse strand)
atatctagtccattaagaaacgaagtagttaacaggtatcacttacctcaattaatcattttccttgatgtcctaccaatgtttttcctttatctttttcttctcatgtgatttagtggcagtaaataatttgttgtttgagacaatcaaaactcgatgcccctggattatagtgtatctagttgttactagctcaagtggcctaagttcagtattatgctgttcaaattatatttatttaaattcaaatgtagcttgaatttaacatcatgccaatagcttttcaagcttggtatattactctttctgtaagattttgatttgttcaagagcataactgtttagataaagaatatatttcaatgtttcttcagtaatatcatttttgtaaccttaatatatttattgtaactgttttaataggaagagaaactttcatgaattagagtaacaattataaagtggaggggataaaaactgggggtttttgttttcttttgcatgtgcgtttttgtatgcagtcgtgttcagatgagggtgagaatacaagttactaagagattatgcattctacaaaactagcaagtccttcgttttctatatacaaaatgtgattcatgagatttgttagggtcctattgtcttctacttgaaatggttcttatgtctcctccttttatttttctatattgctatatttagcaaaccgtaataaacatgggctgccactattagatactatgtaatcttattctttttctattcaggtcatcttttaca

SEQ ID NO: 49447 - DNA, 902 bp, Ricinus communis
  Intron number 1 from transcript 29700.m000747 (locus 29700 .t000003) derived from phytozome v7.0 (chr-ID 29700; pos 5 7830 to 58731)
taattctccccaaagaccagaacccacgtcaggttactccctttagtgtactcttttctttactattctacatttgctgctgctgttcaatttgtttatttgattttagaacatttatatggctgagcatttttgtttgttctccaatagtagctatcttgaatgctgagacaagatcagaatccataatctgttaaaagtgaaaaaattttagaagctatggattaatggtttttttttttcctctgtactgaatgatcttaacaagtttactaacgtaatgatgttatcatttttcttaactgcttcagctttattattattttggattactgaattcttggttctagataattattgcttttacaatgcttgtcgattcattgatgatcttgtttggaatgaatcatttgcaatgaactcaagtcattcactgcggtaaattcatgatttttcttttttgtctttgtctaagttgaaagaattgaattctagcaacaatgacattccaagcatttttagatatgtgggttctgttctaaatataattcaattgaattgaaatcttgcatttttagactttccaagcactatctttaatatttggtaagaagatatgtaatgcagatgaaatctatgttaggatttgggactttaaagtttttctgttttaagggagttgtaaatgtcttttctggtgaactgattgtagttactatagctttccttctcagaaggtcaattgagtcatctggcccttaaagtgaatttctacctcatacagtctatggtagtatgtgcaagaaatatggtgaaatgcttgtttgtttgactttaaactaagccatgtgttttatgctataataggtaggagctgacaaagaaaagaagccgaagaaaga

SEQ ID NO: 49448 - DNA, 1029 bp, Ricinus communis
  Intron number 1 from transcript 29636.m000758 (locus 29636 .t000023) derived from phytozome v7.0 (chr-ID 29636; pos 2 70569 to 271597)
ggaagtacaactgaaggttctgcttttcaggtatgttcggggtctttgtatgttttgtgttgggagacatgattaaaatattaacatttgcattcaatgcatggataattcaaccaactgttgctgttctacaagttaacgtttttcaggtttgagtaaagttctatttggttctatctttttccccttgtttagaaagtctgagaattgcaagattctttcaataaattgaatggtgtatagtcaattctcatgcttggaaagcttttaaagaaataaaatcatgttaaagcggcatgacttggcaagaattcaatcctcgcatatgatttattccaaacaaagtcttaaagtcttggttttgaaggaaatattttcatgcatttgtatataacgcctgaaaatgactattcttttacaattgattttttatgttaggaaaatcactttaatagtacagttttatgagaaacatggtaaaagtgttttccttttcgtccaatatattcatgattttaatggtatttatgtgttaaaaaataccttagctttagctatatcttcaagtgtgtaattggaatattttttaggaggggtggggggcgtatgtttggtatggaatagaaatggatgcctatatcacaagaatcttattccaggtttggttttgaaatcactgaataaaatttattgacactccttagaattagacaaagaaaatatgtcatttcaacattattttaagtcattcaaaatataagaacatcaaaatattttgattgtttcatgaaaaaaatgggactgcattcctttgtcagttctagaattaaccaaacatgcccttagtctctgtagaattgaatgttttgagcttctatgaagatgttgactttccttggctgggccaattcccaatgcatttggagttaatttatatttaatctgtgctgtttaatcatgctggtaactggagttggtttacccaggtgatgagtatgttcatttgataggtgacttcaaacccttggg

SEQ ID NO: 49449 - DNA, 432 bp, Ricinus communis
  Intron number 1 from transcript 27401.m000288 (locus 27401 .t000014) derived from phytozome v7.0 (chr-ID 27401; pos 1 16384 to 116815 reverse strand)
tagattatctccagagtttatttggtcttgcagaggttagtgttagcccttgaattagttttgttgggttacgttttcttgtctacttttcttttatgttcttgccaatcaaacaaagcgttaattcataatttttttttttacatggaaatgttctgttttggtctgtgttgggacgtttaggtctagtttcgtttgctgttctggtcggtttctatgttaattagttcttaaatttatagcttgcattcatctattaatggccgtataaatggcttgtatgggtaaaagggtaactcaagaactggcatttcattatagagaaattttttatttcaagtttttctgtttgatggtttcttgtttgtctacttaatctttaatttcttatgtttaggggtatttctgaaggtttcttgttcaagttcttca

SEQ ID NO: 49450 - DNA, 820 bp, Ricinus communis
  Intron number 2 from transcript 28342.m000016 (locus 28342 .t000001) derived from phytozome v7.0 (chr-ID 28342; pos 5 625 to 6444 reverse strand)
atatcaacttgtacacatcaggtgaccataaaaaggtatattatttttctcttttttcttcaagtcaattttctttccgaaacttgtggttgaaggatacttctcattttttctttttatatagcttgtatggtttttctcatttagcctgtacacctatttcacacgttaatttctttgtcactgttcagaattgtgtatgatacatttcaggttttcttttctttgttttgtgtttgtacaaatgtataatattgtcctgatatgggtttctggttctttatgcaacattggaaaatctatgtaactccaattactgcatgatataaggctgccaactggtactagctttattttgattgcaatgtttattatctcatctatagaaggtttggttctttacattgaatagttgctatgattgtcaaagacaaagtcaccaattgggagtttcagtaactgtcatgcatagccagagtacctgttattacagtgcatatagctgtaagaaagatttaacatggctcttgctaccttatggaaagattaatttgactgacactctactatttttaaatatttttacttcttttatcaacggaggctaatggttgcattcaatgctaaccccttttctttgcattctttattgatgttttcttatgaaattaatttttgtattttaaatttactctctcaacacccttcgcattgtttggcatgtttgtttgcttgcttgcttcttcccttgatattcgtgaaggacattaatttttgctgatacgtaattgttaaaacttgatttagctcttgcttgcat

SEQ ID NO: 49451 - DNA, 862 bp, Ricinus communis
  Intron number 2 from transcript 29667.m000346 (locus 29667 .t000003) derived from phytozome v7.0 (chr-ID 29667; pos 3 4585 to 35446 reverse strand)
gctcgtacctacaacaattactcctttgcatttagtttcaattttagttactaaattttatttatttccttttcaacaattcagtttcaatgacagtacaattcagatatatgcatttgtcattaacagattgacaaatcataaaaataactaataaagaaagagtgattagattagagaaatgcaatgtgtcaaattgtgattggcggagctgattaaattataataaaaatcaaaattaaacaattaaggcaaatgcataatcttagcaaaaataaagtaaattggttttctttctttatttagcttttgacttatatgtttatgacaaaatatatggatagccctcaaacttttagttgaatttcaattaaccctttaaactaaataatatggaacaattaaatatctctatgtaactctgattattttaggcgttaacaactattttgtcaaaaggtatgaataaccccttactattctagacttactatcctaaaatcttgataagagtcactcttttgttcaaatatcttacatttttcttagtgtttcattacactatttctttacatcagattaacacacttataattttgccataaaaacttaactagatatagttaattataataaagattttggcttgagccaactgatataatttaagttatacatattaaaatctgaaggttttctttttataaaattcaaaaataagtgtttgtataatttatgataattttgttttaatattgtgctttttcaataattttttcttatcaaataacttgacctttttactgtttttttttttttttatgtaggaaatcattgaggtttttaacaagaattgcacaac

SEQ ID NO: 49452 - DNA, 784 bp, Ricinus communis
  Intron number 1 from transcript 29747.m001064 (locus 29747 .t000021) derived from phytozome v7.0 (chr-ID 29747; pos 1 61925 to 162708 reverse strand)
ttgcaagggttaggttgtttgccaattaaagtggtaaatgagctgggacaattgaatccacatctgatgtagtgttatagcgttgagagggcctttctctaatacaaagagattatgatggacacatatgtagtgtaccagttattgtacccacagtgatcaagtgcaaagcgaataattattgaaagcagtagtaagctcactctaaaatggatgctctcatatttttatttttctaaaacttttggtagtaataggttttttatacttgtgggcgtggagtgataaaagtttttaaaaattttaaaaaaagttaatggcaaaataaactatttatcgttacgaaaaatatcaagtgaaatttttttctttatttgtgaaatataagtgtgagctttgcttaaaagttttcttattattaatttttttagatatatcttacatatgactttgtcataattttccatcaggattatgagcttaatttcactattcttaattggaaaatgaacaattatgttctaattatagcttgtccttgacacacgcaatgcataaagaatcattttttcaattttacattctcaaaatgtagaatttatttttaaaatcagatttgattgctttaatgaattaagagggtgcttttctcgatattggctcaattcacatggtatttcagaaattgcttgtcaggttagtggatgcctgcatgctaacatggattcttttcattttttttttttatttgaactgaatgcaggaaaggttgaataggtctctg

SEQ ID NO: 49453 - DNA, 789 bp, Ricinus communis
  Intron number 3 from transcript 29805.m001511 (locus 29805 .t000042) derived from phytozome v7.0 (chr-ID 29805; pos 2 26668 to 227456 reverse strand)
gagtgggtaaagcttccgagttttttgcggggtatgttcaagcgactatattcaacctaccttttcttttctttctctaatagaagatcaaaatggaaattttattcagtattctcatttttatttcatttttgttaaatttggatcaaggtagtgagttttgcaggtcttgataattatatcaactcccaggcacagtttacaacattccttgatatattagaaatcagcttctagtttttgtttttcttttgatttctttctcttagtcacttgtctttgcaattaaataatggctggaatatattcttcagctttcaaaagcaggaagtttagcaagtttaagggagtttccgctataaatatgggctttggcaccccacgtttaattctagtcaaaatttgcagtttgtcagtggaaagccatgttttatataacttctgattggctgtgtaccctagtgaggtgttaaagttgtttcccctcctccctctccagtgtattgcctaactgttttccttgttggataaaacagcttgagaaactacatgagtttgaatttaaatcgatggctttaggtcttatgattataactgaaaaaggatatctgacattgcatctagtctcaatttagcatttcttttcctaagaatactatcgactatcaatataattcttgttaattctgcattgcatttccgaacttgtttttatttcatactgtttccaccataatgtccaaggatccttcaggtatatattggagcaaagtttgtcagtggacaatc

SEQ ID NO: 49454 - DNA, 876 bp, Ricinus communis
  Intron number 1 from transcript 28166.m001042 (locus 28166 .t000005) derived from phytozome v7.0 (chr-ID 28166; pos 6 8974 to 69849)
aacgcctttcctttcccagcttcacttccacacaggtactttttctcctttctcaagtttttctattcttatttctttcttctggtttgcttcttatttataaatatgcgcatctgaattctcaattttgtcttcttcttgtttggaatattgtcaagtgatttttcatttttatcaaaatacattgtgtttcatagtgatttccttgtggttttggctaaattgaggatacttatgaaggattatctaattaattttgttaatgatgaaagtttgggtcttttttgtgattcttaaaactgaacatacacaagttaagttgcattctttttaagtgaaccagatcttgtactggcaataattaagtgagaagcttactatggaggaacatgacggatggtgaaaatttttgctcttgtatcttaataataggtattaaaactcatatttgctagctttgtcggattttctttttctttctttttttataatgttaagaatgtgctttttcgtaacagtatgaagaattctgtttttcactgttaaagctcatagttgcctttggttgttaatcaactttgtgttgttcatttgaaaaaacctaatctcaatactaggctgatgtttgatataattctaagcttggttccatttctgagtctgattcattagtttgcttggcatgataattcttcccaggaaattttgccttaaaaatataggataggtttgatcttaatttctgatgcagtttaactgaccattaattttgtgctccacattatatgttatgctcagcttgcttgctaatcgctgtggccacttcacattaatttgtctccttgtttacatgcaggtgaagagaccagataattc

SEQ ID NO: 49455 - DNA, 546 bp, Ricinus communis
  Intron number 2 from transcript 29701.m000581 (locus 29701 .t000002) derived from phytozome v7.0 (chr-ID 29701; pos 5 831 to 6376 reverse strand)
ggctctgtgatccaggtaattacgttcaatggagtaataactgtagatcggaaatcttgttttttttttttggttctcttttctatgtttttttttttttcttttgaacttaattctttgtagtcaattttaaaatttgtttggttcctgagaaactgtgaggaaaagaaaaagaaagtaatttgaaatttgaacttccaggtggactcttagctgttgagttttgttttggattaattacaaacaaaattttattttgcaatgtttttgttgatctgtatgcaatttgacctggaatggaattttaaatcatttaaaaatcaatgcatgaaaggaatgttttttataaaaattggagaaataagtatataatgtttaattgattccttttggtatcttgtgaactgaaagattgaagctttcaagttcctccggtcttttttttgcgtttttctcttatgagaataaatgaaaaaaggggaaattgttttgcccgttttaatatcaagttttactttgttttttttccttagaaaaggagaactt

SEQ ID NO: 49456 - DNA, 402 bp, Ricinus communis
  Intron number 2 from transcript 29804.m001550 (locus 29804 .t000081) derived from phytozome v7.0 (chr-ID 29804; pos 1 073641 to 1074042 reverse strand)
gacaagttcgtctttttcaataattcaaccacttttcttctttttatatagtatacagaagacttgattaataattacattgtactgttggtagggtagttttgaccggattttaatggagatttaagaagagaaatctttttcagggagattcgaactccaacatgggattagtggatcttttcttcaatcttgcattggaatgctttgatgttcttgcgtggtataaacttaatcttttagcctgctctagaatgtaactttttctctttagtagatgattccataatccaattttttttttaaattttttctccttctttttaatcatttccattacttaagtgataacgtatgagtttattttctttgtaattaatgacaggcaatcagttcactcgt

SEQ ID NO: 49457 - DNA, 864 bp, Ricinus communis
  Intron number 1 from transcript 29739.m003600 (locus 29739 .t000036) derived from phytozome v7.0 (chr-ID 29739; pos 2 03842 to 204705)
agcagcagcaatataaatctaagttggagcagcaggtagtttggacttaatttctaccattaactatctgttcttagtgcaaatacataattaatacatctgtgccaggcagccaaatgaaaatagtgcatactatctatcattagtagtcgcaactactagtttgtgtgtgtattactaattcgtagatcctcggtccaacttattcatgtcatatgctgctcatttattctaccaggcatttaggagctgtgcacaaaaactaaggccatgaaaccccattttgtcacgttttctgaaaaagttgatagttatcaaattgggcttggataggtaactgagcattcgagttagtatatagattgggcttcagcagaaatgaaagaaagatctaacggacatggctagtaaaggcccatatagtctaagataaattgaaataatacctttcttcttcgtagttatatacaatccacaaaacagtcttttcgtttgtcatcaattaactctaatatacaaagttaatcaaaggctaatgtatcctttcttagggaataaaatgttttataataaagatcaatttgctatataaaacatcgaactgtaagataatgtatgctgtgttaattcttaagctgtcattttttgttatttcatactccgctaataaatatattaataacagtttgactgagggatgagaggccttttatttatttgaaaaaagaaaaacagaaatgaaaatgcataatcagtcaaacattagaggtacgtagaaaattagctaatagacgtacctttttttaaaattattttgtggattttgaaggtggctgaccttgaaagtgaagttgctaagcagaa

SEQ ID NO: 49458 - DNA, 852 bp, Ricinus communis
  Intron number 2 from transcript 28166.m001064 (locus 28166 .t000027) derived from phytozome v7.0 (chr-ID 28166; pos 2 40346 to 241197 reverse strand)
ggagctagcagagcacatttcatctatattaggcggtataaatttgtccacttttttttttttattattctttttaagtattgaatttatgtaagttttgaagattcgtttgttggctaattatttaatgcttgttgcataaattatgtttttctgtccctaaattatccaaatgttatgcaacgagttggaggaagtcgcactgagttttcatataaataggcttgctttggaaaacatcacatgcaagaatcaaattcttcaaactcatgttacctatttggcgtgatatcatttctttcaaaatgacttgtttttctgtaagttgaaaaaattgaattctagcaactatgagctttcagcacatgagaattgactaaatagaattcaataaagttcatttcttatatttttagactttccaaatacactgtaatccaatggattggcattttggaagaaaaacaaaaagagaagaaaagagccactttaggttagaaaaaataaagaattcagtaaatcctttgcatgcccattattttggatattgcactagaaatacccctctaggtgaaatggctctttaaatagtgcacaatttgtcttatgcagttgccttaagaagaaattgagttgcatgaagaagttgattcttttagcatttcctaaggaggtgattaccaacattgtatgtttctggctatatggtctatttacattgtacatttggttctttcaacattgtatgtttctggttatatggtctatttacattgtacatttggttctttcttgcaacaggatttatcttgtattgcatgtttatatttattgttttagttgactctgcag

SEQ ID NO: 49459 - DNA, 755 bp, Ricinus communis
  Intron number 4 from transcript 29648.m001970 (locus 29648 .t000057) derived from phytozome v7.0 (chr-ID 29648; pos 4 11317 to 412071)
accgtgagcccccaaagaggttcctgaggcgcagggtaatttcatttcttttcttttgtcttcttatttttttgttttaatccgattaccagtttcctatgaaattacagtttcaggggattttgggttctggttttttggtcgtattctaattgcctggccatgttctccattctcaattagtatctcataattgaaaagtgatttaacctgaacattaggctcttttcaacctaactaatacgtgaacaggatatacatttactgccacttaatttttcaaaaatatattccaactgccttttaaagtttaatgttctgaaagttgaaagcttgtttttatttgtccctgtgtgtttccgtctttccttttgtctttttttttttcttttcctgcctttagtgtgtagctgaaccgcatggttgtctaatgtctagtgctatgtcagatatgcaagctcaactttagattataagtcgttgcctttattttggatttcatatcttgacaaagatagagataaatgtggaattgttgtttttgatcttcagattatattcatatgtactaccttgactttctgctccttttattgggtttgatgttcttgggaaatatagaaattaatttgcagtagttgttcttgttggtatttgggggtccgtgaatagtgtatcccttactttggtttgtgttgtatatatcttaatttgtcatgattttattgatcggctttatggttcttaatcgtagg

SEQ ID NO: 49460 - DNA, 677 bp, Ricinus communis
  Intron number 2 from transcript 29739.m003583 (locus 29739 .t000019) derived from phytozome v7.0 (chr-ID 29739; pos 1 24653 to 125329 reverse strand)
aaaggactttacaaaaggtaataatgcaacttcttattaacattctttcatctctataatttttaaaaagatcgcaagaatttgatttttcaattgaattctatttactgtcattaacttacttgcaccttgtttgtatagtcttaaaatgctatttagttgtttctcatgtttggataccttgtgaccttgtgtgtattggagtaagtcatgtgcagaagagttcgatgtgaattgaattcctgcaaaagcatgtcatttttggtatgatttcatttcttttaaaatactctttatttttccctaagttgagagaattggattctagcttttccaaacctgataattgtttaaacataattcaactcaactgaactatttgctagaatttccaaacacactcactagttgctagaattcagtcctttcaactaaaattataaaataataatcatggtaaaagtcacatgattttacaagacattaagcttaattgatatctcgcacatggtttattccaacatggctttaaatataattttttgaaagagaacaaatcaagtcctaagtaagtgtttaattcatttgtgatttatcctaaaggacttgattgatttcatttctttattattatgtggttttttattttattttattttattggattttcagtactt

SEQ ID NO: 49461 - DNA, 299 bp, Ricinus communis
  Intron number 1 from transcript 29630.m000817 (locus 29630 .t000042) derived from phytozome v7.0 (chr-ID 29630; pos 2 53369 to 253667)
gaatcattgataatagtaagaaatttctatatactctacatcatttgaaattgtaacaaacatttttcagttaatagaaatttgggataagaatagaagaaccaaataatctaattacgaaaactgtaatctaaattcatgacattagcagtagttcgaactaaaaccttgacaagtaggactagcattcattactagcagtgactagtggtaggacagtttcaccaattgatctcaaccaacacaatttcatattttgattctctgcaggaacgccactgaagaaccagataattcag

SEQ ID NO: 49462 - DNA, 544 bp, Ricinus communis
  Intron number 1 from transcript 28708.m000183 (locus 28708 .t000010) derived from phytozome v7.0 (chr-ID 28708; pos 6 6128 to 66671 reverse strand)
tgtctacaaggtccaattttctttagaactcaccccattgacatttttgttttatttcattatgttattgctatgaaattaaggttatgcagtttcggcaatgacattatgaagcattcttttttaatgtatatttataggattgaagtgtgttgtggaaaatataagcatttcaaaagaaatcaaataatgccaaaaggcatgtctggaatgaataatatgtaagagtttcaattcaattcttgcaaaatcatgtcaattttcatatcatttcagcaattatggactttccaaacgcgatcattaaataactagaattcaactcaattgcattcttgcattctaaaacttccaaacgagtgcgagaattaaagttttttgcaataaattgaattcttcctcatagtttgttccgagcaagacaagtagtaatagaaaagaaaggaaactacttactgtttaacatgttcaccattctgcttgtacaaaggaaaaatcctttacttactgtatttatgttttatcacatatcagagacctgcta

SEQ ID NO: 49463 - DNA, 594 bp, Ricinus communis
  Intron number 2 from transcript 28014.m000113 (locus 28014 .t000003) derived from phytozome v7.0 (chr-ID 28014; pos 2 5782 to 26375)
ctcctgttgaactcaagatccagcaactcaccgaggtagcctcagccttgttttcctttaaattgtttttgactttattatatggagagtaattgcagatacaatgcacctatatttttatgagaataattagtatttatgtatgtgaacagtgattttcctttttttgggctcactctcgtaatctttcttctatgaagatgacttcagtaccactaatcatatccacataattttatagaaacacacacgtacatttattagaaagggctaatgacagaattttctttatcagtatttttattgtgttattttaaataatttgacaatatgacatgaaaatatataaataaaacagttaatatcattgatcggagcacttaatttcagctgaagtaattaaatcggatcagttttacccaaaactaacaagaatataaaaaaggaagaatatatccaccctcactgtttaaagaaaatgttggccagaagaatcattctgataacagcttggcttgctaacaatggctaatatatccaattgaaaattcttatacaggagaggaaggagttgataaaaggatcatacaagga

SEQ ID NO: 49464 - DNA, 319 bp, Ricinus communis
  Intron number 1 from transcript 29235.m000242 (locus 29235 .t000013) derived from phytozome v7.0 (chr-ID 29235; pos 1 03744 to 104062)
gcatacattttgaagttagttattgatgttttatttttattatttattcaatttaatttttaaactaatattccacttattatctctcttataatatatttaattatatcacattagctacatcatcgctattgtttacttttatatgtttacttttgctaacaaagtaaatcatctatctttatttttcaagaagaaacaaacatccaaaatatacttaaaatcaaaccaacttttcttctttcttctttcttctttcttttgtctttttttcttttgaaaagcgcaacaagattctcaccacaaaagaaaagaaaag

SEQ ID NO: 49465 - DNA, 573 bp, Ricinus communis
  Intron number 1 from transcript 29577.m000448 (locus 29577 .t000005) derived from phytozome v7.0 (chr-ID 29577; pos 4 9808 to 50380)
gcaatcctcttccttctttcaaggtacatctcaattattaaaatttagtcaattttctttctggattctttctattttagatagttgagaaatcttgttatatccttcctgggtttattatattattttgtttgtacgtgtatattttaatcagctaatgttttaattaaaatatttttgaattttggttatattctgaaattaagacttgaaattgcttttaatttcaccttttactcattttcggttgttttattcatttattttttttgagaaattacaaaattatgtcttttaaaccacagagtaacatgattatccagttagggagtgcccatttctcaaaatgcgtagttcttcctaaagactccatttttgtgaattacttacatatgcgtttgttatttgggttgttgaagccctagagcatattagaaatgaaggttttatgttggtggtcctaagctccttaatttgggctttatcccttgtgagtttgcttaatatcagcattatctcattctcaggttaaaagtatgccttcacttgctattctatatttgtagtttgctt

SEQ ID NO: 49466 - DNA, 649 bp, Ricinus communis
  Intron number 1 from transcript 29728.m000826 (locus 29728 .t000032) derived from phytozome v7.0 (chr-ID 29728; pos 2 02651 to 203299)
gtcctccagcattggcaaacggacgctcctctcccgtagctatctttattatccttccattctcttttgttcattgatcgagtttgagttcttgtcaaaaaatggtacccttactttgttgtttaaatcacactcttctgctaggatatacttgcaagttgtacatagcagattagtttaagtataaaattaatggttaaataacttaatcatctagaagaaataatgtggctttagcgttttaagctatgttctggttgcaggattattatccgtggattttgaagatgcttctgattcatgaactgaattacttgcctgtgggtgaggttttcttttagaaaaaataatactaaatcgtatattttatttggtttctgctccgaatttggttttctttgggttatgatttgcagtccaaagtggtatactgattcagtgtatcccttttaatgggttatgcacagctatcttcttttgctgcaattctggattgggtatctcgcattaatattcacaagtttgaaatattattatgcattgaaaacaaagtcgatcttatgctagttcattttgtccatgctgaatatagaagacgcctactgaaacttaaagtcttcttctgattcttataaagaggtctctgaat

SEQ ID NO: 49467 - DNA, 513 bp, Ricinus communis
  Intron number 1 from transcript 29648.m001940 (locus 29648 .t000027) derived from phytozome v7.0 (chr-ID 29648; pos 2 11189 to 211701)
ttctgattcccgtttttctctctcttttgacacaggtaagcttccaatctagatccttacctctatctgcttgtatgtcttttaattttcattgtcttctctttgtgtttatttatgctttttgctaagtgggctttgctctttattctcttttttaatttgggtaagtgacgttttgtttagatatgtgcttaaaaaataagaatttttttttggttggattgttgatgtgattcagaatggtcaaaattggatttgatccttgaattgcgttgatattgttatgggattgtttctttgcttcagatttttaatgggtttaagaaaaaatttgaactttttctttattgtttattagttgttctagtatatcttgatttgctgtttgattcaatttgatcatgatcatcagttgaatttcatgttttatgattgagttttgcaattgcttatgctgttgattcttttttgtttttaggattataaggggatagctagtttgacaatcaggga

SEQ ID NO: 49468 - DNA, 913 bp, Ricinus communis
  Intron number 2 from transcript 29648.m001940 (locus 29648 .t000027) derived from phytozome v7.0 (chr-ID 29648; pos 2 11816 to 212728)
gatcctgggtacgatttctatgctttggtagaacttgtgttggaaagctttactttcttctttaaatgttggtttttgagcattggttatgcattatgagataggattataatgcttgtaaatgaggcagttgaaaattttgcattgtgcattttgtttagtgagaaacacggatgatatgctttcttgttgcttctaaacctaatgtgtctgagctcaaaagtgattttgctcagatggcatcttgacttgggtattatctcttccttgtttttagcctctttaacatacctactgatacggcataatttggcaggcatctatcaacatttataccccaaagagttttgagaactgggcttatagtcttcattcttatgatttctggagcttttattatatagtcacatgtgttatttgatgtctcatactcctattgaatgttccttccttttcctttcaattgtttgaagcatatctctttgtcccaacttaagagtgtgagatgacctgcgggttgtgacttttttaattaatacttattgcatgattacggggcatcaactacataatgagtttatcttgttattaattcaagggtgttcgttaatttacacaatgtagcaacccaagggtgtgttgggacttaatgatagatagttgatatgcttgaggttatcagaactcttaagatattttgatgtgatgcttgagcttcttttagctgttaacttgtgatgacgatgaatatatcttttggcttcattgttggacatataaaattatcttcataaatctatttgtcttatctcctttccatatctgaaattaaattctgctaattttattactatctatggattggattgttgttgcaggcaagcaaaagaggccttaaaagtactcaagaagc

SEQ ID NO: 49469 - DNA, 678 bp, Ricinus communis
  Intron number 2 from transcript 29768.m000107 (locus 29768 .t000003) derived from phytozome v7.0 (chr-ID 29768; pos 7 5801 to 76478 reverse strand)
tggtgagtgagcaacttctttatcacttttgatcttgtatgaatttcttctgcacaagcggcatgatcaagaaccccctaagggtttaaggtactaccgaagttgtatgcataaacttaggcaaatggtagaatgcacatatgtcacacagacacagtgaaacttcttagcaaataaataaaaaggacacacacagacacaattgaagagacagaggaagcgggtttcaccccatattgcgacgtaaagagtcaaatgcacactagggtaattagctggatttgtatttaccttgcatgcctgctttgaagaaagtcctgtaagagtcttcagcctcccgttttaactgaaactcgaagaactgggaaaataggatcctggtatagaatcttattattgttagaatgaaacttaaagagttaaaataaggtaggtagtagatgatgttttcctcgtttcatttcactgcaatttagatatatcttttcccatatgtgcgtgcatgaattgttttttcttagcaacatcaccatcattatgagcatcttaaaagttcttatttgtaatatgaacagaattgggtagtcatttgtttgatgatgggaactaattttctgaattttaaagaatgatctatatctcttcatgcagcaactgccgttattctcatatatttaa

SEQ ID NO: 49470 - DNA, 625 bp, Ricinus communis
  Intron number 1 from transcript 29235.m000231 (locus 29235 .t000002) derived from phytozome v7.0 (chr-ID 29235; pos 1 6544 to 17168)
agcggttactaaattttacactttataataaaaaggtactaaaattttaattttaaaacatatatagctgatatctttttgtaacaaatcaaaggttttgatatctttttcttacaaagtgtaggatttataaccatatatgtaatttaccttctcagtgtgctgaaaaatccactggtgttattaaaattaaagtttagcaaccgtttaattacaaatcaaaggtttgatatctttttttttataaggtgcaaaattttgaaattctttactatatgactaaaaagaaattcatgaaagaaaaaagaaagaaatttttattatatgaagaaggttatagatagtgctaagtgccaatactaaatactatcctatttcctaaggcataatatttaaaagaaaaattatactaaatactatcctatttcctaaggcttaatatttaaaagaaaaattagaatgaaggagaaaacttttggcatttttcagtaatagaagttacttttctaattctataaattaagaaactcaatccatcataaatttattaataagtttgaatcgtaataatattatattgatgtctacagtcttcttttggcaataaagcttggaagaaagctgt

SEQ ID NO: 49471 - DNA, 483 bp, Ricinus communis
  Intron number 1 from transcript 28833.m000155 (locus 28833 .t000004) derived from phytozome v7.0 (chr-ID 28833; pos 2 3781 to 24263)
ggggttcccatctctccgatatctacgctcgtaaagtatttagctttaccttttctttgctttgtatcttttttttttttttttttatttgattcaatgttgcttctgttctttttttgatatttcttttgtggtagttttgtgtaattctcggactttgtccagtgtttagttaatttaatgttttacttcatctttactcatggttttagataatgggtctttattgtttaatggggaaataggagaaggaggttctaatcgaattttctaagatttcggtcaataacccaatgctcatttttgttgatttaaatcattaaatatgatttgctgtataaataaacaaaacacatctgtatcactcttgagcactagtgtatcggtgtcactactacattttacattttctgatttgtttctgttgcaatcttattatggctgctgattgatcacaggcagacatattgttgcgagggtact

SEQ ID NO: 49472 - DNA, 814 bp, Ricinus communis
  Intron number 2 from transcript 28833.m000155 (locus 28833 .t000004) derived from phytozome v7.0 (chr-ID 28833; pos 2 4299 to 25112)
gatcaaatttttcccaaggtattcatgttgtatccttggctgcaagtattatatcattttctgaaatctgatgatgctaggtggttttagtttgatatgtttatgcaagaacattgtatgcatgagagactagtgatagaggaagttagtggaatttttcttgtttaaaatagctcatttgaaaggtctatcatctaggaatagagtcactggatcttcggattagctgtttctatcatttctggtgtccttgtggatgtctgtaaaacatgaaaattgattgtttgcagaatatgtgctagttgacagatgcacagataaggattgcctgtccatcataagttgtaaccattaacatatagaaaatggatgtgtctggcattgcaagtatagtatacatgaattccatacattttcctttttcttgtagcaccctctgattgttgcattcatttttcatggaagctagaactgactgttcctttgtatttgctctttagagttataatatgcatgaaaaagcctttgcaaattcagcaatcatgcagcacacaggtcaataactgaaaattaaactcataaatatctcagtaacatcaagagaactaagtaaatattcacagtaacatcaagagaactaaatgagtgttttgttttattgttttttgctggtcttcctcttctattttagcatatttgatgcaaattcacagtgtctttgcacatggggttattttaatgatttttattttaaatattaagagctctatgtgcatttatcttatgcagttgctgtgtttttgcttccattagg

SEQ ID NO: 49473 - DNA, 584 bp, Ricinus communis
  Intron number 1 from transcript 29645.m000074 (locus 29645 .t000002) derived from phytozome v7.0 (chr-ID 29645; pos 2 8055 to 28638)
gagaggatctcaaggaaacggtattattcattacttttgactttgttattacttttataattctgattttgatcactaaaagaatatacttttactaacagttgattaagaaattaatattttaatgttaaaagagtggatccttttgtgtgtgaactgaagacctgatccattatgattcgggttttcatcgttgatgttggctatgggtctaaatatgtgagtgaagtaattagttcaagtgatacccagatcacaattctgtttcttggtcattggcaggatcactaacagtcatgataatgtgaattggttttggttttaaatttggtatctttttccatttttgttggttggaattgtagataccttttatgttgttaatcctgttttagatcccacattgacagagatcgatggctgtactgatcagtaatcttgatccaaaagaaaacagtttgttttttctgacagggaaaaattgtgtgattaagttaccttgttttcctgtatgaaaaatggtaaatgagaatgatattagtgggctgaattggagtttacatgtctttaggttcaagagtgct

SEQ ID NO: 49474 - DNA, 641 bp, Ricinus communis
  Intron number 1 from transcript 29661.m000948 (locus 29661 .t000050) derived from phytozome v7.0 (chr-ID 29661; pos 4 09471 to 410111)
ttttttgtaattttctttcctaaatctctttttccttcgtagatatgtagctgttgcatattttgacttgaatcgaaaagtgaaatgtcaatcttaacgtgttctacttgattgtgctaaaggtacatttccctcttagtttaacttttatttagataatgctagtcttgtgatgcccgattacagtttctttgtactaaattagaagttgctaaaatcagttctagtggaggctggattatgttcatggattttcttctatttcctttattcagttagtccaacttaaatggggtttaattgtctaattttttagaaatgtggtataaagcacttgtagatgttttgttcgtgatccttgttgaaaattcatatgttatatatttgtcttgttatttttgacgtcactttgtttgatgcatatatatttcatatatttaagtgatgcatcttctagatgccttcaaaagattgaattatgattattccaaatccttgaggcttattcgcattccatgtttctgtctctatagtttacttgttattcaaaaagaagaaactgttcaataaacagcccttcatttatgtgtatttgttgattggctattgcaaagcttttttcacttctttcagatttcgac

SEQ ID NO: 49475 - DNA, 928 bp, Ricinus communis
  Intron number 1 from transcript 29737.m001228 (locus 29737 .t000022) derived from phytozome v7.0 (chr-ID 29737; pos 1 90469 to 191396 reverse strand)
ttctctcgcagaagcaactcttgatattttattcggtaatccatcttttaactccggagttgcaaattgatcgactgtggttgaaattcattaagagatttattttatttatatatgaattttcatagtgtggtaaataataagcctataattcttttcaaataaaattatcatgtttggaattaattatgattaaaaaaaaatgtaaagagagaatatacgatagagaaaataaaatgaaatgttgaagttggaaggggtattttgatattataaaatatactgactcgataaagtgaattgattcggaaattttattcattttgtagaatttagcttagccaaccaattccacaaattgaattattaaattttgtttcagtctaaccaaatataatgtaaggacttaatcctataatgcatatgaacatgaactcagcaggatgagttgttgtgtgccttcggcatcacagatcagttggattccttctaagtgtcgattttggtttctgatttgagaaaataagaaacaagaaggaaaacatatattatttctatgtataatctgattaacttaacgactaatcttactagcaatatcatttgatggtaggtcttgaaaccccttttccctgatttgcagcaagtgggtgtgattacagtatacaaatttaaatgatcaatgataaatcattagatcagctagcaatgtcagttgaaatctatgtaacatttattgaaactgaaaaaattaaaaggcaaatgcagtatgactgcaaggatattgacttcatttttactattattatattaaggtatttattcattgtttagaatctcctttttcagtaataaactgtcttcttattcattctttaaaaccaaccaatgtaataattatgtgtttattgattgatgcagagaaaga

SEQ ID NO: 49476 - DNA, 996 bp, Ricinus communis
  Intron number 1 from transcript 29739.m003686 (locus 29739 .t000122) derived from phytozome v7.0 (chr-ID 29739; pos 7 54976 to 755971 reverse strand)
aagtgcaggtctgtttgcttctctaaatttgttattttctttttctctcaaaagggtatatacatttcctgttattactactaaattaattaaagaagctgctgctgtctacttttgttacggtttatcaattgcttttgctgatcttggccataagagtcagctggtttgcatttcaggtttttgctgtatgatatgttgcgtttcttgaattcttgtgacatggaaaaaagaacttttggtactctttatcagcaaaaacaaataatcccgaagttgtaagataagttgtttggaaaacacagccttcttctcaagtttcatatgtctgttaatctctcgcaccattgccataataagcttgatttggaatatagtttcctctgattttgcattctagattgtacgttgttgacaacaaatatgtatatggtaatataggcgtgtatgttatatttaagcagatataagatatataaatcagaattttctacccttgctttcttttttggtgtgaaatcagctaaaggctaaagcttttcttgttaatcacatttgaagctttactcatcaagtccataatcctcacgtacggggatttaattattactcattatctttttctgtatccgttttactattatgtgactaaactataataataggtgcctgtctgagttctaattttgttggttgaattattaattgattctatgtagattttgcctgacatggttcttttctgcctttaagtcaagtttcctgcgactgttttgtgtatatacgatgtctctgttgttccttctgtgcataactgagttctgaatgaaattcaagtttctgacctggaagcctttatagcttgtagacagggcagaggcagaagaagtctcaggatttgtgctcaagttctgtttgttaattcggtcttttctcttctcttttttttttttttttcgtgtgtgatcacaggtgtggatatgctttctgttatag

SEQ ID NO: 49477 - DNA, 1020 bp, Ricinus communis
  Intron number 1 from transcript 28192.m000244 (locus 28192 .t000002) derived from phytozome v7.0 (chr-ID 28192; pos 3 4636 to 35655 reverse strand)
tattccaaagtaatgttgtggactctgtcaatgagtactcttcttttcctttctttgttttcgctttctaacgtcaagtgctttacagctaattggcaatcttcaaaatgatcgtcaagggcagtctcagacttgttctttctttttcagatattcatcaagcaaattacatgcatcagaaatgaccaaaactatatggttattagaaaaaagaaatgaaatttggtattttcatctctgtttcctggtcatatatcaaatatagcgtttgaaatgtattcccacagcttgcagaaatctagttctaacttctaagtatcatcttgagccttgaccaagattacctttaatcctatgaaatccattttcttctcttccttgtgcagaatgtagggaatgattattttattcaaaagaaaacgtaaaagaaagaaatgtgttaaaagagtagcaaataatctattcttatttctttttagtcaaaatttggctgtagtaatgtggacatgaagctattatttctcttaacctctatattataatttttaatattatttcacattatcgttacactaagatattattaacttttcttttttgaagaaagatattggtaacttaaacctctattaaatcttattgtatattaagataatttaatataaaaaatctaaatgagtatacattataaatttcttatatataaatatacaaacttatcattaaaacatattttgaaactgagatgtaaacacttacatattcattttttttaaccagaaaacacttatatatttattcatatttatgcatggattagtagttggtgacgagatctaacaaaaatggactaaggccaccagaaaagctaaacccctgaagtggcagactggcagtcttgttaattaacgagtccaaaaagttaatcttatcaaaccccacaaaaaccctagcacccctttctctaccataatttaagcagtagccacaaagagcccatccttttgaagaagaaaagaa

SEQ ID NO: 49478 - DNA, 923 bp, Ricinus communis
  Intron number 1 from transcript 28108.m000145 (locus 28108 .t000005) derived from phytozome v7.0 (chr-ID 28108; pos 8 3773 to 84695)
gtttggctgttgcagctgagcagagaagaagcactgtaagtatatatattataaatgagtcccctttgtttcttgctgaatgtgtacatgtctcttgttttcttgaatactaagtgattctgctgatggagtctgtttggtttcccaggaaaagaaaccaaatctgggattatcttagctgttgcaatatccaatgcagctgggaaattcattatgatatgagctttgggttaatctgttaggttcctgactaatagagtctggagaaaggggaaaagaaaaggaagaaaatactcattcttgattgaacttaaattgatagataataaatcttggatttcttgacagaactgcatggtctggctggaaagttgtgttatatgtttatacaggaaaaactgcaattaatactctttctttctttctttggtcctacaacaaaagtaataaaaaataactttagtgggggagattgtatttttttagagtagccaatcttctttctttttctggtaatctcaaagcaacaagaaatggtggaaaaatggcctgtacttgaacctatatgtggatcaaatcacctgatctagaaaggtatacatgacattgttcagggacgaaaaggagaaagttcctaaaaaattttgccattaaatttcttacagatctactgatgcaatggaaatataactagttcttattgtttcttgcagtttacttctataacattatcaaggagaatatgaattcattttaatattgaaagatgtcattattcaatttcattagctttactaattacattagcaataggcatttctctatctttggaagaaaaaacggttgatttgaataatgtatttctagatgaatttagcaaataaataacatcgatcttgttttgcaggctgtaatcaaacaag

SEQ ID NO: 49479 - DNA, 572 bp, Ricinus communis
  Intron number 1 from transcript 28297.m000108 (locus 28297 .t000001) derived from phytozome v7.0 (chr-ID 28297; pos 6 330 to 6901)
aggttccttctttttcttttagtttttttttttttttcttttcatcatttcttatacccagtttgggatttatattttcttgaaatttgctgctgcatttcatttgcatgtggtgtttgagtctgttttctgatttggctttatgaatctctctagaatattcttttcttttctttattttttaaaatagcactagaatattcgacacgttgatgagctcgttaaggttaatatcactcttttttccctgaaaaagaaatttagaaattcttttgtttgatttgatgagaaagtttacatgtatgttttataatgagtaataaatatgatagacccattggagaactcaaatgttaaaaaaatgtagtatgaattcaaattaagaattaactttcatattgttccatgaaaaggatcactcagttttactgctatctaagcgctgaggctctcttgaatgtcatttttactcacggatcctatatggtgccttcagatcacattaaatacgaccataaagccccggaactttctcatattttctattttcctgttgaattttatatgttagg

SEQ ID NO: 49480 - DNA, 700 bp, Ricinus communis
  Intron number 4 from transcript 29172.m000217 (locus 29172 .t000009) derived from phytozome v7.0 (chr-ID 29172; pos 5 3992 to 54691 reverse strand)
gagaggtaaatttatgattctcagattctatacctttcttgatcctgatatttacatgctcggtctacatgttatggattatagttattcttatcatgctattacctgattatagaatagatattactatgtgagcgactaacatatctgaaagaagcttctccaaaagaattttccttttcatatacaatttatttgtccatggaagagagatgaatttgaattaaaagaatttcaatcctgatattttatcaaactttcctctcgccctttttctgctccttttctgggatttggctgtaaccaaatgaaccttgtcagcatcaaaataagaaatggaaaagcttggagtgagaagaaataaatcatcccaggtcaactttcataacttggagttttattattgggagtagctagtcctgcaacttcagttttatagttttatgtttatttttgtattcatgaactatagttactttgaccaagcatatgaatcctcttatattttcgtttatgccagagtaataatgtgcaagtatccacctttgttaagcttccaggcaattttcatctcttgaacacttgttgcatttagttttttgtttggcatttgcattaaattagttaaccttttatttcagggcaattttaaaattgtctgaggattacaccatgtttcaggcattcaatatcttgcgtt

SEQ ID NO: 49481 - DNA, 805 bp, Ricinus communis
  Intron number 2 from transcript 29728.m000817 (locus 29728 .t000023) derived from phytozome v7.0 (chr-ID 29728; pos 1 63772 to 164576 reverse strand)
atctttctggtccaaaaagaaggtaatacgttttcttttttctgcgcttgttggttcccaagctcttgcatataaatttcaattggtaaactaccgaaaatttagatgttctcatgtccatggtatttcagaattaaccaagtgatgtgggtgtttaacagtttataatttgctagtttggttggatgttcctcttaacatgagaagttttctttttcttgcaaacttctggttggcatccctgtctatttatcagaatagatccatcttgtctggtttagttgaaggacgcattgtggtctttgtttaagtgactttgtggccaatctaaatattcagatttatgctaaagggacaatttgtttcttgaatccatctagtcgtagttgctttcatggcctttgtaagatgacttgttggatagtggagatggatggcgtacagtttgctacaggtttttatttgtctgattctgatgccttaaaatggctattatgtgcttggtctttttgagcttattgcaattgttgtaagctaatattcacaaggcatgatgccatgctttggagactttgatgatgattactcttgagatttgacttcagcttgatgaacatttaatatcatagaggattgacggtctaatgattgtgatggatttgtgatgtacatgcctttgccaatgcttttgtcgtgtattcttcttgtattatccatatgagatctgagttttgacccttttatcatgattaattttttgttataaaaatggaaaattgactgactttttacattttgctgaagg

SEQ ID NO: 49482 - DNA, 351 bp, Ricinus communis
  Intron number 2 from transcript 28623.m000399 (locus 28623 .t000012) derived from phytozome v7.0 (chr-ID 28623; pos 7 7941 to 78291 reverse strand)
cacgtttttggttatctaacaggacttttgtgagtttctaaagatttgattttctttatttttattgtcattttattttgttattaggaatggtcgattaactagatgtttgtgagtttctaaggatttaagtctctttgtctatcattcaccaatttgttgacatttattgttagaaatggttttgatttttgatttttatttttataatgtttagtgcttttcttcttgaagttgcacagcctttttcttcccgttgttggcctatgaagttgtgcattgatctaaatattctgtgtaattgttccttttgcagcttctatacagcagcgcctttatcactttgccact

SEQ ID NO: 49483 - DNA, 483 bp, Ricinus communis
  Intron number 2 from transcript 29783.m000321 (locus 29783 .t000018) derived from phytozome v7.0 (chr-ID 29783; pos 2 51027 to 251509 reverse strand)
tcaattgcattcctcgaaagctcttggccccggtataactgttatttgttttttattaaaagttctagtatattttatattatgatgttcttaattagggtatgtctcttcaagttcttaatagtaaatttattgtctttatccttgaagtttagaatcctgaaattactaaagtttttgagtcattaacctgtgaattacaaaaactatagctaatagattgaaagaagtgcttcctcaatcaacttttattctaggtagacttattactgataatgccctgatagcttttggaatctctcatactatgaaaaataataaatctaataggaatgagtctcttcgcaatgaataaagcctatcgtgcataccatatgtttctttaataggtgatgctcaaattggcttatgtgagtcttgggtggatttgattataagatatactattttttctgtcatattctaatctgattaatgggcagc

SEQ ID NO: 49484 - DNA, 647 bp, Ricinus communis
  Intron number 1 from transcript 29816.m000665 (locus 29816 .t000002) derived from phytozome v7.0 (chr-ID 29816; pos 2 0506 to 21152)
ctttcacttttaaatctagtactgctcacaattctgtaagtcaaatatgttgcacttcttttcttgttttcgtttattttgattgtaattggttcagttgaattgtgtgcaaagtgcaatttttttttttaattttttttttaatcttgtgggttttgcttaatttggatttgtactttcttaatgagttctgttgcagtgtattttcttatgataattttaatcagtgtacatttgtgtttatttttaatgttatcagtttatatagcctatttaatctaagaattataattaagattgttgcaaatcaagagtcaaattgactgcgtgttgatgttatcaaaggataatccaatttattgggtcattaatccttctgaaatatttgattggatactaaattttgtatttttattgaaaaaacgtttcgtaaggagggaaaatttgttctgtttttgtgaattctgtctctactttggatgtaaagcatcctagtgactattcattatcaaagaagaggctccttttcttctttagggctaatttttcaactctgaaactactacttattactgtcggtcctgcacatttcttctcttaaagttgtatagatacctctctaaatttcactatatattgatttaagg

SEQ ID NO: 49485 - DNA, 962 bp, Ricinus communis
  Intron number 3 from transcript 29168.m000387 (locus 29168 .t000023) derived from phytozome v7.0 (chr-ID 29168; pos 1 32915 to 133876 reverse strand)
atttggatcggtttctctactctcgttcattgccggtaaagcttctcactgaatctgtaatattcatcaagaaataatttatcttttattaacatttaataataatgatatcaataaagatctattaggctattatatgtatattcccagtgcttaaataaacacttttgactgcagaggtaactatgttgacttttcaaaaccataaaaacaaccccagtacctaacttctcttcaaaaatgtgtatattgagcgagcgagccaatggacaatgaatattttcactcatttttctcattctacaatttaataaataattaccaatattattgatttttttaaaaaaatttcttcacgttttcagttttttaattaaaaaaatagaaataaaacgtaaattttatcaaatggaaaaatttagtctgaaagtcgataaaaaaattatataaatgaaaaaaatggagtaattctttttttttttttttaatttatagaaactttgattcattaattaagatagcatctagattatatatagctttgatgccttaaaaggggtacttatgtgcttccttttctttataggaaatataggtaggtattatgttctgtgttggaaacatgacccgaccgaacaattattgtagtttgttagcagtttaactacagtgtaaaattttaatgtaatatttattattatgcccatgtaaagttttgtactgtcatacattatgcttttacaaataataataatcttgtcacgtggcaaccctatgtgcattcttctgtacaataaaatatcatttgctatattaacattaatgacacagattatcatcattgtaattacttggtttttaactttttgatcattactataattattattatcaacttttaataatgatgattattttttaattctctgtgtgtttttactactgttgcagcaaagcaaagg

SEQ ID NO: 49486 - DNA, 940 bp, Ricinus communis
  Intron number 1 from transcript 28694.m000673 (locus 28694 .t000016) derived from phytozome v7.0 (chr-ID 28694; pos 1 47689 to 148628)
atcttcctggcgttgctcctcgtgactttcacagggtaacccatctgtttctcttcttgtttttttttttttaattatcttttgttttcttaaatttctttagctatttcaatttatgggttcactttttattgaaaaagaaattcaccctttttcggtgttttaagttatgggtttatctttgtttttgttacaagtagtgttggatctagggttttggtgtttgatctgttactgcagatccgtgatttcgcctttcggttcgatttggatctgtgattttgttgttgctttgacttttaaaatgtagtgatttaataacgagttctttatgttggctgtttatatcagttggtatatgccgtttagacttccacttatatgggtgtttgatttagtgatatgactggttgttgtttgtcatgtgggtgtttttcatatttgctttatacgagtatgtgtacgcttatgattaagttacactaattaatgatggaagcagttagaaaattgaatatgtatttaacatgctctaagatttctaacactgctagtatgtttacaaattgtggtgaaagttaggtatgcagttcaaatattgaatatcgaagtgcaactaataatattttattatggtggtatgtttcattggtattacgaattccaatatcatccatgtttgagtaaccattgtaactgatggcatcttttatttggcatattgtttattggaacttttctcacttcaattaaaatcttatggtgaagaattttcttggttgtgtgatgctgaatagtaggggcttgttgttcttatttcattgtgaagttttattattaagttcaatgtctaacattattcttattattaagttcaatgtctaacattatactcctttgattagggtgatcccctttctgtcaaagtgaacaagctgtc

SEQ ID NO: 49487 - DNA, 1041 bp, Ricinus communis
  Intron number 1 from transcript 29756.m000489 (locus 29756 .t000004) derived from phytozome v7.0 (chr-ID 29756; pos 4 3664 to 44704)
cttaaaacgagctggtgctactggtactcgcgctggttagttaccttttttttttttttttttttttttttctttttaactttcctttcagtattttggttttgtttgatgattttatgctggggtcttttttattgaacttgagattataattcaattaatgtctgtactaattgagcaataatgtaattatgcaatcaagaagtaaggtggagtcttgccgcttgaaattcattaatatttactattattatttgattcttggatgattggattatgctggctaaatttcctcaccttaacttcagtaagtaatagcttcggcagagtcaaattcccgaacttcttgaagattattaaaagataataataatgacaatgataatgataataattatttataatactaaaaactagcctttacattctccttaaggcaggtgcagtatctgtatgttatttttctttgttacttttttgcctgatatgaatattatatggagctttggaagtatttatagatttcggaagcatatgctgtaggattctcatgtttcctatttagactttgaatgaagaagtgcaactgtaacgccacaattgcaagacattcaggtcttgatactatgtttaattagcaataacaaaccattgcctcaacaagattctttcctttcaatttcttatgtgtctggaggcagttgtaattgctcagctttaaactgttatgatttggatttggatctagtaataagtgaaaaaaaatctgatccttcttaatgaactttctatactttattacacctcccactttccttgtcttctgcggaatgctctctattttatgctttgaattgatgacgagtgcagattttgcttcctctgcaaattaaccagagcaaagcgtgtgcaagtgagctttcggctgatataaacattactgacatcatgcatgcttctttacatgatttaacttaccctttgttgtttctcctgaaaaatataggagtcggaggctacacctacttactagagccacta

SEQ ID NO: 49488 - DNA, 321 bp, Ricinus communis
  Intron number 2 from transcript 29485.m000140 (locus 29485 .t000001) derived from phytozome v7.0 (chr-ID 29485; pos 2 739 to 3059)
ccattggaaatactattaaaagggtatgatttgattcttcttatttgtttttggtggaaatactatatgatttgattcttcttatttgtttttggtctcaatttagtttttagccttgaaaaaatataagtgaagaactaaattataggttttaatcatgagtgttgagtaaagaacagattgattatgaaagtgtttctttggaactagaaaaaggtgtgattttcctatatattttctttattttgtttggtcattcacttttcatatttattttttgtggcagaagaagaatagctttaatcaaggaaggcgaaggat

SEQ ID NO: 49489 - DNA, 458 bp, Ricinus communis
  Intron number 1 from transcript 29681.m001296 (locus 29681 .t000001) derived from phytozome v7.0 (chr-ID 29681; pos 5 814 to 6271)
gacagaggaggagcataagtaagttatttaattgcaaatcagagctcgtgttcttttaatcaaaagtctttcttttccactatagttttagttaatattttgtgttactatgataaattaccaattttgaggaaaaagagtaagtttgttactctgaaatctgttttctctgattttaaggatagttgttctctctgattttaaggataatggataagttgtcgcttatattttcttattagattctttgaaaaattgcatgtgttgatttggtttatgaaatttgtactacagacatgtttttggcagctgccaggactgtgtttcaaaattttcacaattttcaatttccttatgacagaaaggaaaatttctatattttccatcaacagctataactttatattgttcacaagctacaaaatctgacaattcaagttggctgcaggctgttcctg

SEQ ID NO: 49490 - DNA, 783 bp, Ricinus communis
  Intron number 1 from transcript 28684.m000038 (locus 28684 .t000002) derived from phytozome v7.0 (chr-ID 28684; pos 1 6827 to 17609)
cgatctatcgatcgcttctctctccagcacttcaagtacgcgctctattactttagtgtcaataaactttatcaaattttgtacgctcatggatctgaatatgaattgttgttatgtcaattacgaattttgttgaatcttttaacgtagcgtagtaactagaaagtagcaatgtatttcaattatagtagtatattagagattgccatctgtttgatcttcttactcagtcagtgaagtgatcggtttaactgattttgatttgcaactcagaaattccaaaaatccatcaatgttagaattatgttggttgctattgaactcatggtattgaccttgtgatatcttattagtatcaaagacattatattatgggctttatgatatctttatttggaatctattattcttattatgatttggattatcattatttctacacgaacgcaagtaggtgttaaatgctacagaaagatacagaaatgtgtagaaaatcttgcaggaattcaatgcatttgggattttatttagttatttttcatgctttggagagtttgtagttgctatatgatcctacaagatctcagttcaattgcattttgagatatgatttattccgatttccaaacaatgcctttatgtgtgtatttttactagcaactgttttgctgtataagataattggaaataatagaagagcagctgagttatattattatatggtaaattcttctcattacccctcttttcctcatcgttgctattctttttgttgactcagac

SEQ ID NO: 49491 - DNA, 326 bp, Ricinus communis
  Intron number 4 from transcript 29726.m003952 (locus 29726 .t000064) derived from phytozome v7.0 (chr-ID 29726; pos 3 81732 to 382057)
agctatacctatcatcgccaagccaacaccaacaggtatgcgtttaccttcctccttgttgtttgcttgtttattaagctgctttacacattcttttatactgtttagcaatgaatttaacagagatagattcatattgaatttgaaaggctatggtctaccagagcaggagtaaaatacccccttgactataatagtttatgttcattaatgttatgatagtcttttcaatgtttaattagttagacatttggtttatcattcttctttttcttttcatgattcacttgccaactcaaagaagtttttcttttatgcttcagaag

SEQ ID NO: 49492 - DNA, 741 bp, Ricinus communis
  Intron number 2 from transcript 28883.m000720 (locus 28883 .t000010) derived from phytozome v7.0 (chr-ID 28883; pos 8 5970 to 86710)
agtacgatatccgttgtcctgctctgagaatttaagcttccgcataaatgtatcaatggcttttgcaaaagaatgtctctggtagaactgttctagagttaatggctgaaactactgttctggagatggatatggtttttgatctctcataaaaagtaggtgattctggttgctcgccttctatgctaacttctttgctttctttttattttggcgaaatgccttaaatagctatcaaatgtgagcatttgagcttctactgaagctcaatctctcatgtgtctgctaaatctgcttccaaacttttccagatatgacaatggctcttgatgcataagaaattaaaaagaagaagagaaaaacaaaaagggaaataagttgttgttttgaaactgagtagattatgtacaatatttggtgaattgaacgaacaagcctagtttctgtagcattatatggggaaactctcacttgagctattctgcaaatttgatatggcaaaaatgggcatattattgaaagcctttaaaacctttttttatttcctttaaatttttagatgttaatgattgtttaaatgaatactcaagtagggtatgtcgcatgttcgatagtctctttctgctgtaactggaccccattgatgaacagtactagctgagttaactgcaagtggaagaattgggttctgatacgttaactttgatgttgttttgacagatactgaatctgtcttggtta

SEQ ID NO: 49493 - DNA, 639 bp, Ricinus communis
  Intron number 1 from transcript 29634.m002112 (locus 29634 .t000058) derived from phytozome v7.0 (chr-ID 29634; pos 3 74476 to 375114 reverse strand)
acttggagattggtaagctttcctagtacgtcatgttaaaattatatgttttaaaacaaaccaaaagaaaaaaaaaatggaaatggttccataaacttttttgcctctatagcagtcttagttggattatattgatagcaaatctttgcctctatagcagtcttagttggactatactgatctaaccgcaataaaatgttcacttaattcactgaatttgtttcccagcatgtgtcatggttccccatacattttgattattcaagaaaccattgatagaaggaaatgtccattggcacttactaagaaatgtctctttagtcttcaccaaagtatatgccttattctgaagttgtgtctctaataaccaaaagggatgtccttatgaaggtttatgccccaattcttaagagatgcaatcattcagtagtggcttttggttatccataaataggcaattcaattagcaagttcatataactttcagttcagtgataaatctcaaataattgcatagtgtgtgatcattatactatttaaatccttgagatccttcaatctttacttcctccactgactatactcagcgtttctaaatgtgcaggaccaggtgctccatcagttttcaactgtgtaagc

SEQ ID NO: 49494 - DNA, 941 bp, Ricinus communis
  Intron number 1 from transcript 29791.m000541 (locus 29791 .t000016) derived from phytozome v7.0 (chr-ID 29791; pos 1 42167 to 143107 reverse strand)
agcagaggctctttgtgaggaacttgaagcagcaggtgatgattaacattaccatttcttgtctttcttaatggttcttttttgtaaatctttttccatttcttgagctttgaggaacgttggatccatgactctatatgattttagatttatggttttcttactcttacaccatatatatgattaatgattgtttgttttctatcttgctctgtgattctatattgttaatcttgtcatcaaaaagaaaatcatgatctttttcttcactagctagccttttgttatttcttttgaaaattatatttgggaatatagtttcttatagcacgtgatcagttttttcttgggatcacagatttcttattgtgttttaagtgttgagccaaaagggttcactctttattttcttgttgttttgttctcatttttggatttggatatatgatttctaatcaatgcatggtatcaatcatttgatatttcatttttaatacaaattattgagctatatatgatcttccttgtagtagatctttgggactagatagaggaaactaatttatttgtttggtgaaaaaactaaagaaataatacaacactggccgacaaaaggggaaaatcagagcctttattttctcaattttatttttccagccttagaaattttcttaacagaacaaattggcaggcatgtgatctttgggtttagtcccaaaacacacagggaaaatcaaaactccctgaaaggaacccagaaatgggattaagtaaagaattacctttgtttaatttgtgatcatatggtaagagtactacatttattatttttttaatcttatgattatttttgattgccaaaggttatgaatttctttacaaattttttgcttttgtttcttgcagggaatattagacaatcactttgatcaagtccttga

SEQ ID NO: 49495 - DNA, 964 bp, Ricinus communis
  Intron number 2 from transcript 28129.m000049 (locus 28129 .t000001) derived from phytozome v7.0 (chr-ID 28129; pos 9 139 to 10102 reverse strand)
tcctgtcactggcaagagaattcaaggagtatgttttctttgctttctttctttttatttttcctaatgattgtttgtgttttcattttctggatcttaatgtgtattgttgatggcattattctggaatttgtattttttgtgtgaaatgtttaaggatataataattgataataaatgcttaattatgtgattttgtatgcttctcactatagactgtcatgttatatgcattctatgatctctacaggtacaaaccaaagttttgtttaatatcattgggaaaatgaatcatctctctaggttttttaattgctggcctctagttgaataagacttttttaccagtcaagctattttatactctacactcaatgggttattgtatttatagcggatatgcattggattttacattgtccacaaaagtggattacttctggtacttaagtttctggacagtcctcgaggaatgagggtacatttgtgactttgaaattgttgaaatgttctgttgaatgattcgtcatggatatacggaatgatgctataatttgtgctcttaagatttgaaatgatgagatatgtccgactctttaaggttttttcctttttattttgtagtgtctagcaaaatattgttacctgctcttagttgggaaaatattcactgctgctcatttcatgattgctcatttgactgagtgttggatttttgtgtcctgcagagtcttttacaatgctggaatatattaggatgtgtcaactgtagtaatagctgcaagttcctgttttttcattgtacttttttataaaaaaatattgaacagttgttatgcacatttcatttctttcctaactagagttattaagtctttgtgaaatcatcacaaaacttgaccagctggttctgacttgttacatttcagattcctcacttgagaccttctgagtacaagagatc

SEQ ID NO: 49496 - DNA, 507 bp, Ricinus communis
  Intron number 3 from transcript 29212.m000185 (locus 29212 .t000013) derived from phytozome v7.0 (chr-ID 29212; pos 1 29916 to 130422 reverse strand)
ccttgaagcctgtggtgcttactggaaatctccaggtcagtgacagcttcttttgtggttttgctattttattttttccggttttatattagtgtttggaacttgcaaatccttattatctgttaataaaggaatggtttttgttttataatctgcacatttatatgtctttagttgtttctcattgtcaaaatcttgatgctgttccaccatattatgtcatctgttcttttttttttcctttagaagattctccttttacctgtctgtcataattctggatgcaagtaggaaaatctgtcttgttatctgtttgaaccaaattcatggattgcttgtctgatcatctttataacgaggtgtaaaagacttgaagttttctctgagctctttgatcatggtaactgttaaactggtcaaagtaatatttcagttcattaacatttttctttctctttcttgatgattacaggatagtttctttgctagctttgcacttggttggct

SEQ ID NO: 49497 - DNA, 964 bp, Ricinus communis
  Intron number 1 from transcript 29654.m000305 (locus 29654 .t000007) derived from phytozome v7.0 (chr-ID 29654; pos 1 47181 to 148144)
gctctactgttgcttctactggtgcaaagaagaaggtaaaatttttcttttcttcatgtgggtttcttttaaagttttattggtctctgttttatcttcagtatgcattcttttgcttggttagggttggattggttgcttaaatttataatagttattgaacaatgcctatgctaaaatttacataatattgtcagtcagaacatggttgctctataaatgagctgtcttgccctaaaaattgagttcaccttctgggctaagtacagggctgaatttggtttgttttggttttatatattcctttgtgtaattacaaccatagcatgtcctctgtgttaggaataaattatgctttatatctgattggatgtgggctttgtttaaaattgttgaacattacatatgattgattaggagctgagaaattgagagttgatgcaattttgtaaatcattttatggaagcttattcccacattgataggtattcttgtatgtgcttgtggttaacatggctggttttctgctagttgcttcatctatctatatttatcaagtgttagttctttgactaagttgttgtacatgcaatctaaagcttttggacaatatatatcggagtctttttgctgcaattatttctgttgattttaagatgttttgcatgccattatgtgagatgatatgatatatgtgtgttgtgttgataaagaactagatgcattcgtcctgctgtttttcctaatgttgaactgaatatggtcaaagtagtagctactataaatgttgtctgaccattggtgcaatttttattttctcacgaggcatgttgagttctttcaagccttaaggataactactagtttatgggttttggagtgatgcttatgaagcaattgttgtttatcttgtcaattttgcatttgttttacagaacatctactgcacaagcttgagctgga

SEQ ID NO: 49498 - DNA, 977 bp, Ricinus communis
  Intron number 4 from transcript 29633.m000894 (locus 29633 .t000013) derived from phytozome v7.0 (chr-ID 29633; pos 7 9042 to 80018 reverse strand)
tggtaagtccaattgaagtaccttatcttctgttgttgtctactacattcacgtgcattgcattttggtgctgggttttaagtgaattttggtcttcagggaattttatgtaaacagcatgatggttatgctatttgtatctaacttggtcttcttgcctgatcctttgttgatgtttatgaattgttaaaatgaccagtgatttttatatagtaactcaaaataaaagatcttgtaacagcttgctaaacattgtaaagccactcctaaatttctttcaaatgcagaacaatgaaatgttgacaaattataagttggtttttgctttgttggatgattctcttaattgcttctaaaagcaggtgaccccttcccataacgaacgtgtacccacacaaagttgcaacctactgatatttttgctcttttagggtgaggctataggaaagatgcgactttccctggaaatgtaaaccaaggaaatagcagaacattaattctgctcactcttttatatatctcctgaccctggtggaagagggtgtggttaaaataatttccatctcagtaaataatagagatgctgaaactcatgcatgatttgatcagtaaactattccatctgcgttctttattcctcctctagaatcctgtggtaagataacataagtaagaactaagatttggagaagaagatgcaattgccatgaattatgactggtctggtggattttggccaacacaaattctctttttcttgatggagctgctggacttgtctgctcttgtttacccatgtttatatccacgcctttagattatggccatggttttaatttgccttcctcccaagttgtctgcggaagcacatgtctcctgttcattgccaactgtgtcatttctaatgttttatgtagtaactgaaacctgtgatgcttctactgaacccagagtcatagtcggtgcttagcagacgt

SEQ ID NO: 49499 - DNA, 433 bp, Ricinus communis
  Intron number 2 from transcript 29706.m001343 (locus 29706 .t000073) derived from phytozome v7.0 (chr-ID 29706; pos 6 39177 to 639609 reverse strand)
gtgccacagcttttgaagttgcaggtaggactgtcttctaattttgcactattcacttttgcccaatttatagactggttttgttgaattaccaattaggatattaattgttttttatgaaattgtagaaactgaagtcagaacaacctcaagttattttgagatggaatactatagttaattttcttatatgtttccaaatgtgatgtggctcttgagttttcgagttttgttttggggctagaattgtaatgaaatgatggaactgagaacttatcagatggtaacaagaaaatgtttcttttgatattgttggccacaaatgtctgctagaatgtctgccttttagttttgtttgctcatagtaataggatttggtgatcgtatttgtcgctcagggactccagtggactgtgtctcattagcattatct

SEQ ID NO: 49500 - DNA, 654 bp, Ricinus communis
  Intron number 1 from transcript 29638.m000506 (locus 29638 .t000005) derived from phytozome v7.0 (chr-ID 29638; pos 5 8202 to 58855 reverse strand)
gttgcatacccttccaacgacatctcaagaagttggtaatgcttcatttagcatggcattataaaataattcaaattgaataccattttaccaaatgcatttgcaattcttattttgttatgtttacagctcaatttttcacttacagttttgtatttttgatgctgtgatatttactatgtttaatagtttctgtcaaattaaatgataaagtttgtttttattattttgtttagtattctcagttcttttaaccatcttgagttatagaattctatatttttgcctctttatttcggtttttgatatatttaagatggtgcaagtcataagaggatgtcagcctagctaagatgtttgaattgatgtgctaatcatagcttttacctaaaacccaaaaaaagaaaaaaaaaaattattcacttaaattatataatatatttgaattgcttaatgtgtgtccttaattatcaattatatcactcattctcaatatatcatttgcatcttcattagatgcactcatgaaaaaggcattttacatgcagtaaataataaatgagtatccttttctttaatttgaaagaaatcactttaatttattgtattaacaatggtgttcttatcgtagtgtgtattccttttttacagaaa

SEQ ID NO: 49501 - DNA, 347 bp, Ricinus communis
  Intron number 1 from transcript 27905.m000071 (locus 27905 .t000001) derived from phytozome v7.0 (chr-ID 27905; pos 6 526 to 6872 reverse strand)
tacaggtatatttggtttcttttacttcaacttctttgatgggtttcctcttttccttttccttttccttttggcttttctttttcttcttttcttgaatgattttagttttgaagattggccaatatatatttaaaaggtcaatatattattagctagagtttgttttacttgtggtttatgaatatatgcaaacttgaatcgtaatcaaagttcgttgcagtatttattttttgtttatacaaataatttgatttatatatgttaatttgttgttgataattttgttaaaaattatttgttatatggcaggggggatacagccttttgtagtctagagtgcagag

SEQ ID NO: 49502 - DNA, 829 bp, Ricinus communis
  Intron number 1 from transcript 29726.m003939 (locus 29726 .t000051) derived from phytozome v7.0 (chr-ID 29726; pos 3 25527 to 326355)
ttgagttcctttcaagtcaaactgttgttgatgtatggtatatgaactttgtatgtttctcttgtttctattgctcatccattcattttaagtttgctgatatgtaagacaatagactgctttctgttttaagtttccaagttaacgagtcttttcctgaattttgtggttgcctgcaattgagaaactggaatttttagttaatttcttatcaatattatattttgcatgacttgacctacatgtttatgtttgttaagtttctccagatgatcaagtttgttttacttcagtactttatgactgaacacaagggagagttgctagcctcatcaaaataagtaactaaaaaaactgaaggattgagttttcttcatattttttgttttgatgttttctcataatctatttaagaacctttgcaaatgacaaaatgcctatgaattttaattaacatatgtttcatttatgtaaatttgtcaaattttgcaaaaagagatactggattcttaaaagattaaaatgatgtaagagaacatgtcaatcttaagtaatcttcagctaacttgctatatatggaagacacctaaaaagacaattcatgctcccaggagaacaaaaagaggggaaaagaataggaagaaatacagaagaaattgggggagggggagggaatgggtggtaaaaactgactgttacactaaagtttgtggatgatttgaactttatttgtttgtgatatctaaccaagttgatgccatattagtttatttctctccacctgtttccctttgactacaaatatctttcttgtcataggtggcaagat

SEQ ID NO: 49503 - DNA, 753 bp, Ricinus communis
  Intron number 3 from transcript 28492.m000465 (locus 28492 .t000003) derived from phytozome v7.0 (chr-ID 28492; pos 1 3354 to 14106)
cattgttaaggctgacaaggctgtagagacagctggtaatgaagatttgcttttgcttttcgcaaggatttgattttaaggttttgtcgtagtatttctgtttctcctggttggtcatttgtgatttctcctgaaataactcctcgtgtactgataatggtaaatgggcctgttggtcatctgttaaataagagatgataatttgctttcgaaaatgaatcatgccttggttgctctggtgcttgatatttgagccttcatattgtgccaatttgcagaaattggatttattctaaaatgaaactagcagaagtttgcgcctatttgcttcctactgttgatgtgtattaacaatctaaattcacaaatctactttcttttttccacctaaaatggggagaaaggcattctccctgtctgggaagatataatcatagcaacaactgtttaatcctactgtatttggttttgaaatcagaccttggcaatgaagatggtttatttagtccatcattgatgggcattgtgtatatggtgctttccaattagtttttctggtagtgtttctttgttgcacacatattttcttgtcaatatgtgcttatttgagaactgtatatggacatatttcttgtgggtgatcaggaaatctgcattccataatatttcattaggttatctttctcgtttctactgttgttagtctcctaagcccatgattctattctcatatctttcttgcatgcaggtaag

SEQ ID NO: 49504 - DNA, 692 bp, Ricinus communis
  Intron number 1 from transcript 29681.m001336 (locus 29681 .t000041) derived from phytozome v7.0 (chr-ID 29681; pos 2 03230 to 203921 reverse strand)
gctctcgaagctgatatccagcacgccaatactctgtaactctctctctctctctctctctctctctctgcaattttaatttttcaattgaatttattcctttcatgacttttaaaagaaaaaaccttccatttgtggaattaagtaaatctgctttctttgattggcagtttgatggtattagatgaattgtttatttgatcttctgtttcctcaaaagattattatttttaaataaaaaaggaaaaaacttttcctaaatttcttgaattgtttgctaaaatacgcagcctttgcttgcgttacaatcataatgaagtaacctcaattaaagttagtgcaatgatggaaaatattccctggtcgtaaatcaaaaccaatcatggagatgccaatcatctttcatgagactgtcatcttaatgtgcttttgaatatatattattgtcaattgctaaccttttgctcccttatttaaaccgtcacgaattcagattgggttgtaaagaaggatttacttgaatgacaattcttgctgcatcttagattgttctgttgatctatagtacttcaggtccttgatgttgcttatcggttaacagaatgtgcatattttacttgtagctgattatatgattctcagtttttcaccctcttattaacacagtgccttagattatccaagggagaaag

SEQ ID NO: 49505 - DNA, 332 bp, Ricinus communis
  Intron number 1 from transcript 29634.m002057 (locus 29634 .t000003) derived from phytozome v7.0 (chr-ID 29634; pos 2 1295 to 21626 reverse strand)
gcgtttgctgcggattctgtttgtctctgagaatcaggagatctcaccctgtgctcattttgaagcaaatgtctgttaattagttcaatttgctatttgagtaagctcttttttttaaattaaaaaaaaaaattcttttaatatttttctttttctgcagctactaaaggcatattataatctaaattttctaaaatgtagctgttttatttttttattttttgtttttaattgcttatagaagtcagcgaagcaaagaattatttgattctgtagtgttgaagtgtgttcttgcagtttataagcctttctgtaacacaaaaacaggtttg

SEQ ID NO: 49506 - DNA, 366 bp, Ricinus communis
  Intron number 3 from transcript 29648.m001961 (locus 29648 .t000048) derived from phytozome v7.0 (chr-ID 29648; pos 3 60118 to 360483)
aaggtgagctcttttctctcgtttctgttgttccttcttctggtagagtgaaattctaaatgcctacgcaattggggatagctcccctcttcctgtaacactttacacccgacttagcaagttcaaacttgtaagttctaatggaaactccaagcctttaggttatgttcaggagagaagagaaaacatggaagaaaagaaaatgagaagtgcacatctcaatttctttccaatttttcctttatcctcattttcatcacttctttaacatagccttaatgtggggctacgggccacttcagcctcttaagtttgcaacatccaccttgtgaccgtatttgatttcttaatgatagtggatactcc

SEQ ID NO: 49507 - DNA, 741 bp, Ricinus communis
  Intron number 1 from transcript 29794.m003452 (locus 29794 .t000151) derived from phytozome v7.0 (chr-ID 29794; pos 9 83910 to 984650)
ttgcacatgtaagtatactgcttatttgggttgataaagttccgaacgatatagaattgtattatttttaatatatatacttaaatttgatttagaccatctcaggtagaattcgaatttaaaattttaaatgattgtgagacatttggtttattaattgatttttatttaattaaaaaaaaaagtagtaataaaggaaaaaaacaagctctctcacaatctcttcccagtttcggttggtcatcgtacataaatattaaaattagtatttatatgtaatgaagttttatatttaattataactgtaaaatttaagtgttattttcttcaatatctaaaatattagaaaataacttatagtaattatatatataattagccaattgaaactaaattatttacttttctaattttgaaaactaaggtattatttctatactttctcgtttcgttagcactaattgttgttggaagttaaatgtttttttaatgaattattttttttataaattgaccttttttctttaaacaacggagccttattatggtacgaaaagcccatttagacctataagaaccgaaaatctgtaggctcatagcccaagataattggacctaacataaccaaattttagttatccagaaaatattaaacaccgaaaagaaaatgaagagaaaaagaaaacttctattatgtgggaactaggaagttagttccaattggtgcaagatctcttgcac

SEQ ID NO: 49508 - DNA, 872 bp, Ricinus communis
  Intron number 1 from transcript 29669.m000810 (locus 29669 .t000019) derived from phytozome v7.0 (chr-ID 29669; pos 1 17034 to 117905)
aacagtgattttgttgatcgattcgcttctccagggtgtgttatttactttaattacattttaattattgtttctatttttgctatatgttttgacttttggtattaattatcttgatttagatttggttaaatactttatgtataataggaaagcaaagcttgttatttttgtttgatgtagatttagtaatagtgtgtgttttggaaagttcataaattcaggattctgtttggagagcttatagatttgctagaattcaattcttccacttgaaaagccaaaaaagtacattctgaaagtaatgaaatcctgtcgttcttgcaggaagtcgattcaattgaattgaaagcttgcatatgattttattccaaacaaggacttaggaattatcttgatttagattttgatagaagcgtttcgagttttggaattgaggatgggaagtaaggaattaaagatggacatcacctaaatatggacttttttttttttcttttagcagcatgtggattttttttccttttttttcagggcagaaataatagattttttattttttttgtgaagaaaacgaattcatagctaatagtaagtcctgaatttcaatgtaaaagaaagtcaatctttggtacattgagcatgtctttgcagacttctttgctttgattctaagtgtatattgtgtagtttatggattaaggatctgtgagcagaaatttgttgtctttaatgtaagatttaagtattgaaggatactggtgttatttgagtggacatgctgtattgagattgttaacatcatctttcatgttagagcatgttgatttatgttatctttctggatttatgatatctgtacaggaaaggat

SEQ ID NO: 49509 - DNA, 955 bp, Ricinus communis
  Intron number 3 from transcript 29648.m002018 (locus 29648 .t000105) derived from phytozome v7.0 (chr-ID 29648; pos 7 58711 to 759665 reverse strand)
gatcctcaggttttagctttctttaaactcatttgatttttaagaggtgtatgtctaacgtaatctatgttagttgttttctttatgcccaaactactctagaatgaagatttcatcgttctggtgtgcaatggttcttgttgctggtatcatttgtaacgactttttctggggtgtaaagatttcattttttttgggggacatagaagggtgctggctggtcataatgtcccgttgtccgtggactttactcatatgagacttgtaaagatttttcagcttttttggggataagagtggcgcttctttctgacgatgtctccttgttcatggactctgtttgaatgattggtaatgtgcatcattttttcctaaagttcagagcaagtataaaattcatctatcattgtctcctaataaatgggggcaagtctaacacgagatgaatttacaaacagcagcaatgggaaaacagcgaaaaaaagaaaacaaaaacggaaattgcaagagagggtgccctaatatgtagataatctgaattaggtctcataggcctccttaactgatgggcaatcttgtacaatgtattcctaaatatgtggattaatctgaattaggtttcgttgacctccttaactggcaatctttatacgatgtattcctaaattcaactagtgataagatctcattgcataaaccccattgtcattttagccttgtgtttgtctttcctccatttgattgggaaataaataaagatgtcaaattagttattaatctgctggaacttctgtgacctactaattttcaagctcctatacacttgctcatctacctataattttggctgattctgattttttttttgtttcaattaataatttctattaatttaactgacttgaacaggcatatgacaggcaagtttgaaagcagaagacatattaaattcctg

SEQ ID NO: 49510 - DNA, 1042 bp, Ricinus communis
  Intron number 2 from transcript 27942.m000160 (locus 27942 .t000007) derived from phytozome v7.0 (chr-ID 27942; pos 9 0020 to 91061)
tactttccagtctagtttcctctgagatattggaggtgaggcttccgtttcatcttcttgaagttttgaatttgcaatcaacaggatcttttgttgctgtatcatcataataattctttttctaaattttaagttacattctcattgatctttagcagcatcttagatatctctcattttaagatagttcttttttgcattttctttatattctatcactgtggagtttcatatgttttgtttgttcaagaggattttcatatgtgcatgcagttagagaattacaagcttcggaattattttgatttagttattttttgtgaaattcatgtttttcttctacttctcattaggaatatttaaaagttatattattattattattattattattgttgttgttgttgttgttgttgttgttgttgttgttgttgctgttgttgttgttatcttgttttagtattgggggttagtagtttcctagttaatattggtttagagttttcctagattagaattttcaatctcaataatgttaggattatttttgggttctacataaagctagctattttattaggttatttaatcatttcaataattaaaaatattaagctttgtgcttttctttagtacagcagtgttttgctgttttattcaaggagatcatctgctgttattgcttgagtcatatctgttgcttccagacagtttgaagcatatggggcatctcatgccatactaacatttgataaatataggttaacaaaaaagttgtgtttgcaagtgatgaggtctattttgctgtagatttaccttaaatgcatcaataaagatgttcagattcacttcagtttttgcaatgcaacattagcagcattagaatacacaaaaatgatgctgatacaggactttgcagtcccctttggtatcaaattaagattctctggctggaaattctacaaattttttatggaaatttagcgtttgctgttttctttctgcaggtgaaagcatctttatttgcagctagttgcttttg

SEQ ID NO: 49511 - DNA, 765 bp, Ricinus communis
  Intron number 2 from transcript 28037.m000046 (locus 28037 .t000002) derived from phytozome v7.0 (chr-ID 28037; pos 4 8914 to 49678 reverse strand)
gaaggtatgttataatctttgctaccaaactactcttctttttcctcattttccatgattaattctttctaccatttagcttgactcagcatgagattgcgtttggcaaaagcgcttttataagagaaaagacatagaatttttttttttcttttttatagttttttaaactttgaaaactatatgtggagaggaagcatgtgaattgatagcttttcccaaaagtatgtttgacaactaaatcaaaaaattcttgacatgctttctttaacagtcgatagcaatcccattgctttctttcttttttttctttttttttttttttagcgctcgatagcaatcccaaataagtcaagtgactcattctaatcgcattttgttatcctctcatttctcagatatttgtgataggctttgttggattatctgtttcctccattaaatgtggtgttaaaaattccactccaagattttctttttaagggttggaagcatctttctgtgtgtggtgttgaagttctcttcatgagattgtggtctatttacttataatgaagtggggcaagctagtgtattatggcatcttactgtgcacatttgcttaaataccttgacatggcataggttccacgattcatatactaaaacattgaatcttattggggattaaattattaaagcattgttcacatttatagtttacttggtaataatttctgctattctttaactatatatataggtgtggaatcatacgacattgat

SEQ ID NO: 49512 - DNA, 865 bp, Ricinus communis
  Intron number 1 from transcript 28037.m000046 (locus 28037 .t000002) derived from phytozome v7.0 (chr-ID 28037; pos 4 9730 to 50594 reverse strand)
tctcaggtacaaccatatctttcttgaatcttgttttgttgtaattttttttttttttttggctgaataggatttatgctttgagttgttgccctttttctttgttttcttttctttcctagtctatagagtgctgtgttttctggttttgatttcttttcgtgtgtgttgggttttcttgaatccggatttgttgattgggttgtttgtttatgcttgattattgggtttttgatggttctccttttgttttttatttgagctttttaggtacccagaacctagaaattttggttcttgggttttcaataattgaaatatgtttgcttaccagttgacctgtgaattgaatagcaattgtaagagatggagataaaattcatgcatggaatgaaaagaaagtcatatctcaacacagattaaatgttagttgttttgttgtttagttttcaaggaaaaagggtgctgatgttgctttaatttctgctgttctttctttcttggttggtttagtatgtagttgataacttacaaaaggtcatgcctctataaagcagcaggattttaagtttgcaagtaatggctttctgtaaaagtatctatgttaatttgaagtgaatatggaattgcccaagttctacgaagaaaacatgcattttcttttccactatttctgttttatgcctggtttattttgtctttgaatcttgaatgcttcactttttcagtgaaagaagttctgattacataaatatagaagactagcaccattctggccagatcttattgtacttgttttagttggtgcggtcaatctgataatatcaatttgattctcttgcagactgttgtgctcaaggttggt

SEQ ID NO: 49513 - DNA, 394 bp, Ricinus communis
  Intron number 1 from transcript 28806.m000146 (locus 28806 .t000001) derived from phytozome v7.0 (chr-ID 28806; pos 3 706 to 4099)
gtcttcttcaactgcttcatcgccagtcattagtatatgcaatacccattgtccgttattaatatccctgaagaaaagctgccttttctatatcagcatggcaaagttcgaatctttttaacgtttcatgactttcactggtttggtttgtgaatcttctctctaaggcagtttatcaaacatgtgaaagtctatgttaatagttatttctccgacatctatatcgcctttcatcaatgactaatttcccagcaaaagaatttttctgttttgtgtcagcatagtaaagtttgaatccttttaacctttcatggctattagtggtttggtttgtgcttcattttttttgaggcatttttatcgaacatgtttgagttttgcttttgcagcgtca

SEQ ID NO: 49514 - DNA, 916 bp, Ricinus communis
  Intron number 2 from transcript 27715.m000180 (locus 27715 .t000003) derived from phytozome v7.0 (chr-ID 27715; pos 3 6741 to 37656)
ctctggtaacactccttccatttacatttcatttcatgtacatataacaccatccaacacaaaaataatatatttattagtctatgttttcacttatatactaaaataaataaattcggtcattcgtgttctaatgaatctaaggatgagatataaaacatagcatcggggcaatagacacttgtgctcattgtctccaaaggttcattaatttttggagtaatatttacccaagtatgtaaactacagtaaataaaagaattatatatataattctttatattttaatattaaatgatgatacacattcaattatataaaattaataaatatatatcaatcatttatcagttttgtgtatatatagatatggctagcaaaaaaaagaaaattttgaattaattccttatatttaccattcaaagtccaagtttgcgccacctttagaatttcttttcttaacaatttcaatttgttcccacacttgaatcatataatctcttagtgatattttaatttagaattgactcaaaagtaattagtgattcataaattaaacttgttagataatagatttgcagaaccctctaatactgaattgaatcagtaggttgttccttgctttaaagctttgtttgcccccttctgtacctacaaaaataactaaactaaacttattgatttattctgatttgatgtaagtttgtagatttaatagttaaaattcaatagcattattgattaaaactaacgggtcttctacatattatatataataaaaaatcttgatctaatttaatttcttaaaataaaaattaaaactttttaaggtttaataaattccatctctatataagtctgttttgttgttgcatgggcagtttggagctgtggtacaaccaagggattatacttc

SEQ ID NO: 49515 - DNA, 956 bp, Ricinus communis
  Intron number 3 from transcript 29736.m002005 (locus 29736 .t000001) derived from phytozome v7.0 (chr-ID 29736; pos 4 636 to 5591)
ggcaggtcattaagcttatttttgtataatgatttccatttctttttatgtataataatgaaatcactcatgaggttctttgtttgtctagtgtgttcttgctagtcttttgattttttaggtgttgtttactttttttttataataaagttacttttgaattctccgtttttactagggctaaggctgtaaagcctcattttaatatcatatgttttatcaattaaacagttttctgttcagagctaattcaaataatatacaatctttgattctaatttctgctcaaggataaagaatgatgagtaaggttctactattaggtgttttggatgaaattttcaacagttccagcactaaagtattcatattacctcgagatttataaatttgtggtttaacttgattattattattatttactagtctttctataatctctcttcttgcatcttgtttggctacaagttattttggggtcttgagaacatagaatttaattgttatggtacagtggagcagcttctttgcattgtttagttggaacaaaaaaattgtttgtctgggatgtaatatttctcttaggattgcatatgtgatgatgtagatgcaaaagcacaagaccacattggatgaactaaaaatgataaaagttattctatcctaatgtacagtaatgtattctattctctacgtatgttaacttcttcaatgttatcaaatatgaaaacatcagaaccccaaaaatttaaagtatcaaaacaaacagatgtaaagtttttgtgacttagattctatgctttttgctcatagttggtttgaatgtccgtatattctaatatggatcatagattgctaggattaaatctgttatagtaaccggtttaatatactgatatagttatatttttcttaatgtagatattctgatccaaatagtgcatcatcttcattct

SEQ ID NO: 49516 - DNA, 965 bp, Ricinus communis
  Intron number 1 from transcript 29585.m000597 (locus 29585 .t000025) derived from phytozome v7.0 (chr-ID 29585; pos 1 83204 to 184168 reverse strand)
gcttctcaagaaggcagtaagcaggatgaggagatttttgttagaggagaatcaccccatttctataagatcattcttgaaaaaaccatccgtgaaggaaaatttgtaagcatctctcgtgatctttgttatcttttttctttcatgtgttatctttttctgcttcttgggtttcttttttggtttggtctgtccatgtaatcttgagggcatttggtaagagttctcaagtaatatagtaactatggaaaattatatatgatgacttcgtgtccttttaaaatcccatttgggtactaaactagaagaatggtcgactcagtttcttaattttatataagatgtataattattgctgctgttgacaggggattcctaagaaatttgtgaaaaaatttgggagttttttgccaagtccaataatccttaaggttccttctggcaagtcatgggaagtagagttgttaaagattgaagatgaaatttgggtggaaaagggttggcaagaatttgcacagtatcattctctgaaatatgggcactttgtattgtttaaatatgacggtgattgccagttcaatgtgttgatttttgatatgagtgccgtggagatcgattatccaggctctggagtaccttcaatggatccaaatcatggtcgagattctcgacagcccatgattcgagcaaatgaagaggaagatgccagttcttgtcaaatcttggaagatttaactagtaattgctgcacatctagtaaggattcacgtatttccatatgcctttcttggtttcctgatgttgctatgattgaacaataaattgaatgctgaatttgcaagctactttgaacctggaacttgattcttggagagaagtcataactctggtgcaattgaactatatccaattgttagaaaagcagactcatttaattacctgttaattggtttcatgtaggagaa

SEQ ID NO: 49517 - DNA, 947 bp, Ricinus communis
  Intron number 2 from transcript 29785.m000972 (locus 29785 .t000041) derived from phytozome v7.0 (chr-ID 29785; pos 5 00169 to 501115 reverse strand)
cttgccacaagaattgcaaaatcttctgcagtctggtcagtttcaacctttctttttttatgagaaaagaaggtcatgggaaaagaaatctcttcttttttatagttaaataatcaaaatttctttaattaccctaaagaacatttaagatgggaaaatcatttcatttaactttcaagagctcaacatatagagatagatcttcttcataatcatatcttaaatttcattgtatgataatttaaagtttcttatatagttatgctaaagtttaatgtcggttaaaaaaaaatcagttcgtgcatgaaatgttcatatgtataatgcttatctgcaatcactggtttcaaattcccttgaaagatatgaatgttactgattactttttctttaaagtttttgaaagagaaattgaaaaaggcagacgtaaattctaccttatacatgccctggttttaaaatgagtctttaatttgtaattttagtagtaaattcttcaagctttctcgtctgattgtttatttgcaattgataaaagccgaatgtactttctggaatatgggcttcaccaaatctggagaaaaatatgatattccatttgtggaagggttgaatgatgcaagggaaaactatggcaatagatatgacaaatcttttgcagaaagcttggttgatagattggaagtatatggattaggatatgatgaatctcttataaaaggcttagatgaaaagaggatattggaacatcttcttcccaagtcaaacgtgttcttcttatccagtgatctccatgttggccaaaccttgaagcttcttataactaaatcaacaaacaaggctagatttttgccacgtaaagtagccgattccatacctttttcaagtgataagttgccaagaattttacagcgattctcaataatcctgaatcattgcaagccaag

SEQ ID NO: 49518 - DNA, 337 bp, Ricinus communis
  Intron number 3 from transcript 29631.m001025 (locus 29631 .t000032) derived from phytozome v7.0 (chr-ID 29631; pos 1 91360 to 191696)
cctcctcggattctaattcctatcctgtgagttcttcaaatcctctccattttttatctaatgaatgatttcaaatgggtatttaattattttatgccattggttgttgattttagaaactgaacctttctgataaaagaaaaatagaactgaaggcatacagtagttagaaagtttgatgaaaaccatatatgcagtagtcttcattctttgatatgggcttgagattggtcatctatggagaatactgttttataatccacaggactagcttaatcttaaaaaagacattaatttggcaggtgccgattggaactagagttttgatcccagtatt

SEQ ID NO: 49519 - DNA, 194 bp, Ricinus communis
  Intron number 2 from transcript 29650.m000276 (locus 29650 .t000009) derived from phytozome v7.0 (chr-ID 29650; pos 1 67960 to 168153 reverse strand)
ttttctcgagagcaggtggacttggcaaaggtactttatgtttttcattttcaattatttttatatgatttttcttcttgatacgctatgagcttgcatattgcattctgttgattttttaaaaatcaaattcaattcttatttacgagtttgttgcaggtgttgcctggactgaacatcacatcgcttaatac

SEQ ID NO: 49520 - DNA, 612 bp, Ricinus communis
  Intron number 1 from transcript 29801.m003216 (locus 29801 .t000161) derived from phytozome v7.0 (chr-ID 29801; pos 8 51122 to 851733)
gctgacgatctctgcttcttctctaaggtctctccattctcgccattttttatttgccctttttctttttcttttttcccctttttattgtgcatgtctatattaatcaaagtgggcatgcaatttgtttttagagaatcttttgaaataacatgtgttttttgtgttatgtgatctgggtctctatttgtttgtcatatctcatgtttatcgaactgctttgcgtgtatgtattcaaaaatagaagcaaacccagatttcctgttcactgttcagatagatgtatctcaacgacatattttaatagtttgtttgatattattaatattattatgatgtgtaaactcaacttcttccgatagtaataattgctatttattttttcagctcaaactggattggaatatgcatgtctggctgtacttgatatttcaatcaatatcttttactgttttcttttgatttacccttttcctgatccgatcattagttatagagctgaatcccagctgattatatcaactttaggctctttctttcaacattttgtttgcattttgttatgtgtggtttagtgactttatcactcacgagtaatccatgaattgcagg

SEQ ID NO: 49521 - DNA, 772 bp, Ricinus communis
  Intron number 1 from transcript 29677.m000188 (locus 29677 .t000007) derived from phytozome v7.0 (chr-ID 29677; pos 2 48783 to 249554 reverse strand)
gtgcactgtaagtggtttccggtagcggttttcaggtgagtgaaaccgctttcttttggtccgtttttaatctgattacttgttaatcgtacttgcgattctcttcaaccgtcgttgcggttgcatgtatgtgtatttttctttgtattggatctgctttgtttttctggttagtaccttttctgcatagatctatttgatttttgcaaggtagtgactgggttttgtcacttttagtctctattttgtgtgtagactgttgtctactagtaaaattttgtgggttttcattttagatcctaggacttatcaacggtctccttttcaggttttctagtgttatgctatactaagtgagagttctagtgatttctcttatatagaaagttaaatgctatttttaatttcttactttttgtattttttcttggtggtaggacattatgcagtctcttagagtttttttttctttctttatcttgcttctcagttccgatgattaaataaattactctgttggaattaagttttgctaagctaaacatgctaggtggaattactttgtattattttgatgaagtctgaaggggataatggctttaggattcaatttttatgggtcaactttttctttgttgtgccatgtttatgttgttggcatcaatatgagccatgctcctactgttttggtgctttgttaaaagaattaattttcaacatttgacatttgcctcgtatctgagtctattattatttctatacagcactcatt

SEQ ID NO: 49522 - DNA, 838 bp, Ricinus communis
  Intron number 2 from transcript 29794.m003474 (locus 29794 .t000173) derived from phytozome v7.0 (chr-ID 29794; pos 1 131100 to 1131937)
caccttgatcgtggagtggaggaggctgaatatcggtatgtgtatttggcattttttgtctattcatgttgcggcgtatacataattcgctatttatttatttactgcatatatggttattatatgtgtgtgtgtgtggaataaccaatcaaaataactacataaaagagaatagagtttgtaaaacaattactcagaatatgcttgtcaacactccttatactacaaaatattggaacataagataagagggtgtttcttagtgagttcaaaagctgctttagcattcttaataatggaagactagttatgtgcctgtggatcagaagcagtgaattactacgggtttggagaatatcactttcttgtataggttgaggagttccgaagatgcattatctgtagtttcagactgttgaaaatgattcatctctggttctcactgttggcttgttttctcctcctactttgtttgtcttttttgttgtttcacgattcattcatgtattaaattttaccttagtttgaggttttgtttcttgggctatactctctttttggcttctcagattgttctgcctgtttgcttctgagatgaacttttgtttgttgtacacctgaattcactataagagttttattgattgcactggttatatatctgcactaaaatgcatgtggattattttctaatgccttctttcagttttttgctaattggtgagaaattatgaaagtagttgcacaactccttaattatcgtatgaatatttattggtgttgccttttgatgtttctaatagcacggttttgcaagatctccttttgacggttttgt

SEQ ID NO: 49523 - DNA, 608 bp, Ricinus communis
  Intron number 1 from transcript 27496.m000096 (locus 27496 .t000003) derived from phytozome v7.0 (chr-ID 27496; pos 2 5312 to 25919 reverse strand)
gatctgctggtatgtatgtgaattatttttctttcttgatttcttatggtaaattgagtttttctcctcttctgtttttggtaataaattgagtttttctttaaccttatatccatggtggtttcttgggttttatactttttcgattttcctctgtgatgaccactttgatttggttgtatattttgcttttcgtattaagtggcaagtggactatggagattagttgatatgagttttagcacaaaattgtgaactgtgtctgggtgtgaagtgggttcttgtttttgaacttgtggtctcttgtgcatcttcttttgaacatttgctaatcgagttgttggtttagcttttgatttatcattttgctactagcacatttgtgtttgaggcaatttcatccttaatattttgatattttcaatacagtgcccgatgaatataatagacaataactggttttcttgtgaggttggattattttttgctcacttgccatttcaaaattgagatgagattgtagtgtttttaactagtgctctgcttctgtaatattaaattttgaattgaataattgttgcatacagatttaataaaggtggttcctg

SEQ ID NO: 49524 - DNA, 421 bp, Ricinus communis
  Intron number 1 from transcript 29625.m000716 (locus 29625 .t000043) derived from phytozome v7.0 (chr-ID 29625; pos 2 17860 to 218280 reverse strand)
tcggctaatccttgtccttgttcgacaggtatattttcttgtccaagaattgaacccatttttcagttttctattaatgcctattgtaaagttgggaaattggatgatgcattggttgcttttgataccatgaaaaaactgattgatgggaaacctagtgttaatgtttataatgttttgattaatgggtgtgtaaaatgtggattccacgataaaggtattagtgtttataataggatgctaaaggatagagttaagcctgacgtttttacttttaatatcttaattagtaattattgtaagaacaatatgttcggctcggctttggagttgtttaaggaaatgagggaaaaagggtgttctccaaatgttgttagttttaatactttgattaaagggttttttagagaaaggaagtttg

SEQ ID NO: 49525 - DNA, 291 bp, Ricinus communis
  Intron number 2 from transcript 29772.m000311 (locus 29772 .t000004) derived from phytozome v7.0 (chr-ID 29772; pos 1 8467 to 18757)
cagcaatctcaagctcgccaggtttggtttgctgctctttttattttacttttattattttaattgcaatgttttgaagggaaattggtaagttctatgcaattttttaggtgacatttttttcttaagagcagaataaacaaataaaatgaatatctaactctatgaagttaaaactgtagataatatattagatatgattgcagtttgaatgtgttcttttcgtagttgatgcttattgagattcttttggcttttgtaaattaggtccataaggaactccaagataca

SEQ ID NO: 49526 - DNA, 820 bp, Ricinus communis
  Intron number 1 from transcript 29660.m000768 (locus 29660 .t000021) derived from phytozome v7.0 (chr-ID 29660; pos 1 46952 to 147771)
tttggcaatacagaagcccacttcaaagtgatcaggtttgtgccagacagtattattactttgagtagccagtagtagttctagttgaccttagtatgtgcaaaattgctctttagttatttgataacataaagatgcatccttttttctctgaatttcattacaaattgttgtaattttttcgtgagaattatatgttagttatacattaggggaaaagaaatcagaatatactttattgggtttctaaagtctggatttatttctcaacataatgaataactgcaacatttccaattgatgatatgtctctcaggtgcaggcacaggttcaggaaagcttttctttaccaaagtcagcatccctagaattatttttccagatagttttttccctaacgttttgatgtatcatggcatcttaattctcatttgattcatactaattgctatgatgctttaattactattgtatacattgaatgttatcacagtgttacgttattaatgccgtctcattgaatgttatgttattaatgcattcttatgacagaattagatactggaaatagaaagttttaaaaatgtgaatttattttggccattagtactgttgttataaaagaaaatcttaaatagttgtgaatttttagaatataagttgagtgcagttgactgtattttacaagaacatgccctgcaatcttgcctgctattactcccattggaaggttgagtgctaaagaacttctatggctcaaaattgatcctaaacttgctaaaagcctctaatactcttttgtaaatggacttctgtagtt

SEQ ID NO: 49527 - DNA, 637 bp, Ricinus communis
  Intron number 3 from transcript 29630.m000834 (locus 29630 .t000059) derived from phytozome v7.0 (chr-ID 29630; pos 3 75717 to 376353 reverse strand)
gactgggtcagcgcagttgacggttcttgtcctcggtaagttcggtgtccttactgtttgattgtatcaggagtttattattttctgatcgagtgattcaacatttgtttgcattgtagtcttacataaaggtgttgtaaatgagacctgtctagttagctggaaattaacccagagggttcactaactcaaataccaagtgcttcaaattgctaacctttattgttccttgtgtctgaagactctcctggagtaactgtacttttattgcgtaattttgctcaggtagatcgcagagtagggtctgatcatgagaaatatgtcatttatatttgaaattttcctcatttctggtatacataactgaataagaatattatattgaatactgctatcagcaacaatctgaagatgcaacacgtgtaacaattcaaagttggaaatcttagtagaaagtggctctcatatttgctcatggcatatcttactaggtcatgttgcgttggagataaagacaatgcatcatcatcttaactttgaatttcatgattgatttttcttgtgatgagtaattttttttgtttaataaactgctctaagtcatgatcttttggcaggtttattttgacagggtgct

SEQ ID NO: 49528 - DNA, 455 bp, Ricinus communis
  Intron number 2 from transcript 27749.m000346 (locus 27749 .t000018) derived from phytozome v7.0 (chr-ID 27749; pos 1 38980 to 139434 reverse strand)
atagggtgcttttgaaggtacatgcttttcaaccccctccttcgattttcgcaaacaaaacaaaattatgcatgaacattctttgtccatgacaaaattttatgcttttaaaatatgcaattgttctgacttcttgaatcattttttcttcttcatgctcaatctttggtgagtgttgcaagaatttgaactaaatgatcacatcattagaatgtccctttagtaatcgaaatcagattgctgatgaattttttaagtttgactaaatgtgatattagtaagtaaactttggggacggtttaaactgctaaaacaatgttttgcgattgtgatctcttattcataaacagcttatgtttagagatgttatgatttgcttgcttctttttcttttctcttttccttttatatttatttcaggtcatacatttctcatctccaacatctgcaggagc

SEQ ID NO: 49529 - DNA, 307 bp, Ricinus communis
  Intron number 1 from transcript 29720.m000136 (locus 29720 .t000006) derived from phytozome v7.0 (chr-ID 29720; pos 4 0936 to 41242)
gacaaggtgagttctctttttttttatccatctcataaaagcgattcagttaatggattgatgatgttaatctgctattctgttggagtagaagagaaataaaaaaatgataagagaagagaagagaaggttttggctttaattacagtgatgttagtggcggaggtatcacttgcaagaggaagttgagtttggcaatgtttttttagttagttaatagttccttttttgagtttaggattaagttattctttttaattcatttactaaactggagcaggtaaacttgagtgttgcaattattcca

SEQ ID NO: 49530 - DNA, 1009 bp, Ricinus communis
  Intron number 2 from transcript 29720.m000136 (locus 29720 .t000006) derived from phytozome v7.0 (chr-ID 29720; pos 4 1327 to 42335)
ccgggcggttggctatccaagatatttggtgggaggttagttcatgatggcttttaatatttatatagcaatttatatttatactgtatgcacttcaaattggttatgctaaattgctttataatacttaaatcttaaattatgccatttcaccacattgattaggatgtctgatattgattctgtcactgatgcattggctctttcaagcagttttttttttcattcactttctagacttctgttcttaccctttatgtcaattatagcattcttctacaaaggccaaatcttttcaccggttgaaatggtcaaatattatttttcatcattttattgtttcaactaagtatttgaatatgataaataaaatgaagaaaaaattttgaatctttgatccattattagcctggccatcaaagatgatctggaaactagatacttttcacttttgttgtctatggaatgcctatggctacataagggctaagtctgagctatagattagatggaggattttaatgcaatattctcaacaaatatattatgggcttcttattgaaataaaacaagtgaagaatataaagattatataacgtggttgaaaaacaagaagcatgtcatttcattgagtttatcaactatcttttgaagctcatgttcagaaaatttaattgcgcatatgtgcatcatcccatattactggtaaataatgcttctgtctttttcttaggtttggcttgtcttattcatggaaataaagtcacggagtagactatccttgaaacattatgataaatcatatttacttgataagattcttctttcaggagagtctaatctaatcccgaaaaagcaagccacattttctcagaatacatataacacaagtatttcatttttgttccgtgtttcttgacatatgtgataagtcatttccacctcttctttgccatgataattttcttatgcaggaaagttcttaagattggagtattagtttggtcat

SEQ ID NO: 49531 - DNA, 584 bp, Ricinus communis
  Intron number 1 from transcript 29801.m003181 (locus 29801 .t000126) derived from phytozome v7.0 (chr-ID 29801; pos 6 96205 to 696788)
ataaagatcctgtcttggttattggtgctgagaaggtttgtagatatttttttgaactctttttgttaagctctattctattattttgactgcttgatgcattttggtttgagtttgtgtatgttatttgcactatattaaattgttatctttacactgatttatcgagtgctaaaaattaagatcacttgtaagactgctcaagtgggactccaattattttggagtattaaatattagttagcgcagtttggttgacttatgtatggcatcaggtaatggatagaataactttatattgaagtgccctgaagttagtttccagtttatgtatatctttttaagtccaatgaccatcgtcaggttctccttttgttccttggtagaacaggtcttgacagaatgcatgcacgaacctaatccattcatttgtttggtggaaaacatcttgagttgctggttgccaaactttcaagtttcaacaaagtgttgaatatcttctgattttctattgatgtctaaccattttcttcatatgcatatttgtgtatttccttgtaggagtggaagacttgtcctgtggg

SEQ ID NO: 49532 - DNA, 854 bp, Ricinus communis
  Intron number 3 from transcript 29661.m000926 (locus 29661 .t000028) derived from phytozome v7.0 (chr-ID 29661; pos 2 91050 to 291903 reverse strand)
ttggttcaaaagaactattggcaaggttgcactctgtttgatcatatgatatttccagtttgctattttactgagaatgcatattatttgatggtgctttatagtatttttcttttttgttcatatctgaaacagaatcatttcaagtagtttatggattcagtttttgtagcttttgtaggccatctttaacctgactgatagtctgatacttgacccatgaattcatcaatgtaaaagcagcataacaatgattactgtcaggagcactataagtcagccggttaaaattgtggatgccatttttaattcacaaacattgtggtaaaaaaaaaaaaacttttttttagtctgggatgtaattcttgtcacttttgttttcctccattcacttgttacccaacttggcctttgtgccatttcagataacaacaaaggtctgtagaatctagaattttattttgtatttattccagtttcatatgaattttctactcatacacataagtttgtagttttactggcaacattctcagtgagaatatgcttaataatgattggtaaattgaaatgtttgactgatgtagaaaatggcattgtggtgacagtagaggtggtaatatctgaaaccctagattgtgatgatgtacaaatgattttgtacataaaggaaaaggaagcgcatatgcctgaatgttgctttgaaaaatatggtgaaagcttttggtttctcaagtttactatttattttggaaacctctgtcctttagcttgatgctatttataatcaatttgatgggactacttttgtggttgcaggttggataatctaattttagaagctattacaacat

SEQ ID NO: 49533 - DNA, 684 bp, Ricinus communis
  Intron number 1 from transcript 29661.m000926 (locus 29661 .t000028) derived from phytozome v7.0 (chr-ID 29661; pos 2 92442 to 293125 reverse strand)
ctctgccaactttctcgttggagttctttaatcaggtataattcacgcgcgctgcactctctttcacccacatgaatttgattttttttttttgttccctcttctctaaataaatgatcgtcagattgtgtatttttgtaagtaggagcttaatttctgcgttctccctttgatctgtgttaattttatgtttatttttcattgaataagcaaagaaacaacacttcttgcatttttgggtttcttgtttttgtgtgactttttttttttcctgttttttgttcttttgatgtcaaaatttttacaagggcaaggtgtgatttgacctaatatgagtataattcataagatttagcattgtatcaaattttatgttaaattatagttcaaaaacaacattaacatttccaatttggcactaaaagtgtaagtagattaaatttttgctgtctttaagaggtctaggttgccaggcaattgttttgctgttgttgtttcttacaattgctgtcttctggtttagaatttacttattttgggctaattgtcggttgttttaagtcagtagaagtatgtgcaaggttgatgtagttctcttttagtgtctggatacttatatgggtgaatttgctcaaaggtggcggaattcaactgtttgtgcaggtatttcctgcgagggcattg

SEQ ID NO: 49534 - DNA, 878 bp, Ricinus communis
  Intron number 2 from transcript 29647.m002026 (locus 29647 .t000034) derived from phytozome v7.0 (chr-ID 29647; pos 2 33217 to 234094 reverse strand)
caggcaaattgacattcccaatctcattgaagcaggttttgatagtagtcatttaaaagttttaaattctgttgtttatgtgttctgcaagtatattggtatttagatttgtgagtaacaatctgcatactgctatttgttgcattgtttgccatccaatatctttatgtttaattatgtagcagtagctgttttatgatcaactgctagattatggttgtgtgccactgcgatggaaaagttatacgatgatgaaaacttttgtcatctcatcgtcttggagcagtacaaataaattataggtagttcggataaaaatagtttgtggattctaaacatagttatttggtgttcagtttcttttgctcattttaaatgatggaactgattgactgaagtacattaacatattaagatcgctagcagctaataaaactctatcaagagactctttttgtctttttcttctccctccttttgagtactttgatgctgctcaagtctgaatctaagaattgatgcatagatgcttttataagagcaatactcatgtaaatctgtttcttgtaatgaatttgagggctcaaataaaatgttattggataataattatgatagagcagggactgtcttcaatgctgtaagcatgtcatattagtggtggattggcatgctgtcattgtaatttggcttttcttagagtttcatgtaatgccatgactgggaagtactggaatcatatctctcttcttgtaaacttttttcaattaacactttgactggagctatctgatgtctaaggtatttgccttagagctaacgtgaaattcatttggttattttgtcttgcagcctggaccaagggactcccttcttca

SEQ ID NO: 49535 - DNA, 933 bp, Ricinus communis
  Intron number 2 from transcript 29804.m001507 (locus 29804 .t000038) derived from phytozome v7.0 (chr-ID 29804; pos 7 65698 to 766630 reverse strand)
ttccgtctcggcatcaatttttttgacacctccccgtatgtcctttgaattcctagattagttgtttcgttgttgagtgaaagtataattttggaataaaaaaattttaagagattgtgattcttgaagtttttaagctaattggatttaggtagaatgtcctttttttttattattctttttactagtcagaaattggaaattttggatctttgtattgctggagagtaaatggatttatgcgaagttgactttttgaatgtgttgttttatttgagtgcaaactatggctagagtagatagtaaacctaatttgaatggttgcatgaaaagagactaaagtgttgaactttaagttaattgggttttggtagaatgtgtttttacttgcaaggacatgagcgaatgaaagagaaatttgagtttttagatctatgtattgccttggatgtatatggatttttgaataagtgacattgtaatgtcttttgcactatttgattgcaagtttttgacctgatagaatgcctatttgagctcttgaaagagaagagactatagtttagaagttcagttttatatacttagataagcaataaacttctttcctatacctgtaatgcaaatttaagcttggttgggatatgtttttcattttcgataccaaacacagattccaaagttctccagtttttaattttctattgcactttctagtagtcatactgacagaaaaatcatgcgagtgtttctgctaaattcacttgtatttctgagaaattaactaatattgttttccctataatccattatctgttgtctcttacccgacttcaacaggttatttatagattaagttgttagtaattgaccttattggcactctgattttatttccttatactaacttcttattccaactttaaaggtatt

SEQ ID NO: 49536 - DNA, 658 bp, Ricinus communis
  Intron number 1 from transcript 29308.m000177 (locus 29308 .t000003) derived from phytozome v7.0 (chr-ID 29308; pos 2 6076 to 26733)
tggctcctctctctcttaatactattaatccgaaggtggtcactttttttttattgcaactcactgttttgatcggtttctgggttcttacatttgagcgattttagcatctgggtttgctttgtttttgtttatttatctatttgtttgccttttggaagtttcttttctattattttattatatgctgtgattttagcttttcttctttttaattcatttttgagatattgggcttgctttatcaattcaatagttatatttgcgttttggttaagcttaatatgcttcgaatagtttttgattaagccttttttttttaaatctctatttgggtaaatagcttatagacaatatcatgttcgatggaaagccacttcgaacatacaaaagctaataactctctgtattgcaacgcacctgtataaactaatataactctatcaaatttatatagaatctaatactctacttaatattttcttaataaattcaaaaagcttaatcaatatattcatagtaattgatggtcaaatgccgagttcttttttccttctataatttggtgatcaagtttgcttcttatatgtttgctgtttctgtttttctttgtattcctgtatgttaaccacaatgttttatatttccaggttttgga

SEQ ID NO: 49537 - DNA, 818 bp, Ricinus communis
  Intron number 1 from transcript 29629.m001398 (locus 29629 .t000049) derived from phytozome v7.0 (chr-ID 29629; pos 2 71218 to 272035 reverse strand)
gccggcactccttttgcctctaggttcttgttcgggtacaacctctttcctcgcttgatataatatttacttatttgggtagctttgatatggattacagggtagttttggagtgtgtactttaatttcattatgatgattggtttatttggtggttcaattttattttattttgaatttttggtgaaagtgagcttttatatacccttttatttttagcttgaatgcttgtagtttatttagcagaagtatgattttgatgtggatattgctaattgtagagagtggagcttgaatactttttgtaatttaggttgctgcctgaattatcaatcagcatttagattaatgggattaattttagtgtgtatgatcttaatggttttgtcaattgggagtttagaattgaaatataatgcctctatgattttattgttggagattatagtatgaatacaaattggaccttgagtagtttacttcacatgttatgtatatcttcttgttttgttttcaactttatgtttagtagaagcttaaagcttgtgatcttatatagtttggttaagctatagcatccaagttaacatatctctgttgtattatcatgggaaaagatgcagacagaaaatttgagcttcttggttctggaactactgttaaaagttatttgatgttattctgctcatatttcatgcagctattttgtttttggtgatgcctataaaaatatcttactatctctagtgtagctattgccaaagacttgactctttgttatcattccattttttccaggataccagttgctcattgtg

SEQ ID NO: 49538 - DNA, 601 bp, Ricinus communis
  Intron number 1 from transcript 29005.m000258 (locus 29005 .t000009) derived from phytozome v7.0 (chr-ID 29005; pos 6 1711 to 62311 reverse strand)
ttattaactccattatattgcaggtaagaattttgatcttaacattttgttggataattttcatttggtttgtggttccaattgagctgttatgaattctgaatgtggaagaaatttatggggttcagtatttaaggtcaaaacttatgtggtagttttgctaaaagattttatatttttgtttttttgactattcgccagttcttgatgttacactatcaaaaagcatttattaattcacagttgatcttggagattgatgatcaagcttagaacatatactgaggtttagtgagaatttgtcttgcagccaaaactaataaaagagaatagggatgcgaattctaagatgtatggtttcacaaatttagtctttttctatggtctattgaatccctctaggttcttttacccaagtttatctatcatttgtctgatagcatctcatctcttagctatattcatgtcattgtaaatacagatagttcttatttctgtatcatatgttcaacttcatgctcgaattgtacttaagttagtaaaattactttgtttggtattcttagagtgctgccttgacatgatcttattcttatccagg

SEQ ID NO: 49539 - DNA, 761 bp, Ricinus communis
  Intron number 1 from transcript 28196.m000201 (locus 28196 .t000001) derived from phytozome v7.0 (chr-ID 28196; pos 4 711 to 5471)
ggtttacaggtagttaaatcttttatctttgcaattattgggttttttattttttgtctattttttgttagtatttgattggagtatttaagtcaacggaagtaataattatgatgaacttttaaactaatttgcgacaaatctttatttacatgtaatatttagtatttacagttggtcgtattattggtgctcaaaatttgattttgactcttccttcctcctctttttggttactttctctttgaaaatgactttttgtgctgcgattaactgattagtctatttctgggtaggcttaatcacttctttttatttttttcctcaaagacagggcagaccttaagggtctgtgttttagcctggtgaagatttcttgcatatatgaaaatgagctggaaccggtgcatgtgtattgtttactcatctacggattctaattacttagacctctatggtaaataaaaacataaagagaaattcaaatgaaaaggtttgaggataggatagagccaacaggaatttaaaataataacataagtggagagtaaagattttttaaattttggtgtctgatattatcaagaaaatggctacagatttcatgattctcttcttccattatgacttttagtgctatatcttcagttgccaatactcaaaatctttagttgcacaagttctatcaaggaattaattcttcctgatgctgtatggtatctatctgatatttggcattgatgtgtctgcaggttctattc

SEQ ID NO: 49540 - DNA, 554 bp, Ricinus communis
  Intron number 1 from transcript 29785.m000954 (locus 29785 .t000023) derived from phytozome v7.0 (chr-ID 29785; pos 2 64506 to 265059 reverse strand)
acaaaggtaaaacattattgcaattgagacatgagaaactcttccttaaaactttgcacatgtgctgctaaacagcaccactcaattaccgtggtgctgcttattttgtttttctaaaagaaacatctaagaaagttattggagaactgcagttgcatatatttcagaagtttcatctctttttactgtacatgaagattgtgtttgtaatagaaaggtgcttctgttttggtactttattagatggatgaccattggaccagttgaatttgaatcttggcatgttagggaacttttcttgctagaggccatatggaaccactaccatttaatgcacttccaatcattttccaagaatgagacatctttcaattttgtgttactgtaaacatgagaagcttgctttcatgtgttgttctggtgacgaatttcatttgttagcattataaagaatatagctctctgatactatccatctaaattttattttcctctgaaagaaattggaattcagaaatgctatataatcctgcaggttgctgctgttcctgagg

SEQ ID NO: 49541 - DNA, 593 bp, Ricinus communis
  Intron number 2 from transcript 29794.m003459 (locus 29794 .t000158) derived from phytozome v7.0 (chr-ID 29794; pos 1 014959 to 1015551 reverse strand)
tgcctgtgcttatcctgctagtcgcctcaggaaatgtgtgttttatttcatccccctttactattgtttgttttgttttgttttattttattttatttttggatgatgagcaaatgtcttgaatgagaagcggtttcctttcctatatcagctagtgccctttgtctccttgttgaattatatgcttcttgacgtttcatttcactagaattgaacttgatttagggattatgaagcaaagtagttagtcatttaggtgtctcaggtaaggcattgtggagttgaggttcgttaccttttatagtgcatcgagttagattacatttctgctgaaatggaggagaaattgcttattggtggtagaaaatgagaggaagatgggcaatgctagacattagaattattttacaattgaattctgttgagaatcaattctcaaatgagatgagaactaattatgttcgtctagttccaggaattatattttccttccttattatgagacattttggcaccacatgttctgacttcttatttaattttgtgttttgatttcagataactggagtgtgaaggctatccgcagaaagacc

SEQ ID NO: 49542 - DNA, 834 bp, Ricinus communis
  Intron number 1 from transcript 29647.m002002 (locus 29647 .t000010) derived from phytozome v7.0 (chr-ID 29647; pos 6 6718 to 67551 reverse strand)
ctagcatagaccctgatattgctctctcttacatagtaagttccttttattattattattgttcttgttatcaattttgtttttcattttgtttaacatatttggatgcgtttgatagatattgtatgtctgagtatgtttttagatccaaactacgaatattaagtgggttttgcgaattagtttttaattacttgtaaactacaatgcagactataatttgttgtatttgattaatatgtcattgcttttacaataggaaataacaatgttttgtattctgaatgtgtttggtgctttggataggaaacaaaaggtcattttagcttatgaggagtatatctttcagtaattggattatgttagctgtagaagcataaagtgggctttgagttcttttcttttaaatttataaaatggacggaaagatacatgtcttttgatatattagtgctgtagaagcatggaacataattttgattggttttgttagtgtgtagtatgaaatctgtagatacttggttaaggtttgatagtttatttgtttgaattatccaagtactcccaatttttatattactgaggcttgttggaaacttttgtttccattcaagaaacttttcgaacattcgatttctacaactgatacttgagagctaatatacatagctctcttctagtggagctttgaaacgtgaatacacctgaagtttagtagctagctaaacaacagtatgatttgcacttatcagtaggtgtcccgatcatcatgtcctatctctgtatatctgcaaaattattctgcatgattggtaactctttttctttcaaagg

SEQ ID NO: 49543 - DNA, 852 bp, Ricinus communis
  Intron number 2 from transcript 29706.m001298 (locus 29706 .t000028) derived from phytozome v7.0 (chr-ID 29706; pos 2 36889 to 237740 reverse strand)
ggagctggttcaaagagcaaggttagaatctatataggctacttttggtagtttcatatccctgttctgttttttcttttttagtatgtcaggattggaacacttaatctcctactctacattacatgcctactgaacatagttacctgtctccaaaattgcagggcaactgatagtcaggtacttgtggcatattatactgtctactagattcgtttgtgaccttaaagctatataatatgaactctgagaattgcttcagaggaagttattcgtagctacttgctcgccttctcgagattctgatggctgctgctataagatatggggtcattctactcttgttggaaccgtaatgaaaaagcttggaattatttgattcattttattaggaaaatgtttgggattaaatgcatggtcttcctagaaatacactgtttattctttaaattttaagagaacgaatactgataacactaagaaaaggttagaatgaactgatattcgtgctgaactgtttggtccgataattgcaattcatggtcctgaagagactgcgttggttgctgagactaattattctgatattcatatggaaggtaattacagcaattgtttcaagtaataatgctctgctacttcctgtcttacaagtatgaaactttgcggagagagccttccacttgagaaaataatgcaaggagatgtatagcagtttaaggacttttctgttaaatactgaaattaaaaggtctggaattgcatcaaaacaattcctcaaattttgaattttcaagctcttgtgataatataatagtgttgctactttgcactggggaagtcactgaaatc

SEQ ID NO: 49544 - DNA, 516 bp, Ricinus communis
  Intron number 2 from transcript 29745.m000371 (locus 29745 .t000018) derived from phytozome v7.0 (chr-ID 29745; pos 1 33680 to 134195 reverse strand)
aatttatcttgaattgggatacaaaagtaacaatatcatatgttttttttaatgtgaatttggtgcaataagtcattttaaggtcttagtatcagtggagtgaagaaatttatgtcaactgatgttaaattatattcttttaaggcttcattaggggatttatgcactgaattttcataatttgaagtggatttattttgttagtattatttcaatgatcagtccatgccgaatttttattttatttcatgatctaattcattttatagttttttttttacatacgcagaaagaataagaagaaaatctaatctattttgcacgaagattttggtgtttatatttgtacaaatatggttttagtgtgaagacatttatgttaacggcgatatataccattattatgctattagcttctttagtgatcgattgatggatctattatgtatatttataattttcttgagaccaaacttacctggtttttgattttgtttttctttctccaggaatata

SEQ ID NO: 49545 - DNA, 1005 bp, Ricinus communis
  Intron number 1 from transcript 29630.m000810 (locus 29630 .t000035) derived from phytozome v7.0 (chr-ID 29630; pos 2 35211 to 236215 reverse strand)
gctgatctgcttcgtcatactgacgtgtcttatctgtaagttttgtttatttagtattattttatcttgttaggttcaggatatgcttattttttgaaatgtacatgttaattatatgagcctgttttcagagtgaatttaacaagtaagtgaaaaagaacagttaaaattaatctgtctttccagattgaagtacaactgtctctgaattaacttgattcagctgtgcgcctaatggtgtctggaaagtctaaaaaatgcgagaattgaaatctttttagtcatttctcatgtttggaaatctctacttgctagaattcaattcttttgaacttaaaagaacaatgcattttgattcatgcaaaaatgacataatcttgcaagaatcgcattgtcttcaattattgcgaatgattaattccaaacaaggacttcttttttctcaaatgcaaatatgagatgtgcgtgggctatgctaatcttgattattgtttgcttgacatatgcagcgtagatatgtctttaagacctttatatagtgtgatattatacagagtgaagtagcactttcttgatttgttttactgtagatgttgtgaaagtcccaccagatgcacattttgttagaaatcacccactcaatacatggagggataaagaatatatgctgaaagaaacaaaaagtgaaacatgaggaactagtggtttggcactgtgcttgcttcttggagcaacctgtgattttcgctacagaggagaaaatacaatcatctagaaagttcagggttttagagaatacttgaaattactgagaatacttgaaattactgagaaccactataataaatcatcctaggtcaataaattgtacttccatggaattgtgcgcaatatcttctctgaatatgggatacaatctcagaaaacgtttctattttcctctgatgattgcattgagtggcagcatctgttttatatatgtttttcgttacaggaacttccgag

SEQ ID NO: 49546 - DNA, 726 bp, Ricinus communis
  Intron number 1 from transcript 27955.m000382 (locus 27955 .t000011) derived from phytozome v7.0 (chr-ID 27955; pos 7 3243 to 73968 reverse strand)
ctcaagaggtctttatttttatttttatttttgcttttttgcttttttaattaactaaattatatgcataccttttcttttttcttcactttgacttttcatgattggcttaataaattttcagttgtttgtttgcggaagtaattgtcgatatatgtagtgtacagtttttgctcttttcctgttcattgtaatgattgagttggctatgcctagtgtactctcatcttgggatctttggttgttgagtggtttaaagagggcatttaaagtagaaagaatgtgattgttcagttgcattttgtcgttgtggtattacttgggagacatcagtcgagcaggaccctggacgttgactctattacattcttttatacctagttttgaatttcaatgcattatagctctttcagcagttcctttttaccttcatctttttaagtttctgttcattctagtttttctagatttactaggtagttagtttgtatgatctgtgtactgtagttcaaaaagcctggcatgcttatgatgataagaaggctttaatgattcaaggaacaaaatttcagaatgtgttacttgttcctagacagcgctaatcatcagttggtacttcttcgtgatttagttcacttgctttatatgttccctccagctcctaggattcatgcagatgattttcattgtttctgtgagtttggtttcaggatcccaagtcaagtg

SEQ ID NO: 49547 - DNA, 854 bp, Ricinus communis
  Intron number 1 from transcript 28515.m000318 (locus 28515 .t000012) derived from phytozome v7.0 (chr-ID 28515; pos 1 56177 to 157030 reverse strand)
gtttttgttttcttctcctaaggaaagacttgtttgtaaggaggatatagatattttttattgtaaaagatttgacaattatacttggagtaagaatgttttcaattatactttggaatctttaaaagggaagattgatagagtgaagaacaatgggataagtcattttataggttgagtggttttccattagccttacgtatttggttgtttgagtgttgccctcatgttagtgggaagtttgctattttaaaggacaatcatcttagtcttccgcatattttaaattggtcaacatctctacaatcaatttatagtaatttttagagaaatttgtttgttatttatgttaaaaaattaatttttccttttgttatttatattattttgtttatgtttatactgatttttaatttttaatttttttttatagctaatattgaaaaatttaagttccactgctgataaaaaattaaacttgaaattagaagaatttttcagtaagggtaaagcgattgttgttgagaaaagtgttatgaacaagatgacgatgataataatttcgaaatttctatccgcttaagagctactagagtgtctatttcgagagaatcagaagttgttatatcaaattatgagattaagaagcagctgaccaaattttacgacaagcaaaagaaactctcttatgatttttcttcttttaagctatttttggagcaaaatattattgtagatttctcatctcataagaattatgttgaacagaaattaattgagttgtttaattcattgagttttattaattctaagttgcagataggtgaaattcatagttctacttttgttgataa

SEQ ID NO: 49548 - DNA, 993 bp, Ricinus communis
  Intron number 2 from transcript 29587.m000224 (locus 29587 .t000003) derived from phytozome v7.0 (chr-ID 29587; pos 6 4492 to 65484 reverse strand)
ggggtagaggagagctgggcgttgggtaggttgcatggaaactctaaatggaattatgttttcatatcacacacgtttcaaacaccgaaattgtttagaaattcttgagaaaattttaaaaattttaaaaaatattttcaattatttattttatttatttttaaaaatatttaaaattctttaaaaaatatttctatttaattaaattttctatttgagaaagatttttaatattttttctatttattttgctttttatttatagatacttcgtacctattatataatttttttttatattttcttctaaaagatctttctatttaattaaattttctatttgaaaaagattttaaatttttttatttattttgctttctatttatagataattcttacctattatataattttcttattatatgaatattcttaattcttatgcatatttattatacattatttttttagtttatagtataattgtcaatataattaattatattaattatgtttaatttgtatcttttacgataataaaaacaatagtgcagtagaaaatctagaatatatatatatatatacacacacataccctctaacgttttattttctagttttttagaaaatttaatatttccgtattgtattgtgtcgcgtttcttgtttctgttttcatgcaatctaaaatttcagtattgtggtacgtaatgcagccggagatgtggtggtggccagaactcaacttctatacggttgatttactgctgatgtggatgtggcaactgccattcgcgaaggacttgagctagctttacaggtaattcaaactccctttgaaatttggtctgatgcaaaaggtggtagttgactgtatcaatgctagaacaatttctgtcaatgaaatgggtttgttaattgaagactgctctgatcttaggttggccaccaactgcaggcaggtgtcttttgctcccaggagttcgaacaagg

SEQ ID NO: 49549 - DNA, 667 bp, Ricinus communis
  Intron number 1 from transcript 29646.m001075 (locus 29646 .t000023) derived from phytozome v7.0 (chr-ID 29646; pos 1 67071 to 167737)
atcacagtgattcgaaatctcaggtaatgtaattgaataagaatttttttaaaatacttttttccttaaattgtgcattcttgtggatgttagggttttgtagagttctgtgaacactgtttgcgatgtaaggtaaggatgtgtagcagatgtttcagcttggtttagggttatgataaaatatggagtgtgtttttctttttttataattgggccttattagtgtaaatttactctgaaatttatttcagagtgattttataaatttagattaatgagatttgcttaatattggactgtctcattaaatttcggatacttctattaggtttattactttagacatgtaaagcatcatgcagtcaattaaactcatttgtttaatgtgttactttactggattttatttacctttttcctttgttgaattgattgtaaaaatgtcatatcttggtagtgattttatgcttgtcatttgtttttgacattcaaagcatcttgcagaaagtgaattattttcaaatactgacatttcagatatttcttcttttttctttttaacattttaatcctagttgtccataatcctttgtatttttatctttgtgctgataataatttttaatttacagcacgggtctcgtgaccacgaaagggagtcttcaaa

SEQ ID NO: 49550 - DNA, 424 bp, Ricinus communis
  Intron number 1 from transcript 27699.m000208 (locus 27699 .t000004) derived from phytozome v7.0 (chr-ID 27699; pos 2 0699 to 21122)
cgttactctaaagggggtcgtcgtcaagttgttgggttggtctcttttaaaccttctgttccttttcttgatgaaaaagaactttaagattaatcataacttgtggattcttgattcttgattagtgaagcatattagtagctgcagccttcttggaatttcctggttgtgtttgatttacttcaagaaacaaaattttcttttctttttatcctgcaaattgatgtcaaggaagtgtttccaagcttgctatggaacaggggaatttctttttttcttttttatttctttttgtttattgctgaaacaatcaataaccccacataaactagcaagagtttgatcttgttcctggacaaaattatatatctttagttactatggtgcaggtgtataccctatagatataaaactggggagcaaa

SEQ ID NO: 49551 - DNA, 428 bp, Ricinus communis
  Intron number 1 from transcript 28670.m000105 (locus 28670 .t000004) derived from phytozome v7.0 (chr-ID 28670; pos 4 2460 to 42887)
gccatttcaggtctcttttctcaatctttagtcttcagtaattctctgtttcttgatatgttcaagatttctggtctttttgtctttaattttatgaaatgtgttttcttgaatttagagatgacataataataataataataataataataataataataaagcatccatcttggtcttttcagatctctaagatgtttagaacctatcaactcaagattatgctttattaagtgataaaaaaatctcaaattttcaggtttaaaggatcttatttatttttaagatggttatgcctaattaagtgacaaataattcaagattgcatgagattgcttttgattggttgtatagatgttgctcatgtaatcaataaaatgcaaaattttataggatctggaaatctgataacgtggggatccacagac

SEQ ID NO: 49552 - DNA, 777 bp, Ricinus communis
  Intron number 3 from transcript 28670.m000105 (locus 28670 .t000004) derived from phytozome v7.0 (chr-ID 28670; pos 4 3077 to 43853)
agctgctggctgggcacattgtgtttcagttacaggtattttcctatatatatatatatatatatatacatatttatatattattttgctgcatgttaatcatggaaagagtaaaatccttccttttgaaagtctagaaatgcaagaaccctattcaattgatttctatttactcaattcctatgtttggaaagttcatagttcctagaactcattctaacaacttaaaaagtaaaacataataaaataaaaaataaagccttttgagcgatatcaatgctaatattgacctgaagaactgacgtgttagacattatttagtctctacattgccaaaataaattttaaatttgcagtttgcctgcctttgtgcatgaatggaactttttgccttttgtggtgactttatgtctgactgataaattactggttgacctatctttaatcttagcatttagattttggcatttttgtcagaaaatgtcattattgttttctaagaaaaacactaattataatcaatattatacattgtgcttatttgcttccgttatttatgtcctctttcaaggaatgtgatattcttaccgccttctttgagttgttcctcttatgtagtttctttaccttttcttcttcataacagatgattcagtaatagtaattactgaccatgcccgtttacgaggccagagttagttccacagaaaatttccatttagagtctcaatgagctattgtcatttatttatttgcagagacaggggaagtatttac

SEQ ID NO: 49553 - DNA, 253 bp, Ricinus communis
  Intron number 1 from transcript 29703.m001537 (locus 29703 .t000073) derived from phytozome v7.0 (chr-ID 29703; pos 3 71847 to 372099)
cccaatcaagggtcagtttctcttatttctcaacatatttattttactcgcggcggaaacaaaaataagtgaatatacttggaagttagtgagattttggttcctcactttaggactgttttgatagaaatatgctattgttttttctttttcttctgcatttatttatttgtatataattatttttcataaaacaaattggtgggtttgtgatataggtttgccacttgtgaggaatattagtaagctttca

SEQ ID NO: 49554 - DNA, 820 bp, Ricinus communis
  Intron number 3 from transcript 29703.m001537 (locus 29703 .t000073) derived from phytozome v7.0 (chr-ID 29703; pos 3 72472 to 373291)
ctcaccaggtacaccccactttttatagtttttttatgggatattaattaatttgcattgttgatctattactatgagaaactctttatgcctccagtcaatatattgttggaggaatttatagttagtagaattattgcagtggtttctatgactttactttttctttttttgttgtctagcaaatctttgagatgctataggtgatagtatatcagtttttataatatattgtttcatcccaagttatgtagatggttaactgatctacataatccaaaaaatgggttgcaacccactctactctgtctatagctctgtaaaatgaacctcaaatgctgaattcttatatatctacttgagcaaccaaacatggttaactaaagatattctttagatatctggatatctgatgtgcatcttggaaacctagaaggcggtttcactttgccaattgcaaagggttaatttgggaactagtaaacaaggattggtattttctttgttgcttaaccaatgctaaaatgttattctttgttattcaatataaataactaaaagcaagataagttcagaagattgagagaaaaacttctgtttagtaccataagtaatcatctactccctatgtttgtactgccgagttgtgtttctagaaattttcattttgcatccatatctttttaccagctgtgagtctgtgactcatcaatctcaaataattcttcattctttttcttatttcttttcaactcataaaagagagtcagggtgttgtttagccactcttgtttactctgttttctatcatatttcaggt

SEQ ID NO: 49555 - DNA, 763 bp, Ricinus communis
  Intron number 2 from transcript 29070.m000127 (locus 29070 .t000001) derived from phytozome v7.0 (chr-ID 29070; pos 1 1441 to 12203 reverse strand)
agactttcataatcttttgtgcaatagagcttctggtatgatcatcttatcactgtctgtgtcatttcttttattttggtaatatatactatccattcgggatttaggttgttgaagcagttatctattttagttcttagatgatttcagaaataataattataacagaagacgtttagttcttagagaaacactctaagatcaaataaaattacttaatcatagttagaaattaatgaaaaattactgatgcaaagtccaactaataattaaaacacgcttgcacttaattattggattattatcttacaaatagaattgcttatacatttaaaccgcatgataagatttgaagctaaaaagattagggtttgacataaacatatttggattaattcattatgatatgtcgaaaactagatataaatggtcaatccgtttaaacactgaatgacacatttattatttagattaatatatttaatatgaatattaaaaaatatattatttttaaaattaatataaacagttcacacaaatcatatattatataatatgtgtatatttgaatctaaaattttgatattattaattaaaaaagatgatatttcggatggtcatttttgtttctttgaattaattgtatttttgaataaatatattaactttatatatataactaattttatattttacttgatatttgctaattaattaatggagtgcagggactaatactattaacatttcaagcactgtatca

SEQ ID NO: 49556 - DNA, 525 bp, Ricinus communis
  Intron number 1 from transcript 29070.m000127 (locus 29070 .t000001) derived from phytozome v7.0 (chr-ID 29070; pos 1 2351 to 12875 reverse strand)
gtggagcaaaagctgctagcatcacttgtggtaattgggacaaatttataacttttaaatttttttatagaaattcaatggattatgagctataaatatgattgaaaaatagtcatctttttacgcttaccgttaaaatgataacatatctagtatcaaaaaataaaatttgattacaaaatatatgaaaagaaaagcacttactatataactaagagtacacaagcttagttatatgttccgtctgtcctatcatttcgtttatttaaccacatttagaaaaagctgttctgcagcaatcgcaaactcaaatgtgtcttgataaaaagttttaagcctaactgttacgccaggctcgaacttagacaaataaacttggcccaaatatgaacgctgttaattcagttttaatcaacttttgcagtaattaaatcgtcattaactgttagttggaaatgtaacgcaattgtttttttttcttaattgttttctttaaacagttgttgaagttggttttcttatcaa

SEQ ID NO: 49557 - DNA, 811 bp, Ricinus communis
  Intron number 2 from transcript 29733.m000743 (locus 29733 .t000007) derived from phytozome v7.0 (chr-ID 29733; pos 2 08608 to 209418)
tttactcatcttacagtctacactggctttccaaggtcagatagtttctttctcccgatctttttatttcttggctttttactgaagttctaaatatggaagaaacaaaagaagaatagtttaatactacttacatgtactcttttctctttttttttatctataaacttcaataatcaatctatatattcgataagaaaaagattgaatctatattaattcgaaccaacttcatgtcaaatcggatcaattgaaaataaacaataattgttggtctgtgactctttgcaaattaataccttttctcccaaaaaaggaagaaaaaaaaaaaagagaaaaaaggaaagaaagagtaaaaaaggttgcacgacaagacgaagcgtgcaaagtaggaaatctatccaccgtggatatagagaaagggcatgtcctgaaagtttagggattgatactatgtctacgagttgtaccagaaaaaactctcgcctagatcacggttcataattattatcttgcatgaattgtggatccatattaaatttgcccataatcatgaattataaaagatatttgaggcatagctaaaagaaaagcatttgttttttaaagtgaggtattcgattcaaactttttttttatatattatgtggatttttgtgtttatgaaaaagataaagagatgattttttatattatatagtcaaccattggttgtgaaataaattgtaagattcaatctagagttcataagaggagcatattttaattaagcatgttattgtatttccattgcaggttcctccagctcttt

SEQ ID NO: 49558 - DNA, 530 bp, Ricinus communis
  Intron number 1 from transcript 27553.m000317 (locus 27553 .t000003) derived from phytozome v7.0 (chr-ID 27553; pos 1 3353 to 13882)
ctcctgaatttcctagaggtttattggttgactcactttttaaatgttctaaatactattgcaataaaattagattttgaatatgttcgtttttatctcttgtgttttgaactcgattaaatgagcttaatggagttacttgactgtccttttctttatcgaaaagaagaaaattcttaaggccttgtttggaatgaatcacgtgtttgcaaaatactgtcattttattggagttgaaataattgaattctagcaactattgccattccaagcatgagaatggctaaaacaagaaatgaattgaattaaattcttgcatttttagactctgcaaacactgcaactagtagaaatgagggcatttgaatttgaaagttttaccttattttttttgttaaaaaaaaggaaatggattctattattaaacataatgaagcctgttagtttacttatgtgtggatggtatttgtttttctgattgttgtgtgttttcaggtggagcaagctcacttagccgtagagagcgcgag

SEQ ID NO: 49559 - DNA, 894 bp, Ricinus communis
  Intron number 2 from transcript 29729.m002324 (locus 29729 .t000057) derived from phytozome v7.0 (chr-ID 29729; pos 3 23774 to 324667 reverse strand)
gtggaccttccgtttctgctcatagagccttactggtaacccttctatctctttctcatgtacatatctgaacatcttaaatacatatagataagaacttttaaaactttaatgaataaaatttacaaggagaagtaacaaactcatttaattaagttaatacagtgcttggagacaatgatgagtaactagtatcagttttgccttatgtcatttgattccaattctttaagttttttttcctctttggtatcaagccttctatgttacttcagattgagttacttggagtaatctcgatcaacaattatagatgacttgtcatccataatatgaatgtgttttcaaaattggctacattggacgctaatatcatgggaaaatttaattaatcatggtttgaatcaatatttaagacatatatgtcctgcttaacatgttggtacaattcataattaattaaattgtctagtaatgttgtagcatccaattaataaattctaagaatatatttttattacggctgacacgtcattcaaagtcgacctacttttctttacgcaatttatataaaattaaattagaaggtctaatacaaaaaaaaaagttaaaaaattaaaaaaattagcacccaatagatacataatgaaaattctggtaccaagtagaatagttaaccgacaacgatggagccaggagagtggggcaggaccctaacttttcaaaagtattactttatggttcgaatgagattggtctaatgactaaactgaaattacattatatgggtcaataatatttaataatacacatgataaatgtattatattagtaactatataaaatctgttggggacatatggctaggcagcaagatcagaaatattcaggaac

SEQ ID NO: 49560 - DNA, 289 bp, Ricinus communis
  Intron number 2 from transcript 28725.m000313 (locus 28725 .t000005) derived from phytozome v7.0 (chr-ID 28725; pos 5 8527 to 58815)
ggctctatttgcttctttggagaaaattaaagaaggtgagcgtttagttcattcatataaataagtttgagtttattgatatgtgtatgggtcttaatctgcttggttttatgtaatgtacattttgttaacttatgtatttgtgcaagtttcttcctttttcctgtctgtgctttatgatgttgtaggagttgaaacatttactgatattgggatttgggtattgatctccatgtgttttgctgcttttttttttttttcccctttcttcttcttcttgttagagctg

SEQ ID NO: 49561 - DNA, 759 bp, Ricinus communis
  Intron number 1 from transcript 27798.m000609 (locus 27798 .t000030) derived from phytozome v7.0 (chr-ID 27798; pos 2 39185 to 239943)
tgttgacctttacttcaatttggctgctggtgaaggtaataacatcttacctcttcttcatgccttctatttgaaaatctttctcgaactttttcttttcccttcagttaggtcagatttcatttttattcatgggaaggaaaataaaaaaaaaacgtttggtatgattaatcataaacaccaatcagaagcctattgtgtggtactgggatggctctattcctcgagaaataattaagaaactaatgcaataacatgctaattgtttttttattaattaataatagtgaacatatctttctaattgggaaaatattgggtttgctaccttaattaaagtttaattaagtaatgtttgaatgctctcattatctttcttagttgaggaatttagaacaaggccatatatatatgggtcaacagctttcatcatcaatagtaataacaacaacaaagaataccaccttgacgtgctaaaaataaataataaatcataccctttatttataaaaataccatctttgtcttattaattttattcttaaattgaacctattaattaagtaaagcatttggtaccttgctgcttcacttttacttcaccttcaatcaaagaattcttcttcctacaatccaacaaataattaacctaattaatcaataatgatagtgaatattccaagtctaaaactttatttatggtatcttactctatttttttgcttttgtatgcaggtgcatttttgcctgacctgtgcg

SEQ ID NO: 49562 - DNA, 840 bp, Ricinus communis
  Intron number 1 from transcript 29642.m000283 (locus 29642 .t000008) derived from phytozome v7.0 (chr-ID 29642; pos 6 9307 to 70146)
ttgatttcatttctctctgaattcctcttggtaaggtcagtgtgtacttcaatctttactctcactgcatttctttttccattttgtgttgcttttcatgtgctaatgtgatgtgaagtacccatcttcagattctcaaggttttgcttgcttttgagtagctctttcttgctaatggcactgggtattccccatttcttttctattggtcaagaaaattggtggtcattttctgcaactggaagaactgttgcttttggatgagctggtctagatctgtttcttgtcttttctcctgatgtaccttgtgtgactgtgtttttattgttttcgtacttcaatttctgtttttgaaacagaaatatcggtttatagcttctgttcaactatcatctgttattgcattgtttcagatcccgtttcaggctttctagattaaatgaatcagtttctttcatgtgcctagctaaaaagaaagaaaaagtatttcttttgtatttctttttctagtgttgttggatgagctggtcaagatctgattttttccttttctaggttagtagttaaggtcattatattcttagcttcttaatcctgatagatatttgttgcttggatatcttctgttgattttcagtttctcaccttgatacaatgccatcattattttgcaaaagcaaatttagtggtttctttgttttttctttgttttttctttgtgtttttttttttttcaattgatgaactgtagttgtgttcataagctgaaatataagaattgataggatgtatttgcctactgcaggaatttggagagttggtaaaatatttgctacatag

SEQ ID NO: 49563 - DNA, 659 bp, Ricinus communis
  Intron number 2 from transcript 29801.m003149 (locus 29801 .t000094) derived from phytozome v7.0 (chr-ID 29801; pos 5 26854 to 527512)
tgggactcatctttctgaagatctggaccaggctggtgagttatcagtttttgtcatttcaacttgattaataagtacataaaatttgttggtatgaccatagcccttccttttctttttaatttttgtaagattattggttgataaggcatgcaaatctataatgagggtcttgtattttcttgcgtgttagctatttagttttcttgtaaggacatttagggtttactaatagaacatgaaatggatagggctctaatatcagactcttgaaagagttttcctgtgaccctggaagttggtgctttctagaatgggactaatgataaaagggaattctgaactttggctggtttcataatcatggtaaaccttctaattttattaacaatggaacatcaataacaattgtgccaattgtgagtgagtgacagtacatatacatcgtaaattggcaaaaacatattccttataattctttgcaataaatataaaatgctgatacaatgaattgtaagactcaattcattttctttttttccagagtacaggttgttttaagttttaagttatggctgatgtaatttcatatgttatgtttgatatcagaccagaagagttgaatttgttttcatgttgtttttgtgcttgaacaggtt

SEQ ID NO: 49564 - DNA, 920 bp, Ricinus communis
  Intron number 2 from transcript 29666.m001455 (locus 29666 .t000031) derived from phytozome v7.0 (chr-ID 29666; pos 2 27700 to 228619 reverse strand)
aatacgtaagcttccagttgctcttctatttcattttcttatttatctcttgtaacaaattaggagggttaaaaggttgaaaaaaactcacatgaataacagtagaagtaagaaagaatacgtagagaggacaaactaacaaaacccagcaatgcaaaaaatccaaagaaagaagagaagaaaaatggttgacaaagggaagatgggtaaaatatatttatataccaaacctatatattggtgacaatacttcattttattttttattcaactttttaaaataataataataatataaaataaattaaaaattttaaaagtaaaatataatatcttaaaaatatagatattcaattgataattatctattctcgccttaacgatactaaaaaagtaaaagttagattattgaaaaaaacaaagtaaaattatgttaacattttgaaacaaagcctaaagttaggtgacagcaaggcaatttattttaataattatcataattttctatacaatttcaatattatgtctaaatttatgacaattaatttaagctgacataatatccattattagtattactttgattattacttagaccaatatgatgaattagcaaaaagagcaaagctagtcatactttatgttattaggcctattattcttttatcatattactccaattttaatagagatgtatatgcactacacacattcactttctagttgttttgctgattatggaacttgagttgcatttgtgatgttattttcgatgaaatcaggttaaaaacaggggactttcagttttcggtatgcccacaggactgcacgatactattagagcactaaagggtgtcgaattactgtttgaaaatttctgatgagggagaaagtgcaaatattgaattcctgaaggagca

SEQ ID NO: 49565 - DNA, 539 bp, Ricinus communis
  Intron number 1 from transcript 29813.m001529 (locus 29813 .t000081) derived from phytozome v7.0 (chr-ID 29813; pos 4 95632 to 496170)
gccgttcctaaaaagaaggttagttgcctacctgtttctccttctcttcattttaatatcaactatttgttattagttttatcgtagttatctgttttccttaatgtttgtggtatgggcgtggtttatctcattatgggttttgggtttttagaatggttgatggatgttctaattatgaatttattgttatattattatcattatcattattcttgaactataccgagaaaattccagtattgcttatgatttctttggttttcttcatcgtcagtgtgtaattaagggaatgcatatgttttaatgggttattgcaataattagcttctgctatgagtattattttgatttgtggctgttccatttttaggtttattatgggtcattcattttcgttgcatattgccaagtgtgcgaaaccttttctgttctttttcttttttcatgtcaatgtggatattgaaattataaatgcaatagtgattcatcgggcttttgcaggtttctcgtcataagagaggcataagaaacggacc

SEQ ID NO: 49566 - DNA, 990 bp, Ricinus communis
  Intron number 2 from transcript 29780.m001363 (locus 29780 .t000049) derived from phytozome v7.0 (chr-ID 29780; pos 3 62047 to 363036)
gaacgtgcgattacaagaaagaggttttgaaaaaggttttattaacattttatatgctttttgttcataatatttgatacaattgacttgagcaaagaaaaaagaatcatcaaatggagatttttgatgtaatgtactgaataaacaagatgaacattgcatttacaagcagatgagttagaaaagaagggcagcaagcagtaacatgaacacatatagtttcctttgagattcttgaagaaaacttgtaaaagcattaagcagtacgttgagaaatttatgtatgatatgaagttgtcctgaagaaaataagttgtttttctatattgatttattaggtctggttaaagcatgacattagggttttttttaatgataatctgttgcctatggcgttgttctttttggcatcagttttggtcttttacacatcatacactgaggttgtttcattagcaggcaaccaacaagaaccagcaaagtttagagaccttctgtattgatagttgttttagttttgtttttcatttttctcactctattattattattattatttacatttgctctaaaggaaaccttctcgttcttttcaaattcactgtttccttgccttagttgaaaaattttttattaaagaaaaagaaactaaaaaaaatatcaaagaaaaaatgagaacattccggagtggagatgagaaaacctgacaaagcattttctctaaaatgcatgtgttgagccatgtttgttcttcatcttagattacagttttttggcatctttagaagattcttttatatgtatgacaatttggccttttgtgtagctgattgcagacatgattgtataagtcttgcattattctattttgtcattgatttaatagtggatatatcttaaaatctgttgtatttctctcttattcctttaaacctggagaaaaattctctttggatttctattctcatcatctatttttcatgtttgcag

SEQ ID NO: 49567 - DNA, 1039 bp, Ricinus communis
  Intron number 1 from transcript 29813.m001475 (locus 29813 .t000027) derived from phytozome v7.0 (chr-ID 29813; pos 1 51093 to 152131)
caattcaagctgttgttgcgatcatcttgtttacggtacgtttttattttccccattcgttattagattgattttattttgacctgttctctatgattgttgttattctatttactttacgtctgaaactttgttttagacattaagatgagcagttttattttgttgcaaagtgggaaatctggtgatcatttgcttttttttccagttttgacgtctcttttgactttgagccttttccattagttttattatgcctagtgaaatcagaaccttctaataaggaaaatattattctattcccttggaaattatgcctgatttttttttttctttaagaaagcatgttgttgcataacatggtagattgctcagacgtgcataactggataatttctgctttgcgtgctgtgctttcttgttggtaagtattttaggtcctatatatgactttatgtagttatgtatggttaacgtatatgctaacaggacgcaatttatgtgtttgtattaatttctaagatcagttgtgcctctaaatcagttaagtggctaatcctgttccttgtaaactcaaaccaaccaaaaataaatgggcaagggaaaagttttgcaacacttaaatatcaattcttcttttgtatgtgtgtggttcggagcatgaacagacaggaattgatcaatcaagtggaatggttttggttatttatttgttaaaattgtttctagattgcaattgttgggttgatgagttcaactttgataatcgcagctcaaattctgtacttattgtaagattttctgaaccaaagtttgttggttgtaatgccttttataccttttcttttctgtttacctgaaccagcagcaagctgtgtgtgccatctttttgtttctgttcttttgggctttggttatttattttgttttctagctgtgatcttaacctgcctaaagtcaagtcattcacaattctatacatgatttgctattgattttactttacaattgaatcctgctgttctataggtaactggag

SEQ ID NO: 49568 - DNA, 713 bp, Ricinus communis
  Intron number 3 from transcript 29670.m000150 (locus 29670 .t000007) derived from phytozome v7.0 (chr-ID 29670; pos 7 0030 to 70742 reverse strand)
cttgccattattgcaaaggagcgcagaaaacatatgtcagtgaactgtacatgtggttcttacaattttgtttttattgcttgtaaaaagccattgcttcacatctttttataaaatggttgttattgtctcttgggcttatcaaatgaaactagtatgatttgtatagaagtgaattttttaaaaaagaaataaagaaaaatgtgccaaccaagatgaatttcgttcctgtcttgaacaattaaggttggcatgcaagtctatttcacctttaatctcttccaaacgactgaccttgctatcagtgtggttaaagtgttttgattgttaaaagttgattctgaataatagcatatgaactcaatctcacatgccaacttctgcaatttaagaatgctttgcaatttttatcaaacacttattgatacagtgttactatgtattcctaggggttgtctggttatgatactcaagcctctgtcttgtatgctttatctggacatgcaatttgatgcttagatttttcaattggggttacttaactatttagactgtttgttaagataggataacccagttcaagaaaggaatctgtttttttttcctaatctattagtttctctgctgctggacattttcatatatctatagatcttctctgtctctctgtgttttttagtttcttgttttgatattttatattgtactgcagg

SEQ ID NO: 49569 - DNA, 229 bp, Ricinus communis
  Intron number 1 from transcript 29670.m000150 (locus 29670 .t000007) derived from phytozome v7.0 (chr-ID 29670; pos 7 1082 to 71310 reverse strand)
ctcttcttacacccaattcatttcaccgttccacggtatgtttatgcctttcttcccctctaattattattaaattaaacgatattttgagtgcatgatcgatctatgcaaagctattaatcatccagactttgattcttaattaaataataatgtatcgatgttcactgatttcgattttttcaaaaaaagaaaattgctgtaatttgtttgcagttaaacgtatcaa

SEQ ID NO: 49570 - DNA, 246 bp, Ricinus communis
  Intron number 2 from transcript 27985.m000892 (locus 27985 .t000055) derived from phytozome v7.0 (chr-ID 27985; pos 3 62647 to 362892)
ctactgccttgttcctttttctttccccaacgtaaatatttcatttatctctatttttcttgttcttcttctatcattatgtttctttttatgaatattattttgatttgcacagtatttcttgatcttttatcttgaaaatggcagagttcatataatcttccctttcaccattcttagttattgtttttattttattattatttctcaggattacattcaagagaatcataaagagtaaatcaa

SEQ ID NO: 49571 - DNA, 616 bp, Ricinus communis
  Intron number 2 from transcript 28402.m000024 (locus 28402 .t000001) derived from phytozome v7.0 (chr-ID 28402; pos 1 123 to 1738)
ttcaattgacaattttaattttgccctttttgaaggtccttggatgacccttaatcattatttaagtgtttgaaaatggtgctcgaactttgatcctgagctgccaaatatcaatagtgttatggcatgggtgcggtttccttatttatctattgagtattatgatgaaaagttcctcatgagaatagttaatcgaattggtagccaattagaatggatagtagtacaagtgatgtttctcatggcaaatttgtaagaatatatccggagattgatttgaacaagccgttattatcaaagtttaagctgcataaacatatttataaaattgagtatgagagcatccatttaatatattttgaatgtagtaaagactagtgttcgaagttattgacaccatcaaaatgagttggacagaagcaagctaataatgatgtggttagtgatcatgtggagaagaatatggttgatcaagcaattactgattgttttggactatggatgatagctcagtgtaaatcttgggcaagggtagcagttaagaagaacttgaattcaagtaggactgataatcataatagatcggttttacaagaggtcaataggcgcgcttgga

SEQ ID NO: 49572 - DNA, 449 bp, Ricinus communis
  Intron number 3 from transcript 29675.m000392 (locus 29675 .t000005) derived from phytozome v7.0 (chr-ID 29675; pos 5 0036 to 50484)
caagccactggtgataacagtgaagtcatattgtagtatgtaatatagacccataattgttcagatctttctttcttgatctctggccaggccatgaaggaacctgctggcttgcttgaatttcttttcagcctaataagttttgaggtttttctgatcaaataatcggatttggtgaattaggtgcaattttgggtatttatttatttagttaaaaattaaattagcgtgcactcatgtagactttcaaaaaactggctaacctaattaaaatgacatcactcatgtcagtttaattttagctaaattaataaatttgctaaaattttactcaaactggactaattttactaaaattaagtccaaactgcaccatttttttagtgttcttactttatttagtgactgaatcagcccgcaagctatctttaaagatcccttcagaagag

SEQ ID NO: 49573 - DNA, 683 bp, Ricinus communis
  Intron number 2 from transcript 29717.m000225 (locus 29717 .t000005) derived from phytozome v7.0 (chr-ID 29717; pos 3 1233 to 31915 reverse strand)
ccaatcttacaaactcactgtcaggccaacttgaggtgcacttattttctctgtctctccaagacaatgcactaattctttttctctgacttattatgtctgttcaatctaaactctatttacagcttcattacttcttcctgttggtcttattatgttcaacaccatttttatttcagaagattcttttgttttgagttatttatcttttagtcccctttgactaagatttcaagtgtgagtatggaaaatttataagagaaaagaaaaaagaaaaatctaataataattatagctaataatatagatacacaataaagataattcttgtcaattgtataaacttctcaccatgtttgttcaatttcattatgattactatcattaaatgttttgggtgaattaagagtgtctcctttcatgaataattggctaaggaccctacaacacttaaatagatcataagatgtcactctcagctgagattgagatgagggaacagcaatagtcttcccacatgtgtactaattcaataaattcacctgaagctatttaattttctagatagatatacagagatttcataaatgtagagattgttacagaaaagtattccaacatgtttaatgaaagtaatgtctggtgcagaaattgtacaaattagggggtcggaaatttgtgtt

SEQ ID NO: 49574 - DNA, 358 bp, Ricinus communis
  Intron number 1 from transcript 29736.m002107 (locus 29736 .t000103) derived from phytozome v7.0 (chr-ID 29736; pos 7 23592 to 723949)
aatcacaattgggaggcggtgttatttatcttaaggtttggagttagggaatttgaatttatagactttattattgcttaattactttgattttgctttttagactatattatttgtatccaagttcttaaggattaagtttatgccttttttatgtgttagaatagtagaaattgatagaattttggttctatgtttcttcaaatttctgctacagtaggttaagtattttgctgttatattatattggctagaattgaaatattcttggaatttgatattttatatattaagtatgtaatggcagcaattatatttttcctttctacagacctctgcagcgcacagctggacctgt

SEQ ID NO: 49575 - DNA, 869 bp, Ricinus communis
  Intron number 1 from transcript 27940.m000333 (locus 27940 .t000011) derived from phytozome v7.0 (chr-ID 27940; pos 9 6867 to 97735)
cccatcatcaaggtcccaactttccttttttttttttaaaaaaaaaaaatctataatgttatataaatactatatattcaaaacccatatctctatattatctaatttaattatggctagttttatgcaatcaaacactcttgtgatccatttggaattgtttttgtgtgttttattcatggcggatgctcgataaaattgtaacttcttacagttcatgcaacttttacttggaagacgtgagtatcaatatcagttgaaactttgctcgtctaaaatatgaaagcatgcatatttttccagggtatatcgcttcaaccaattcaacatccaatgttgaaacttttcaaatatttacaaattcttacgttgtgtattgatgatctttgcaaaagtataccaagtaattgagattcattttggattttagattttctatctctccaggtgtatttggactttcagttgtctctttcagcacattaattacatcatgttttccctttttatattagcggctctggattagtgattaggtttcttgctaatatgaaaaatttctgcttctccttttttcttttgttttttccataaatcactaatttaacttttgtttcttctttctattattctatgtctagttgtgaatccttatgctaatagtgtatgcttataagtatttggttttaacatgtatatgatcctcaataaaacttgcttcacttagttgatatggaatattctcagtgatcacatgttttttaattgtagcattcatcattatgttccaaatatctttggttgtacataaagagatcgagtgtatgaaagtttgttcactttgattaatcacatggcaggtaggaagg

SEQ ID NO: 49576 - DNA, 568 bp, Ricinus communis
  Intron number 1 from transcript 29736.m002023 (locus 29736 .t000019) derived from phytozome v7.0 (chr-ID 29736; pos 1 82905 to 183472)
aggaggttgttgttgcagaaatcaacaaggtgattatgtctttagttaattaggacctgagtgcatggaagattttagatatgtttatatgctattgtgttctttttcttgggaagttttctcttgtcttgttgattagctttccatgcataggaatccacaaaggaactaaaaagatttatccattaaaaagaaagaagaaaaatctccaaatgaaatcttccttttccttcacttaaattcttggaaatacacatagcgaatgatttgtcttttttggattaattaaatctggtatcatatacttatagttttctccatgacaagatccacttttctagaaaattagtttccaagttcatccattaatgactcttcccatgttttgactctttgcttgaatattgattttcttaattctttttcagtaatatacacaaaatgcttttgaagcttatgtatattgaaatgaaatcattattcacgttatttcagaaatatttatcttatcaagcaatattcatgttttttttttccttttggtgtatgccatcttaggaagaaggag

SEQ ID NO: 49577 - DNA, 994 bp, Ricinus communis
  Intron number 2 from transcript 29736.m002023 (locus 29736 .t000019) derived from phytozome v7.0 (chr-ID 29736; pos 1 83538 to 184531)
aataaagatcttacttctatcaatcatgtaagaattttcatatacttgtttcgttttatatgtaaacaccttaatttttcttttcactattattactttggttgttgggcaaagacttgtatgtaaagaaaaatgtgttcttccactcatatgtgcaagttgatctataacatattaatagtttgattatttcttataataattaagttcacttaattttgaagaatttatttcgataagttttccttaaactattgagttgttcaaccaaaatgatggtagaccaattctgtaaatcctaatattgaatattaattattgaggagttttgctttcaaaagatgatcactgcattattaattgatctattctaaacatttttgtgctataccgagtcaaacattgttcacaaatcccaccatgaagatcagatctcctcttaattagtcatttgcagaaattgactgagatctattgttattattttatcttcattatatatattctagttagtaccttttcttttcaaaaaagaaaatcataaaagcactcagactgcataaatttgaattcttaaatataaagtagtattgggtttattggttatggtcttaatttctagtcttgattcctttgcttggttttacaattttagtttgattttgattattgtagtctgctattttgtttctcattttcaatgtgaaattttgctgcccatattttacaagtagccacttcatgattagaatattatctcaataataattattcgatgccatattatgtaactaaacctatagaattcagatgttacatttttctgaagctcttagttaagtcgtgtagtctggagatggactaactcaatgcaagaaactttcccaaagattactattattattatttttattattttagaagtcttaaatcatttagttcacttcttttgacaccaggaggatcagctgaggtccacaaaagctaaaattgg

SEQ ID NO: 49578 - DNA, 900 bp, Ricinus communis
  Intron number 3 from transcript 27471.m000420 (locus 27471 .t000020) derived from phytozome v7.0 (chr-ID 27471; pos 1 40174 to 141073 reverse strand)
aatctacaggtactgcttgtttaattgcatgtttctaatatacttgtgcaaactgtttactggctcattgctaggttcttttacctgtttaatggagaacttgttagattttataatcataagctttttaaacttggattgtttgttatgtgtattgtggacagaaggaaaacctaacataaaagagtaatttagtttaaggagtatatatatatatgtgtgtgtgtgtttgaaagctagctttgttttaacagaacaaactagttttgcactgcttttgagatcaagtgtgatttttttggggactggaagatatgattgtatccctagtttcaggcactattgaaatgagagagaaatctttgatagcttgaagtaaagaaatcaataaatggtggagaacatatagatctgtaggaaagggatgagaattgaaggaaaagatgtcctttaatttttttgaaccaaaacaaagagacagatatgtatttgctgtttaggcctgtgtatctatttaaattgataatgaagaaaacacaacccattttgcgtaaaatgataaaaattagagcatgaaagaggttttgtctttattctttttgtcacaaaaccaactgcattcatgtatattatcaaacaatttgtcaaccttagtattttctgtcaatagccaagtaagttcaaattgccaacccaactagacttggaccaaggcaaggtcgattttagttgagttaaacttctacttgttacttgtttagcataatacagtttttctctagctgttggagttcctcttgctcatgttcttccagcttaatttttcccctttggtgcactttctaatgttatcatataatgatttctcattgcagctaggtaacacagaagaatttattg

SEQ ID NO: 49579 - DNA, 638 bp, Ricinus communis
  Intron number 1 from transcript 28281.m000379 (locus 28281 .t000018) derived from phytozome v7.0 (chr-ID 28281; pos 1 40127 to 140764)
agaggcaaggcgacaccctctcggtaaccagcttggtaaaaatttctattatttcttcttggtctataattctgcttcttgttctttttgggtctttttatttccttttaattttttgagtttcatcttcatggatttttctgccgtagtatgtatgtatgtaatactagcagcagtcttggttttcgaatttgatgttgttgtgttcattattagctgagcttcttgaacaacacgagtagcactttaacactgttagtttctaagtgctgagaggtaaggatatatgttaagtattcccaatttggatctgggttggtttagatagtgtgaagtccatattcaaccctgttaaaataacttccagttgatcaaagatggctcttctattaccattctatgccacagaagcagttttttcatgtgctgcagtagttctttaacttatctttgtttgtcctcacgtagttcttgttaaataaagtggtggactaggcattggcaagagttttctgatttgcatactcttcttctgttaatgtctttcacatttgtcaatatgaagtctttttttcttatataatcgtcatatgatgaacgcagatattcagcaaatacttgtagaagcacagcataga

SEQ ID NO: 49580 - DNA, 659 bp, Ricinus communis
  Intron number 2 from transcript 28281.m000379 (locus 28281 .t000018) derived from phytozome v7.0 (chr-ID 28281; pos 1 40815 to 141473)
tcgtattgcgccagaacctgcacatctgccgtcaagtaagacttctttatggaagacttctttatgggcttttttgctgataaattttctcaattaacttgacattatatttctttcctttttcaatgaaactgccttgaatgatattttgggtgtctaaaacattgagggattacatattggtttaacttgtttagtctaattaaattttacatgtctgttctttcttgaatacccgtgatcaaccttttctttgcaactgctctgcttctatatttcttgaaatctataaagccacttgcttattcttcaaacgtagataggaaatttaattcacattcacattttgatctttggtttctcccaaaagtcaaataaaattattagcacaagaacaaagtataaagggtttgtttggcattgtcaataaaaacacaatactgaatatgttgattaccagtaataaaaactcctacataggtttggcatgatctttttcgtaaaactttaaaataactaaaacacttaaaaagcagtttcagctgcaaattgcaatgtcaagtaggctaaaagtagctggtaattgtctgataacttttcttctatttgctgttcattttttaggtggttcacttttcctttttgatcgcaaggtgctg

SEQ ID NO: 49581 - DNA, 925 bp, Ricinus communis
  Intron number 1 from transcript 29709.m001167 (locus 29709 .t000003) derived from phytozome v7.0 (chr-ID 29709; pos 1 4907 to 15831)
cggaaggcctgcgcatcttctattacctagttcaggtgctttttactctgcttttcctcttgtggtttttgttgtttgctatttacaattgtcaaagatcggaagttgaagagttgaacaatttagcacatgactgtcccttatttagacaaatgataagaataaaaaaagcatttttgattgagcctttttcctacttggggaaatttgccattctcccgattattctatgaatattggaaactcgggttctcattcacaaattttcccattggcttcgatcagttatgctgcaattttgggattttcttcaactgaagctattacattgttttccctgcttgtctcgcttaaatatagattgacaatgtatatgattttttttgtagagagaactattgcaactatagatatagaattcagaggttggatgatagaaatttgtagaatatagtcatgagatatgtctatagtgaactattccagattgttgcgctttcagtattacacacagtttatgcacccattatggactataattggccaaattacagaaaattcggagtccattctttcccttccatttattatgcaagatgcgatccattcttgtggtctttactcatttatttgcgtgccatattcatgtgtttgggagaaggggggatgcattcataagtggcagaaatgttagtatgcaccatatgctgatgatcatatatataaatggaagaaaattgacagaaagcaagcccatccagagggcctttttgctttaatttcttttttttttcttagtgtattctgaaatttaatccataatgtgctcattttacatgatgactgctattcagtgtgctgatacaggggcttttagaattaatgctggttctggttggtgtttcttgtggttgcaggacttgaa

SEQ ID NO: 49582 - DNA, 729 bp, Ricinus communis
  Intron number 1 from transcript 29805.m001475 (locus 29805 .t000006) derived from phytozome v7.0 (chr-ID 29805; pos 2 6327 to 27055 reverse strand)
tggaccaacggtttcttctaataaaggttcttttttatttctttattttggttgtttgattggttgattgctaagacactgtaggaaatataatttaattttttttggaattatttgttatgataaaaaccagttttgacgggctgctgattgcatttagtaagaactagctgttagggattatctgatgtgtttgtaatatttgatgcgttggtgccatttcttcccctaaattaaaactggcatttcatcgaacattatgtgatgcttttgcactatatattttgttacttcttcaaattctttctccaaattccttatcctgatgagagaatcaatatagggagtaagtttgcaatgatttgtggttgtaatcttgctaaatggttgtttgaacatactagatagaaaattcataagtatctgggtgtcatatcaagcatccttgttcgtttatagggagatcttttcttttcatttttttttttaagaataagaaactgaaatgcagttgattttctatgctccttattactaccatccttatttaattcagaattatttcatctctttatcaatggaaagaaaatcacagcattcactgtcgtcttggctcatttttttctgagcaagtaggaaatgcttgtgtttttaaatttctcgtctgatatacgaattgaacaccagtgctggtttgcttatatattccacagaaactactttgtttgg

SEQ ID NO: 49583 - DNA, 762 bp, Ricinus communis
  Intron number 1 from transcript 28128.m000160 (locus 28128 .t000007) derived from phytozome v7.0 (chr-ID 28128; pos 8 0678 to 81439)
cgagctcaaaggaaaaatacaggcagacagacaaggtatgaaaatttggtgttatttctttttatattttgtcaatctataacgtttctgtattgttttcttacggtggtttgatcaattgtattaaaaagtgtgttgaaatgtcggaacgaaaccccgcctgaaattccatgtcttttatgtcgctggccttattcagataatgatttttctactttgaatctggaaacaagttgttgagaaaatccacctcttccttctattagtaatacaagatgtttgggtatgttaaggaatccaactcgaacagacccataagtggtggttgggttggttaactttagttttgccggtgcattgctttgttcatgatcctgtatttagaaaatgagaagaaataatttgtgcttcagatttttattcttttgatatttttgttttttctttctaaattcttaggttgttgatttggattcttttggtacaggagaatttcaaaacttgaagtgggtcgtgttgtttgaatgataagaaaaagctcagctgtgatcatgaaaacaattttatgaccttattattaaaccctaaaccctgttaaattttcaaatgcaaactgttaagtctctctttattttttcaccttcccccttatacaatttcctcatcaataccaaatatcccttcagttctgctgtcttctcttcacttgcccaaacttcaaaagcagcaaatcctgcccttttccattacctattaaaaagc

SEQ ID NO: 49584 - DNA, 797 bp, Ricinus communis
  Intron number 4 from transcript 29788.m000333 (locus 29788 .t000016) derived from phytozome v7.0 (chr-ID 29788; pos 9 1163 to 91959 reverse strand)
ttgtacctgatttgactgacttcaaggtaacctttttccacccatctttgtttctgtattttggagaacggatacttagctcttgcattaatgatactaaaacatgtaaatggcgttgatgataagggtatttcgtttatagttttctggtctccttttgagtgttggaatgtaattggttgaaagttgtcaattgttaggcttctttatctttcagttacaagaattattattgcaagaatagtttttgtgggagtattcttgaattttttgtttctttgtatgaaagaatatgttttcttccatatggttgttttgtagataacgtttttgttttggattgtgaactgtttttctttctttaaataatgaaagggatatatatctctgtctctctagaacggattagaagttagtctgctgcataaagtatttagcatgaggagatagttggtcgctgtatctcatggtcaacttacagaagtttccccatttgcttatcttcattattttaattgatgtagaagaaaatgattgaattttagtctccatgattataagacttgtgttgtgtatgcctgttctatgggtggcattaccctcacctggaaaaagaaaaaggttagaaaatggaaatcttacaaataactggttgcatgttgcatctaaaacaacaaaattttccccataagtacaatattcttctctcactctagtgatctaccaaatttttagactaacctctttgcatgttttgctgattaaatgtttactcttttgctttcagctaaagccgt

SEQ ID NO: 49585 - DNA, 985 bp, Ricinus communis
  Intron number 1 from transcript 27613.m000618 (locus 27613 .t000011) derived from phytozome v7.0 (chr-ID 27613; pos 7 7722 to 78706)
tcagggatctggtaccagctggaaaacacttagcggtttgtattgcttatctaatctttccttcttttttgtctttttcctcctttcttgtttctctatctagaacaaagatgcgtgcaacaattttctctctgtagaactatttagtggatgtagtagtaatggtagtatcagttagtgcattcttttctttttccccttagaattttctgtttggttcctgagaaagctctcgaggaaaaaatgttactatctctttttttttttttttgtcttcagagcagctacctattaacaagattcgatctttttgctcttttttttgcttctctgtacttctggtactaaacgataatggaaaggactttttttttaatagaaaagaacaaagtgttatgtgttactaattcataattaatggtagccatttaattttgttttataatttttaaggtaaaggtaggtttatgatagatattctgctaattgggtccttaatcaggcatttgatttttttagaattggattgagtgtcaagaaaatcaatcccttttcaattcatgcaggattgcaggatttcagatatgggatcgcaaataactcccgagattttaacgtttctaacttttaaatagttgtaaattatccaaacaactaaaaattagttttgcatctatttctcttatggaaatggagaacttttgtttcctacaaataaccttttttttaaccttctctatgtgtataaatacaaaggaagcttgtattaatgaactgctttatttaacttatttattctttgaccaagaacatcgagaggaagaaagaaaaggttacctcttttttcttgttttgaggttttggattgagaaaaactgcaacattgcattcggtaatatttgttgttgtttaagcttacttgctgactgatatatatcatattattgcaggaaatccacctttagttatagcacgcggagggttt

SEQ ID NO: 49586 - DNA, 751 bp, Ricinus communis
  Intron number 4 from transcript 29738.m001052 (locus 29738 .t000054) derived from phytozome v7.0 (chr-ID 29738; pos 4 68813 to 469563)
tgactgtttacttaaatgtacttttcttatctatcaatttctatttcatttgcttgtgttgttctgtaccttgagtgtgcatgaaaaatgataatgttgttattgtgttacttagcaatttgactaataaggcaacatgaatgttccggacagaaagaccttttggaatgcattttgatacagaattaacactaccgtttccttgcacctgaattttattgttgtatctgaggctgaagaaattgctcaacttagcatcattatatatttcttattgtgcaattgtcagtggcatgtattgtccaacactgaatccttgtcttatgccatttcattaccaaaaaggtcgatgaaaatatgttgaacataagaccccattactaaattacataagaatttacacatgtttaaaagaaatatcttttcaattttgctcagcatactatggaaattgagataagtaataacatttttgcattttccctttagagtatcatttgtgtcaatgtggacatgcataatgaggaaaataatgattgctgctaatgcagattacatatggatggagtttgagttgaatagagtgcaaatatcatataaataaatttaaaaatcacataaatactacatgttggaaatatttctttttttttttttcattttttttgctttagatgtgctcttacatgtgaagaacatatagctgattgccctttgtatcatatgctctctgtttcctcttagggatatc

SEQ ID NO: 49587 - DNA, 846 bp, Ricinus communis
  Intron number 3 from transcript 29734.m000411 (locus 29734 .t000001) derived from phytozome v7.0 (chr-ID 29734; pos 2 783 to 3628)
ttaagctttgtgactttggaagtgctaaagtcttggtatgtccatccctacttctggtttttcttgttcttcatgatgataataggcatctccggtggtgtacagtctcttagtttacagctattaattaaatggatttcatgaactcttgttccttgctattgaaaatttgagctctttgatgtgttggcatcagaaccttaatggtgcaataatcacggatgcccacattttcagaaatgaagacccatcatcaaatgcatcttgagtgttttgtgatgggaaggcatggcttgtagttgccatggcttctaagaattttaaattctatagaatgatttagatatcaacttttacatcttttttttcgtagtccgaataattgtagttctggatatgagtttctatgcaaatgtgccgtgcactggattcatttagcagttttatcaatttttttttttttttaaatacgatggtgatattgtatgattctaattattctgtatgtataatttcttctgaagattctgcttaattcatacgtactgaccatggcgagcagtggatattgtttatccatgtactttatagaattctaaatctttcattattgcaaagccaaagggcactttgtcaccctgtggcttttgaaattacacttcatcccttgagttgcttcattactgcaatgccaaaggctggtgccttgctgtggggtgacaaagtgaaaatgcgtccaattcatggtgttgcattactcatatactttataaccggacagattattatttttgttgtgctttttctatctcattaggttaagggtgaagcaaacatatcatatat

SEQ ID NO: 49588 - DNA, 390 bp, Ricinus communis
  Intron number 1 from transcript 27769.m000109 (locus 27769 .t000005) derived from phytozome v7.0 (chr-ID 27769; pos 4 7456 to 47845 reverse strand)
accaatattgttagtgtatatctaatattttctatattttctttgttagtttttttgtattttctgcattcatttaatgttgtcatctttgatttaatttgaaagattttaaaaagattataatatattttcataaattcgatatttttctaataactcgttatgaaaagaactcctacattgttatttttagttttagttttgctgatattattttagatttatttttgtaaattttaaattaaatgttattgtgagtatatatatatatatatacgctgttatcggatgtaaacacagatatagccatataaaaataaagaaaactgaattgtctttttttcctttcaaaatcatggtggttgtgcagtagttccagcagttgaaaca

SEQ ID NO: 49589 - DNA, 691 bp, Ricinus communis
  Intron number 3 from transcript 27964.m000360 (locus 27964 .t000015) derived from phytozome v7.0 (chr-ID 27964; pos 1 32618 to 133308)
gagctcgtaactacaagttttttcttcttttcctggtaattatctaattcatacaaaactcgttacttgtggcaactatctaaaagaagttacctgtttaatcactcggtggttttgttggcataaaagagggtcttagttgaatagcatgttgtggaatttgaggtgtcaaaattctaattcgccctagcaataatgacttgtgattgtcgctgaatgtaatcttagtactatagtgtatgatttatctgaaggccctaagattgaaaccacacctggatgatctgaaactagctgcactttgacgtctgaagttttgatgaagatctcttatttcttgaattcattgaaaaccattttgtaagtttatggaagaaatgacgctcctttgataatgtcaataaatattttgcaattataatgttcataaaatcataagacatgcccagttgactgaaatttggtgggtctgagtgtcaataaaatgtacaatgtatactttgtaagtatgtgtatgattcttctcttacccacctccatttcttaaacgtagaaatcttttaacttttgttttagtgaagtgaggctggtatttgcacttgtctatttcatttctttgttctgcctgactatctttagcctatttttttccttcctgtctttgaagctttacacatttctggagacaaca

SEQ ID NO: 49590 - DNA, 488 bp, Ricinus communis
  Intron number 1 from transcript 29648.m001925 (locus 29648 .t000012) derived from phytozome v7.0 (chr-ID 29648; pos 8 6796 to 87283)
atctctctcctaccataggtaagcttatgtttctcaattattttcttttctatttttatccctggatattatctagttcttctatataattgttaagaatacaataataattgaaatttttgttcgtattataatgtgcaatgtacacgaaattcatggttcagtgcttctttgattaaatagacgtggagtgtttccatgcttatttaaatatgggaattagaattggaatttgcaaaattggtgcttatgtatctgtaacaatttgtgtatttataacttagcttgaataaatatagtcaagtaaactgcgtatgcaactcttgagttagtgtgaaaccagtttcaatctttcatattttttgaaaatgaaaaataattctggtttcaggatatcaaagcataatttttgggattgttttctgacgaaggactgcaatttagttaatctttgctcaattttgtaggcgtggattttaaggtacagt

SEQ ID NO: 49591 - DNA, 406 bp, Ricinus communis
  Intron number 1 from transcript 27940.m000330 (locus 27940 .t000008) derived from phytozome v7.0 (chr-ID 27940; pos 6 3561 to 63966 reverse strand)
caaattttagaggcaaacgaagcgtcgtcactgtaacttcggatatttagctttgcgtctttattattgtatttaggtttgactttgctttaagatgcaatttatcaatacttgccttttcttctgcgaaatggataattttgtgttttatatgtttgtaatggtgattattagtggttttttgttgtaaatagaattaactaattactttgagaggtttggtcccggatttccttgggttatgcggttatcataatgtgttctaagttctttagttcttttatttcttggtgaattgaagtgtttgttgcacacgaaatcactgaaagtcttctattatgtaaacacttatttgttggtttaccattcttctttggcaggttataccctatactagaggaagtgc

SEQ ID NO: 49592 - DNA, 892 bp, Ricinus communis
  Intron number 3 from transcript 29813.m001469 (locus 29813 .t000021) derived from phytozome v7.0 (chr-ID 29813; pos 1 23588 to 124479 reverse strand)
gcctcaaaagctccgataccaggtcattgttgttaatgatctgattttgtccttcgtttccttgttttatgttaaagatattcacattttttttttaactttcagatgatggggaattatttttctcttttgatatgtaaactgaatatgttctattgcatttcacccattaacccattcttacaattaattttcttaagaaatacatgctagataatgttttttttttttttgttttagctaggtatgaatattttaaaagatgtagcaatgtgcatggatggcatatttttataggtgaacgggtcaagattcttgctttggtcaagcacagttgttcattagactggtggatggttttcactgtgtttctttcctaatgtaaaataagatattgatggggaaattttactgaatttgtactaggcagctattagtattatgcccatttactaacttgttatatggccaatgacatttataggtcagatgaacatccgttcctgtttcatgaaatcagccatccaaaatctcctcttcttctggttattagaagttagaactctttattcactatattcttctcccaatgttattgattgtatagtaatatcaataagtttcttaactaggaccacttaatgtgtcaggtgaataacatgcatcctgctgttgagaactcataactttgtggtctatcttcttttttctttttctaaatggttacaaagcaatatgcagaaaacaaggattgccatgttcctttgattagacaattgttctttgttgctcaccagctattttccttaaacttgaaagcaatttcttttgtaattggaagcgctgattaaaatctggtctatcttgaatttcttttgatattaacagggag

SEQ ID NO: 49593 - DNA, 750 bp, Ricinus communis
  Intron number 3 from transcript 29794.m003366 (locus 29794 .t000065) derived from phytozome v7.0 (chr-ID 29794; pos 3 48198 to 348947 reverse strand)
gctaaacttccaccatttttaggcattaacgagctgtttgttttgctttttttctttttcagttttctttcactatcatatattccaattaattacgtactataattactttgacaaatccgtgtacttacatttttgactgggtataagatttttttattttcttttattccttactggtgatcctgttccagtactggttactttatgtgtccgtgcattatgagagctgcagcttttctcagaagaaaagaaaaaccctccgttttaaatgactttgacagtgttgattttgcgttatttttatgcctttcttggtatgttctttgcctctatgatattactttttgttacataaaattgtacatcaatatttctcctttgcaatgtgcagtttcttgttcactttataatatattcaatttttgctcaggccttaaacgatgcggcaagagttgccgtttgcggtggcttaactatctcaggccagatatcaaacatggaggttttactgaggaggaagacaaaatcatcttcactctttatggtcaaatgggaagcaggcaagttggtctatttgtttttcatttttagcaaaaatttttatttgattcttcataattaattaatgttggttgtctgtattcgagctttcattaatttgtatgttaaacatgtttagtatttttttatttttgtagtgttctcatcaattaattaacaagacttcaacttgttctttttaatcag

SEQ ID NO: 49594 - DNA, 927 bp, Ricinus communis
  Intron number 1 from transcript 29609.m000609 (locus 29609 .t000036) derived from phytozome v7.0 (chr-ID 29609; pos 2 76696 to 277622 reverse strand)
ttgtaagttttttatcttaatatttaataatgtgttttatgtgtagcgatttgcaattagggatttagttagatctttggatctattaggttttttttttttctttcaaatgattttggtgattaatgtgttgaaagtagttctgaattttaaaggcgtgtttggatttgagacaattggtaaaagctagaaatgtagagagagagatttggaatgaggatcactgaagcaaacggaagaccaaaaacaatatacaagcaagtgatgctaaatgttttctttttaaaatgtatttgatttaattcattagagatcctttataaatctacattcaatttttggacttgttttagttctgagtggctggtttttaaaataggattaaatgaataatacatttgtgttgtttgatatttgggaagatgggattagtagtacattcctataattgatggctgtatgtatgtgtacactgtctctttatgtagatggatttggttgcttgttgttttgacttgatctaatagaatgaaataatttatgtggagaagatgcttgctataagctataaggaagtgggggatggagaatgggttactttgtgaaaactgcttagtttgaactatgcaattgggatgagcgaatgccaatatgaggatttttgttttttggattccattgctaacatttacatgaaatggtgaggggcaactctgtgaaataaaaaacaatgaatggaatatgaagggaaaatgaagacttctggaatattgcacttgtgatgcttttttaatttttgatttctctctcatgggagtttttatgcatatttacatgtcaatgctttaagacgttttaatattttttttacttttgccaattttttgggcagggtgccggtaaatctgctgtcttgaatagtcttat

SEQ ID NO: 49595 - DNA, 362 bp, Ricinus communis
  Intron number 1 from transcript 29686.m000890 (locus 29686 .t000037) derived from phytozome v7.0 (chr-ID 29686; pos 3 22175 to 322536)
gctcagatcttatttctgctttttcacaaattacggttacgaccttcgtttctctgattttcagcttcttatttatgtaattttattgttttgattagctagggtttctgtttatttggatctgcgaatggaactttagagctacaatttagctgcttcactattgtatttttcatttgaaaaaaagaaaaaattttgatgtcatgtattatggaattttcattatagcaatttttagctgattctagtttagatgcagtgtagatttttcatctgggtgttaatcaatgaattgagctttgggttttccttcttttctttttccaggtattctgtttttacccttttctcagctgttagct

SEQ ID NO: 49596 - DNA, 926 bp, Ricinus communis
  Intron number 2 from transcript 29686.m000890 (locus 29686 .t000037) derived from phytozome v7.0 (chr-ID 29686; pos 3 22595 to 323520)
tggctttgggattttggcatcttggtctgattcaggtacttaactctgttcggtagattttgttgtttttctattttttgttcagtactttattattactttctctttattaaactttttgctaaattttggttaagtgaagcacaagttttaatttttcttttggtgttattggtagtcttgaatttgatagcatatccattgtttttcaatactgtattctgctatatatagcatggtgtaatttattttgccaattcaataagtataataattaaatgcaatatactgcaataaatgatgccaggatttcctcttatgtgctttttgtgtgtaaaccaattaaattgtgcgtaatgagcatgttcacttttcatggtcttagaaatgagcgtgttctagatgtttttttatttcaatttatgtgttctggattgggtaagaagcatttacttgtacacggggaatattatgacctgcttcccttttttaagtttataaaatccatgctttttcttacatttgggagcttattatcattcaactcttgaatactgtgtatactgagctttggttctgtgcttaagttgtttctattaccgtctctcctttacatgtgttattccttttaaggtatatatatatatatatatatatttctttctttttatagcttaattttgtttcttcaggctttgtctgctttgagattgtatatttgcgtgaagccattattgatttttgacccacttgtagtttgtcatattctataaagtaattttattggaaaaaaaaaatgaacgcgtgggaggtggagtgcaagtatcaaaaagtggagagcaagccgcaatgccttttcatttatttgtgtgttgatttatttttctcatcctctttttggttcaggttcttgccctgctgattga

SEQ ID NO: 49597 - DNA, 946 bp, Ricinus communis
  Intron number 1 from transcript 29640.m000417 (locus 29640 .t000015) derived from phytozome v7.0 (chr-ID 29640; pos 8 9102 to 90047 reverse strand)
cgattaaagaaaagatctcatttgcaaaaaagaaggtaattttgattatcctatctgtctgaggttttgaattctttttctttttttcttctttttcgagtaatattacgatttggttttgtttttagtttgtgctgtggtttttgtttcaagggtttacgtctttagtttgcttccgtatatcttagtttagtggaagttctaaagttgggtaggattatctatttatgttttttgatccagttggtttatttcttttgcgtccttactgtggaaactcatgatatgtaatatgttaattgttagtagtatatgtacttatatcgtagtgatcactacatatactgatataccatttgtggattgtgaggtcaagagcatcagtaattttgtagttcttttttttttttggtcaagtgctaggagaactggaaaatgctcagtggggacaaatacattaggaaaagagctacaatttaggtagtaagatctaaaattctttagtaagtgggatctggcagaagtgcttggtacctaacccttaatggggtgtagctgtgcggctcatcagcctacaggtccttgtaatatggaataaaggacttataaacgcaattggattacttttcttttcgctcaaatgaaaataaaataaaatataaaaaagaatatagtggtttttgatttaggtgtttgggctactatgtgttatcttgtaaagtgagttctgaaggttaactgacacagttgagtaaaagagtatcggccttaagatattaggctcatgatattatatatttcctggattaaatctaagggtacactcatgagtggatcgagctaacttgttatctctgctcaagctagttaactatctttctgcattttattggattttattaaactgttacaattaaaagatgcgaggcttttcttgcttctccag

SEQ ID NO: 49598 - DNA, 167 bp, Ricinus communis
  Intron number 2 from transcript 29813.m001512 (locus 29813 .t000064) derived from phytozome v7.0 (chr-ID 29813; pos 4 22224 to 422390 reverse strand)
aagcagaggttagttagcctttttcttacaaactaatttttgccaatttgcatttctttcttccattctttctagatttattggctgcccatttgatgctagatatttgttttttttttttttttgggtaagattgcagcttacaagtcacaactatttgctaactt

SEQ ID NO: 49599 - DNA, 951 bp, Ricinus communis
  Intron number 4 from transcript 29634.m002124 (locus 29634 .t000070) derived from phytozome v7.0 (chr-ID 29634; pos 4 34414 to 435364 reverse strand)
atcctaggtaacaactagtatgtccatctgccaatttccctgcctttgcacctactttgtaaaagttccttgttgtgcctcgtgttcttctatattttatttgaagataagcaggtaatatgttccccatctttcttacgttactgcttaaatatgatactcatcaagtgagaggctatctttagttacctcttgttagagctgaacttcaaaagtaatttagagccgtaactgctccaatctaatagtcatcattcttttagctattatacatgtcttttttgccatggtcattgctgccctttgtggtagctggagaattagagctagttttcttatctttctcacggcagaagccagaacatgtggaggaaattggttgttgtcactggttgaatccatagctgttggctgatcctcttatgtcaagtttgtaagtatgtgttcgagaagtacgaaaacaaaatttaagtttgaaatatttctagattcttccaaatagggaatgaaggtttaaaaagaagacagttccaataatggtctttggtcactagattttgcttttcctgtcatcttatgttgagaacaatttaattatatttcttgttaatattttagttatgccacaagatctttttctgctccctcatcctgattgacactatcctaaccatgtacctttagaggccaagtatgtacacttttggatgttgcctctgtttctgaaattcactgacaggtaattggtaagagaatgtactttcatgatattgaacctcgaggatgagattatttaaacttcttgtttacttgatattgacgatgcgttcagcttgaggagactgaaggctaatgaaagaatctgtgttaatcttgttgcagatttgctaaagctatttaatttgatttccttgtgatttcttttgcagggaaacttttgtgaatacattt

SEQ ID NO: 49600 - DNA, 497 bp, Ricinus communis
  Intron number 1 from transcript 28111.m000105 (locus 28111 .t000001) derived from phytozome v7.0 (chr-ID 28111; pos 2 5523 to 26019)
aaagaaatttacggtgaaaaatctggaaagcaaaggtaagaaaagggcaagacacaaacaaaaaatacaagaccaaaaaagcgtaaaaaaagaaaggagattagcaaaaatataaatctccaaatattccataaaaaaaaaaagtaaataaagataagcgtatactgtaatttcctaaaaaaaaaaaaagaaatagaaaaatctaaaggctcaattaacgaacttgataaagcttcttgcgtcttaaatggggtttgacggtgctttaaatagcgtttggagtgcgcgcggctaaccgacgttaagcaatgacttgctcttttttgcatgaattcaaacaatatggcgagtattctgatcaatcctgtttcggcttgaactctgcctctgttactacgttgtcaatagttaatttcaatgacgacatgcccacattcttcccttgattaaaccacctttcaggcattgtttcctcaatcagatcaaatatccttaaa

SEQ ID NO: 49601 - DNA, 868 bp, Ricinus communis
  Intron number 1 from transcript 28035.m000367 (locus 28035 .t000012) derived from phytozome v7.0 (chr-ID 28035; pos 2 50292 to 251159 reverse strand)
agcagcgttggatattggagtttcccattattcaggtatctcttttttttttcgttccccattattcaggtatttttttttatctcgttctttatatatatttatgttgctatatgttatcattttataatgaattaaggttagagttgttcttgttactgtgatttagataacttggtaatggattataaagtttagttattgatggaaatgttaaaactgaaatggaaaatgcatgaatgtggggtgttaaagttgccattgtttctaaagtgaataaccaatagaaagtgaatagcaacctaaccatgatggaagattaacaatcaaatactgcaaattgtttgtgctattttgatgttagtaatttttcagttggaagtgggctatgcaggccaatatctcagataataaactaaactaatcaaaagctgatgaatgcttttttatatctatctcattcagtttcatgattgagcatatattgcattcaattgggtttgcttctaagccatgttagtgaaaattatttcttactcctaactttgtaatcaaaagcattttcaaacttaataatgcaagctactatttgtgtatgatttttctttttctttttgttttgagttaaaactatgggctaaattggttagggtccttgttgattagctgtcttaacattttgctttctaggattgtacattacgatctaatatccttcttttttacatttactttttttcctggtcattttaatggctgggtgtaatttagtatattaatctatcagtttattcattcttcagttatagactcattactgtatattttcttttttggtcaacagcgtccccttttctacagctttaag

SEQ ID NO: 49602 - DNA, 335 bp, Ricinus communis
  Intron number 1 from transcript 29736.m002094 (locus 29736 .t000090) derived from phytozome v7.0 (chr-ID 29736; pos 6 36398 to 636732 reverse strand)
gcttgagttgtttggagaataggaggtttgacaaggtactgtctcctaattattgtttcttccaaaggaattcttggattagtctgtttggttgctgagaaaatgtatgaatggaagcaaaagaactaagaaaaaacaaaaagcttttcccttttgcttctgattcttttaagaagcattgacattattataaactttgactaggcccgtgagctctcgagtctcgggtttaaatctcggtcacgacccaattttccatacaagaaaaaataaattattgggatttctggtcttatatataattaatctaacaggtgaaagcagttcgggagacc

SEQ ID NO: 49603 - DNA, 684 bp, Ricinus communis
  Intron number 1 from transcript 29729.m002305 (locus 29729 .t000038) derived from phytozome v7.0 (chr-ID 29729; pos 2 25288 to 225971 reverse strand)
aatcctgaaacagatcatagcattaatccgaacacgtccaataaaataataacatttaattttaattttatatgtcagtttaagattaataagacaattaattttttaaaatataatattatcatattttattagataataataattttttccgatgtcattcaataaaaaaaataaatataaaggtgttacatagaaaaaattacattctaatatttaattattaaataatacttatactttactgaacgtcttatatattcgttttaattaaacatcaactttacaaagtttatttctcaattattggagataatggtctaataattgaaaatactcctaaaaataggtattgaaagactaataaaatctggtacaaagaaactaccagaaaaaaatgatagatttctgttgctattaactcgtagaccacctgctaataacaacctgagacttgaaggtcaaaacacccataatatcaggtttacctcccactctctttctctcttatttgcttttctttctgtgtaagaattcttgttttcttcttcttcttcttttttccatctcttttgatgttctttatttcccagttgcttgtgttctttctttatcttcttcctaatagcaataattatggtggccaatgttactttaacaatcgaccaaatggtctgcagaaaa

SEQ ID NO: 49604 - DNA, 942 bp, Ricinus communis
  Intron number 2 from transcript 29705.m000587 (locus 29705 .t000019) derived from phytozome v7.0 (chr-ID 29705; pos 3 47529 to 348470 reverse strand)
aatctgcacaggtgtttcagagcttttatttgaaaatgctcgcacatcgaatatttaagttgtatttggctcaaatcttatgttttattcatttcatttatagttgaatttctaatagaattcgtttacaaatcttttggtgtttgatatgctgtataatagatccagaatcaagtgtgaaattcaatttttatatttcagtttttcaaaagtactcttcatatatatatatgtattgcatataaatattatgtatgcaagttaagtattcttcctaaaagaaaaaaagatagttaaaatgagcgagcgagagggaggaagaaagagatagaaatagaaagagaggagagagaaataagaacttgaattaatagtacttttgtcataacaaaaagaaaacctcacatttgtagaattcgtttgaaagtcctatcaaaattgagaatttggtatgttataaccaattccatgaatctagtaagatagaattgcaaatggatttccatttataccgaacacactaaatttggaattagaaatgaattccaaaaacttatacccaatacaatgttagtatttaacttgatttgattaagaattaagaatcattttgctttatttattagacagaatatctcaagaaatttattttaattgtcattttctctgcagtcctttgactaatcttgatgtccattaggtaaaaatcattttgtgattgttactcactgattgttcctttcttgccattaaggcctttcttttctttttccccctttgtagctgtcatagtagaaatataaaaacgaaatgttaaagtacgttttaatttggatgtgtatttgctttaactggagaatcacaaatttgaagatgggattctcgtttttggtctcttcaactaattgatagattaactattccaggtaaaggaacttgaaa

SEQ ID NO: 49605 - DNA, 884 bp, Ricinus communis
  Intron number 3 from transcript 27647.m000182 (locus 27647 .t000009) derived from phytozome v7.0 (chr-ID 27647; pos 7 3487 to 74370 reverse strand)
caccaaagaagaggttttctgattttggtatgtctctagaaaaccatgctttctcttcagatcatgatgttgaaccaaagaatgggagattgtaatgagaagtgtgcttgtttttagactcaggatccaaattgaatctgccactgatttgacttattaacatgtcgaagttcacttctttcttgcttgaaacacatgttcattttaagcattggacatgttcaatagttcactttgttacttgatcaagttaggtatgagcttcatgaccttaaaacttgttaaaaatgtatgaaaagcaatactttctcaactaagatgcatgcttttgatctgttgtcgattgaaatttcctttagtaactatattgaaggggctaaatggagaaataattgataaggtggtattaagatatgaaatatcttcatgagccatttactacttgtgaatttggagttttgctattgctttagggtgtagtgagctctctgctaatggaaaatctcaattttgtgttactacaatggagacatggaaagaatggtacaagttgtttctttttatgatagtatggctaagtcaatgtactattttaattgaatcctaagcaatgaccataggatgataggaacaagagtggggatttctagtggctggtcgcatcttggaaatggtgtctttagaagcatctttatttcaacttaattatttggcatttttccttgcttgttaatctcaaagaaagagaaagttctatttatttactaggtactgccatgttatcatgtatcaaaactcatagttttattatactataattttcccgattattcactgaacattgtttttctttcatgtagcttcggtgcgtagggagatagcag

SEQ ID NO: 49606 - DNA, 399 bp, Ricinus communis
  Intron number 2 from transcript 27647.m000182 (locus 27647 .t000009) derived from phytozome v7.0 (chr-ID 27647; pos 7 4417 to 74815 reverse strand)
cgtagttgggagagattttttgcctcgtggatctggtaattcttggcctttcaatgttggtttttgacacaagaaatggaggaaagatactgtaaacaaacgttagttatgctaagtcaaaacagtaattcctttgatttttgttggttctaactaaaatttgaaataacacattcattttaacacttacttaagatgttataagctgtcaaatggagttaaggcaactaattcattgtgatctctcccttagtttcaagatggagtgatctgtatctggttgatttcattatgccacttgaaaacatacattttccttttctttgacatcactttgttattggtttaatgatcatcatcgtaggaattgttacccggaggccattggtgttgcaactt

SEQ ID NO: 49607 - DNA, 717 bp, Ricinus communis
  Intron number 1 from transcript 28833.m000158 (locus 28833 .t000007) derived from phytozome v7.0 (chr-ID 28833; pos 3 6727 to 37443)
gtcctatcattcctcaggtcaactcttttttccctctttgtattttcaaatattgagctggagaaatcaaattcttgtcctgattaatgctaatacatgcctaatttactcatattgtaaaatttcatgatttgatggtttttctttttgttaattttggattaaatgttggtaacgtggtttattgcttgatttcattggtgggttcattggctttgagtggaacatgtaggatagttatggattggcgcaaaatggtggggtttcctggaaatgtagttgaggtccagcagcataggatttaagtcttaatttctttttcttttctgtttaaaaccgggagaagatgactcaaacttgagaacttactcaaattgtcagattaaggatttgtttgtactcaacaaagttctcgtatcaattgagctaatgaatatgatctttaaaggttatctaattaataatattcatgtagtatttagacttgtcatgttttatgttaagaagttgatatggccggattgcttatagaagcattaaacagtctgtatctttggtaatttttcataatttgcatgtgaattagtgtctctcttctgtgttaggtggctagactttgtatgtttttctctacagatatgttctgaagaattttgtatggggactatgtactgtcatgttttcccttgacaaattatatttcattccaggtacacc

SEQ ID NO: 49608 - DNA, 918 bp, Ricinus communis
  Intron number 2 from transcript 29726.m003977 (locus 29726 .t000089) derived from phytozome v7.0 (chr-ID 29726; pos 5 40570 to 541487 reverse strand)
aaggaacattctttgccatatcaagtgatatcaaggtgagacttttctattgattttgaattttgttccattactacgcccgtttctcatatattctttatctccatatgttaatgagaaatgtgagaaagacaagtgaagtctctgaataattgtttcgggactgctagatttattgtcctctcatgtgaggtaaatttacttaatcatgctaatgaggtaataaccaaagcatttaatggtgactgaattgattataacacaagtcttttatgtacttaagtttaattatggtactattttggtatgattcaggtggtgatgttaatgtatgttatctgactcataataataatatcatcccatttcgtgttcatgatttcaagtatgagacagcacatgtctggtggaagatacaattggttatgttttcttgtgttattaacttctggagcttcttctttcagactgcaactcaattgtggcattcattgaccacagaatagtgctgcttgattgaaaatctagactgaaaaaaatgattgtaataaaaaaatattttagaatagaataatttagtgattgtcgctttggtgaatgtggtggttactgcatatttggcacttaaaagggaccttatattgtccgtataatgtgtgcatgcaaacataatctcattacatactgcaggatcaccttactggttgttacaagttgtcttgtaatttgttctttgtttatctctggtttagttaatcataactatttttctgttattttttcttatctagttgcctattgtacttctgtatgtcttattgtcgcacggtatagttgagattcttcttttttgaacttgttaatggggatatatctctctctggtagttatttgacaaaatttttttattcaagggcc

SEQ ID NO: 49609 - DNA, 670 bp, Ricinus communis
  Intron number 1 from transcript 29758.m000658 (locus 29758 .t000021) derived from phytozome v7.0 (chr-ID 29758; pos 2 12302 to 212971)
ccgccaatttcgctacttgctctcgtcttgtcaaagtaaacttatagctcaactctgcaatttaatttctcaattttgcgttttttactttattattattatttttaactgggtactgtgaactttgagtttcgagtaattgtggagaattgctctacttcttgaacatgttcgtaaatttgttctttactcggtaaaaacagtaaatttataatttggaatttttttggttctgttgttagaaatatatttctcttagaatttaggctgtaacaacatcgagtttggaaagtcgagaaaatgtaaaaatttgttagaatttaatttaattctatttagttcaatttctcatgtttggaaaaatcataggtgtaagaattcaattctttttcaatttaaaaaagaaaaacacaaagcattttggaagaaacgaaattatgtaaaaaagttaacgtgatttggcaacaattcaatcccatttgtaaacgatctgttccagacaaggcttagtttgttgcatgagagtattttgatgacatgctattactatattgtattaactttgattgttgcactgttgttaaagcttacaatttttttgaattttatttttctttttgtttgcaattatatttaaaaaggaagcagcagctgcaggtgcaaaattgct

SEQ ID NO: 49610 - DNA, 511 bp, Ricinus communis
  Intron number 1 from transcript 29765.m000753 (locus 29765 .t000035) derived from phytozome v7.0 (chr-ID 29765; pos 3 25209 to 325719)
caaaggcctctctctgtaagttcttgttaatgcccagaagtctctacttttttctcttctagtgaatggtttttatggttgatatgtcggattatcaaattgcctgaaattttgattctttagtgaaattgctgacatgtgtatgctaaagtttgggtctttttatttgatagtggaaaaaatcatcatgggccgagaaagttataagtaggtatgatatagttgaatttcaagtttgaactttgtttttggtttcgttttggacactgtgtcatgtgattctgttacgatagatctctgtggaattctacaattggttatgctgacaattcaatcttctgagtgaattttgagaaagcattgctagttgttattcattcattccttccttcctgtgttaattgagattctgaataaagcaccagcatcaattttgtattttggaaatgtcatcttaattgctatttcttgctcagatactgttcgggtgtgttgctcagtactccattat

SEQ ID NO: 49611 - DNA, 198 bp, Ricinus communis
  Intron number 1 from transcript 28359.m000274 (locus 28359 .t000002) derived from phytozome v7.0 (chr-ID 28359; pos 9 981 to 10178)
aggttgcttctggaggtgggactaacactcgtaaggtacattaattaatgatcaaaattcttgctggcatctcttcttgtttttttcttattttttttctgggatcaggtttctgactgttctttcttttctgggtatgttaaaaaaaaataaaactttgaaggtggcagattgggcaactatattgaagcttgcatt

SEQ ID NO: 49612 - DNA, 1044 bp, Ricinus communis
  Intron number 2 from transcript 29693.m001990 (locus 29693 .t000028) derived from phytozome v7.0 (chr-ID 29693; pos 2 41279 to 242322 reverse strand)
gatctattaaccatttaaccaagtgcattgctgaggtctgtacttggcatgtttttgtacttttgagtctgacctctgatcgctgaaaacttgcaatatgttcttttcttattgctattttctatataatatatggttagtgtttaatgatcatactctatatgttcttttttttttctctctccttcaagcaagtatccaagtatatgatatttaatgctccccatttgctgttcttatattacacttcaacaggatagagctaagttgttaataataagcttcatgtccggaaaaccgattcgctttgtggaacatctcactaactgctctatagttccataatttctaacatatgagcttgtatgcaaactgtgtgttttagcttttatttcatttgttcacaattttaagaaacggagttagatacactgaaactatgcaatcttttgctcacactatgcaggtgctctcttgctttttaacaactaaaagtagaaattatttgaaaatgttatcatggaaataattacttacattttaacaagtaacaaagaaattagtgcatcattgcttccgtttattcatactctctcttctatgtcttatttactcaccatatcattttctttccttttttgtttcttttgattttttcatctgtcttcaatatttttctgaatgaaatacggtagtggggataattcacactgcaggatactgtgaattgcttgtcattgtgtgtgatatgcattcgagcgttaaagacatcatattcatccccaaataggaatcaactattgacccattctttttcgaatgcttgtacaattgttggaggttcatttgcttactattgcacattattttgatcacacctgatagccttttgaaatttgtgagcttgcaaatgttaggaagagaacattctactgctgtatgattggcatattcttttagattgactgtcttgtattctgatgtttggatctggtactttttgcttacttttcattggttctggtttaaggtaacaaatacgcc

SEQ ID NO: 49613 - DNA, 757 bp, Ricinus communis
  Intron number 1 from transcript 29226.m000077 (locus 29226 .t000001) derived from phytozome v7.0 (chr-ID 29226; pos 3 156 to 3912)
agctgtttaatcgctggacgtttgaggacgttcaggttttttttctttttaataattaatatctcttttattcactttaagtatatctttttttgcttctgattgattattgaaggtaattataattgtctgtgtcgtgcatatttgatctgctgagggtttaagtaatgatttatctgttaaattagagttaataatcaatttatgaaacatcatttatgttttcatatgcgtatggtctcacttggtgcacttcttcgcgcatggaggaatgcacatgcccatgcgtataacatctatgtcgtctctagatgttttgttctgttatataaccatggtgtgtgtatttggtttatttattctgataattaaccaagttttgggtcatagcagtataagtctggccatcgcgtttggtccttttatcttctttttgtaatttcatgccttttgggtctttatttcttcttgtaatttcatgcctcatggcagcataaatctatatctttatgctttgcaaattccagttctattgcttttcttactggttatggttaggcagtcaactgaattaggaatctacttgatcagagtatatctcctatgattctatattttttatttgattaagtttttacggttcttgtatgtaagcatataaacattgtcttatttgaagtgataattatttgttattagttagaacttttaatgttagccatttctataattaattgctttattgtggatcaggtca

SEQ ID NO: 49614 - DNA, 874 bp, Ricinus communis
  Intron number 2 from transcript 29726.m004035 (locus 29726 .t000147) derived from phytozome v7.0 (chr-ID 29726; pos 8 57325 to 858198 reverse strand)
agtctaggcgcacgctgaattccaggtactgtttgtaatactgttattatctttactcttatttattcacatgtttatgtttggaatttaatatttttgaaagaaatgaaatcattctaaaacaatccaccaaaaacaaccatgctaagaattcaacccgattgacagttgtagcaaaaatttctcaattcaggttgcattcggcttggcatttattggatggatgtatgcagactgtggggttaggacatcttgagccagggaaaggctatcattttcctgatgggtatctgttctacttaaccttcctgtttgcttttctttttgctctttgaatagcctcttctttcatttacaggcaatatttaacaaccttcaaaattgaccacctcttatacatgcaaatgtttctttcacctttagtttagtctattaatagtcacataggtgccaattcaaaatatgggtcaagtcggcatgattcatatggagtagtctttctgtagtttctgtacggcaaggaatttatatggttcgttttaggtcctttaattttagcattatctgatatttgtgtttctttctttctttctttctcttctttgtaacatttgggcgtggggaaggacaagtttatcactcaattcatgtggtcaattgttgaacttctagaatgttcatgttcttttactctacttttttgaaggaaagattcacttttatcactagctaaataatctaaatgcaaggttccttttacaaacttctacatgaggttcacagatttcattttatcaggccatgtgttaaatataaaggcactgttcctcaaaatgaattgcatagcaagcaaaagaaatagaggcagaagcta

SEQ ID NO: 49615 - DNA, 510 bp, Ricinus communis
  Intron number 1 from transcript 29739.m003711 (locus 29739 .t000147) derived from phytozome v7.0 (chr-ID 29739; pos 9 43716 to 944225 reverse strand)
ccatcctagacttcatcatcgccttcctcgttctggtaatttccttttttctttttctttttttttttttgctcttgatttgattttaatttctacttggattttgattccatgttgtttattttcttttttgcattgtgaaatttccaatcttgattgcaaatattaatcttcacattttaattataggcttgtttagctctgttctacctacgctagtagcttatttatctgatatttggatgctttatgattgcattactaatataaaagcttagattttttgccacaaaaatgtagccagtttaagttgcatgaggctttcatcctacatcttgatgcttttgttatgcgcatgaagtgaaaaagattctagcgttgctatgaaaatcatgtttttcttttcctctctctcatgaaataattgttgatggacttactatctaatgcgtgtatgacatagtcacaccatttgtggttttatctttattttaatttgcaggggaagca

SEQ ID NO: 49616 - DNA, 755 bp, Ricinus communis
  Intron number 1 from transcript 28752.m000324 (locus 28752 .t000004) derived from phytozome v7.0 (chr-ID 28752; pos 3 1239 to 31993)
tcgggtttacttaatgtattcattcttttctatactactagctttatatttgcacaattctatacaacttagtgtaggaacatcagatctttgttttgattctaaagcagttattaattccacttactctgaaagaacatcgcagttttattttttatttttaatttcttaggttgtgtttagagaagtagtcagttaagatgaaaggtttagttgtatgtatatgtttacttcccaacatataaaatgtctttgattggatagatttgttgcgtgtggatgaaattcatgatgttgaagggttttctcttgaatttaatttaaaactgcaaatcgtttgtaatttgaaatgcattacatagtattcggtttaaacaaaagttttccttttacctttacaatcataaatcttcaattataaaatctgagctaaaagatctaaaaggtcttcgatttcaaatcttttttttccaaatatgcccttgcttatccatcagattttcaagtaatctagtttagaagatctaaatgtttaaccatttaagatctttaatattataggttattgcatatcctgttagatttgatagatgtttagctatctttctatcctttgtcgtttatttcatttctgttatcattttttttagagttttaaatcaattattgggttttgggtcagtagttacctatggttctttttttatctgtttgttataaggtttaatgtgcgttctgcttgcagtcttcgctaa

SEQ ID NO: 49617 - DNA, 989 bp, Ricinus communis
  Intron number 2 from transcript 29688.m000259 (locus 29688 .t000006) derived from phytozome v7.0 (chr-ID 29688; pos 4 7582 to 48570)
ataaaagccctttccagagaacatttgttaatcaggtaatttctttatcacttacaagaactcaatactgcaattagaatttattatgtcaaatatgagcaattgtagttctgtagagatgttaactttttaatttatttcatttttaaaaaatacatgcaattctgcaatcattattgttactaaataatactaaaataagaaaaatgaatgaagtgttcttctggtgtgcccttcgtttgttaagttaaattcacactgaagtgtgattatttcagtcttgttttactgtagaactaaaatcaattaaacctttttgtggtgttttattcaactgaattccgtttagttaaatctcatgtgatcgaaatccctgttgctagaattcaattcttttaacttaatttgtcttttttgagaaaaaaatgcattttgaaagaaaggtaatcatgccaaaatgtgacatgattttccaagaattcaaattatttactcacaaggcttttgtctcgttcaccgtttcctttccccttgatgctaatattgcttgaactaaagttatggatcaaagtgggtccaagatggaggcattaatcatagatgtgagtactgagagaaactgtgagtaaaccggaagcctaacaacagcttgtccaagaatatcctttttgtattcgccaactacctaattgagttccatcaattgggacaggccatctcaatcaattatattagtacaggaagccaaagtacagaaggatgagatagagagaagtttccccacttgctttcgacaattaatgaattatcaacttttttttgtgcaactgcatgaatttaacttcgataactgaatgccatttctaatggtcgtgagttgtatttttccactgttgacagtaatattgcaggtgctgatcagtgattatcattcacttaagctgttttaatgttttgagagattttcataggtaaagcgctgcggagag

SEQ ID NO: 49618 - DNA, 783 bp, Ricinus communis
  Intron number 1 from transcript 29707.m000132 (locus 29707 .t000002) derived from phytozome v7.0 (chr-ID 29707; pos 5 298 to 6080)
atccttcaatttttacctgtaattttttcaatcaggtatgacttttatctttttaaagaaaaattcttttgaataatccagttcatttcatgctaatgcatgtggcttttgggaatcttcttgttcatgatgctgatagaactccaaaatgtagattatttgcataaatttttaagtttccatactcacttttcagtttcttgattattgatttcaagattttgtcaaaccatcttactagtttcaataggaattccacttattgctaatagactggaaaaacctacaaccttttatttttttgaagagatttagaaagaatagggtttctgtagcgagatgcattgagatgatcaagggcctgtgtggcataagtagttgttttagttaccctggggttttcaagatggatacattgtaagattcctcgggctgccattttactgactatatcatttcgattgatcaaagtagagtggactaaaatccttatcctctttatatcaagtagaataaaaacagaacgtcccttgaagaaagaaatagaagtgaagcaaacataaatagatggttaaaatccttacaaatttactaggaaatgtcatttatccactttcttttttaaaaggaagcaccggtttcagagttgatatgatttcagattgaatttctttacttcttttctattttcctttctctatttgagttctagttcctattgtctgaataatgtatatatttgtggattcttgttactgaactgcaggagggatattggctttc

SEQ ID NO: 49619 - DNA, 525 bp, Ricinus communis
  Intron number 2 from transcript 29707.m000132 (locus 29707 .t000002) derived from phytozome v7.0 (chr-ID 29707; pos 6 138 to 6662)
atagtgagaattctctttatttctttggtatttttatcaagctctacttttggatttttatttgaggatcttgaaatgcatttatgaagatcatttacagtaataaattttttctaatagatgatgaactgatggaaattgtttttcttgttttgataaagctaagcaagattagcctaataaaagacaagaaaagcttttccccttaaaaactttagttaaattcaaaatattttgaagagataccctctcagaacctgcaacccatgaaatatgcattgaaacacctttttatctttaatacacataatagcataacagaatgcaaatactattataatataaatgttattgtctgatgtatgaggtatgaaacctgtaatgatgcattgaaatgcatgattgactaacttaaatgggaaaaaaaaaatttgcagtttctttgagaatgtgttggacttattatcctgtatattaattccttgaactaaacccactttcatcttaatttttgcattctaggcc

SEQ ID NO: 49620 - DNA, 639 bp, Ricinus communis
  Intron number 1 from transcript 29732.m000314 (locus 29732 .t000007) derived from phytozome v7.0 (chr-ID 29732; pos 4 5634 to 46272)
accacacgcaccatctctcttccctttcaccataggtatcattacacacactctctctctctcctttcaaaattgaatcttcgatatctccgagattccactgcttttgctcattcagtacatacgcattgtttgattctatacctattttcatttgctgatctagctttctctctcttgacattcacctgtgtttggttgctaagtaagcttaggggaagtccgatcacaatttttgaatccttctattctatttcttttttttttcttaccaaccaaacagatcttttgaattttatgctctgtttggtactctatataatttaagggggaaagaaaagcattatttatttcttttttattgcagtatagaaagaagaatatgtagttagttaattcagctacttttgtggagcgattatttgtaaccgccttgcggtaaatttgctgaaacccaaaagcgtgattatttagataagcaccatttccgtgttcaacagaagaacactgataaagcttgtgcttgactattagaatccatgtgctatgtgctgtctttttcgtaattggattatactgagcaaagagtcactgtttttttttttattttgttgcaggtttttgtatctgcactgatcc

SEQ ID NO: 49621 - DNA, 891 bp, Ricinus communis
  Intron number 1 from transcript 29703.m001549 (locus 29703 .t000085) derived from phytozome v7.0 (chr-ID 29703; pos 4 48156 to 449046 reverse strand)
tagtgtttgttccagagcagaccagagtccttaaggtaaaggttcgagctatttttattatttaaatttctgttaatttggatttatcttttcttggttttaattaatggttatatagagttgactgtgaatttcacactgcgttatctgttagatttccacctctgctgcctcgtagttatggtacttagtttgttctgttatattgattcgtgttgctaactatacacttaccatttctgatgacgatgttctgaaatttaagatttatgataagaaagaggcaactaacgctaactatttattgcacagttccaaaaatatgcaatctgcctatgactggcattttatttttattttttaaaagttttttaagggagttgtcaagtacacttgtgagctttttgggcctgcagccaagaagttgcaggaccgtctcgagttcctctccatgacccactttggctggacctcatatgggtaaatgatctttctgttttactgttagtattagtgcattctgaaatcctatttgtgatatttattaacttgattagtatcagttacttcagttaacggttttcattctcgagttattatgtgtatggttggtaaatttatccatgcatcaattgttggttaatttatcactgtttatatttgaattatcttaccctatcctattcaatttggagaaattaggagcatattaagatgattttatcatattctgggagaggccgtgattctgtgtatagtttatgatcatcaaattgataataagatggttgtaactccttgttgtctttgcatctcattatgaactgtatttattcagtagcaaatgatgtcaaatctttggtttatgcaggactcacagccgtattttcc

SEQ ID NO: 49622 - DNA, 824 bp, Ricinus communis
  Intron number 2 from transcript 29048.m000066 (locus 29048 .t000004) derived from phytozome v7.0 (chr-ID 29048; pos 1 6687 to 17510 reverse strand)
agatttgtgggaaagaagttcctcggggatactgggtaggtgcttttcttcacttcttcctcgattcttctgggtgccagtgctttgcttatcactttgatgatatgtactgtttaggcatattagtttactgcttggatttctttccccttgttattctggtgttgaactaatagattcaaatgaatgtatatgatgccacgatttagatgctctaattgcatttagttcatgatatatttgcttttactattgttcaagttcaagaagaattatttgttgtagttttgtcctttcactataaactcttagtcatgtttctatgtcttttctggttgccattatctgtagagaagttgggcatgagatttaatgttaatttatttagtttaaaaataatgaaggcagctgccaaagatctccagaacctttaataaatcaatgactgaattcattgcatcccaagtgtccatcattaattcattgataaaaatgcatttatgcttattttcctcaaagctttcatactcttgcggttactgtcatctttttattggtctattttagagctctttattttctctaaatttttttattgtgttatggcctttctgtcccatttatgcatccaaaatatttgcaaatgtgtgactagtatctgttaaactgatatttggttctgccttttattattttgggcagcatagttgatattaaacccctgtgataaatctaattatggcttgctctttgttatttttacttttcataagctttatttttttttcatcttatttactatagctctctgtgtgcctttccag

SEQ ID NO: 49623 - DNA, 894 bp, Ricinus communis
  Intron number 1 from transcript 29773.m000290 (locus 29773 .t000014) derived from phytozome v7.0 (chr-ID 29773; pos 1 43528 to 144421 reverse strand)
tttgtcaagctttgggtgcttttcttgataaaaaggtagctcgtttgtttgttaaatagatcttaatttgatattgagctttacagttttaataattattgactgttttatggcattacttccagtcattttgtgtgattccatatatctataattgggcataatcaagtatcattatgaagtcttgcttgatgtaagtagaagtccatggttgttctatttgtgaagatagatgacttcatagtaggtcttgaagagcctacaaatttttacattcttcaggagaattgatcttaattaaagtgattgttctcctattatttcactttaattttgaaatgctgatcaaatttttcatccgagtaagatatttggttttcttccatttgattaggttatcttgcttaatattattacattacctcttttggtgtctagaattaccgaccttaaaaaaactaccgaccttaaatactcattctgtcaattacgaaatccgtaaaatttgcttcctagatctgtaatgaataaatacatcattttctcatcagatgcattgactgtatttagttagttacataactaaaggtataatagtccacacttcttcaatgtacttttttgtgcttggtttcttttctagataagcatgttaagctggtttagatacatggaactttgtttacagttggcagttgctttctgtattttctttgcgtatttggtataaatggtttactccctttgtgagagttgcaaggatacatatattatgatgttctaacacaaagatttgctagcttttgttatacaaagttggaactagtctaagagaaattctctctgtttgtgatgttaggttgtcacctgccttcgtcagccatcacaagggtc

SEQ ID NO: 49624 - DNA, 802 bp, Ricinus communis
  Intron number 3 from transcript 29696.m000105 (locus 29696 .t000005) derived from phytozome v7.0 (chr-ID 29696; pos 6 4237 to 65038 reverse strand)
cgttaaagtatattattgatactctgccgaaaaaggtaagtttctcaagaactgtatcataaattttattttctctgcttagaacatggtcctttgttttaggatttttccattctaggcatccgtgttacttctgcgagtaacattagtctgttggcaagttttagatgtctacttggtcagtgggttttttactttgcaaagcattagagaagagaaaattttaaatggcataaaatttgccttgggtgcataaacattgtgtatccaagttgttttgataatttccttagctcctaatgaaatgactagtccaagtattttgtgtttggtcagaagtgagcatggatgctggatgatgcttcccagttggaagccaggttttcattgcaaactttggatgacataaaatattatacattaaacaatgatataattttaaaatgcccaatcaggttcctttgtaagggtaatttggatattgttctgtccatcaacattattttcaagttttcaggcctaagaatgtcttcatgcaaaaaattgctaaaggacaagactgtatatttgaatttcccttctccaaaatgccgcttccataggattttgtggcagcctttttaaaaataaaaaaaaaaaaattaactgtttaatgagactgaggccttgatactttgaatccaagaattgccgttgatttctgtaccttaatgagcttgacacagaaatactaaagtttgaatattgatttcttttgttctcccttttcaaatttttggttgtaaggtgtttgagattgacg

SEQ ID NO: 49625 - DNA, 288 bp, Ricinus communis
  Intron number 1 from transcript 29613.m000365 (locus 29613 .t000008) derived from phytozome v7.0 (chr-ID 29613; pos 5 3844 to 54131 reverse strand)
aaaggaaagaaagaaagaacccctgttcatcgaaggtaatgtcattcatttttagttatttttttttgtttctagtctgccggtgaatcagaaataagcagttatgtattgtataatcatatctggcttatggaattgagataatatgtctgcatattaacatcatttgcattctgatgtcaaaagggtgcatcaaatggattttatgctcttcgaagattgtaccctttttcttttgtccattttgatatagagttgttggcatttctgtggcagacataacgagaa

SEQ ID NO: 49626 - DNA, 667 bp, Ricinus communis
  Intron number 1 from transcript 29609.m000601 (locus 29609 .t000028) derived from phytozome v7.0 (chr-ID 29609; pos 2 07446 to 208112 reverse strand)
cagaggtagaaaattaaacatgtcattatgggttcatttttcaattagatgtggtgattttatgcctgttctttctttcaatcatcatgttttctttcatgtaataaattgagcttttattccaaagaaagaaggccacctactggcttagaggacatgcatactaagcacaatttattagaagaaaaatataaaaaaatatctattttttttgttttcttaacaaacttataattttttttaaaattttttatttttattgtgttaaatataaaaactaaaaataaaaataattgagaatcaactgaaaagcaactaacactataaacggatggagggtaatttaaaagaaagagaagtgaatagataggaaatagtttttcgttatcccattgtagaaattgaatttaattacatcccaatttaatgcgtaaaaaatttcaactcataataaaaaattagaatataattaattattatttttttatttctataattataataataaaattcaaaattaattaattctcctccctttcctttaatggatatttctttgtaactatattttttcttctttcccttcgactccctttccttcccttcccttcccctccctttccaatttattacgtaaaattctttctcttttaatgggggctcaggt

SEQ ID NO: 49627 - DNA, 831 bp, Ricinus communis
  Intron number 1 from transcript 29346.m000113 (locus 29346 .t000002) derived from phytozome v7.0 (chr-ID 29346; pos 2 1905 to 22735 reverse strand)
tggtcaggttcgagttcttgttgctggcgattcaggtattttaacttttgattttccttttttctttaacttgttcagcatgtattcttttaatccctatgatttctttgggttttggttccttccttttagtttgttatttctctgtttgtatttgtaatgtttattattgcttgtggaatgagttacttgtgacaaacttataaatatggaaggatactagtatattactgaagtaactatgtgggaattggaaggtgacgttgtagagttttcatgcatgcaccactactggactgaaagtctcatttgccatcattgattttattccatgtgattcattcataagtgtaaaattcactcagatgcagtagataattgacagtggaaatagtcctaaatagataaggaaatttgtggggtttcgagttgaaaccctattacatcattgagggagaagactcgtagtgtcattaattggatttgagatctgaggaaagttaaggtagagcattagtttatctaagaatcaaagtaaaagctggtcttttgcattgttgtaatgccttattttttcaatttctcaatggcttaattttgttaagtaatatgtgctgtaagtctcagaaatcttctacaatcttgatgtgcaagcttgattgcagcaatgctgattatatgtagtcttgtttgttgataaatacttgtccatataaaagtcatttccttctttttccctctcatgtctcctatatttgacatcgaacgtcactttttaatcttaatctttctttaggtgtcgggaaaacttctcttgttcatcttattgtc

SEQ ID NO: 49628 - DNA, 732 bp, Ricinus communis
  Intron number 1 from transcript 29669.m000820 (locus 29669 .t000029) derived from phytozome v7.0 (chr-ID 29669; pos 1 81904 to 182635)
agaaacttgtcagaagatcgctagacttgcaaaacgtaagctgtcctttagtctatatttgcattgctttattaaccataagcttttttctctttctcattttcaagaaatgaatcaagaagagtttggagctgcttttgtatagcaagattttaagatgttaatcaagaatgaccttgattttttgaattcaagatttagaattactggttagtaattatgaggttattgggatgttgatggtgttagttttgataagctattaagcactagaaattttttaagtactttgatgcatcagtgaagcaaatttgagctccatatatttcgcgaaaatgactgtttgcagaaagtctgtaaagcccagaaaatgacatccctcggcttagttttctcattgatcaggaaaatattttctgtacggtagtcttgtcgcaagcactgaagacaggaaaatgtttcctgataagtgttttccactaaacaaatggagccttaattatcattgtttaaatgcctgttgcttctttatttagcattaaggccatttaaatgcccattttgcttttgattattctgttgaatgacaaaaaaaactgagttcaagtatgttattatcatttttgaaattgggattaagatcatcttagaatgtagtggctagatgatgttatgctgactctggcttttggtttgacgttatgtgaatgtgcagttgcaaaaaggtcatcg

SEQ ID NO: 49629 - DNA, 432 bp, Ricinus communis
  Intron number 1 from transcript 29703.m001532 (locus 29703 .t000068) derived from phytozome v7.0 (chr-ID 29703; pos 3 43747 to 344178 reverse strand)
ttgtccaaactcactaccacacctcattcttttcggtagtactgaagtagctgttctactcacacacacatatatatacagggaattccattctcactattgatatattatggattgaaggatgccaattgccacctcagtaacctaggtgatagaaatctttctccaattcttttttcctcatctggattcttttcttttagttgctgtgtttttttgaattttcattttaagtgaaggttatatatttgaaaaatgagtgttagtatgcgtgtctaatggtatgctggtttagctcactggctgcaagtaatatgtttgttgttgtgttttgtattccaggttgatatgctgagtttccttattgatcaatctcctttttttttttttgatacagggtaaagctttgccccattgtccaccactgtctct

SEQ ID NO: 49630 - DNA, 1054 bp, Ricinus communis
  Intron number 1 from transcript 29805.m001472 (locus 29805 .t000003) derived from phytozome v7.0 (chr-ID 29805; pos 9 937 to 10990 reverse strand)
agttctgtagcagcgatcttgaagtttgtaagttttcttcttttttttgttttatttgtttgtttgatttaattttggtggatttgttgttttttataatgaaaaattggttttttctttttcttagctaatgcattgtctaggacttgaattaattgattgattgaattatgggataagcaatggatcacatctaaatggactaggattacatgatctgatattagactgaatcattttccaatttatattgaactttgcaaaatcaatatcagttttcatgtaatttattttctttcaagatgccttttcatttttcaagttgaaagaattgaattcttagcaaccgtgagctttacaagcatggtaattgactaaatcaatatcaagtgaattgaattttgacgtttgaaggagacagaaaacatctagacagttcgttgatatgaaatggattattgttggagagctatagacctctcctagttggaaaagtacttgatatgataaactgttggacatgattgagctcacatgttagcattgggtcattatatgttgaaggcgtatttaatctagagtttggtcctaatttaaaaaattaaaggacaaaaaagaaacatttatttttccctccctatatgttcaatgtaatagctttaagcttttctttaggttcagcaactttgctggctttgtttcattatgtgctattcacccatttgctttgatgcaatcataatattgagaaaattaggtagattttaaaattgtatctctgttaagaatcctcatcatctttttggatggattagatcatgtgtttggatggatgttgacatggagaaccagtttcaaaaggattgatagatatgcagatgaagttggcagcattactgtgcaatgctaggttcttaaattgcatatatagctgacttgttgaaaattgttttatgagtattgattatgatcatggctatcagttcataacatattcattgatgtaatgattttgctaggtcttcttggaagtgttgctccttgtgtgctgtat

SEQ ID NO: 49631 - DNA, 923 bp, Ricinus communis
  Intron number 2 from transcript 29610.m000392 (locus 29610 .t000007) derived from phytozome v7.0 (chr-ID 29610; pos 4 0890 to 41812 reverse strand)
gaggcccacccaggcccctccgccgttttcttcaggtaaatctatttgaaatcctgaaaactttgcattacgataatgtgattattatgataaattattagacaagtccttgaaaaacattcactaatttgagatctttgcaaattttctttagaggagggaggaagggaatggggtatgaattccacattgatcttaatcaagtaatattactgtgggacctgggcaccaagattatcgggttgtaaatttgcccttgcccactaagttgttgatcttgattatataagtcaacaatcttgatacagtcaaaaatagctcataaaaattcaacatatttggtggttcttattggctctagcaaaattaaaacccaataagtcaggcctgttagctaaaatgcatcattaaggtactaattggttttgttttattgagctgtttaatttatattttattttttataattaaattaaactattaatcaaaacaaaaatatcaaaatacaaaatctcaataaagttgaaaattttattgatcaagccttttgaaaatcttatttgatcaggccttctttaatggaggcatcttcaaggtctagagttgcataaacatacataatcctgaaccatttagagggtatttgagatttatgctgagtgtttattttataaactgtttttattaaattcctgaaccatttagagggtatttgagatttatgctgagtgtttattttataaactgtttttattaaatttacttggagaaaaagcattcatccttttggaaaagcagaattagcattcatagtccaaataaatagacttataatttctttctccatttttaaagaaagttgtaataagcctgaatcaaattcaacagggtcttgatccaaagtccacagctaacttattctc

SEQ ID NO: 49632 - DNA, 725 bp, Ricinus communis
  Intron number 3 from transcript 28525.m000264 (locus 28525 .t000005) derived from phytozome v7.0 (chr-ID 28525; pos 6 7268 to 67992 reverse strand)
gtatctggtggtggtgctgctgttgctccgtctaggtatagtttaaaatgtttctatacactttctgatatagacttttaaatcagtcgacttttcatataaagttttgtgcttcaattgttatttttctaattggactgttaaaaatatagcaagtctgacactttgaactacatcctctttgcaatgtatttatgatggtggtgaaatgccttgttttgctatactatcacttgttgagcaagtcgattgattttattaagtaaagcataatagacagatatgcagacacatgtcttcattgggtttttgtggtattaaagttagaaaatgccacaatggcacagaatagagtctggcatgagctattgttgcatgtcaaatgaagatgctaaagagtgtgggtaatcgattttgagttatcctgtcaagctcctttgagtgataatttcatgcattagctccttctatgtagtggaattctgatggatgcaatgctttcattatctattattgaagatattttcatttcctctctttgtagtggtgtcttctctctaattatgtggttatattcctcgcctttatcagcttttgttcaacagccattattgcttaaatgcgcaggcatgcatggcaagcctcacaaaattttatgcaaatgttatctattccttggctttataatctaaattttatgttgcaatatttcagtgcaccagcaa

SEQ ID NO: 49633 - DNA, 631 bp, Ricinus communis
  Intron number 1 from transcript 29603.m000533 (locus 29603 .t000025) derived from phytozome v7.0 (chr-ID 29603; pos 1 62435 to 163065)
aggtataagtgttttttcttttgttgaggaaaagaaaaaagaaaattattcgagaaacgaaaaaaaccttagctccctaaaccagaacacaagacataacacaaaacacagagccaaacgttcaacgaaagaaagttagaaattagacacttgatccattcttgtttcaagagagagaattaatttctttcttttatttttatttttttttcttatcaaactgtgtgagcttttcatctctctctcttagtgcgtttgttaatttattctcttctctctgcttaattgattctattatgtgattttgcatctgttctttgttctttctattaagatcatttctgggtcgttgatctttctaaactaatcttcatcgccttctcttttcttttctttctctcttttttgattccattaccatattgcatctaattctccctctcgtcatgactacttcttcctttctttgctaattgtcatcatctttctgtcaccaaaacctgagagcatagctactagcctgcacaagaacccctgtctttgactttgcgatcttctttaattcctctgaagacgtgaacaaaaaccattgcaagaacctcatcttcctcttcttctccacttctctcat

SEQ ID NO: 49634 - DNA, 747 bp, Ricinus communis
  Intron number 2 from transcript 28320.m001110 (locus 28320 .t000037) derived from phytozome v7.0 (chr-ID 28320; pos 2 17530 to 218276)
ggggagctcccatagtacaccaggtttaacggttacttatggtttaatgagttttttttttcctttgttgtttctggctttttttttattagtgatttctgtttatcttctggtcttaattttgattttttttttttatttggttgcatttggttacttgtttatgctggcattaacaaaataaagaagcatgtgttctttttggttttgggaagtatgctttgtgattttggtctttgtgaaaatggacaaaaattatacatggaatgattcagcttgtgtatattactcttcattgatacatgtgtaacactgtttattagtctttgatgggttccaaatgaagggttgttatgcacttggtagcaccacacctcaaaagctagccattgatatgggagagcccaagttcattaaatccctcattgaaatcccacacttttgatgtgtgatccaagtcccacaccttgccgactaggatcacaactggcattcacccccctcattttaaacagttgtgtgaaaaagtgcaaggtattttgaatgaattaagtcatgcaaaaaaattctgattttccaagaatgtaatttttacaaaacaagctcataatgttacattcctattgtgttaatgtgctattcaaatattttcttatgattctgaggatgctatatttacaaaccagatgtttgatcttctaacgttttgcagtttcgcaatttggagaagggtgttgacatattagt

SEQ ID NO: 49635 - DNA, 232 bp, Ricinus communis
  Intron number 4 from transcript 29613.m000364 (locus 29613 .t000007) derived from phytozome v7.0 (chr-ID 29613; pos 4 7164 to 47395)
ctaaagtggagcagcttacttcttttcctgaagtacagtcgtggtttctttctttctttccttttttcttctcatttgagatgcttgtctaacctaaatttctcttgcatattgttgaaaacttcaaaacattaaagtgaatgtagcaaagagcattgtctgacatcttctttcagggtattttgatactgttggacgctgataatagttttattaccttgttataagcttg

SEQ ID NO: 49636 - DNA, 511 bp, Ricinus communis
  Intron number 1 from transcript 29637.m000750 (locus 29637 .t000028) derived from phytozome v7.0 (chr-ID 29637; pos 2 17082 to 217592)
agaaagccttccagtgggcttccttctttgaacatgtaagctatttcttttaatcgcatcctttctactcttttgttttatctggtttgttctgtgtatcttttatcgaaatacgttaatgttttgactctttagtggaaaaaaagaaactctgagaagaattcaatttaattgaattctattatcaatttatcatgtctggaaagctccttgttgctagaattggtttctctcaacttggaaaaaagaataccatttgcaaagaaatgaaaatatgccaaaatttacatgattttgcaagagttcaattgaatcctggcgcatgatttactccaaagaaggccccattaagtaagattggtgtgtacgagctggcagatttttcacttattctcctatgcggtttagtttcattgctaaatttatgtgatattacctttagaaatagtttttctttggcgatggcactattgaaagttgtcttcacgataatgtttaggtgcttgggcaa

SEQ ID NO: 49637 - DNA, 602 bp, Ricinus communis
  Intron number 1 from transcript 29633.m000908 (locus 29633 .t000027) derived from phytozome v7.0 (chr-ID 29633; pos 1 34553 to 135154 reverse strand)
ctttgctgggcttctgcttcttggtactattaaaggttagtgtttattcattttgattccttattttgggttgttttcttctttcttctcacgggtaattgttctctcacttaatttggctaacatgctgtttaaataggtatctttattcgaatgcaattagtactttattgtattgcgatgatgctttacttttaacatgaatgtgaattttctgcgagggagcatttgtcatttaatggtgatatgtattaggttcatgcttacaagttataatgcgcttcttcagttggcttattgactgctgacttttaagttctaaccaacatagacttggggttcttaacttccatttccttgttattccattgctgttctctttttcttttagatcctttatggttgaacttcttctgaggatgcatttcatatttttccatgcttgatatgtcaaacaatatcaatgctttgaagggcttgtattttgagaaaataggaaagcttagctgtttggaaattcaaatcagcaaaatgcccatgactgaatgtgaacttattgagcgctaaaccttttgtgcaggtatcattttctgcccattggt

SEQ ID NO: 49638 - DNA, 749 bp, Ricinus communis
  Intron number 2 from transcript 29010.m000216 (locus 29010 .t000002) derived from phytozome v7.0 (chr-ID 29010; pos 1 2343 to 13091)
aggagagaaaagctaactatactgacgtatgtcatttccccatctaacccacttttggattttaacgttattatgtttgagtataactgtgatgatattgaataaattgtgataattgattataagtttcacttggttttaagataaatacgtaaatccagatggatgttttgatgttctttgctctgaatgttcaatgtcgtgcattgatttagtccttttggtatttgtagctagtaagtgatgatttaaagctatttgaagcaagtaaaatgtaccaaatggacaaataggaacctaaatcttcttgaagggggtgaacattgaagtattttactgggtagagaattttgaattctgaatatatatagacagcttagcttctataagatttgtttaacttggttttccacatgggctaatctttaaaatttatgctttgatatataaaggactaacactcctctattagatacattctcaactgtaatgctatttgctagttgataatactattatcattctcttcctcaatcccttatttgtacatatagaaccattggctctagtcattagaatatactactccttgtaattacattttggtataaactatttagtgcttgtaggtgaaaatgcagttctctgaggaatttttgtaaatgaccaggtaaaggagaatagtttctgttgataagagttgtttccttactagtgaaggtctttcctatttcaggttaacaagtact

SEQ ID NO: 49639 - DNA, 961 bp, Ricinus communis
  Intron number 1 from transcript 29780.m001381 (locus 29780 .t000067) derived from phytozome v7.0 (chr-ID 29780; pos 5 04763 to 505723 reverse strand)
tcttctcgttatcggcattgctcttggttccttaggttcctcttcttcttcttcttcttctccataatttttatctttgtttgttttaaatctaaataaagaaattaagtataaggtgctttgaacaattacgcattgtttattagtaacttagtattgcaatctttaaaggttacttttgtttttaatcatttctgtagaattacgtgctcagattagtgcttatcagtaacttaattttttctttgaaaagttgagatcgttcattagttaacttgatttgttttaaacttttaatgacagcttgtgtttcacatattaccttaataaaacccgtatttttcttatgaataatataaaaactccaaacagaacactgttatggaagatcttggaaaacgaatatgacagtgattgagtagaagttgattgcttgcatctgtgtcattttcgggttaggtcttttatatgaatctggtctcaagccaaaaatttatatgctgttcactcacatggttctttgtgccgaggccgacaactcagctttggtgctaactctaaagttttctattttgccttcatttatttattttattttagtactcgagaaatttcttaaaggtgagatgtgtatcaatcttgtcatggatgcacacacacaaacacacacacacacacacacacacacacacacacacacacacacacaggcctctatcatttcactttcttttgagttaatgccttattgggagtgtagacattttttttctaccaaggaatgtagagatttcaatgttaaaagaaaagattgatgttataatcggtctatcataaaaagaaaaagaaaagaaaaaattatgcctctgttttgatttatgtttttgttgttttcatgattaacaatcatcgataacttaattcaccattaatttaaaggaatgatttatatctgcagaat

SEQ ID NO: 49640 - DNA, 612 bp, Ricinus communis
  Intron number 2 from transcript 29589.m001228 (locus 29589 .t000007) derived from phytozome v7.0 (chr-ID 29589; pos 5 8349 to 58960)
gtgccaaatcacgcttgccttacggctcatacgtaagttcttagcctttcaaggctatctttattttcttatatacagcaatataactcctttctttcttccttttcttatttttttttttttcctcaatctggagtttcttcaatgtatactcttggtcttttcattcctatgatttattttgtctcggtatgtaatgtaggatagaaaggttctcacttgctttattaactttggtgtttatagtctatggcgctacttgttctcaaggagctgatattagtttgtttcttacacatcaaagtctggctgaggtgttatggagatatgcattgtcaagtctagtacagcatgtagctttgactaactagctcttttgtacacatccattcctctcataacatgatcagatttttatcatgttggaaaaatttcatggtaaaagctaattcctgttaaaggagggaggttgtcttcagacaaaaaataatagtttccatgcagtggtagacagaaaagtttttttatgttctaaaatgtagttggttttgacttttgcttatcttccaatttgtagggttttgttgaaagggaaactactctaattgggtc

SEQ ID NO: 49641 - DNA, 914 bp, Ricinus communis
  Intron number 2 from transcript 29637.m000769 (locus 29637 .t000047) derived from phytozome v7.0 (chr-ID 29637; pos 3 44153 to 345066 reverse strand)
aggtacatgtcctctgggctctataatttttaacttcccatacttattgatcaatcttgtgtggttctatttaattctagtcatcataagttggcttcacacaacacatctaagaagctttgttctgttttgtcattcttatcaaactttggaaagattaaatatgggcattttactattttttcaaagatttcaatactactcgtaaaatttcttattaattgttgaaaatgcaagtatctgtttaaaactgatgagaacatttatctttattaaaccctggtcttcaaacgggtatttgaatgctttaactcactccaaaagtctttaatgaacctgtttggccagtcagttagttaaggccattcttttttggatcacaaaacatcatgccttttgtacagtattcagttgcatactcatagttgctatttttcaatagatgccataaaccgcagaattttacctgtgaagcacctaaaatgatattgccatgtttaataaacatcattggttcatgcatcacagccaactcagagattgaattccttaagctcctcttactgatattaatgaaatcgccgttttgattatttatcaatatgcagttgttgtcttcattatgcatcaactccttttattactagttttccttcagtttgtacacaggttgtgtgcctctaggttatcttgtttgccattattcttcttctcccttctaagattgccaataattaacttatcagtctcagctgttaaaatttggatatgttccttggtttttggcctaagatatgagtgctggaaataggttaacttttgtggatatttttcagtatggtttgagttaaaaaaaatgaggatctgtgcgacttacaggaagcaagagccttactgggaagaattgaatatca

SEQ ID NO: 49642 - DNA, 676 bp, Ricinus communis
  Intron number 1 from transcript 29693.m002058 (locus 29693 .t000096) derived from phytozome v7.0 (chr-ID 29693; pos 6 56888 to 657563 reverse strand)
ggtgagcgagttttgttttaactctttactgctttcagttatttcatgtttatagcaaagaaagaaacgggtacttgttacaggagtatatataaaacttggtagaagaggtaatcattttatgaatcaaaatttccaagtgatctttttgattgggaaaggcaaataaagttttaagagcaattagttcaagagatatgttcagtttcttaatttagatacttactagaaggaacagcaatgagctggctttgatgaaaagtggtgtggacaaccacagccttgccacatgcggtttcttggagctaagtctttttgtcccatgcttgacatcatggttcctagtatcattcataacaaatgtgcagataatttatatctacatgtacatgtctgggtcatcttggggaggctgtgaggtttataattcagttcgcgaaggttgttttgatatttaaaaatatattgcgcagagaaaaagattaaagattcatgaagagcagatcatcgactactagactacttgacgaatacctttcttggatatataaaatgcctgtttgtatggaaaagattgcatatatactcttcttctttagacttaatactggaaccagtcattctatttgtgttcttgccaggccaggaagtagaagcagcaaacctacctgagcaa

SEQ ID NO: 49643 - DNA, 513 bp, Ricinus communis
  Intron number 1 from transcript 29801.m003111 (locus 29801 .t000056) derived from phytozome v7.0 (chr-ID 29801; pos 3 32149 to 332661)
ttgatactcttgatcttgaagtgctcagtgggtatttatgattattgaatttcttttattcagattttgtgggtttattaatttttgtaggctatgttatttgtttgatgaaagtatagtaaagattttttggtccttctaataataatgggaattgttaattggtctacgtggtttactacactctaggtatgattttctatctctttcagtgttgaatcagctgtttgattaattgactaacttcgctgtaatttgatattgttgttcaaaatgctatctgtttgatgaaagtactatgaaagttttgatttttaatgataagagcaactgttaattggatatggggttttagtacgttcaatgtcttgattttgtttttagtactgaatcaactttttgataaattaactaactttattgcaatatgatgtttatgactgctattatgtattgtcactttactgcaattcaatgcttttcgtgatcagtttctcttcattttaatagggc

SEQ ID NO: 49644 - DNA, 769 bp, Ricinus communis
  Intron number 2 from transcript 29010.m000222 (locus 29010 .t000008) derived from phytozome v7.0 (chr-ID 29010; pos 9 7676 to 98444 reverse strand)
ataccaagtttaaggtcaacttcctgtttgcttctttgaactattaatctgtttggctgttttcttatgagtatcagtgactgattgatgatctgctttcttgcttctaaatccataatgtgtgtgtgtgtctgtgtttctttttcttaatttcgtcttctgattctgtttggctgagttttgcctaacagttcgatttgattcaaatagaaactctggtgacagtttgttctcgtcttttgcattttgattagcactctgattttgtttagctttctgtttgaaatgatgattattctttcttattttaaacttttattgctgttgaacaattactagcttttcaaaagtagcgattctcttctcttattcggatttccacgctctgtttagaaaatgaaatcaaatctccacttctttatgtgttttctgttctgtttggctgagtcgcttatagagattcattattattttcctttttcgctttagattggcattcttttaagcaatctaattgcatatatctttttggaataactctttcctattgatcactgtcgcattcgttgatacttctgttaagtgtgaatttgaatcttgagttacaatataacttgaattccgaaggtcctgctgccattgcagtttcgactgtgttttttcttttgagttattatctattcaaatcacggcactatctgtttggcttacttacttactgttaatctttacaggtggtgaggaagaagcgctcaaaggtaagctggac

SEQ ID NO: 49645 - DNA, 858 bp, Ricinus communis
  Intron number 1 from transcript 29773.m000281 (locus 29773 .t000005) derived from phytozome v7.0 (chr-ID 29773; pos 4 7599 to 48456 reverse strand)
ggttaaccaaaggttgtcttctttctttctgtctttattttatagttgttgcctttacttcttggttgaagagaagattgagaatttagttgttagctttattttattgtattcattggtgtgttaagttattccttaatttaatattgtttatggtatgtttgccattgctgttactggtttaaaaaaatggatttgaaattttttaatttaatagatttgattttcttaagtttttttataaattgttttttttttctttataaatatgcttatagaaaaaaatatcaatttattggtttttttcttaaaatcagtttttaaaactaaaagattagcaaaaaaaaaaaaaaggaaatttgaaaagtgtttttcccaccatgatgccaaaagcgcacttagaatagttccttagttataagatgaagtgtgatcttctctatttatatgcgcatctccattaaatgaagcttgaaggttggaaaatgattgaaaatttaaaacaattttaagaaaataggagtattttgatgagtagggtagtgggaaggatttttgagtcaaattctatcctccatcagattattgtttgaaatatttttttcgggtttggggtatacaccgtaacaaataagagagtgatacatattatgaatattttatattttggtattcgataataaaattaaagaatatgtgtcagttatttattggtttgttgtatagatgactaatgcattaggcttttaagcaagaatttttctaaataaattaatttttattttctattgttttatttatttaaattattattttttaagttatttatgaatttgtttgctttttgaatttgttaag

SEQ ID NO: 49646 - DNA, 845 bp, Ricinus communis
  Intron number 3 from transcript 29680.m001745 (locus 29680 .t000088) derived from phytozome v7.0 (chr-ID 29680; pos 5 82933 to 583777)
caacttttcattttaattgtcttcttagtgttcaagtaagtcagtgtgtgaatttccatgtcaagcaatttttgaatttaaacgctgagtgtttaagttttggctgtgcttgttagaaattttttagcatttttagtgttaggtatattcagaacaaattggtcaaccgaatatatttctctggtcaaaagggaaactaagccactttcaaggaagataatcacttgtgcaagcttataatcaagaaaatgatttgtattaaaacaacataaatattacatccattagcatattaattatcaagaatcatctccaatgaattttagccattggtagctgcactggtcagcatttggttgctgaaaaacttcaaatattttttttcactttttaatttgtagtttttagtgataaattaaaaatataatgttttgataagtttaaataattttcaaatgatattttccaaaacactctagacattataaaataattgtcaactgatttttcagtgtatataaaaaaaatgaagttattttctcggagaatattcttcttagaaaatattttagaaacaacttattttccagaaatagatgaagcattaatgagcttcaaatatttcttgtgcatgctaatgcattgagatttgagaaacaaataaaatttggcctttaagttgaatgctgttaagagtctatcttgtattctcttttctagtatattttcttttatgaagttgcgtgctttttgttggaattattacactgaaagttgaaactctgatgttatctttattcctttatttaggctacttgcggaatacctgaaatagcttttgctac

SEQ ID NO: 49647 - DNA, 846 bp, Ricinus communis
  Intron number 1 from transcript 29729.m002337 (locus 29729 .t000070) derived from phytozome v7.0 (chr-ID 29729; pos 3 95735 to 396580)
ccttattacaaggtttgtagtagttgcatcagctgcttattttcattttattggcaattaaatagaattgtggtcatgttattgatagaaagttgtgttcttttgaaattagcttcgctatgctatcacttagggaaaaaaaagagttattgatagagaatttagctttgtatgttcttggaaatgatttttttttttttttccaaaaatgaaaattacatggacagtgacaattttgaataaagatgcttatccacaaatttttgcaaatagtgggtgagaaagacttcaagctaaaaagtgacattttgttttgatggtagatatattaaatttatagataattttatttaggattttgtattatactaaaccatgtgtaatgtgttgttagttccattgtgcattgttgtttagttagtaattatggatttcaacttaataaggactgtgatgtcatgttatgtttttgtttgtaaaatccagatgtctgtgttcttcatgttgtttaaatcataaatatttatattctcagctgttactgatcattaaagagagatgcacagatcatacttacatgatcataaaatctttacccgagtatttgtttcattgatgctccttgaatcttgaatgccagaacctactcatgcataagcattatgtttgtaatgttaagtattttccataaagaagagttttgctgctgatttcgagatctgtaatacttaaagggaacctggtaaatggtgatgttgtttatacgtcttccctttcttttgatgtgtaagaaaatcggtgtgtgcaacagatctttgaggagatagatataaagaaagtggagga

SEQ ID NO: 49648 - DNA, 210 bp, Ricinus communis
  Intron number 1 from transcript 29780.m001343 (locus 29780 .t000029) derived from phytozome v7.0 (chr-ID 29780; pos 2 31579 to 231788)
accgaggtatgttaatcccaatcacacacacacaaacacacactctcttgcttttaaaacgcataaatttgatgactttctatcattctttttctcattcttgaagatcttcgattgagtatttgataatttgatttcactttcttatatttcaatataattatgccttttgtatttaattttgcagtactgggttagtcaaggtaataa

SEQ ID NO: 49649 - DNA, 634 bp, Ricinus communis
  Intron number 2 from transcript 29780.m001343 (locus 29780 .t000029) derived from phytozome v7.0 (chr-ID 29780; pos 2 31947 to 232580)
ctcttcaacaaattgaagctgtaagtctttgtttactaaagctatatactttttgattattgggaacttttagattttgatgaagtaatgatacgatgtttacttgagattaccttaattatgtgagcgcgcaggctagagagattagaaacgtaccattttatcatcggaattttgaaacttgagtaagattgacggtgattgtttcttagtggaacacttaaagtgtaggctggatatttaactcaaaacggtgtctaaagttgaccttttaagaaggctttggtaatgcaacttcttgaacagtgcaaggcataaaaattattgttccagtgtaaaggaaaggttgaatgtctttgtcatgtatgttatattcattttatgtgtttacctatatgaaaactttcatggcattgccaattatgcaatctaattttggtttggtattatactagtagttaattttaaataacctccctctctctctctctcacacacacacacctctcacccacccacttttcttacatttagttgtactatcagagtatgctttgattcactggtgttatctctgattattttctttttatttgatatgtcttccagaaagctaatcgtagctatcagaaag

SEQ ID NO: 49650 - DNA, 718 bp, Ricinus communis
  Intron number 1 from transcript 27469.m000166 (locus 27469 .t000005) derived from phytozome v7.0 (chr-ID 27469; pos 3 5729 to 36446)
ctcactcagctactaaggagcaagtaatatatacatttctttgcttttttttttttttttggttataattgtgtttggttagaacttggttctttttactctgtttcatgagtatgttgatttctatgatctgggtaatttcttggtttcgtttataattattgtcttgtaagaatttatgtgttgcagagttcttagaataaaatatgggttttgaaaggggaatgttacaataaacatacactgtttctattacatgttttttcttttcatatttgcttcagaatttttaaattacacgtaaattctccaataatgaaatatagcaatatggatgtttgatgttctactgataattggccaatcaagaacttaagaactttttgttgaacttcttgcaactagaaaatcaaacttcaataaatctgcttgttgtttataaatctatgtagaaactaatttacttagtgttatgagaaagtgcaatccgtagaatatgaatttccgtcctcaggagaagaagtctggcttgaaatcttcaaattgtggaaaatactgagtaacaatctatgatgtgtttaaaaatgtggatcaattttgaatcctgatcaaatccctatctcaatctttgaaattttttttatttcacttgttaattgtttctgccgattgttttatcccaggctcaactgagagaggtaactttgctggaagaaaa

SEQ ID NO: 49651 - DNA, 878 bp, Ricinus communis
  Intron number 2 from transcript 29581.m000258 (locus 29581 .t000006) derived from phytozome v7.0 (chr-ID 29581; pos 1 27241 to 128118 reverse strand)
gtgctgctagtgtaaagagaatactagaaagccaagtatgactttatttatttactctatttgaactttaatgttgtaaatttgttctgtatatatatcttgtttcgttgcttcatttaatgctcggaaagtgaaaaagaaaatgcaagatctcaatccacttgaactctattgtccattctcatgtttggagacttcataaatgctaaaagttaattcgctcaacttgaaatatttttttttttgaaagaaatgatatcatgcctgaattgacatgatattgcaagagctttcaattgaattgagtttagcatttatgaaaattataactaaattaatttttaaattgtattttctttccagctcatataaaatgtaacaagtaatgaaaattaatgctcatcgtgcatttttcacttcatttatgaacacaagagaagagacatctactccttgttggaagttgtattggtcccacatcactaagttattggactgttataatgtgtattagccactccctcctttgagctagcttttggaaatgaattctactcaagcccgtttatcactccttttgataaatttaaatttatttaggaaccaactaatttgtttattggttatatgtttttggttttaaaagtagtattagatcttgaggtatatttggtcaaatactaagatatttttgttaagagtaatattatcttgtacacatagtacctaagagacgattaccaatgacattgatgctgtactttttctagatttctatgtattttgtatgatttgtcttgtttctgcatcttgatgttcttatgtgatcatatttatgtacagccacaagtctcatctgctactgtcaatctcacgac

SEQ ID NO: 49652 - DNA, 131 bp, Ricinus communis
  Intron number 1 from transcript 29581.m000258 (locus 29581 .t000006) derived from phytozome v7.0 (chr-ID 29581; pos 1 28135 to 128265 reverse strand)
ttggagtatgcacctcttcttttttcttaaaataaattaatgtgtatttatttgttttagtttttgatatgataaattattatttattttttaatttaatcttttatttatctggctgtgtattgcaggga

SEQ ID NO: 49653 - DNA, 335 bp, Ricinus communis
  Intron number 2 from transcript 29726.m004021 (locus 29726 .t000133) derived from phytozome v7.0 (chr-ID 29726; pos 7 87713 to 788047 reverse strand)
accgtgagtctttcgaagaatacattacttcaacggtgagggttatttaaattgagtttcttacttttctctacaatatgcatgatcaaagtcattttattgtattgtatattatttaagatgcacgatatttatttaggattttattattgtttattgcttttagaatttcttaggcatgcatgtagatccataattatagatgaattatggtttctcttttaaggttcatttgtatcatttgaagctctcatttgctttagttgttagattcttttcgttattttttaatatgattttttcttttcaggtattgccatctttaagagagaagc

SEQ ID NO: 49654 - DNA, 379 bp, Ricinus communis
  Intron number 1 from transcript 29631.m001013 (locus 29631 .t000020) derived from phytozome v7.0 (chr-ID 29631; pos 1 14981 to 115359)
acacccaggtgcatatttgaattcttacagtgacttgtgaggttcttactttttagtttttgattcgcttttatgattgagctgtttatgttaagtccccatttgaatgccaaagttcctcaagttttaatagtttaatagtctgacaacaaattactattagcatgatagactatgacatatttttattcaatataacagtggcttaaacttggaattgatgcttaagtgaaaatcttatctttccaaagttgaattccaaatgaaactatcaggaaagaatacaatgtatctgttattcaatcaaatagttataattttacctttattttcttcttatagcttaagttttctattatgtcattacaggcctttgtca

SEQ ID NO: 49655 - DNA, 459 bp, Ricinus communis
  Intron number 1 from transcript 29709.m001208 (locus 29709 .t000044) derived from phytozome v7.0 (chr-ID 29709; pos 1 86430 to 186888)
acaggtacctttctctattttttcgtatcataatttagtttcttctcgtttctttgtttcctttctattataatccgtgggttccttttattcggttattgtggaattgaactgagactacaaaaatacaagggaataaatttactgaattttgggttcttttcttttgaggttggcatctttgttttgtgcgagtagcaaattgcagatggtttcttccttgatcatgtctgttttatcatttcctttatgtttttgcataaattttgaatatcatacaatgagattatctcgggctatatggtatctctctgttccatataacttccactctgctgagtactgtatcatcaatttgaagcactataaactccatatcaatatcattggtgtgttgttgaactgataattgcctcattttccgtacaacagataatcaagaaccaattttgaacaagg

SEQ ID NO: 49656 - DNA, 235 bp, Ricinus communis
  Intron number 1 from transcript 29172.m000210 (locus 29172 .t000002) derived from phytozome v7.0 (chr-ID 29172; pos 7 190 to 7424)
aagaaacattcaaagagcaggtacgaacttcatttcagtttttcctcccccttttgaagtttatcttttcttttgttaatcgggcttttactaattcaaactcatatcttatgccactgagccgaagctcattattttttgttcagatatagttctgtgcgtaatgatccatttttatcttcttttttctttttaatattctaaactagagatcaataatgctttttgcaggtga

SEQ ID NO: 49657 - DNA, 1013 bp, Ricinus communis
  Intron number 3 from transcript 28525.m000267 (locus 28525 .t000008) derived from phytozome v7.0 (chr-ID 28525; pos 9 7598 to 98610 reverse strand)
cggcattgggtttggactgtagggaatcgtagcattggggatgtctgatcctttctagtgcgaacgagtaagataacagacctctttctttgaaagccaaaataaaaacaattgttggagttttagattcattttctgtcagctagattagttccctgctaacctaggaatgagtgaataaagaaaaagcctatcttttctcaagcttgattcggaatagctatccgttcaagcaggagagtttgtttttctttgttaaatggcatacctatagaataaaagggattggtcaaaaggctttttggcaaaggaaactgatagtcgcttttcgttccttgcaacatgattataattattaaaatcacattagctttcgctcgtgtcattgacatcagcctcacgcacctacgaggctataccaccacaaaagcaatcgatctgggtcaagggattgaaattctcaagatttctactattttcttattttgccattcgctgatgatctagtgtgcttttcaaaacccatcttttatgcctagaaaggcccatttgagtgattaataaaccctcattgggaagtgcctttttttttaaggctcaagcacatggacttggaaacccctgggctgccgtcctttcttcaaataccacggcttagggccagaccaagggtccccaagtgctatggcaatctaccatgtggttgttgttaagaaagatgaaggaaaagaacaataagggggtcggacccgtcctcgtcacaaaattcgataagccaaaaaaaattatagaggaagaaaatgcagttgggcttttggaagagcgctccacgtggtttttttcctatctagtatagaaccccttagaagtgagaaagagtcgatctatgaaagttttatttcatatatattaaaatatggatactacctttaaagaaggttaaggaagagtaatgcttaccttgccatacaatagtagattggtccattgggagctactactgattccggctt

SEQ ID NO: 49658 - DNA, 761 bp, Ricinus communis
  Intron number 1 from transcript 29780.m001395 (locus 29780 .t000081) derived from phytozome v7.0 (chr-ID 29780; pos 6 37892 to 638652 reverse strand)
atttgaagctcactggtctaggtaattcttttttgtttcgttaacttggtttcttattaatagtagttgtttaggtgaagaaatggtcttttttttttaattggtcatttttagaggcctgcaattttaatttgatcacgttaagcgtgtaaagttgtgccaattctaaatgataggctcaccaaatgaaactttggtaattgttgcatcatgatccggcaaaaaggctctgccttttttaattgttaatcttagctacttctcttggacgactttccgacatagcttcttatccctactccgtccagcaaattggagtccttttctattgttatgttgaatgcagattaactgaagaaaattgggatctactttttcatgggtttgcgtaggaggaccattttttcatacttgagaaaatgaaatgagcttgttcagttgaagcaaatgctaattggatgagagttgttgttaaaacatagactggttaattgaatttctttcgtacgtgaggctgaaattcttgtatattaaccaaaaatttcctttttatccataagaactcttgcaatatactaatctccgttctcaccgattactttatataaaaaatttaacatttagtatttttagtctttgaataaagtaagtgatcccaaatgcttctctctcatctttgttcctagctgaatcctaatgcatgttttgagtacatgatttgataattctgattggtattttcttcacagctctttggtcac

SEQ ID NO: 49659 - DNA, 685 bp, Ricinus communis
  Intron number 3 from transcript 28592.m000283 (locus 28592 .t000011) derived from phytozome v7.0 (chr-ID 28592; pos 5 8317 to 59001 reverse strand)
ttacaccgcacgttatctttgtgaaggctggagaggtgcccttcttttatttcattttctcttcatccgaataatgacagtttccttttcctcagtttaaacctcgattatcataccagaaagcttcttatttcctacagagattttcctgatgctcaactcattcaatgttgcttgacccaaatttttatctctctttgctgactacttgaatgctgattatgagaaaatcagtaaactaattgatcaactatttctggaataacattactcatatgctataaagtaattcctcataatattaccactagagttgcaaatcagtggttgataatccagtttgatgaaataggtgggacattgcttttctagaaggttaaagcacactgagggaggggcgagatttactgtccccttcttattctgtttatttattaagattttatttgctaaaggtgatgcaaattagtctgaaacactcctaataatatcaagcaaagtgtctccataattatggttccaagaagttctggatatagtagcatttgcagctgttgaagcattatatagttgtcatttttgccctaccacataaggaatattttattatgcaatttatttctcaaaatatgatatctcttttctcagaggacttgtatttgatctgaaaatttcttcccgcagg

SEQ ID NO: 49660 - DNA, 503 bp, Ricinus communis
  Intron number 2 from transcript 28592.m000283 (locus 28592 .t000011) derived from phytozome v7.0 (chr-ID 28592; pos 5 8985 to 59487 reverse strand)
tggttctgcccgtaagaatcaccttcctaatcttggtatgtttttattctttcccgagatgacaatttttaatgtacatatatgtcacttttgctcttattatattacttctcgctgtctgtctgtctactaaaatatcttttctttcggaaaagaataaaaaggggtccatcgttctcatgctcaaaccattgtgcacatttcgttattcttttactatttattttcttggtgatttaaatatgtgtgcataacaaaacagggaaagaataaataaataaataaataactaaataaatagacaagttttaacttctgagtgagtgaattctttttattttaattttaccccattgttttgctgtagatgcatataataacaaaaaagtaaaagaaaatgacatctatttgaagtttatttgtatattgatttttgaatgatgattcttctataatattgctttccaggatcaggaggaactgggtttacaccgcacgttatc

SEQ ID NO: 49661 - DNA, 419 bp, Ricinus communis
  Intron number 1 from transcript 28592.m000283 (locus 28592 .t000011) derived from phytozome v7.0 (chr-ID 28592; pos 5 9925 to 60343 reverse strand)
atcgattttcatccacaaaacataattttgttttggtaagcatttttatttatgaaatttgtttctatatttttctttaattttgttttctcgtatgaatatggaataatagacaattctgtaatttcgagctgaatttagtattcaaaatagttaaataaaagataaaaaggaaaagaaaacaggaattatcagaatttctgaaactctaattttaacaaaataaatacatcaatttcatcgaaagaaaaagcaaaatagtaaataaattattatattctgaaactgagggtttacagaaattggttaaggaattagggtttaagcgaattataaaagatgtttttgaatttgaactgagattagaataaaagagtgatgaaaacaatggcaggaagaagatcaaatcggggaagaga

SEQ ID NO: 49662 - DNA, 404 bp, Ricinus communis
  Intron number 3 from transcript 28644.m000943 (locus 28644 .t000050) derived from phytozome v7.0 (chr-ID 28644; pos 3 22331 to 322734 reverse strand)
agagtcatcggtcaagagaaaacaaatcgtccaatgtaagttaatcgcctgccttttctctttgtgatacctatgagagtcatcaatcagcgactgcttcttgcttccatcacagtcgagctttttgctagcttttcttttttgctattgggattttgattacaaaatttgccaaaatattggagctgtttccttttatttgtattttatgagagatgaagaattagcaccctccgatgactatttcctcaaatgtggtccatgcagtcatattctgatggatattagcaattatgtaggcaaatgttttttagcttgcaattttatatattatatgaggtgtaatgatgttatgtttttgaattgaaggacgctgttggcactacttggagtcctaggagtgg

SEQ ID NO: 49663 - DNA, 347 bp, Ricinus communis
  Intron number 2 from transcript 29588.m000857 (locus 29588 .t000012) derived from phytozome v7.0 (chr-ID 29588; pos 8 7603 to 87949)
ggctggtgtaagtgttctctattattgttattttggtttgttttccagcatcaattttgctatatcaattaaatttactgttagttaagtgaaattcggaagtaccctgtagatggtaggagcgacaaaacactagcctttgatattaaaattgttattttgttgtttttattttactttcacatatccctaattcactggatttgaagttcttcgcttttccattctagttatgttgcttgcaatagctcactatttgcaagtgctatctgaatttcagctgacggtaattttactgggttcttgctgcagttgtgtaagattgattctgaaggcaaggccaggaa

SEQ ID NO: 49664 - DNA, 804 bp, Ricinus communis
  Intron number 3 from transcript 29680.m001669 (locus 29680 .t000012) derived from phytozome v7.0 (chr-ID 29680; pos 8 1335 to 82138)
agaagccttcctctgcccttgagtatgtctttatttctttggatatctgaattaatgtcttcgccagcagataacgataattggaaaatgggtagatatcattgtcataagtctttgattttatctctacattgagaatgggaataaagcaattcccaccaattccctttcccggggcatccaattattttggtttatttttcatttgtattcttctaaatttctatctctatccagttcagtaaaaggtgtttataggttccttaattccatttgggatttaaaaaaaaaaaaaaaaaaagttttctgtgacaacaacaaaaagtaaccatattatgccactatgttccatactgcttttgttttgtcatactaaattgctagttagaatcgggcatataaagccaattagaagtcaatatagttttattcaggccacatgattctaatttatccagcttccaagtagcatgttgagtttgattggcttggtctatattcatgtggtagattggtatctgattgaatctaaattgaagaactgcaatagacaacctgtgaaattagagaaaatcttggaaagatctggttgaactaaaataaataagctttggcttcatggtttcttcattctgtcagctattgggttatcttgttaagtttccaattagcttggttgaaagcctttactgggtttgccttgcgtccctcttcttaatttttctttctctcttgtttgggtagataaacagatattttgtattgacagatttatccaacaaaagttaggcggtccgagtttgt

SEQ ID NO: 49665 - DNA, 746 bp, Ricinus communis
  Intron number 1 from transcript 29736.m002048 (locus 29736 .t000044) derived from phytozome v7.0 (chr-ID 29736; pos 3 43123 to 343868)
atacttcctttggtatcacgattggttccaaaagggtaccgacttttactttcttaccctctactgcaatcaaatccttttcctttttttttttttgctctggatggtaaaattgcatttagtcttatggatcatgcagttccacttgttgttttaagatccagaaattgcttaggcttagcccttgaaacttgaaagcatcttaagcttaaatgtcaatttgcccgcccccccccccccccctctctgaatttgcggacaatggacaattaatcccaaaaatcgatattttgacctaattagttctcaaattttgcaatgtggctatttaggcccaacttcgatcacactgaagagagctggcttgacactgaacttggacctgcatagctacgttgtaaaagttgagggctaattaggccaaaaagtttattttggagcatctgcagttcaacgggctatttttttctttaaatttcaccattttctacaacgtggctaattaagctcgatttcagacattcaagagagcatgttttatactgaaattgaaccgattaaccacatgtaaaagttgttggctaattaggcaaaaaagttggttttggagcaaaaaattcatgaacttgtagttcaggggacaaattgttatttaagccccattttggtttattctggaagtaagttttgattttattgtttgtcttccaatactgaaaggagggattggtgcaggtacaagtgtt

SEQ ID NO: 49666 - DNA, 807 bp, Ricinus communis
  Intron number 1 from transcript 29705.m000603 (locus 29705 .t000035) derived from phytozome v7.0 (chr-ID 29705; pos 5 58801 to 559607 reverse strand)
ctcctactgttggccttcctcaaactagaaggtaatcatctcttagttactttactttagtcttcttatactttgacagtttcaaattcttgtatttcttgagttttatttcaatttaattttgggtgttgcatgctgatttctgtttctgggtctagatttgagaaattagctccttgtgaatttggacttcatgagttaaattttaggtaacagattcaactttgcagtgaatatatgacagtgtcgtgttatttcagttagttatttgagctcttgattgccatcttatgctcaattaatatggagctgccattacaattgttacttctatcctttatgttctttccctcctcaattcttacagttgtactcgaaagtaattacgaatttatgttctgggtttctttagtttagcttagttctagttgcagttgtatctgaaacaatccacaattattacttagacttgctaatttgcattttctcatttgaatacaatttcttgttcttctttcaaagtagctgtcgacttaactcgagaactcaaatctcaaagttttcgtcttacctctagttttatttgttttcttattttagcaaaaataaatctagctgagattctaaattttttctttttaggcatctaatgtcttatttctagagttagaaatcatgacatgaaacttatggttcaaatttgagaaacttctgtgagtcacaggttcagtttatataatttcatattcattgtagtttttcttttggacagggcaatttctgattacctatctcgtgatcttcctt

SEQ ID NO: 49667 - DNA, 867 bp, Ricinus communis
  Intron number 1 from transcript 29736.m002114 (locus 29736 .t000110) derived from phytozome v7.0 (chr-ID 29736; pos 7 90675 to 791541)
gctctcaagtgtgttttaactttttattaactctgaaaataaatttaatgaaacaaaatgttttagtgcttgttattgaatgaattgttgtgaaaattgaagtaaaatatttgtttgtttggtagaagctatttagaattttgcaagaaaaaaaaaaaaaaaaaggaagaagagttgttagctttacaattttgttaatttagttgctgtatttcacttaagaatttcttttattgaaaatttaagatttgacttatttagagaactaagaagtaaaacttttagctccatttcactcaattggtgtatcgaggataaatagggtagatggctagacagtataattgttgaaccagtgatctgagattttcaaatggagccagggattatgatgttagattagtatattttgatggggagccctataaccttttctacctagttttttttaagatataggtgcttgtgttcttaacctcgtcaacctttgcaaatttcagtgcaacaatatattactagtattgataggatattcaatttccttgtagcttcagcttaatggggttatagatgatgtatcatgctaagctggaacctttagtttcatagacaatgtgattgaagataacattatatgttgaatattattcattgaaaggggtcaaaaggaaaaacaaggtcataaactcttttagagcgttggtttgatttgaagtgaagtatcctgcatgcaatcgaatggagcaagagagacttgttatatattttattccagtttatttcttttccattattaatgttgtccttgtgctaagtaaggattaaattctcttaaattgtactttttcaggtaccatcctgacaaga

SEQ ID NO: 49668 - DNA, 224 bp, Ricinus communis
  Intron number 1 from transcript 28200.m000191 (locus 28200 .t000003) derived from phytozome v7.0 (chr-ID 28200; pos 3 7921 to 38144)
tccattgcaacatctgcgacactgttctcgcggtattatattaattcttgtcactaataataaccctatgctgtgtcttcagatttttatcactcttgccactttttgcttatctttaattaggtatgttctgcttctttcctgattcatttgtttctcatgaacttcctttgattttggtttgtacaggttagtgttccttgcacaagtttattcaagactgt

SEQ ID NO: 49669 - DNA, 110 bp, Ricinus communis
  Intron number 2 from transcript 27810.m000640 (locus 27810 .t000011) derived from phytozome v7.0 (chr-ID 27810; pos 1 18881 to 118990 reverse strand)
ctcaggtattgttttgtttatgcaatatatatatgatttatttgtttttctttgcctgcattaaaatttgaatattttgctttttcttgttatgactctagacagggcta

SEQ ID NO: 49670 - DNA, 744 bp, Ricinus communis
  Intron number 1 from transcript 29654.m000303 (locus 29654 .t000005) derived from phytozome v7.0 (chr-ID 29654; pos 1 05310 to 106053 reverse strand)
actctctttgacaccatcttcttctatgtcagtctctctctctctctctctctctctcacttttataattctgttttagccaaaatattattgttatcgttgttacataaagagaaaatttgctcccactcaatatacatcttagaccttttctttagtgtcccaactgccttagtgaaaccctttaaggcctcaaatgggtgcaactgccctaaagattttgagcaatttgtttggatggagttctttccaagggttttaaatctctttatttatttatttaagttttagaacactccaatttctgtgtgaaaagaaaatatcaattaaaaaataaagtttttaaaattttttaaaaccttcaaaattcttttacttgtaccggtgaattggagatcttatagtttaagagaattttatattactttttaaaattttcattttttatctattatttccttataaaataagattaaaacttatatcttatcttcaaaaaccatattccaatttattttattctcatttttttttatccagcggagttgaaataattatttttgtcccatatttggcctcgattcgccggtgataataaccgacttttttgtaatttataacggataaaattctaagaagaaaaaattatttttatagtaaaatttgtgtaaataattttatttcttcgattttgtttttttatttttatttttatttttataggctatacattttgtggacaag

SEQ ID NO: 49671 - DNA, 812 bp, Ricinus communis
  Intron number 3 from transcript 27894.m000798 (locus 27894 .t000026) derived from phytozome v7.0 (chr-ID 27894; pos 3 87368 to 388179 reverse strand)
ctcccggtatattgtttttctgtttatatgttcttatggtctctgtattctttttttttccccttctaaattgaatgcatatacatacttttaaagaatattaatggactctagggtttggaaagaatgccggagaccctgtacgggcaattattttgccttgtcttttgttttattggtgggaaagagagaggtcacatgatcaaatgtttatgtaacttattgaaagtcaaatgttgtgtgacatagttgtaattcaaatgtttgtgaaaataatgctagtcaaatgtttgtgtaacattataagatattgcaatcatatatgtgtattttggaaggaagtgtctgcattttttaaattcaggctctgttgtttaacctgttgagagatgagatgttcttttagcttcttcatggattatgcttcagggaactgggggctcttcagaaggctgccttttgagtattactcagattgattgtagggcattacatgtctagttgctgtttataactgttcattttctattattgttattattacaattatgcctattactttgttcttaatttttttagatgaggatatcttatccttcattttgtattctgctttctctagtcaatatagttctcttcttgtgaaaagaaatgtttcgtctgctacattgtttagctatttgacaatgaaaatatggagctctacaatgtcctacttctgcctatgtacaaagaaatttttagggtttaatttttcttcatggattttcctttttctaatctgctcttgttcttgcccctaggttttgtac

SEQ ID NO: 49672 - DNA, 530 bp, Ricinus communis
  Intron number 1 from transcript 29586.m000600 (locus 29586 .t000005) derived from phytozome v7.0 (chr-ID 29586; pos 4 3805 to 44334)
tcgcagcagtcgcctccccccttgccggtcatcaggtactgttgttttttttaatttcgatgatgcgagggcttattgttttctattaattatttttgtaattttattattagattaaaataaaaaatggcagaagtttaatgttttatatatttaatagttatttgatataaacgggttttaattggttcgggtagtatgcgggtattttctgttactttcgatattttctttctatttttttctgcttctattgttggggttctgcttgctgcaattaaattgaaagaagaaagtgtttgttagatcaaagggaaaagatatatgggttctgtttttcttttcgtgcctattagtttggtttcctctacttatattcttacttgttttccttgaattttgtatttactgagtcagatttagttctcataagcattattatcctgacgagctgatggccatgattgtcatgggcactttgttcttctgttttagttctcttaagcatattgttaatacagcagctttca

SEQ ID NO: 49673 - DNA, 258 bp, Ricinus communis
  Intron number 1 from transcript 29772.m000321 (locus 29772 .t000014) derived from phytozome v7.0 (chr-ID 29772; pos 1 36603 to 136860 reverse strand)
cctgttattaaggttagtgttctcttctgaaagagtttgaaatttctttttcatgattatttttaaagtttcatattttatattgtagtttaatttaaattgagtagttttgaactgtgggtttttttggttgtactatgttgtagtcaataatgagtttagattcttgattttgaagtttcaacgtttcaagtgttatttgatttggtccattgatgattttgtggttggttggttggttatttttaggtggggaga

SEQ ID NO: 49674 - DNA, 769 bp, Ricinus communis
  Intron number 1 from transcript 29727.m000476 (locus 29727 .t000015) derived from phytozome v7.0 (chr-ID 29727; pos 1 33144 to 133912)
tagcgaaaggcagacaacaagaaaacaaaggtcaggtatgaaatcttgcctgacataaaatacatttggatcttgcagatatggattactggttatgctacattaatatgatttaaattctgctaccttgtcttttaaattttcaaggttgctaataagttacagttttcatgataaataacaagaagctttaaactcaaactccaaatggatgttcttgttcaacaaaatcaaatggtaattattttcttcttccgtcctttctctaaattgtgtttgggagaaaatattgaaggcttgtttgatacaaataagttgttcatgctggagaagggaagttaaagatttctgcaggaaaactaaaggaaagtccttgctgaattgtgtatgaagatcaagtttcttatctgctgtttacttcctgtgtagggaaagtgaatgcttgtgctttaatcaccaacaacctgatttcataaacttgtacagatgtaaaggaggctgcctttcttaagttgaatttgtatacttgtaacagaaacagtattattcctgttgtgagaccctggagagatttttgagtgccttttttttttttcagagctttttctctgtgtattcttggaagttttgattctaaacaaaatgctgaccaaaaagaattgtaacgaattcttttataaacataagaagatttaatatttctgcaaaatatgtaaatgtcaatcaagtgacagttatcgggcattgcaggcacgtccaactactccta

SEQ ID NO: 49675 - DNA, 592 bp, Ricinus communis
  Intron number 1 from transcript 28320.m001087 (locus 28320 .t000014) derived from phytozome v7.0 (chr-ID 28320; pos 8 0841 to 81432 reverse strand)
ggaaaatctacatcttgttccatcaggtctaacagaagcatgagcattacacgaacaatttgctgaataaattttcctgcagtcgcttaggcccaagctcaaaattgttcaagtactcccaattactcatggatccactcgtctgagtaaacacaccccttagaccttgattctgctgggcttccatcacatgttgattttgactcgaatataatatccatctagacactcgactcaaatagaacagtccgtcaagaagaatcaatctctatccaaggggaaaggctgccatccttcacagtgaatgtgaaataaattataagaaatacaaaacaatttataactaatcaagtggctaataaactgtttcttggccataacaattatctgtcttaaatgtatcaaagtttaacagcttagtcaatcactctaacacgggacatatttcttctggctcccaccataacggagcgttttattctgtgaaggactatccattaaaactgtgcgtttcatgttgtcgggtttgtttttttttttttgtcgggttttgaaaggataaagtttccgactcggctaaagctgggctctg

SEQ ID NO: 49676 - DNA, 983 bp, Ricinus communis
  Intron number 1 from transcript 29747.m001071 (locus 29747 .t000028) derived from phytozome v7.0 (chr-ID 29747; pos 2 07794 to 208776)
actgtaactttctcttttctcgatcttctcttctttttattttcttttttctttttttttcttctaacttgatttttcttacttgcagcaagcatttatatgtttctccttgtattttatgcaaatttccaaaatttggtggattcattattattgcagcttttttgataaccttaagagtgtcttctcattattaatacaattgctgacatttatatcataactatctgtggaacccttctggtgtttgttactcaaagtctcaaacttagatacgagtttgttgccttcccactgaattgattgctagtactgttgtgctttggctttgtgttatgattattgattttatttgggttgggagtgctagtgtcaaatttttcttaggtaatcttgtgagctacttgcgtggagcctagctcttgtgcccttgcatgtagagattctacctacgggtgtgcattttctcttttttggagaatcatcttcatcgtgaaattcttgcagttgatctttgaaagtcgcgtcttatttaagattacatgttttgaacgtaggatacgcttaatgattcaaaaagttgttgcacttttggcatcctgtagtttacagtagataggattggtagaagctttcataaatttgtacccctgtttattttttagatattgctagccagaatcgctttcaactgaaggtattgttatttttgactgcagtttaatagttttaatttttatgggaattgtgaaaactaataactgattttagaccattaacaaaattaggcattggttctatacctattcccttaagaactttgcaatttgaattatttgtgactatggattcttttgtttctcaaattgttttcatttagattagttcaatatcaacttaaaagtattggttaacatttagatagaatgcattgtgtttgattcattttggagtatagggggttgatttcatttttggtagat

SEQ ID NO: 49677 - DNA, 527 bp, Ricinus communis
  Intron number 2 from transcript 28202.m000134 (locus 28202 .t000006) derived from phytozome v7.0 (chr-ID 28202; pos 4 4097 to 44623 reverse strand)
gaaagtctagtggaaaggtatttgttttttcttttcttcttaaaatatgtttttgaactgtttggttactgagaatagagaagaaagtgaaggaaatgaactttggaattttcttaattgattttatttttctaaaaaaggaaattaaatgctcgtttggtgttaattatgtgtaagatttagttggattgacttctgtcagaatctaatttagatatgcttttcatatctttcaaaattatgcctttttctttttatttttctgttgaaataattgaattacagcagggacgaactttccaaacacgtgaaacaagataacctgaatgctctcactttgattttgatgaatttgaagagttgtagatttaaggagttgagatttttagatccaatttttgtggaaataataaaaattatttatttggcaccatttaataggtaaatgaaccttttattgtttttttttttctatttatttctttgtcatttctttttgtttgggcagccatctgagcagaatactt

SEQ ID NO: 49678 - DNA, 581 bp, Ricinus communis
  Intron number 1 from transcript 28883.m000730 (locus 28883 .t000020) derived from phytozome v7.0 (chr-ID 28883; pos 1 15324 to 115904 reverse strand)
ggtgccgccacacgataggataggaactcgccgaggtattctctatatcttctctctctcagtcgctatctcttaatttaattttgagcttgaaagagcaaattaggtccggctttgaaaaggctatccgtgaaaaaagctatagtctagcataaaacctgtgaaattaatgagaattggttgctgttagttcatctattcgcagaatattacaatcctttccttttatttggtattgggaaactttaatgctgtctttcctgcttggagagtggcaatacgggtttcttttattattctctatttttatggctttgcttatttatgcttctattgggaatgaggagtcggtgaggggggagtaaattattgttaaccattctcatctttttgtttctcaagttttgctgccatgttgctttagttgcgtagttgcttatttcctttagctgttgctttagtttccatgatgttattttatatgtgttcctaatatattacttgaaattactaatatctcttttgcatacactctgtattcctcaggaattacagaacatttctgaaactgaacataaaac

SEQ ID NO: 49679 - DNA, 544 bp, Ricinus communis
  Intron number 1 from transcript 29726.m004039 (locus 29726 .t000151) derived from phytozome v7.0 (chr-ID 29726; pos 8 68848 to 869391 reverse strand)
acagcttttgtaagttcctggaaacattttcaaaaatattttgttatttcgtgtaattaatcttaaacaaattcggactatctccatttagttttaaggatgaattaggtagcagtttgtgctttgaatttcctattctgctacctatttggagcatatttggctgtatttagattgcttgaccttcttttcagcatgccatgtctagtattatataatacggtttagatcaaaattatgttgtgtgcatcttaacatgatagagttagatcacgtctttaacatggacggcatggctattatacctccggacggagcagttattcttccttttccattatttggagtgcttttattattcaccaaatattggtagacattagttatactacaaatgcctttattctactaaatttcctattaatgtaaatattggaggacacttttgctgcaaatttttattgcatggttcaaataattggatgtttaactgctgctgattgtctatattgcttttctacaggtacagaatttactccagcag

SEQ ID NO: 49680 - DNA, 335 bp, Ricinus communis
  Intron number 1 from transcript 29739.m003708 (locus 29739 .t000144) derived from phytozome v7.0 (chr-ID 29739; pos 9 07218 to 907552 reverse strand)
attcagacactgttcaggtctttttactagggtttctatttgtttttccttttataatctcgatgaataatatttgaactgaagcttatatttctgcattttatagcaacagttcaatgattccaccatagaatctctttcttgttagaattaagagaatcatatttaattgattcggtgtaaataccttgataatccatgcactttgagagagtaataatttcaacactttcacttatcttcttcttcgtcattatgctttttaaattttatgatttacattatataaatttcatttctccatttcagtggtacggattcgaatttcttataat

SEQ ID NO: 49681 - DNA, 471 bp, Ricinus communis
  Intron number 2 from transcript 28690.m000025 (locus 28690 .t000001) derived from phytozome v7.0 (chr-ID 28690; pos 1 2711 to 13181 reverse strand)
ggtcaaaaagatattcttggagctaaatttccaaggtgtgtgagatactctgttcatctttatcttcacattttaatttcctaagaaaaaagaatagaaaaagtacaggtggacttgaattatatgcagcagctttgattaaatggttagtgtgtagatgcagcttggaacatgaaccagtaataggagcatatgtcactgatattaataaatataatctattggatgtacgttatgaaaggtaaaaagtaattataggtaaagttttttaagataaaaacacacgtctggtagttttttattaacttacttaacagtaccaaagtctgtatgtatgttctctaagaagctggaaaggattggcttatttaagtacttccgtttgcatattattatttcttcttgagaaaaagaagtaaagaaaggattgctctaacttggagagttatgcaattacaggggatattatag

SEQ ID NO: 49682 - DNA, 618 bp, Ricinus communis
  Intron number 2 from transcript 28152.m000882 (locus 28152 .t000011) derived from phytozome v7.0 (chr-ID 28152; pos 6 0427 to 61044 reverse strand)
cagaagcggtcaaattgtcaggactgccttctgaggtatgtatttcattttgtctatgataaagccatttttttgttgttttactaaattggtggtgacaattcaattgtccttttgaggtttatttaatggtatgtgcacctttgctcgcaagttaacttgatgatgaatgaagatgataattttgacttctatattgttgcctttgaagttcacataagatggttaagcagagtatatccaccagcatgatagtctgggactactgctttgccagctaatgcattaatgcttttgtcggttcttagctgacctcaagctaggatgatctgctcttgttgggtatattcattccttatactgaattaatgtgatcaaatcttgtaagagtgccttgtctatctaatatatcctataaagcaccaatttccctgaccaacttcatggttgccatgtcgagcgagctttctattactaataatgctgggtttctttttaatgttggtgactttttctattcagtaacaataagatttcagtgtttttcagaatctcatctaattgttattttctgttgttgaagatctaccaagtacttggtgatatcaaactggaatt

SEQ ID NO: 49683 - DNA, 950 bp, Ricinus communis
  Intron number 1 from transcript 27785.m000033 (locus 27785 .t000001) derived from phytozome v7.0 (chr-ID 27785; pos 2 276 to 3225)
gcagttctaaacacaagaaacgcaagcaattgcaggtatgcttcttccttttctcttttaacttcttgatgatttttcttttttccttttttcttttctgcagtatttcagttccgagcttatatttcgtaatgctagtgtgtttagaaatgctcgcttagcatattaaacaattacccgcttttttttttaaattttttttttcttattgtctttccttggtatgtgtttgttcttttttccttttaactaatttgatgcttcttttgaaaatcccaaaccaaacagatctcccctgtacaattcttcagcttctctttacagtattctctgttcaatttttattatttttggataattgaatttacaacagagattttattgtatttttccagttgaatttagtagctccccgtactaaattttggcacttctgtacttggttactcttgtttttcttttgaaagcaacaacaacttttgaaatgaaaattaaatctaataactcacagtttaattttttttttcttcttatattctaaacataaacatcttaaattcgagaaacagaaacataaattatatcaaataaattagacgactgtaatataaattttgtattttgttatatgaatcaattagttttgctaggaatttccttctgttataattgtatgagataatcattaagttcattgcattttgccaaacagaaattataagaaggaatcattacaataattagcggttaagaataaagattgtgcactgattagtgctcatagcaatactaaaagggaagggcattttggtcttttcgcaagtgacagaacattcggaatatagtagatgacttgtgctgtaatgcatgtgccgctgattgtctgataggctgaattattattcttatgatcagacggtggagattaaggttagaatagactgcgaagg

SEQ ID NO: 49684 - DNA, 557 bp, Ricinus communis
  Intron number 1 from transcript 29684.m000320 (locus 29684 .t000012) derived from phytozome v7.0 (chr-ID 29684; pos 1 74972 to 175528)
tatttagatatcaaaactgtgcttctggttgttgggtgggtatgaaatatgaattagcttttcgctttgctagctgtttcaaacttttgattccttcgcgtgcttcgataattaaaaatcggattccagtttactcatgtattcttatactgtcaatatgttgtttctcgtctacccttcattctagcgaagggagcaaaatgctcaagtaaattaataattaacatagcgaaggatcttttcaaggttttatttgattaagtttaggatactgtagtgtttctttgcctattcatctttttcttgtctcccagattctctttcctttgtttgctctttgcagtcattttcttggtgctaatcatactatattgtaaccatttgtctatctattgtttttcctttagtgcttgaattgaattagtggccttctcttttataatgttgaaattggcagtagcatggccttttgtttgctttcttcatatgttttgcacttatgctggttgtttttatttctttcttcagaaattgtggttgcttaaaccacagacaca

SEQ ID NO: 49685 - DNA, 690 bp, Ricinus communis
  Intron number 2 from transcript 29684.m000320 (locus 29684 .t000012) derived from phytozome v7.0 (chr-ID 29684; pos 1 75605 to 176294)
caaaggtaattgttttacatacagtattcttgggtactctattgcaggaattttctgtaatgtactcatatgttgttgtctaaatgtttcaaaaagtattttcagctcgtagtacatgatttttattgggtcaattagagattaaattaatgtttcactgatgattcatagaggtgtcgtcactgccctgcattgcttgaacttgttatttctgagttggttaagcaagattgataaactccaatgtcggttggcttagttcatattataagcaagttgtagtttatgtagttatagtttgaaaagaatcagtgtaattgaacttacatgtcagtttgcatgcagattgacttaggtttttccaacctttaatttgattgttgtttttatgtccacctatagtgtaatgtacttgagaattatggaaatgagattttatgaacttgatgcatgattgattgagaagtttctcatcattattgtcttgaattcaacattgttggacactattagttattaggttgaggagatttctgtttaataatcctcatcttgcaattctggtttattaaactgcaaatttcttacctatgttgctcagtctgagcttatgtcattttagagcaattattgtcattcatgtttctgattaccaatgtctctgcagatctttcggttttgtaggtctaa

SEQ ID NO: 49686 - DNA, 830 bp, Ricinus communis
  Intron number 1 from transcript 29676.m001660 (locus 29676 .t000051) derived from phytozome v7.0 (chr-ID 29676; pos 3 21647 to 322476 reverse strand)
gccttgatctcagttctgtcactataagagaagaggtattcttttttctctctctattttccatttttcacctgtcaatcaaattgcgattttgttcaataattaagcaatggactgagaactgtcgtagttttattaattagttgttgatgtcttgtaaaaatagcgaactaaaagataaatcagcaatttccactgctggagaaagaaaatcgtcctctgtattttagtgaagaaacttcacaagattgtgggtcctttgcattaaatttactgacaaggaactgaaacaacaagacattgttagaaatattaaactgttcttatacttaggttataaggtgcccagtccgaaccctgacgaccaggtgggctatgcctggctgccgacaacactatcacacatttttacatcagctgatgctgcatatttttgtcctaaatttgcatgcaacttgtgattcagtagccatatctcttcttttgaaaaatatgcagtttgataaataagtggattcctacattgactcacaatatatgtttgctgatggaccaaacaactcccgaaactccttattgcatgggcccgaattcttgtcaaccaagttgtacaatctttctccagctgaggtaatacaattctcttaccttctatcccttgtgtccttttttttttctttgtgcagccattgttgaaaaagcaaagataatgccgagggtttgaacattttgaccttctgcaataagcataggtacttgagtacttgcgacagctgacttgtttcaattaagcaggatctaaatctagcaacacggttggtaagaccaat

SEQ ID NO: 49687 - DNA, 692 bp, Ricinus communis
  Intron number 2 from transcript 27955.m000374 (locus 27955 .t000003) derived from phytozome v7.0 (chr-ID 27955; pos 1 3103 to 13794)
taaattttgggcttccaagaggtatggatattaatttaagttttggcactcttttatgcttctggtcattataaacaattaacctcttcttcttctttttttcaatattttaattgaaaagttttaagtaaataggtaatggctttgagattgtgaacatgggtgcactttatggaattgcgtccttagatatacattccaaatgattgttttacatgtaactggttcatgtttaggttaatggtttatttaggttatattgtgtttcttttggcaatgaaagggaatataatctaggattccatttgcttataaacaaaaaaaaaaattgaataatttgagtatttgtggaattgccagcttatttatttcaagaataaaattggaataggacttttgtgttttatatgtccttccatttcattgtcaaattgagtcatacatgatcttatgatttttgtgtaggatttaggaaacagtttatgtttgggtgaattggcgtgggtcttttccttggactcctaattacaatgtttcattcattcgttgtatactgtaatgtaaactaagccatgtctatgaaaccgaagtccatattcatgaagttacataattaagatatagagattacataaattaaactattgctctttgcagcaagaagaaaagtcaaggtttctcaactcaaggct

SEQ ID NO: 49688 - DNA, 925 bp, Ricinus communis
  Intron number 1 from transcript 29666.m001487 (locus 29666 .t000063) derived from phytozome v7.0 (chr-ID 29666; pos 5 08308 to 509232 reverse strand)
attacagcgattccaaatctcaggtaatgtaattaaatgagaattttttaaaaaaatttggcttactttgtggatttttgtgggttttagggttttgtagagttatgtgaacacttcaaaaaaaaaaaaaagaaaaattaaggtaagggtgtgtagtagaagtttcagtttggcttacactatctttgataaaaatgagggtaaggtaacttaaggttgtgtaaaataaatgaagataaaggttctaggaggtaaggttactctgtttggaaagaatggatggtaaatgaaagaggttttagaaggcaatttagagttttttaaactataacctcctcaaccaccgatttcttgaagggttttacttccagaaaccttacctcttaagtgacacttccttcccaaacaagagttggaggttccaaaatattataaaattctgaaagaccttggaaaaccttcatccaaataggctaaggttttgataaaatatggagtgtggattgttattttcttttttcataattgggccttattagtgtaaacttatggtgaaattaatttccgagtgattttatgaatttagattggtcaggtttggttaatattagactgtctcattacaatttggaacttctattaggtgtattactttagacatgtaaaacatcatgcagtaaattagtttcatttgtttaatgttacttttgctcgatttaattttttttttttccccttgttgaattgattgcaaaaatggtttgttttggtagtgatttaatttttgtcatgcaaagcatcttgcaggaaatgaattattttgcaaatattgacatttcaaattttgctttgttttgttttattttgtatttttatcttttctgctaataaaaatttttgaacttacagcacagatctcgtgacc

SEQ ID NO: 49689 - DNA, 896 bp, Ricinus communis
  Intron number 5 from transcript 28196.m000211 (locus 28196 .t000011) derived from phytozome v7.0 (chr-ID 28196; pos 1 18518 to 119413 reverse strand)
tagtcatctggggtttgctggaccaaataactcaggtttgttttccaacatgctggtactatcattaccttgttttgatctcacttactatgttaatttttccatttgaagttgtatgcttctcattttctgtttggtatagcaattgacattgggatgaatgctgtgacttgctagaaagttgggactttgtcttgacaagcattgtgcaatctaattacattgttaaatattcaatgcaataagctctaaatacaagtttatgcaacactgttgtgattacatttctaatctatctgcattctaagtaatttttggtgcttctagatttttttatatcttgattcaagagcgaagacagaattggtaattaagggaagcaattttgtctctttaaagaaaagagcaaagcagaagggggcaattgatttttaagtaattataattttcccatcaaatatagtgttgatttacaaaatttccaaaagagtatggagtgcagttgcctcccttgctctgaacatggctttgctagttgttgctaaagtataaggaaacttgaggtaatatgttgctgttctaaagttaaatgctcatataagtatgaactttttttatgtaattatttgaaagagaacagtattgaacttgaatggaatgagaatgaaagcaaattgtggttctacaactctaaactgaagcccgtgattaatgtatatatttgtgtctacttgattttagactcaaattcttaaatgttgatgtgccaatgttctctttctaattctcatatattatctgctctttgtttttcctttttcttatttacttttttattttcttcaattcaactataagcccacactaaaggttctgcagggattgccacttttgag

SEQ ID NO: 49690 - DNA, 753 bp, Ricinus communis
  Intron number 1 from transcript 29805.m001478 (locus 29805 .t000009) derived from phytozome v7.0 (chr-ID 29805; pos 4 0506 to 41258)
agctcagagatattgagtatgtgcttttctcctctcccttcatagtaactttttgctctaaatagagttcaaactcataacttatctccaacttcagcactattgagttaaaactcattggttcattattagttattgccatgatagtcattacttaagtttccaaaatattatactttaaagggtcacaaagagaataaaaagaaaaaacaaaagaggaagagaaaaaggatttgaggttcttgcaagtaggaacatagtcttggcttaggtggtattctcaaagtttaggtttttcttgaattgatctcaagtgaattggtgcaccaaatacaagtcctatagtcatcatttatcaaacatagcaaaagaaaatgtaggattggccaggaaaaagaaaataaataaaagcaacccaatgaatcctaaatattcaatttgatcaaattgaccatttctaattcgtttatattctattgggcaataggaaagatatagaaagtagaagggtaggtactttatgtgatctgttcctaaaacattggatggatggatgtaccctccatgaaagtagattcattagtgtatatttattaaaagaaggcagatttggcaccttaaatcaatctaataaatctttatttatttatttatgagagtgttttgtattcttttggatattttcttgtaggggtaggttgcgtaatttgaaattaaaggtaaaaagtattatatttgcaggggttttgggac

SEQ ID NO: 49691 - DNA, 214 bp, Ricinus communis
  Intron number 1 from transcript 29806.m000954 (locus 29806 .t000025) derived from phytozome v7.0 (chr-ID 29806; pos 1 79059 to 179272)
ggacagagatcaacgaggaagaagtgcctgtaatatctataatatccttttctttttctgatattttctttcgttcttggatctttgttttttgctttgatgttcactatttaatgaattagacgtaaaatctttctgggttttgatttatttgttaaatccctaatttgggtatgtttcgattttcttctctttaatcattttcaggagcttg

SEQ ID NO: 49692 - DNA, 797 bp, Ricinus communis
  Intron number 2 from transcript 29806.m000954 (locus 29806 .t000025) derived from phytozome v7.0 (chr-ID 29806; pos 1 79356 to 180152)
ggttcttcacaaggtagaatctttattcaattttatacaaacccatcttttgggaggtatttggccttttcttctttggatatagctcagtatgttgtgtatgctgaaatttgaggcatttttgtgttgcagtctgcagttgatctgcgttagcttaaagaatttgttgtgtttggttgagtgactccttatattttgtttgaggatattaatgaagtaaactttttcttttttaccttataagctaatcgcgcatggttgtgacatgagatgttgtttctgctccgtttctatgaaacataagaatagatatcttacgttcttgttatacttggtcattttttatagttagaaattcaatacatacacaattttgctaaaaattttggcaagaaagatttcagggacactgcacttttgtatttccagttgctatctagcagcctctctagataaatgacaattttcattggtgatttctctccagcacctgagttggttaaaattgttattatatttatgtagcaatgcctatgagcaatttttattgccgcaacaaagttttttcctctaaatcaaattaacaagagtgcaagtgtacgacaggatctttatttaattaactccataggttatcatattatttttctttttcattagttgacatgaggtgaataagaataacaaccataacgatttccattgatgctttacaccttttcttcctctctttcaatcttattgatttctgtttgcatctagatcctactgctgctgcatctcaagcaaatagagag

SEQ ID NO: 49693 - DNA, 367 bp, Ricinus communis
  Intron number 1 from transcript 29726.m003891 (locus 29726 .t000003) derived from phytozome v7.0 (chr-ID 29726; pos 4 1135 to 41501)
acccaggtcagctctccttcttctctctcttaacatcttttgaatggttgcaggaaaagagaaacatggattaaaaaaatagtggaggacgttttttttttttttttaatctgataaagtcaattgacttcttttgatttttttttcacattttccagtctattatttgtagtctcatctacccattgttcacattctctagccaaaaaggggacaaaaagaaagaactacgtaatcaaattcaacgtttattgatttataagtgttgcaacttcaacttcttctttaaagctaaaaaaactgggaaaattttgtgttggtttgttgtttagcgaacaagctgcgagggaagcttggaaaagtggct

SEQ ID NO: 49694 - DNA, 675 bp, Ricinus communis
  Intron number 3 from transcript 29726.m003990 (locus 29726 .t000102) derived from phytozome v7.0 (chr-ID 29726; pos 6 16025 to 616699 reverse strand)
gcttgcactattgcatttttggacttaaagtgccagtaagatcctcttctttgtcctttatgtttgttctctttagataggtgtggtattagacaccgttggtggtatctttagtgttttgacttgtgaaccttgtaaagctgatattgcttactcataatcctgaaagtatgtaaagctctgtaaagagtttgaaggaaatgatattgctgaattgattagtttaaaattctttatctttgagttcaagctgataaacaagcaagtggtttttttggcagttcaatcctgcctgcacattggttcacccgctaaagaaactgttctcgagttctaggtccaaagcttcaatactccacacctttgagcaactgttcagctattgttcaatatcagtcagattgtgatagaattttggcaaagagactactcaaaacctttaactaaggcattagtcaatccctgcagcagaagcagggttcgctaatagtgtccaaatttttctagatatgtggaacttatgtgtgtcaaactgtctatctaagaaaaggaagccttgtgttgtttggttacagatagcataatctctaattagccaaagattatttcactcatatgctgtttctgcgtatgctagatgtctgatacggggatattataatggacaggctgagc

SEQ ID NO: 49695 - DNA, 634 bp, Ricinus communis
  Intron number 3 from transcript 28408.m000201 (locus 28408 .t000007) derived from phytozome v7.0 (chr-ID 28408; pos 6 0078 to 60711 reverse strand)
ctgctgtaagttctttttagcctctaattgttcatttatttatgttattagattgaaaaagtttctgatgtagaagtgaaaaaaaaaaaaattaggaaaattaaaaatattgatgagcttagattgcttattttcagttctaagtgtttctggtttggtagtagatatattatacatggggtagattttttcttggagaatagtttaaatagtgaacatgcttagagtattggttttggtgtttaacttgtgacttcattcaagttttgacacagactttactgtaaaagcataattatgattgctgctctgaagtttctgctatgtaattgtcacatatttgtgggtgatgaccctaatattgttttcaaaaactcccttcagtttccccttcctaactctgacataaacatgcccacaaattcaaaagttctcttgttctttaacttttcctgttcttatatgccatattcctctttgattatgaactttcctatgttatcatattttctcccattgtaaaaacattttaaattgcttatatcaaccatttgatgacagagagacaagtcttttcttcaattatagattgtaactaatatgcacttttatttacaggggaagagaattgaaa

SEQ ID NO: 49696 - DNA, 168 bp, Ricinus communis
  Intron number 2 from transcript 28408.m000201 (locus 28408 .t000007) derived from phytozome v7.0 (chr-ID 28408; pos 6 0732 to 60899 reverse strand)
cttattttcactgctcaggtttgatatcattattcttgttcgatatgttaattgatggtttatgggtttttttttcttttcttttatagaaggtttattggtgctaatttgattatcttttctgtctttgtagaagaaattaaagagtggaaaatacttccctcttac

SEQ ID NO: 49697 - DNA, 617 bp, Ricinus communis
  Intron number 2 from transcript 29673.m000907 (locus 29673 .t000008) derived from phytozome v7.0 (chr-ID 29673; pos 4 2565 to 43181)
ttcagattattaagatttatcatttaaactcattagtaagtttgcacgtgttataataatttccaaattccaatgttagcacatcaaatattgaaatccaataagcctgaaaaataaagaagtaagagaaatctgaaattaattaattaattacccaaatttaacatgttacccttccttgaaccttctttaatgtatgtatcttaactccctaacaagacaaatgtatcttaacttcctaacaagacaaaagaatagcacctcttttaccaatacaaagactaggtcaaatctttttgcttcaattctgcaccattcatatgttacaaatcatatatgctaagactcaccagtcaccaaccgcccaacttccatgccctttcctttccttttattatcttaatttagggattgccaacttccttgaccctttataaacctcatcactcccttcccttcacaacccaagaaaaaccgttcttatctctcattaaaaaagaaaagaaaaagataattccattgataatcttcttcacccactaaactgccattcccttctcacccttcacccaaaaaacaccatattttgtgtatttttttctcaggtatttgttcaa

SEQ ID NO: 49698 - DNA, 153 bp, Ricinus communis
  Intron number 4 from transcript 28694.m000675 (locus 28694 .t000018) derived from phytozome v7.0 (chr-ID 28694; pos 1 74670 to 174822 reverse strand)
gtcctttcaaggtgaggcacatttgatgattcattttccttatttactttattttttcttctgcacaaaaaccaaaagaattccgctgtcattgctttgatttggttaattaattttgaattttaatttttttttcttaacacgaaggctcaa

SEQ ID NO: 49699 - DNA, 235 bp, Ricinus communis
  Intron number 1 from transcript 28200.m000196 (locus 28200 .t000008) derived from phytozome v7.0 (chr-ID 28200; pos 1 04538 to 104772 reverse strand)
agactgacattgcctacttctcctgggtatgcctggctcagtctttcataaatttatagagctttttactttactagattgtaacttggtctgtgtcattgagacactaagaagattcaaaacatcttagagcattaagacatttttcctgcttgtgtatgtgtattcataattttgtttcctcctgtttctgactgcagcttaagtatccatcagcacttaactcttttgagca

SEQ ID NO: 49700 - DNA, 385 bp, Ricinus communis
  Intron number 1 from transcript 27742.m000248 (locus 27742 .t000003) derived from phytozome v7.0 (chr-ID 27742; pos 3 2626 to 33010)
ccaactcactttcccatttatccgttcaagatcaggtctttttcttttttgaatttaattgtgtttctagctttttgaagcagatctgtttgttgggttattttattttattttatcatatgggtttgttgtttcttgaaaatacaaaatgaattaagtgatgggaccaatgttataattctagtatctgggttttgtgcaagttaatctttagttaatgaaataattatttatttggtataagattaagattgaaagtttttgtaatattgaagattggtgtttgaaatggatgttggttgattaaagggttactcctaaattagatattttattaatatgggattttgatttcaggtagaagtgcagactgaggtgaaggttc

SEQ ID NO: 49701 - DNA, 541 bp, Ricinus communis
  Intron number 1 from transcript 29158.m000192 (locus 29158 .t000003) derived from phytozome v7.0 (chr-ID 29158; pos 3 4019 to 34559 reverse strand)
gatcttttcaccggaaggccgtctttttcaagttggtgtgtgtttttcgtaacattagaaaaaatctatcaataatttcaattttatctacgccattgtcattataacgctgctgttttagagtatcttgaattattggttgatagatattttagtttaatatgtggttatttgtcattaaattgcagtgatttaaactgttaaattagtgctgagcgatttatttataaaagatgtacagatttatataatttcttagcgccattgtagctttgcataatttatgttgtgattttgaatgtaaattcagcaagtgcaagttttacgatactctcttcacattagaatgcaggttaatctaaaacttttgatgtccatccattagtttttattttcttagttcaagcattttctcagttttcttttataaaataatgttacagtctgctgaatctttgatatacctactgcaccgagttaactctaacgagcttaatagggggtgattatctattctaataggtttggtattatgtagaat

SEQ ID NO: 49702 - DNA, 681 bp, Ricinus communis
  Intron number 1 from transcript 29638.m000508 (locus 29638 .t000007) derived from phytozome v7.0 (chr-ID 29638; pos 7 5222 to 75902)
gcggtaacggtggtggcagtgggtaaaactgagctacttaactatatttacatgtatgaaagatttagtatgatgcctattatactaaagaggagtttatcttctatatcgtccacatcatatatatatatacatatatattataaaatgcatatatgatattcaagttttctttgatgtatgatgttgaagactgtattaatatattactgtatgtacctttcctaattaagtattttaaagtacaggttaaattgtaattattgtttcttgttttattataaggtatgtgcatgatacggaaataaacataagattgtcttgttccctttttttttcttaaatataattttctggtataagattgaactaattttccctctattatagtgtgcatgccaaattataataacaacatgaagatcactactctctttgatatgtatttttgttcaatgagacaaagactgaaaccaaagcaaatcccagtaattggtctgtacagaattatggtatctagattaattctaatggcaattagcatatggtgatgataataacataatacttgattaataacatagaccaagtttttttgatgttgccaagcccttcatgagcttggggctgcaatgtcaattcgtttttaaggtatttaggcctcatttgaagggttgaggc

SEQ ID NO: 49703 - DNA, 808 bp, Ricinus communis
  Intron number 1 from transcript 27519.m000109 (locus 27519 .t000001) derived from phytozome v7.0 (chr-ID 27519; pos 5 0766 to 51573)
agaggacaaagtactgcctcacttctaaggtatacttgcattttattatttttctgttatgatcctgcttaaaaacgaacaagaaaaacattgaaataaggaattacatcccttgttttaatggtatgaatacattcaaaaggtagccaataccgaattaattggctaatgatgtaagcctaacagaactttcaaaatgactaagcataggtaaccaaatgtaccctggtctagttcatacagtaatggccacaatttgtctgcaagtgcaactggggtaacattaactataggatgtgcaaaatagcctacttatctcagttttcatttataaggaaaaagaaaaggaaaaaagaaatgtggatactacagctcatagatggaaactagatttgtctgaatatatctggttgggactactcatgcgtgagccattttataataattggtagcctgaagaatcaggagtgtaaagagagatgagccttttgctttttgaatatggacttgtctaactaaaagttggcttctacttgcaaaacagagaaagcaagagacacttgtaataaaaaacagagaaaaataaaaaaagggttaaccaaatgtggtctgcaattttatgacaaaatgagatgaaagttataataattacaataactgaaataaggcatgtagtaaattagttcagtgagagtattgttttagtttctcattaatttttgggcaagattgttaatatagtttatgaattggaattgtattaaaaattgcagatctcccttggtgtgatactagccattccatcctt

SEQ ID NO: 49704 - DNA, 723 bp, Ricinus communis
  Intron number 1 from transcript 27798.m000597 (locus 27798 .t000018) derived from phytozome v7.0 (chr-ID 27798; pos 1 54614 to 155336)
cgcactttggatagattaacggtaagtccattctcccatttactcttattttcattttctttttctgtttgtttcctcagaaaaccgaataatggaaagctataaatataacaattctttttattgataagtattttttatttttcacggcggtgccaacggtgtgttctaattatcactctttcaattttaatctcgtacgtagtgttccgtgctttggtgaaattgacccttgacaaaaaaagaaagaaagtaaaactacacaaacttaaaattctgtacacatttttttttaaatgaaaaatgaaaagatgacattttttaataataataataataataataaaattttttgctatactgagattgggtatgggaagaagaatttgtgtttgggtatgtgtttgtgccgttgttggtggtggacttttgaattgttggcgttatataattgaccggcaagaagtggtgggtcgcagatagtgagtgcattgaatttcttttcttttagatgtggggttggctggctataagcctatattttcactcatgggctgcttttggttaacttgacctgaatcgatactggaatctttctcttcacatctagtatttggccggttgctatttggtgggattataagtgcactgatttaattgtgctacttttcaatttaacttaggttttatgtgatttactatttgcagactccagaaatttgg

SEQ ID NO: 49705 - DNA, 971 bp, Ricinus communis
  Intron number 2 from transcript 29634.m002119 (locus 29634 .t000065) derived from phytozome v7.0 (chr-ID 29634; pos 4 13697 to 414667)
ttgactaacaagcaggtttctttaccatttcttttcgttataatctgcttcttttattgttatttgcttgtttcatttgcaaattattctgttcctgttttaagtacatgcgaatatttagaaaaatatttacctactccaataccatatccccatttaaacatactaagcccatagattgtcactcatatttatcagtattaaatgattaaggattgtgtcactcatctaatgttgaagtgtgaaacacttaaaaaaaatattacttacctatttgttacagtgtatgcactcatagtaggtaaattttgcccgtatttaaagtaaaattcgaaaagaaaaggaggaagaattcaatgtgttgggtatagagccatcctcaccctctttctaagtggatagatagatagatcttgtggtgttgcaattgcgaattgccaacaagtgcaatcactataagtggtctccagctatgatagttctcaatttgatccataaatttggttttctctacctgtttgtgctgtgagcctgactgaattaatctttgaaatgactgttatatgttatggattttctgcttgtaactaatatctttgtaacagatacaacctgtcttatagtgaccccttaaaaaggctggtaatatttaatgatgtcaaattgtttgggtatttttttcatgcgaaagtagaagtatcctcaatctcattctgaatttaattaactaataatgtagatactatattccatatttgtccattgagctaatactgatactgcaataatgtgtaatatgctcttgtggctgctattaaatataatgttgtattacatgtctgaaagcaaatgttttgaagtaagatttttttgttttaatttttttgttttcatgaaataggtatttaaagtgatcggaaatttctgtttctgcagtttgctgacttgatacaacccattgaggaaaggat

SEQ ID NO: 49706 - DNA, 494 bp, Ricinus communis
  Intron number 1 from transcript 29692.m000519 (locus 29692 .t000002) derived from phytozome v7.0 (chr-ID 29692; pos 7 8541 to 79034 reverse strand)
aaaaggtcatagagaaaaatccttatatcaataaggtatgcttacggacccaaatcaacttctaaagtttcttctgttttattaattggatatgcttgcgtttcttccactgttcttgagagctaacgaataaggctggataagatatgcttggtggggttattgcttccttgaaaatggggtcattatttggtgcccactcggaagaaacgttcctgaaaaaaattgtacactgaagaaaccaaaacaatttataatcaatcagtttcctgagtaaatgaccagtgtagccttcagtacaagatataataaagatagtttgatgagaataaacatgaaaagactaaatttgactaagaaatcattaaaactggatgggttattaaaaaaatcagagtggcattaaagtctcgaatcagtttgaacgtttatttgagtgtcacaagcttcttatttctttatttggtcatattgatacagctccatctgcctgc

SEQ ID NO: 49707 - DNA, 521 bp, Ricinus communis
  Intron number 5 from transcript 29629.m001391 (locus 29629 .t000042) derived from phytozome v7.0 (chr-ID 29629; pos 2 37308 to 237828)
tggttcgtattttcattattgtattaattcttcatttatttactttggttaaaggattgtttactatgaggcggttggtgtttcgaatatggcgtctcttgccgactcacggcaaggtaatcaacattgttaattacgacagagatggagattcgagaatttttagggtacaaaaagagttaatattgactgttgtaagagcctatttcttttcagttgcttaacaggctatatttgattcatcgactcaaaccagtaaatagtgcacatcgatcatgtaaacatactgttaaagaagtgtgactcatcactcattactcaccctgttcaataaaatcttgctaaagttatggatctagtgaattctagtcttctaactagtcaatgtgggaacgtgattaaaatttatttcataaaggttagatggaagttgtccagaaatttttggtgttccacgatttactgtttgttcacttttttggacaggtgtctgttggaactgggtaggtacttctaatcac

SEQ ID NO: 49708 - DNA, 1021 bp, Ricinus communis
  Intron number 2 from transcript 28611.m000101 (locus 28611 .t000001) derived from phytozome v7.0 (chr-ID 28611; pos 2 2983 to 24003 reverse strand)
ctcaaaatcgagttattgtcgagggaaaaaatctggtaatggacttttctgccttcttatgtatgttttatgactaatttggttccgttggagatatgagatttctgtttgacttgagaaacaagaattctcttatgttgcaatggtgtattcttagaatgcttaaaatgtacgagtttaatgcttattgcaccattttgttgggagattgaataatacttttttattgtttgtgctggcatctaatttcattatttgttgatgtagtgcttatgtatcagctacaaatttttctgccaaaatgctttagtaaatttgattgtttatgcttttatcatattcaattacttccatcaattaaaagtgtatgaaactttgaagttggttcaaagaaatgttgggtaacaatcaagtgatttaaaatttaagcaaactaattatgtgtctgagctgatgagttctctcttttccccttttcttttttccttaaatataatacatattacatttttcctcatctcatgtttagaccatatcaagttgtttcctgaaaggagagaaatcaaggcaagtgcaggattaatgttgttggccaatatacaatgagctaaaaaagcattttaatacatgtcaatgacttcattactttgaagttcagccccaaggatttacacaaaaaaggagaatctaggatcagggccttaaaaataagaagtaacaaaattgtgctctactagaaaatgccttgttctgtttatttgttttttcccctaacgtctctatattttatgccatgtcatagattttactgtcctttcttgctgatcttgtatctctgagttataagctcagttttgttatatgttttacctaataatgagatggattagtggaaatattttttatttttttaatgattctgtccactggatgagatggaaattatgttcatatcaaattatccataatcttcttcttttatggatgtaggtaaaaaagcacatcaaggcaggtgaaggtc

SEQ ID NO: 49709 - DNA, 757 bp, Ricinus communis
  Intron number 2 from transcript 29648.m001928 (locus 29648 .t000015) derived from phytozome v7.0 (chr-ID 29648; pos 1 10172 to 110928 reverse strand)
atttgcttgggccttactcacctttgtctatcttggtatgtttttaatgcttttgtggggtttctatattatccatggcttcgcagttttgattgtgaatcaggaatttgttggtctgttttaggttcaatagtcttgttgatgataaagatgagaagatcagtgtgtcaattatgccttcttaaaagtttaaagctgtttcactggttatttatgggcacatccagttacctgatgagggatttaagagaatggagaaagtttatttaagtagtaatttgatggtctgtacctgtcatagagtttatcttagatgcccagaacttgttctttactggtatgtttgaaatttgagttgttattaatggacggagagtttgtattaggtctataattcgtttatctcttttgtctcccctgtccatgatgacaaccttgatactcctttagacacgcataattatcaattcataagaattattttattttctttgatgtgcaagtataaagatactatgattttgcatgcctgcctgcagtgcaggtgcgggtggtttaaatctctgcttctacctcctctcaactgtgaaaggaaaaagaaaaaataaatagaaaagaaaatagaatcatgattaggccttattttcttggttcatccttttcttatttgtataccttgtgccttctatgataagaagttccatgaatattgcgttaatcgtatcttggatacttcttttgcaggtgcaagaaccac

SEQ ID NO: 49710 - DNA, 528 bp, Ricinus communis
  Intron number 1 from transcript 29648.m001928 (locus 29648 .t000015) derived from phytozome v7.0 (chr-ID 29648; pos 1 11206 to 111733 reverse strand)
ttatctgatagggattaaatcttaatcaagtatggagtttaattttactctttcttacttggttgatcatttctgttgatgcttttagctctttagatcatttcagttttgctaaaattcgtttcttcttgtttctagttttatacaagcaaatatggttatctttctttctttctgcttttggcttgtttttgttttatttgagttaatccgtctatacttgccttatcctgataaaggttgttatgggcctcttgggctattgatagttattgtttcgctctttcttattatactatgaagagaaagagtaaactagttatgttctttttttcttctcctttttctttttggatttggttttcctagttttttttttttttttttgtccatttatcaaattcaattactttttgcaattctgtttaattatatttgctttatttgtctgacacacactccttctctttctttctttctttattgatgacaggaaaaataaccaagaaactatccttttgcaattcc

SEQ ID NO: 49711 - DNA, 802 bp, Ricinus communis
  Intron number 3 from transcript 29727.m000478 (locus 29727 .t000017) derived from phytozome v7.0 (chr-ID 29727; pos 1 48954 to 149755)
gcaggacgtactaggtgttggcgaaaaactagaccgtaagaaaaaattttaaattcataatcacttgattttcaatatatcactttgttctactgttgctgaagatgaatttcaaaagaacgcaatgctgaaaattataattaagactgaagaaagatttacactccttaagcatggataaattcaaaaattatgcacatgcatgaatccttgctgagttgatgaatgaatactcatgagaatttggttggatatgcttataaaatgtattgatttaggatattatcgtagttgattttaaaactcaagcttattgactatataatcgtggcgcctcttgtagtattaacgtttaattgacaatgcgtgtaaggcatgctcaatgggtgtaaaccccaaagctgccttcttttggtggcatccccagtagtttaatagcgtttgatgcatgcatatcccttggaaattatgaaaatggtaggtcttcctatgaaaatattggagagctgacttctgacatatttattactttatgaaaccaccattcttagttccaggttttataagctagaattcttttatccttaggcaaattaggcagatagttattttttctttttgtttcttttctatttgctcttggtcatctgctgctgttcccttatattcttatcataaaattaatagaatacacatgatattttttgtcagattatgctctctctctctctctctctctctgaaatatgctcttttgaaatatgaaccttgcacattgtatggtaatgcagaggtcagtgaa

SEQ ID NO: 49712 - DNA, 933 bp, Ricinus communis
  Intron number 3 from transcript 27574.m000222 (locus 27574 .t000005) derived from phytozome v7.0 (chr-ID 27574; pos 3 2210 to 33142)
ttgaagacagacatcttcaagtaattcaaagcaaggtttgtggactgtggcatttgagtaaaatgttgacaaattagattggacattgctttatacgtaaacagcttcgattcaagtggagaccaccccatagcatgttgctaccagaagcagaaccctaaaaaggttatacataatattaggttaactatcccgagacctaaccttaatgggaatatcactggatcatgacgttatgtagaaagtcttaataattggattgaacttactagtttgtagtatcaaatgcagagattaaaccattttcagtaatataacagttttagaagtataacttttagagaagaaaaacaagtgaaaagataaaaaaaaacttatatctttttagctaaccttgcaaacatttttgcatcgttggtaatttcagttttaattagcaactgcttatcctatgtggtgaagaaagaggaccatcttcagatcctatcatcgccatcaacccaaccccagcatcacatgcttataaaaggttaggctgaatgtttcgattcagcagaaacattaaatcttttaagccttttagctaacctcccaacatttttgcatcattggtaatgtcagtttgtaagtagcacctacttaccacagtattaacatactcataaaaggttaggctgaagtttcaagtcagcagaaatattaatcttttcaaatttcttaaccatgatgtaagagtaatggtatcaggtttacttcagaacagggatagtatgagagtttaccttaatttgatagttccatccaaaatttgtcaaaaattactttatacagtatagtaattgtcttaaatgcttctgctgtcccagaagatgatagcgattacaattacacatttcaggctagcagttctcttcaaaacctggagtccttaaa

SEQ ID NO: 49713 - DNA, 784 bp, Ricinus communis
  Intron number 2 from transcript 29725.m000234 (locus 29725 .t000003) derived from phytozome v7.0 (chr-ID 29725; pos 1 80967 to 181750)
ggctcttcaggttcactttaaacttcccttgtatacatatatgcatatcctgactactgtttaaatctgattgcatttctatttaccacaataatctagcacatgtacttctatggtttcatttcataacaaaaggatgaatttcctttgcttttcaaatctctaaactcaggataggaaagtatatagtttatttttgatgtgaatatttggataattcactcctattgaattgtgcgtcactttttagttgattataccttatatttcttgagcaaattagaagaatttctatctaaagatgccaatgttcttccttgctactgactgcatttttaaccataatgtggagttggcattcagtttcttaaaacaaaaagattaagagatcctccacacaatgataaaagaaaaaattttccgaaggtgttttttatttacttgattatcatggtaattcttgtgcaattctttttatattttagttcaaatgaaagttgaaacagctgtgttcaagttgacagatatgaccctttaactttcagttgctaatgggagattgttcagatgtattattggttgtgcattgtcctcttcaccttccttctcttccatgtaattattttaacaaattatttcaaattcaaaaaagttcttctacatttgttgataagatttctgtaatttcgactgcattttctttctaagaatttattgtgacataatattatttcttctggaaattgcagggcgttctattgctcaatactgttcttacaggtaa

SEQ ID NO: 49714 - DNA, 959 bp, Ricinus communis
  Intron number 1 from transcript 29737.m001230 (locus 29737 .t000024) derived from phytozome v7.0 (chr-ID 29737; pos 1 95988 to 196946 reverse strand)
aggtttgtaacatctttaccttaaattttcttattgcttcaatacaatacccttttcctgttattgaacatttcttttgtttatttatttatttatcaattgtttttatgttctcgtttcgatggctggttcaattgtttatggcttccatttatatgataatgattcagataatcgtttttggttctggattaaggaatttgcttgtgttgctcatgttattgccttcctttctgtgtcttatgtgcaattaattcaactccttaattttccaatttatgttttctctcttttaaaaataatttttattgtcttttgactcatcggtgctctctttttcttctcattttgttctctgtttgtgcatatgtcggtgccttcatatcatgggccaatttgtgatctgagcttttcatttattatttcttgccgtcttgataactatttcttgttttttcttcctcacttttgtgaccattcagctctaaatagacaaatatgaaaaaaaaaaaaagaaaaaaaaaaggaagttgataagtagacattctaatttaagtttgatcatgggccagatgtttcctggtactgtcctgatcctttatgggatttttcggcgtctttgtcactatctgcaaatacatatcaactcctgaatgatttgtattgaaaatgttaaagatttacttgatattctttttttcttttacatgagatgttaacagatgagattaacttgaattttagctaattgagcatctcagaaatttatatgtaagcttttattgctttgctatgtgcaaaagaaaaattgcacaacctgtttgtaaagattagtggaaataattttgttatgtcatatgatgcagctaagcctatgtgcatgcaatagtaagatttcatttatgtgctccgttgcttacgtcttgtttttctgtgattcagctacgattattccgggt

SEQ ID NO: 49715 - DNA, 646 bp, Ricinus communis
  Intron number 1 from transcript 29761.m000424 (locus 29761 .t000018) derived from phytozome v7.0 (chr-ID 29761; pos 1 57313 to 157958 reverse strand)
aagaaagttgaggtacgtttacaagaaagtgattgtttttgtgatcttctgcatggtagttaattttttatctattttttcttgataattaaagggttattaattatccatcataattcttttgaaattcttgaactatattggctaaacacagtcttgatgatgttgttgaattgccattttcttccttttaaacttcaccaggatcttcttgattactacttgtgtagttggtatttaccaaagttaataaggaccactagttgatgggtcaaatgggcaagtgggtatattatggattagaaattagctagttttgaactaatgaagattcaaattttttctatatatgtaattattgctcccattaaagcacaataactaacttctccacaagaaatgtaattttaaggcttcaagcactttagggtatacatgtataagcatgtgttaattacctttacatgtattctaatcaagtgacatatttggcttatatttgaagcatgttcattttactatttgggttttttttttttactagttaattaataaatcaggtagaattttgtctctgttattgcactgacatcttggcttgatttgtgtagaggaggctagaggagaaaagggcaaaagcactaga

SEQ ID NO: 49716 - DNA, 401 bp, Ricinus communis
  Intron number 1 from transcript 29794.m003327 (locus 29794 .t000026) derived from phytozome v7.0 (chr-ID 29794; pos 1 41280 to 141680)
cagtggctagatatcttcaacttgatagagagcaggtatagatcatgagtgcttcctagttcactctgtttgttctctcacacacgcatgcaaacttgcacttgctattgttaaagttgccatttatttgaaaaggtaatatagacatgcaaatggagggactcaaatagacatttattttctttttagtcaaaattagatattgaggagcccccttgtcttctcaaaataagatggcaactcaaatgagattgtgaatgtataatctagcacttgttcctcattctttcatcattgcttcatgaaagagatgctatttgtttatctgttgacgattttgttgttgtgatgcttgggttgttaaatcagtgttgctttcctccgaacttagctgggcacac

SEQ ID NO: 49717 - DNA, 683 bp, Ricinus communis
  Intron number 1 from transcript 29632.m000077 (locus 29632 .t000003) derived from phytozome v7.0 (chr-ID 29632; pos 4 5336 to 46018)
caacgcctactagcatctatttttctacttgccatgtataaaacctacagatatttacaccattttaattacaaaactaaatataaatggtcataaaatatgtatcacattagtaagttaaatgaaaagcaagtgtaaaaaattacagacttacaaacatgctcattaaataatttgaaacaaagataagaaacatataatccaactaatcattatgattagcgcataaatcctcatcttcgtctctctatttcttttttgattttgactcaagtattagttcatatgactcttcatgttcatcatcaactaaatcaacaaatactacttcaacgtcatttaagagcacacattcatcaagtcctgtatatgtctcattgatacacagattcactggctcatcatcttgttagtggcttaatattagtaggaatatcaatatgcacacaaccaatcagtcagacttatcccttctcaatctaggataagagacataatagacttgtgcagcttgtgtagtgggaataaatggttcatacttgttgagtctacacctttggttaatatccactaaaagatataatatatacaccttcatcccagcattattagtatgatcaaagcattcacataataatataatatgtatggttgtgtataaactttagggagagtccacttgg

SEQ ID NO: 49718 - DNA, 369 bp, Ricinus communis
  Intron number 1 from transcript 29439.m000224 (locus 29439 .t000010) derived from phytozome v7.0 (chr-ID 29439; pos 8 1931 to 82299 reverse strand)
ggtaccatttctttttttgatctaatgttctcgttaatgggtaattattaggtagttgcgctttttaatggttttgatttatatatttcagtttttttttatttgatctgggttcttcttttatttttatcgaagaaagtgacgtaaagctaatgttcaccctcgttgtttttaatgggtttgttatatatttattgttctgggttttgtttgattgatgagaaataccaagtaaacgaaaagtaatactttaagcggattaagccaacaatctgcatctgtttgaatttttgttttttctttcttatttattgaattctgggtttttggttagggataagagaattgaagctaataaaggacaagcaa

SEQ ID NO: 49719 - DNA, 905 bp, Ricinus communis
  Intron number 1 from transcript 29790.m000821 (locus 29790 .t000016) derived from phytozome v7.0 (chr-ID 29790; pos 1 73904 to 174808)
agcgcgcaaagaacaggtttggcttttaagacattttgctctaatgtttaaataatttgctttatccaaagttggtttacatgtttaagaaagattgttttgcgagtgttttgagttttttaatttattatcggtaaatttgcttgtttgaaaatgtgaggagtgaaggactgcaaaattttttgtataatatggatttcattggtttaaaggggaattataaaaattttgcatctagtggctagatcttctatttctaggctcataaatttacgttttcaatgttgataaaaagggttcgagaggttctattgaaggcttgatgctgtatttggcttcaattagcattattttaattgttaccattgcattattttaatgaagcaagatttatcctgatgatgatggtgcatttgcatattggtcttaccaatttgctttcaacacaattttattctgttgaaatggtttccaactaccatggatttgtagatttaaaaattaacaacgaccacatcttatcaaactgccatggctcacattgggttctagaaatagttatttctttcattttgctaaggtcaatttagatactattccaatttgggtattatacttggttgttttgatattaagaaaaaaattgtattgcttggatgtctgcaatggtccttacttttatatcaaatgaccatctcatttttcttctaatgtgaatctagttattgaacttctatatgatgttattcttgctagtcatggaggactggacgttagaaatgatgcttagttattttgttttatggactaagaatcactgggaaacattcagacaatgatgtaattatgcatcccttggtttaggattgatgtatgcttagtgctgctgcaggcataagcaagtg

SEQ ID NO: 49720 - DNA, 803 bp, Ricinus communis
  Intron number 1 from transcript 27428.m000109 (locus 27428 .t000004) derived from phytozome v7.0 (chr-ID 27428; pos 2 2927 to 23729)
aggtgcatgtctatattttctactttttcttttgctccctagattgcaattaacatccaatatggaggtgcaatcacatctttctgcttttttttctcataggatatgaaactatgaatatacagattcatatttttgataaagctgtgtgttttactgctattatagataaagatttttagggtgtgcgtaaagtttgtcaagaaaatactattattagcattgttgttacgttttggtggtattgccatatcagtgtcatcaattcaagtgtttatgctccttcgtcgtttaaggaaaaagaatagctttaacccaatttgtattatggttggtaaaaacacttctcaaaaaaaaatattatttgggtttgaaaaactactttcggaaagaagtaggtaagcccagtgctttttctaaaagtaggtttgacaaaaataatttatgaaagaaatttaaaaaatcaatttattaaacataaaaattcaaaacgtgttcttttaacaccaaacgacatttccaaacaagcttaagatttggaagttgtacttaaaagaaggactgctttggcatgagaaggcttgacaatacgaaaagggctacaagctcatacaaatgcctcacgcaatttaatactcatattttgtttcttgagttggtctagatgatttaacttctcgctgaatgacataaagaagataatggttagtgtgaacttggtaacatttgagctatataattattccatcaatatatgttgtttgatgactggattgatcaaaatgcaggccagtggactcaat

SEQ ID NO: 49721 - DNA, 573 bp, Ricinus communis
  Intron number 1 from transcript 29653.m000297 (locus 29653 .t000008) derived from phytozome v7.0 (chr-ID 29653; pos 7 7133 to 77705 reverse strand)
atactttggaaaagattacttgtcataattctactgtaagagattttactttctttgatttgtagcttcttcttttttatttattccaaatcgaacttgagtattgcatcaattgctttggagcttttctgaataaatcatttggaagaagtgaagtcaattcctgcaaagacttactattaacttctaattttcttgagattgcgagaatattagggtattgaattattatgaatcaaactatgatttaggttaattttgcaaatacattagttcttgcaagcgtaatcgccctattgacatgaaacatttacaagaattcaatttaactcttgcaaaactatgaaatttttttaaagttgaaagaattgaatctagcaactttgaccttattgaacatgggaattgactaaatgaaattataattgaactgaattcttgcatttttccagacagtatttcttattaaattcttttgttttatgttctatgtgtgtaattgttagcaaatgagtgttcggtgcatacctcttgtatgctcttttcatacattctgtttgtgtctttcttagg

SEQ ID NO: 49722 - DNA, 375 bp, Ricinus communis
  Intron number 1 from transcript 29606.m000100 (locus 29606 .t000003) derived from phytozome v7.0 (chr-ID 29606; pos 4 0469 to 40843 reverse strand)
ctattctctccagattggaccgtttagataccgttagtgtcttcattaacaatcttttgagatataggttgtaatattttcccttgtttctcgggcttccctttcttgttctttctttctcgttttgctttttgtaaaggtaagatatgtaacatcttttttgggtgtcttgagttgtttggtttaaaagaaaagaaaagaaaagactttggaatgaataatcccaaatgaaaaaattgtcagaaaatgtttaatttatcagtacatatgttgaactttctgaaggagaagtaaagtactttctagtgatagatagatagtgcagagaatcatatgtttgctgaatgttattatcagttgaggcagctagaagac

SEQ ID NO: 49723 - DNA, 584 bp, Ricinus communis
  Intron number 1 from transcript 28128.m000156 (locus 28128 .t000003) derived from phytozome v7.0 (chr-ID 28128; pos 4 0972 to 41555 reverse strand)
cgttcggcctcctctgctcttgtcgagcaagaaaagtaactcaattctttcagagatctggatcgtttcgttttccttcagttatttttttgactggggattttagtttttctagataattgagtatcatatgttgttagatttgctaatacacacacttcacatatactgtgtgatctcgctattgatacttgtattaagtagtaattttattctattatgctcgtcacttttctgtgtgtatcagatattttccttacaagtcttgaacttctgttttactttgcaagggtttactgtgccttatattcaaaataaacgatgtgtgtgtaaccttctttattgacaatgtacaatgctgtgatttcggttcttgtgttttgaatttcagtggtggctttcatttttcttttttaaaatttgtcatctttcatcactggtaatttaaagtcaatgggataactcattcttcatgatcttaacatagattttcttgtttgtgcacgtcacaagtgctgcatgcttaacatatttgtgtttttgttgcagatatctttcagagttgttagcagagcgtcataagc

SEQ ID NO: 49724 - DNA, 590 bp, Ricinus communis
  Intron number 3 from transcript 29634.m002126 (locus 29634 .t000072) derived from phytozome v7.0 (chr-ID 29634; pos 4 48747 to 449336)
caggttggataaccttatttactgggtttttgaaatatattttccatttagatcctattattcctttttattttataaaaggtgtaaaaataagcaaaggaaaggcatcatctgtaatcttttgaattatcttttaatggctaaaatcataatctaacatgagaaatgctagggttggggaacctaaactaaaacaattgtaaaccaatactgactagaaaagtccttagtcgacccaaaataggataagaaacatttaataatttctaattacaatagaattcctaaatataactactaaaactttcctagttcctagttacaatattaagaattctattttcataaataaaataaaaatgagatattttctagtgcagtcttcatcatctaaatcaaactggcttcatttttcttacaggacatgaattgcatttgttgttattgagtgattagatggccacaaacaaattggcttggccagtggggaccttagtttaaattcaatattttttcttccatccattttatgttgtgtgatagatttatttctttcatggtcttatcattaccttatcttcagacagatc

SEQ ID NO: 49725 - DNA, 792 bp, Ricinus communis
  Intron number 1 from transcript 29815.m000489 (locus 29815 .t000001) derived from phytozome v7.0 (chr-ID 29815; pos 5 112 to 5903)
ttaaagtttggctcaaaagagaggatttacagccggtaaagctttgatcttttccattttgtttttgttttactttatttgaataagacacttaccgtttttctttcttggattttaggttgattccttttggtttcttgaggatattttactgaattagttcttgaaatgtagcgactctgtttttctttttcttggagggattatagaatttgaaatgatttgattatttttgggtactttgaattcttctcgtgttatttcttgcttcatttaagcgattgttgatgacaattcagttggatgagggctttatctttgttttattttcatgtttggtttgaggttacagtttaggaaggagatttatttcgccagtttcgcaatgtgatttaagcatccttttggttgagctaggtggtacaagtaattgaattagcttgttttcctgttattcattactctcagagctgctagcgtccagtatattcttgcttatgaattctttaattcaccttctcttttgtgatttaaatatggcatacttaatgcaaaacctgaggttgcttttttcagattcttttgttagttaagagcagaggccacgtctgtgtggtgactgctcgagaaacaatatgtacttggtcaattttccaaagcaatgtcttcagatgagttcgctgtttgatatttgaattggaaaaatgtgcattctgattgactcttgtactgtttgtctcaatgctctgtttctcaggttttctcatttaagctacgcggagcttataacat

SEQ ID NO: 49726 - DNA, 435 bp, Ricinus communis
  Intron number 3 from transcript 29739.m003742 (locus 29739 .t000178) derived from phytozome v7.0 (chr-ID 29739; pos 1 114225 to 1114659)
actggtcagcttcttattatattcctctttcttttgtaatttcattcaactaataaattagtattgattttgatgctgtttaaccatagttgtttcccatataatgcgactttgattacttgctcagaagagttcaacaatcaaatttgtgcaatgactgaatgcgatgattattatgtaaacatgttatttttgtactcagttcaaaatatctgcatgtgttctgtatggatgcttcacgctcaagtttgtatctttttatctatcccattgttttggatgaatattgtttaagatgtgaaacttttttttccttctgcaaattactggggcagcttctgtttttaaaattttagaccttgcttttgctattagttgagtttctcatgtatttcaagcttttgaaacttgactttctttgtcaattttcagctg

SEQ ID NO: 49727 - DNA, 371 bp, Ricinus communis
  Intron number 4 from transcript 29739.m003742 (locus 29739 .t000178) derived from phytozome v7.0 (chr-ID 29739; pos 1 114734 to 1115104)
cctgtggacgtattggcaaggtatttgatttttattttaattacattatgaaatttgctttcaaaaaaaagaaacaagaaaaatcttaggctagtttaggaaatcagctgttagttagtcttgcatttataaactaaatcttcagtgctttcaaatattctgattctttgtggtatacagactctaattgggccctaatacaagaagtgatattctgtctagtacatccttcttttgcattcctatctttgttttcaatcctcaatcatttgttcataatcaagtggatgggtctattaaacaatctgattaagaattatatccttggtgcatgcataggattgcagacaaatctcaggtttatactcagc

SEQ ID NO: 49728 - DNA, 563 bp, Ricinus communis
  Intron number 1 from transcript 27524.m000288 (locus 27524 .t000004) derived from phytozome v7.0 (chr-ID 27524; pos 2 7574 to 28136)
acgaggaatagctgtacagtagtttagcttctaaggtatgatttcccttgcttaattttaattcttctcttcattctaacttcttaatctgaaagattttgtttttcttacttctttatttcattttcttttggggttagatctgttgttaactatttctcggaagcctttttttcttttatttttttcaatcggatcttggttttttgcttgtaattaagataaatccctcttttttatggtttcttcaaatctcagtaaaacttctccttgacaaaaattaaattaacagaaaaacgtgttactttttaggaaatgaattatgagctaaggtgtgaagtatgtcaagctggcaaattttcttttgtaaatttttcacggtgataaattacagaaaaagaagcgacttgttttttttgtttgactagacctttttaagtttaactattcacacgcaacacgcgttagatctgttaaaatataaaagcttcaaagatcctgaatatctgctgcttatgttatgttcaggttcaggtttttttttttttttttaattttaaagg

SEQ ID NO: 49729 - DNA, 433 bp, Ricinus communis
  Intron number 3 from transcript 27524.m000288 (locus 27524 .t000004) derived from phytozome v7.0 (chr-ID 27524; pos 2 8495 to 28927)
atcttttggacatcatccttacaaaggtaattgctttatctgcttttgtttatttaataattttcttttcctgggcttacggtggtcatttaattagttaataaattattttgatcagttattattaattattgtggtaattaaaaatccgaaggtggtggtggtccctataacaatggcgatacttcaacagaaatgagaaatttaaagctaattgttaggggggaccatatataaacttgtggttctttgattccatgtactaggaaagaaaaaggaaagagaagaaaaaggggaaaccttgtcggtgttatgtgtttatcatgttcatatggacatgaaaaggatatgttcttgttattaaatgaatgattagattatgtatggctagtttttgatgtgggtaagatgtttttattacagggtggttgtt

SEQ ID NO: 49730 - DNA, 518 bp, Ricinus communis
  Intron number 2 from transcript 29804.m001552 (locus 29804 .t000083) derived from phytozome v7.0 (chr-ID 29804; pos 1 077896 to 1078413 reverse strand)
ttttgcaggcctctctttgcattgggctatcctttgtaagtacataacttctctcaatgtgtagcatttatgacattataattatagaatctgtgcttactatttgctttcttctttttttgttcctctgtgattgtgctcactatataggtttgttttgtaaagttaagtttcttccgtcaggggagcctttttgctgcctagattttctatataattttcctacattcattatttactgaagttcaattgtgcaataaatgcatggtagacaaccttcatcatggaatcctcattttctgccacttttttcttttccatttatcttttgatttatgctacatgcattattgtactaatgataaattatgtgcagaaatttctagacataatttacaaaaaaatgattaaagaactattggttagtggtttcttcaaaaactaaaactatagtagaaaaagtgtttgtatatttgactgttgttgacattgatgattaaatattatacttaacagat

SEQ ID NO: 49731 - DNA, 381 bp, Ricinus communis
  Intron number 1 from transcript 29804.m001552 (locus 29804 .t000083) derived from phytozome v7.0 (chr-ID 29804; pos 1 078371 to 1078751 reverse strand)
ttcttgcgtatgctttccgaaccaaaagttttaatctttctgcttgatgatgctatttctgtgcaaggttctaacttcgtctcaaaagggttatgtaatttttgctttctttttctttaaatcttcttttggttagttgttttcttaattcctgaagtgataaaaatcatcagtttacctgcttccatgatcaattatgacttgaagttgactttgtaatgactgatttgtcctctattgtttttgtttcagttagcacataattttatttctgtgtttttgctttctgtttttgttgttgtgggtgagtgggttacctcctcattctttctgttctgttttgcaggcctctctttgcattgggctatcctttgtaagtac

SEQ ID NO: 49732 - DNA, 867 bp, Ricinus communis
  Intron number 1 from transcript 28838.m000253 (locus 28838 .t000011) derived from phytozome v7.0 (chr-ID 28838; pos 6 8873 to 69739)
ggcagatatctttgagatttaccatcgttactgcggtaactttactcgatttccttattcttaattgattccttttcagttatatcatcaatttcatgttctgattttttttcaaaagaatattcctttaaactttctttagcagttccaatgaagagtaatctttttgttgttgttgttcttattaattttgcagtatgtttttcatctttgattttgattaagattcaaggaaaaagcaaactttttttttttctttttatgagatgggttttgagtaaagtatgaatttttctgctaaatttagttaccattatgtgtaagatggcagaatctaacatctaggggtttagaaggtttgttttttggtaatttgagttttgggctttttggtaaattaaagcgtagattttggctgcccttttttaattttcttgaagcgttgcattaggtttttaactaaatagcagaattgttttgtttcttactaattagcagaactttgaatctcatagttgtcatttcatatctgtttaagaaagttatagtgagttctgaagggttttgtgtatttgcaagtgtagtttacagtttgagaatctttgctgatgtgtgtttgctttgtggtttatattacttgtagaacataatggaaaacttttatttgtattgtgatcctttctgtttttgaggatgtctatttaattttgggagaggattgggggagtgctatattaggttggttttgtgactaacatccttgctctcagtttgccaattgagttctatctgttgtctgctgtatgtagttgacactgaactcctcttgcagacattagatcaggaaaagcatacgacacagataga

SEQ ID NO: 49733 - DNA, 657 bp, Ricinus communis
  Intron number 1 from transcript 29759.m000283 (locus 29759 .t000008) derived from phytozome v7.0 (chr-ID 29759; pos 1 71256 to 171912)
ccctgcataccctcacggctatcaaaccgtcccaggtactatttttctcttttccttctgtatatcatgcaattacttatgggtcttccgaaacgattctgggtgttttacatttttgggcgagtgattgacaccacttcaattatatcaatgatcttagaattttcttttttaaggggattcttcggacttgggcatccatttcccaggtgcaccgaacgtgcccttagttaattctcatatttggaaatttcatagttgctaaaattcaattcttttaatttagaaatattagatatttgaaaaaaaattcctcatgccagaaatgacatgatgttacaatatgacttattccaaaacaaggcttcttaaatcttatactaattcaaatctgaaaactgttgttgtctccaagctttaacttctgggcagttttcatattttccctttgtttctgtatacagcattgcctttgacttaaccaagtaattagttcaaagaaaattgattagctgaaatttaacattaatcaagcatgaaccaacagaagcaattaagacttgcatcgataaaccagccttcattgagcaaataaagactatcctttcttgtgttgaactttgctgaccttttggtttttacatattgcttaaggtt

SEQ ID NO: 49734 - DNA, 963 bp, Ricinus communis
  Intron number 2 from transcript 29759.m000283 (locus 29759 .t000008) derived from phytozome v7.0 (chr-ID 29759; pos 1 71951 to 172913)
cttccttgctgtggtatcggtgttggctggttcttgtaagttatggttcactaaaacaagtagccaatatgaaatatcatgttttttaattcatttaactttaattggagctttaaataatccatacagttttttttttctccaccacaattcctcagcctttgagatacgcaagtagcaaatactcaatccctgagggcaatgcttcaaatagttgcctaaaaataaaatgcttgatgcacttcaatcttagtgattcttataatttgggctcttatattctttactgctgcaggaaattgtaccgaattcattgatgcttttatgcttcaaaaagttctcgggagtctggagtgtgtccatgtgaatttaattgagcataggtttggggtagtggaagcctatttgtttgacataaaacacattaattttattagcttttttttgctttctcatatttcttttctttgttgctttctattcctctctctttctttggtctcaggtttaattctttagatcttgaaatacttaattattaaactcatatatctaaactgaattttcctttgtcataaacattcttaaaataaatttttggagttgattgagtccttgctgaaacttgaatatggtttacgcctatgggatcttataatgggccatattgttggattatgcttactctttggtactttactaattagaaactttattaactaaagcttttagcgtcattcatgagatgcttttagtacaaaggaacagtcttagggtatgttcatgtgtaattaacattctctttaagaaaataaaagtagaccttttgtttacgttttggactttcttgtttaaattagctggtgcactggaaagtattttccttcatttattaactgtaaggtgtttcattctttcttttttgaaggtttataatcggtttctttcttggtgctatcccat

SEQ ID NO: 49735 - DNA, 904 bp, Ricinus communis
  Intron number 2 from transcript 29709.m001184 (locus 29709 .t000020) derived from phytozome v7.0 (chr-ID 29709; pos 1 00194 to 101097 reverse strand)
caagactgtgaatctgggtctctgggacactgctggtatacactctctctttccttgttacaaaaatcataaatttttcatgtttttcaaatttagctgggataataacacgaattaaatatgttttcattgatcaaagtgatctgacaatgcgtctaccagtcttattcatacgttgaattgggagcaaaagtttcaccttttgactgctttagtgtaatttgtttcttaatgctttgtctgtttagcgcaaagtatggcgaaacatttttacctgtatatagccatcttttcatacagttcacttgccactaaaatcccagtttgctttccaggttttcgttttttacgctttcagactttccaactatttgtacagagaattatgtatgatacaagtaaccattatgcatatcttttatgctctgtcaaactcattgaggaaaagtagaggaattacactctgtctttcccattttaatattggaagacccaatgtcgtttctgaagcatatgatggcacttatgcatttgccaaatcaaactagggatcatcactggctctagttccttaaagtaggtgcttcacatttaactagaaattattatgttgtggcaacatttaaacatggttttatatgctttgagtaataccatgatgccttatttttatgtggcaattaaacacttcgttggagcttttcttttgctgtttgaagactaattataacaaaagagcaataattcctgtaatcaatgatgactttcttagttaatcttttgagtaaattgttaagatgtcgtaaaagtgtcctataaaaataattcaattgaatactctcacttaagttttagtataattgatgcaggtcaggaggattacaacaggctaaggcctctaagt

SEQ ID NO: 49736 - DNA, 377 bp, Ricinus communis
  Intron number 1 from transcript 29812.m000193 (locus 29812 .t000002) derived from phytozome v7.0 (chr-ID 29812; pos 1 1584 to 11960)
gtgcattcttcttttaataggttgattttctttgcttgcatttccttttggtttctttcaatgttggacacatcataatttattaagaagtataaagctaacataaaggcctaacctacatttatctttatcataaaattaatttatataattttattcataatattttgggggaaaagtcacttactaaaaatgaaaataaaatttttcagtattgaaataaattagtaactcaacagttaaatgttcgcttggtggtatacaaagttagagattcaaactctcaatttaactcatttatttcttaagacttacatttaaatactccaaaaaaggtatttaacagggtacattactttttaattttacagggatta

SEQ ID NO: 49737 - DNA, 556 bp, Ricinus communis
  Intron number 1 from transcript 29767.m000202 (locus 29767 .t000004) derived from phytozome v7.0 (chr-ID 29767; pos 5 3367 to 53922 reverse strand)
ctgtaagttctttttctaaattagttttgcagtttctttgatttttttttaaatataagtagaaatgtgatatttccgttaattttaacagatgatgtaagttaagtgaaatgtaaatcttctcttttatttaaaaagaaaattatttattttcttattgtatttggaaagtctaaaaattcaagaatttggttcaactgaattctatttaaaagtacaaggcattttgaaataaataaattcttgcacatgaattattccaaacaagacctagacaaacaatcaaattttacgtttgtttttgttagttgaatgctctaattttactagatatagttttttttttttttaattttcatttattttaaatttctcttgttgcactaaaaaggaaaaattggaggaaagtgaaagcaattgcctgttgtaattagttttgtttataacaatacagtcatcaattatgattagcattaaactaaactttttcattgctccttgaaatcaatgcttactagtgtgttaatttttgtaatgtctcagagttctttacctc

SEQ ID NO: 49738 - DNA, 430 bp, Ricinus communis
  Intron number 1 from transcript 29690.m000424 (locus 29690 .t000017) derived from phytozome v7.0 (chr-ID 29690; pos 3 14544 to 314973 reverse strand)
ttgctgaaggagctaaaatattgcaagatcgcattgtaattttctgtattatcacgtatttgttttaaaaaatttcaacttcaacttagtgattaaatttccttatttattgtgttatttaatttatttaggtgttaataatctattgcagtttttgctttgctgcgtggtctatttatagaaagaaatggtcttcggtcaaaattagggctttttaattctatagaaactcaaaaagaaagttgtgtcgtgttgcattatttcgttaagtaagcaattgtcagctcctagcagctatttacggttattgcactcttcagagaattagcattgcctagtatgtgtagtgaaatttgttttgacattttgtgagttgaatgtttattattttgtaggggaaccggaactataaaagtgttaagcaaacgat

SEQ ID NO: 49739 - DNA, 504 bp, Ricinus communis
  Intron number 1 from transcript 29784.m000366 (locus 29784 .t000012) derived from phytozome v7.0 (chr-ID 29784; pos 8 3115 to 83618)
tggtgcagttcggcatactcagccccgacgagattgtaaatttctctctccatttcccccttctttttttaagtttttcattttcttgaaaaatgaatttaagttatagtgaacttgctgttcttatactcttccgttattattggattttgttgaagctggtctgttgttgagttattgcgctgtgaacctcgaaatttttgaactcatgtgcttagattagtttttcttttttggttttttccagctgaaatgttattgaaatataaatcattagtctctatgaatgagttattgtgatgcgaactagggttttagtattttggttgtggtcttgtgctgctggaaattataagaaaagtcaaagctaagcagtgaaaatgattactagttctagttagcgctaggattaatactttgacctggatatctgaatgagttgtatttatgttgtgaatttaattgttgaatttatgttgttgtggtttcggttggcagagacaa

SEQ ID NO: 49740 - DNA, 810 bp, Ricinus communis
  Intron number 2 from transcript 29728.m000815 (locus 29728 .t000021) derived from phytozome v7.0 (chr-ID 29728; pos 1 45375 to 146184 reverse strand)
gaccccctcaggcaagtttcactttacattcatctagcttactttcatgcaagttatattgtttctgatttttgagtttcatgtgcaaaatttaaattcttacccaattcaggtctataattttagaggggttagttagttaatgttgcatgataaaaggaaactgccttgagcttgtgctagtgcctacacaggtctttcttccttcattagttaccctcttgacgtaatagagacaaaaggaaaatggaaccgaatatattcaactttgtccttttttcggttttctttaccttttttcatttccaaacctgagtcttgtccctttaaatcaacggcttcttttagtcaatagaaatagaaagacttttccacactatgttggatcgatatcttacactttctaattagatgaatgacacttgtaaaatatttatcattctctttttatttagccaggcttctttgaatatatatatatatatatatatatatatatatatatatatatataaaacctaaaatataaaaccatgtcactcatgtaatagttaagtataatatattggaagttgccgaaaattcgtacatgattaatgatattaaaatgatagacatgaacgcctaggtttgattggctaaacaaaatggaacgtaatgagcaataccttccttttctactctcttgataaattgcaagttaagttactatctatatatatacttaaattgactcattgcaagcattattcagtgttatcttagaccaagtaataataataaatccggattgcaattgcaggaagaagg

SEQ ID NO: 49741 - DNA, 371 bp, Ricinus communis
  Intron number 1 from transcript 29728.m000815 (locus 29728 .t000021) derived from phytozome v7.0 (chr-ID 29728; pos 1 46428 to 146798 reverse strand)
ggagatcgaaggtaatatgactgacaaagaaaaaaacagtccacatattttcatgtcatatcattggttagttatagaggccactatatacatacttgattaccatttgaactttgaattttagaaagaataaatacaaaaacaacactactttcttccacaaattgacacatgcaaataggagaaaagagtagctagtgggaactgacctaaagaaaattgactggataatatgaagaatagggaagaaaaatagtattggttatgaacctaaaagaattaatgtgttttgagtttgacatgtttggatatcgtgctaacctaaaaatactattcatgaattctacatgcagcaaggtgcaagctagggt

SEQ ID NO: 49742 - DNA, 487 bp, Ricinus communis
  Intron number 1 from transcript 29770.m000334 (locus 29770 .t000002) derived from phytozome v7.0 (chr-ID 29770; pos 1 21614 to 122100)
gagctacctaccaggcatttcggcagcatcctgaggttggtggttctgatttttcccttttcattttttgtttattattattattattattatttattattattattattattattattttgtgcttatttattttgcatgctagaaaaaaattatgtgaacaacattagattacatgatgcttgtaggatataaaagagcataaaacaactacaatattaaggatacatgtaggacagaataaatgaaatgaaaagaaaagaatgagacttagcttagtgtttttgacttgcagccattcaccacccttcatggcttggcgggtacttctcctatcaacatacatggtgggacgagttaccattgagggtgagggtccttgttgctgatgctggcttttcccaattagcttgtgcatccggaatgatgcaatagtgatgactgcactaatagagaggtggttgaacatgacacatactttgggaag

SEQ ID NO: 49743 - DNA, 839 bp, Ricinus communis
  Intron number 1 from transcript 29776.m000484 (locus 29776 .t000018) derived from phytozome v7.0 (chr-ID 29776; pos 1 42144 to 142982 reverse strand)
atccacaacagcagaatcagcagcagtaattataggtattggctattgctactctttctttctaaatttctgaatcatgtggttgttgatattattgcttgttatttcgggtatgtttatatatggaatatggagcagtgaattattgataatttctagctttgcaattagctccgttcctttagatatgatgctttagcgtctatttggcaaatttatacttttaattagtcttgacgaaccctttggtcaatctacatatacaactatacaagtgtacagtgtcctctctcaatcatttatacactgcattaagttattttactcgtatctctgtttgtgcaacatgaattcagtaataagtatgctttccatgataagaactagtttttataggattcttccttaactattcttacagcttgttgtgtaaacatgaaaaattggtgagttagttgtccaacacggggataagttagtgtagctagattctcttacttttgtgtatgaaagatgtgaaggacattatggaacatataaaggcaattacttactgcactagtaagagtcctaaactctagagatactactgagaatgaaaatcatggattcaagaaatgttgagactttctcaagactaatggactttgctaattgcttgtcaaaggtttgtccattgctgagttactacaaggtttagcaatgtgtacatagactagttaaggtgggttggaagagattgggaatgaatgccaaaataatttgatttgagattaatatttccccttgatgaaattcaatcttccattaacctgattgcatgagggtttgattcagga

SEQ ID NO: 49744 - DNA, 734 bp, Ricinus communis
  Intron number 2 from transcript 29726.m003912 (locus 29726 .t000024) derived from phytozome v7.0 (chr-ID 29726; pos 1 64187 to 164920)
aaacattttgcagggtttgaagccccaaatctgaggtatgatggatttgagtttttttttttatttttgctctaactgtttggaagaatcagtcttttacttgattggaatgtagatggtaaaattagctctagagagattgatataactaactcgctcaataataaagctatggcttgagtttttgttcaacataaaatcgtttcaatacaaaatgagagttgtccatattttgctgctactgtgcctactaatgattctgagttttgaacaaatatttagaattccttttgtcattatttggaagttataatttagaacagactttagctgatataaaattatgcttaatcctgcttttgacttatagggtccgttcatggcttcatgcagtaaggaacaattttttgttttcttataacttggcataacacagtccattttctgtttatgctattaggaacgagccctgcctaatgaaggaatgagaacaaaaaaaaaaaattgttattacttgctttcttaaacaccaatatttctagtatgcttatctttttcttttttctggtcatctttagtatgcttgtcttacacttatatggcactcctcctttagcattattgaagtagatctgataagactttagttgtgcatataacgtatcaaaatcagttgttcggttgttcttgttataaaaggaagcttgcagacaaggttgcagctgctggattct

SEQ ID NO: 49745 - DNA, 634 bp, Ricinus communis
  Intron number 2 from transcript 29666.m001458 (locus 29666 .t000034) derived from phytozome v7.0 (chr-ID 29666; pos 2 46112 to 246745 reverse strand)
ggtattcttctttcttgtgcccattacttggtattcttctttcttgtgcccattacttactcatgtaggggaaagtgtaaaacttgcttatcacctcagaaatctactcagaggcctgcagctttggacagcatgtttgcgcttttgatttacagtatacttctgtatgaggtcaatactaaaattaaatttgtatccaaaatttaaatgaggtcttgtgtggtattattttaatggaaatgaaagaactccatctgttttcaatagcaatattggataaacataacttctattgcaccacagaaaatttttcaaatattatgcttggttttacttatgattttcaggccatcttagatatctcaaaaacaggctacaagaaactaaatggatcctttttaaacagaaagttctatggcatgatcatgcaccacaaactaattcatcgaattatcatttgaagtatgcatatggatatacttgtatatgtttaattgttcatgttgttggtccccaacttaagcagctagcttaagaaatctgtactttttatcttattcaattttctattggattcttaacttatatttggcttgcagaattgtctccgattgcattcccattaagggaagaa

SEQ ID NO: 49746 - DNA, 717 bp, Ricinus communis
  Intron number 1 from transcript 29666.m001458 (locus 29666 .t000034) derived from phytozome v7.0 (chr-ID 29666; pos 2 46856 to 247572 reverse strand)
gctcatttgcttgatttacttcactcaggtatttaaatttgttggggttcacattgattgaattttgattttctgggtttatttgagtaattggttggttcccttttatttatttatttgtttattcagtcattttttgtatttgaattgttgcttttggattctgggttttggaggatttatcaatttttatttatttaattattggttttgaatttgaattctatctcataatgatattgttatgaatatttgtatgttgtgttacttttgagtatatttctgcttgtgtttggtgtttcgagtttatgtttatttcttgtcaaagtatatgaatggccatttattagtttggttagagttctgagttcttcgtttcaggcctttgaaaattataatttctttgctgacaaactaagtatttttctaatgtattagccaaattaaataagctctttctatacagttgtatgatcatagatgatatactagtatggcattcctatataaatgtctgattaatgttgtaatttggtttaattcgtcatatttatgctgatttgtgctactgttctattttattcctaaagtttctattgtggcttggagtttactattttctacatttgaaatttaaaaaaataattttaaaattcatttacttattcttctttgttatatttttgaaatatgattctagggtttcagatcctttgt

SEQ ID NO: 49747 - DNA, 429 bp, Ricinus communis
  Intron number 1 from transcript 29630.m000812 (locus 29630 .t000037) derived from phytozome v7.0 (chr-ID 29630; pos 2 40215 to 240643)
tataggctgccaagctagtgcacggcgcagaagtaactataaccgtactctttgactgcattattgtcattgtacttgtattattgatcagtttgcctactttttcagttctgatttgcttaattctcatctttattcaatttcttttttgttgcttggatatttatgtctgctattatatgtgaaagttttgtctgtttttatcaatgactagtagtaggtgttaccgttaaactggattccttttgtctccgttatattttaggtggaatttgattgttgtcgcttggtatatctatagttcggagtttggttgaagtttaaattcttgtggaattattggcttcttatttcatgccattgtttgaattttgcttcttcttttcatcttcaggcaccaaaagaggagggaaagtagcagcagcagca

SEQ ID NO: 49748 - DNA, 525 bp, Ricinus communis
  Intron number 2 from transcript 29805.m001544 (locus 29805 .t000075) derived from phytozome v7.0 (chr-ID 29805; pos 3 55839 to 356363)
ctgtggcacaacttggtgggccagatcgtgagttttccacttggctgagctcttatattcaaatgtgaatttttgttgtgtgattaccattcttactgccaatcccagacattaattttctatttttcattcagtacaacagcatgagcttctctatcttgtttgcatgtgcaccacacaaacacatgaatataatatgtatgtggatgtattcatgtgtgttcacacatgttataaatgtacatagacacatgatgatttatccaagctctagaaacttttatctatttttgaaaaaaaaaaattattctggcttcaagtagtaagttcatttattgaatttgttggagtactcaattgagaattataactttacgaagagaaaaaagttggtctaatactcaaaacttgttcttgggcgtgttcccaagtatgtgaattcaatttaagtgtgactggatacactgaactattttttcatcttttttctctgtaggggctacgccaaagggtgttctcagggtt

SEQ ID NO: 49749 - DNA, 982 bp, Ricinus communis
  Intron number 2 from transcript 28094.m000179 (locus 28094 .t000011) derived from phytozome v7.0 (chr-ID 28094; pos 9 5918 to 96899)
gcatcttgtttctcaggtattcaattttaccacaaccttttccttttcctttttctcccttttttcttttctttttgtgctgtctattaagcttgaactattaaaagattgtgttaaatatagcatgagttgactatctggctaagaattccagcgtaatataagtaagttaatctttgaaacaagtatatatgatgatgaaatcaagaacatgcagcataactgccagaattcttggccggatattggattggtgctaggtttctcacgattctagtagctcatgctacatttggaaaaaaatgttcatgatacatttgaaaagttgattaagtatatttattaatagctagaggttttatcacttcttctttagtatgaagacaaatgttagggatattgccaagtataaaatttggagttgcatgctcttcatattgacttatgtctcaaagtagagtggaatttctatcagatacatgtcttgtaaaagagggtgtggatgtgtatgccactgttagaaaatgcttaattagttaagaacttttctcggagacatagcccaacaattttattaattggattacatctgatagttcattcctctgatatgaataatggattgaaaaaaaattgagtacctctatcaatcatattatccatttggttaggtgtgtatttgatatggagggtacttgaatttggcttttacaaacttgaagtccttggtgtgtctttgaagttaaaggtttctgaattttgggtgttatcaaaaggactatatcaaattcaaaaccctttcttttcaaatgtgcacttattgaatgttgtataattttctttgaaaatcttgtctataagaggcagcttcgtgatttttttccttttattttttatgagacaagatattctgtttttctgagtcggctgctgctagtactttaactatttggatatttttgcttgcttgctagattctaga

SEQ ID NO: 49750 - DNA, 553 bp, Ricinus communis
  Intron number 1 from transcript 29779.m000297 (locus 29779 .t000001) derived from phytozome v7.0 (chr-ID 29779; pos 5 2452 to 53004)
aaagaacagggtatgatattgacttctaagttattctgtccaacatctcatttcattattttctttgttattctgtagaatttaaattcgaaccctgacaaaactctagtatcactgaatcaaagcttattaatcaacaattttattctatttttgtttttttcttcaccatccaaatatatatatatatatatatatatatataggcagaatacatatttataaggataaaatttggtcgtttagtcactctaatattttaatttttaatttaatctaacaaatactttcaatattcggttaaatttaatagctacctaaattttattttttgaaaacatttaaagcaatacacgtggacatattaaataaaattatatatgtcaaaaagtgtttaaatatcactcaaatttttgagttatttattagattatatcgaaaattaagatattaaagtgaccaaattgataaaatctagatattaaaatatgcatctgtgaatcgttttttaacttttccttgcagggggatttaccaaaagttctgtgaagaa

SEQ ID NO: 49751 - DNA, 717 bp, Ricinus communis
  Intron number 1 from transcript 29753.m000252 (locus 29753 .t000004) derived from phytozome v7.0 (chr-ID 29753; pos 1 75977 to 176693 reverse strand)
actgctcgtgctaagtggtaattttcttatggatttctattgttagaaatgtgaaattgaaagctaaaattcggtattttattgtaaaataaaaatgttaagaatggagtagttggtaaatttgaatgatgttttcaggtatgatagtgttgctagttaggaatttagcttgatattgaagcaataccagctacctgtcaggtaccttttccttattacatataatgtaggtaactaatcattatacctagagctaaatcttttatcattgttagtagtcaaggaagaaaagaaaaggaataaaataaaaaaaagaatgtatatttttttcttgcccagggatagtgttggaagttactgaaggaccctttttaactttgaagtattattgtcttattatgttgtttctacttaaggggattagtatgatcttctgttacacgctataattttcttattcttttcttttgttttctaactttcttgggagatcttcatcaggatataaaacctcacttaatggtcttagtttgtttgttgttattattactgtgggattggggtgtaaggtttaaattgtcaaagttcttgcttctgcccataatgcaaacactgcagagtccctagctgtataataggttgactgcttaacatcattctttttttgttttgttttgtttttttttcttttgtcggggtgatttgtaccaggcaagc

SEQ ID NO: 49752 - DNA, 451 bp, Ricinus communis
  Intron number 2 from transcript 28872.m000252 (locus 28872 .t000013) derived from phytozome v7.0 (chr-ID 28872; pos 1 03685 to 104135 reverse strand)
ttgaagaagaattggacagacttggagccttacatgtgaggctttaggcatagttgttgttactggttattagcttgcgtagaaagtttgaatgaatgtttgattgctgtgtgctattctgctttggtttgataatgataagaaactgacagcaaaagatcggtttttttctttttctttagagaacatgttgggtttattacattgtaagttgtttcacaggaatggcgttatatctaattggcatgttgaggtgggtgtattaggaaactttggtattctgcggtcctggaatatgattatcttctaagttcaattgttgtcctctatgaatatatgagcaatgaaagcccattgctatttgtttcagcattgataatctcatggattgtttgctatttttgttttgggtgaagaccgattcatacgtgctgtgtagagtttttcacaa

SEQ ID NO: 49753 - DNA, 1008 bp, Ricinus communis
  Intron number 1 from transcript 27613.m000644 (locus 27613 .t000037) derived from phytozome v7.0 (chr-ID 27613; pos 2 32387 to 233394)
actcagataaaagttggttctcggatgtgagttttgttattttttggatatgcgaattgcaaaatttcttgttagcatgtaatgctgatatactgattgattgttcactaagagcaattacctttgctttcacaagcaagaattcccttttttggtttgttgacgatacttgctgtctcttcaataatttttttagctgagaatgttgatgggtagattctaaaattgcagattgttgtataatttggcattctttttgtaatttagaatccataacatttgaatgttgctcaagtcaatatgtttaaactctgtacttctaaaagagttgcttttgattctgtttttgctttttatatggttagggccttaggaattttatttaattaatatcaagtttcaaaaatgtgaaactttttcgcttttgcaatgtgtaatttgaatttattttacttctgtttgccctataaagtgatatcgtagttaagtttgaccagtggtaggttgtggagttatatggttgatttgggaaattagcataatctttgatcaaattcactatgtaagcaagttcattcatttgtcttgctgaattaagtagctggagtatgttttgcaactacctgagagttgtctgtgcgtgatagaatttgagacaatataatgtgtttaatttgcattaagggcttcatgtctcctgtctcgcctgtgaatttgggactgaatgtgttatttaacatatgtaaacataccacaagaagttttcaatgtaccgtgtcaaccttatgtacctgccaatgatgtcagtgattatttggtaaattaatatgtgtaatgtctcttctccttttaccgtttctcttttcttcaattttcggtggcaggctagcctagtagttattaggatttgtgaactgcatactgtgcaagtactaacaagtgtcacatatggtgacatgctttttctttgttataacttgtgtgagtttcatgcataatggcttcagg

SEQ ID NO: 49754 - DNA, 1021 bp, Ricinus communis
  Intron number 3 from transcript 29599.m000173 (locus 29599 .t000005) derived from phytozome v7.0 (chr-ID 29599; pos 4 4578 to 45598)
gataggtaccccttgtttcctttccagctgtatatgtgcagctctctatcaagttaatgaattgtcacttatgtcttccattattagactgtgcattgtaatgtgtgacaattatggacacatgatctgcttatgctgtcttggtgatgaaatttgcaatcttataaatattgatactttaatattgaaaattaatgacctaagccaaggattcaagtatattgaagcttttatttcaaatagatccattatctataaagataagcattaggacattttccaaattaacaggaagggcaaagctatgcgtccaacaagcttgaaattcccatcttcttggaaatgtgttacaacaattaaaattagaatgttggtttgttttgtttgaacatgatgtcacttagaatttgctcttaaaatttgataggaagtactcgaaaagtcgtatttaatcttttcctctgtatttggttgcctttcagctaaaatcaagttgcgaaaagtgaaaagaaagaacaaaatgaagaggatgacaactcaactcttttacctctagtatttctggaagtctatccattgtggatatgatgattatcttttttcgtttgcttgatatatttccttttctaatcaaagacacttctaatcttctacatgaatatttatcatccttaatgaacaacaggaaagttttaatgcctacctgtcaggtgcctcattcactgcttttatgcataaatcttaaacgactggaatcttagttgtcttacatgttctcttttacttattcctgactaataattactaatactgcatgagatttgagtactagcattatgcctgatatgtaaagattctgctaccttaacccgattacagataattgtcagaattatggagatttttattttcttttacttcttgttgtgccaactggaatttaacttaacgtcattagcattatgctatgttcacttttgaaacagtatagcagtgaaatttccttacctggtgaagaaaa

SEQ ID NO: 49755 - DNA, 477 bp, Ricinus communis
  Intron number 2 from transcript 29726.m004025 (locus 29726 .t000137) derived from phytozome v7.0 (chr-ID 29726; pos 8 11542 to 812018)
gctgaggttagttttttgaaatctgtacttttatgctactcctgaagtttatcgtgaacgaccaccgttatttatcattgctagaaattatcgtaaggagtccatccttctgcagctttgatgggcatggagttaagacacaatttaaggagaatgaatacaggaaatgacaaacgatgcatgttcatgcgtttgtaatactaaagagattgcttatttgaatagctgatatgataattattaggtgtaattggataaagccatatgccaaagaacatacaagcatgtcaaaattataacttgttgaagtttttgattgaaggttccacctgatgtatcttttgaactactaatttttcctcttatgtgaggcttttttaagggaatggtgccgtattactcacttcccggtaacctattgaaatgtcttcaaatttttgttaacaggcagctgtggtagaaaggtacaataggccc

SEQ ID NO: 49756 - DNA, 914 bp, Ricinus communis
  Intron number 1 from transcript 29733.m000741 (locus 29733 .t000005) derived from phytozome v7.0 (chr-ID 29733; pos 1 06521 to 107434)
gttttggtacattgctttgccggtgtgtcaagaaggtatggttttatttttctgtctaaatcttgttcaacttaacaactagggatgcatttgtgggtttgttgttttacatgtgctaattttgggcattttgttggtaatgtgtactgatgtaaaaccataacatatagaatttaaaattatcagttcttttgcttattgaacagtttccagtttctatgttcatcaatggttttttgctttggctccaagagcaagtacacaatgaggaaaaagaaaaaatcataatataaacaatgagaaagattgcccatttgaatgcaataaaagaaagttgctactttttcctaattgtttcgattaggcatgcactgaaaccgttttttgttgatcccctgtcaaaaccccatttatgatccatatgagctatttaaagatggaataaaagaattttggaaatgtgcgcttttgaccatgtcacccttatttatttctttgtacattttgccagatatacttctttttttctttttaaggaaagagttttagttctggtgcttggtatctttattaaaagaatattggtgttgaatacatttggttaactgcatattccaaagggagagttgatctttcttttttctattcttttcttggaaagaaggtgaaataataattaaagtaaggttatttgaatttgcaatttttaatttcttttgctcattgaaagcagtgatggaatttttattcttctataacccctgaggaatcaatctaggaaaacatgtcagaaactgtccagaacaggcctacattatactagattttccagtttactcagctataaatcctaaggttttactcccttctttgcattttctcattgcagtgcagctattattacagcgtatttg

SEQ ID NO: 49757 - DNA, 624 bp, Ricinus communis
  Intron number 1 from transcript 29751.m001906 (locus 29751 .t000121) derived from phytozome v7.0 (chr-ID 29751; pos 7 24839 to 725462 reverse strand)
ctccagattcttctctaaaaccccaccttacattggtatatagcttcttcactctttcagttgattcctgattctgttcggtgggaaatggaaataaattgttgggttttgtaaaatgatgtttaagtttgattgcttttggaacttgaaaactgaggaaacatataataaatcatgcataaataatactaatgatatatttcccatggtgaccgggttcatgtcttagcccaatgaaaaacaaagcaagaaagacttaactgtcgttaagcaagatagcctacagaaaagtcagataatagatcacttctgtaattttgtatcccaaaaaattaggttgctttttatttcaagtgagattttagcagccaaatgaagaaaatatttcttttttgtaattgattaagaatggtactgaatcttgaattctacgttttttttttttttaattttcaatgttgtgaaacatgccttctttaactgaatgttttgctcttttctatgtgctatcaagtataattatttgctcttgtctaatcaattagaacctacaaatgttctgagagagttttgattatgattattgcagcaaaagtcggaattccggagttcttaactggaata

SEQ ID NO: 49758 - DNA, 337 bp, Ricinus communis
  Intron number 1 from transcript 29729.m002350 (locus 29729 .t000083) derived from phytozome v7.0 (chr-ID 29729; pos 4 75290 to 475626)
gggtctctctctcccccgactttcttatttacttatttatttttctttatcatactaaaggaagcgctttttgatgaaattttgcaatttttttaagtttatagatgtaggtactggtaggatcataaagttctgagagtgtatggatgttagtgtatgcgtatatgatcgagaaataccttttctctctctccctctgtctgcgtccctctgtttttttataaaaaaaaaaactatgtggactcaacaattgtaacatctgtcaaaaatttcagcctgtgcaatgattttgtatcttctggtgtttgattttgtgttgttacaaatgtcctcgcag

SEQ ID NO: 49759 - DNA, 740 bp, Ricinus communis
  Intron number 2 from transcript 29729.m002350 (locus 29729 .t000083) derived from phytozome v7.0 (chr-ID 29729; pos 4 75665 to 476404)
aaactgtcatcaaggaaacaggtgaattttgatttcttcttgttttcacatttcattttttttcttttgtcatttatgctggtgttgaataaatgaattatgttattagattgttgaaaatctaaagtttgatatacatgatttatcttggggtctataagtaagtgagaagaactgggggtatgctggctcagactcacatggtcgagtagctgtaaactgtgagtatgtaaattgaaagagtaaagtagaaggaaaagaagaatgaactgaagaggaagaatatgtactggttttgtaaaactatgtttgcataaaggcacctcatatgtgaactcgatggattttctaatcatgccataaatttgttgcttgctttaagggacttgcttcatgaaagtttgttcattaaaattgatgactatatgtccaatttgaatgcctttttgtatgcagttgattgaccatcacttgatacacgaatatggtgcctaaatcacatgtaggctatccttagagttatgatataactcttaggattgacttcatgtcttattttcctaattgggaactccttcagaaatgctaacatttgactttacctttgacagctgatgcacttatctcaactggcttggctgatttaggttatgtgtatgtcaatataggtataattcctgcttgtttcaaatcgtttctgtgacttagcttttccgtctcttttagtcttattccatttt

SEQ ID NO: 49760 - DNA, 790 bp, Ricinus communis
  Intron number 1 from transcript 28193.m000309 (locus 28193 .t000015) derived from phytozome v7.0 (chr-ID 28193; pos 1 08128 to 108917)
tccagactcatctcaaacaggtctctattcctttcctttctttttttttttcttttaattttcttttgatatcctgtttaagtttcgctaaattaggtttaattagcaatctttttgtacgatcatcgtaaatttgtgtgtatttttgcattggcttttcttgttttgttgctttggtgagtgttagggttttccttttatccctagattttttttttagattgtagtggtcgtttctttcaggattctgtttggttgttgtgaaaataattgattttgatccttcctagaggattgggttttcactgtagatccatcgtgtacgggatttttaggttttatttacggtagagtaggaacttattgctcttagtttgagataaatcatgtgcaaaagttcgattcaatgaattgtttcttaatcatcacagttttggcatggtttcattccttttaaaatctgttcttcctaaaggattgacgtaatataattggattcttggatttttagactttccgaacatggtaatcatgaaaagagagaagttgaaattatatgtttgcttgatttgaaaaattcaatgaagaatagagagaagctgaaatcatatgtttgcttgatttgaaaaaatcaatagagagaagttgaaattatttgtttatttgaattgatgattatctgttaatttgtgttgcttggggtttggcctttcaacatgtcagtaatattaaaaacatggagtgtgttcacagcttataatttgttaattttgcaggtttatttgacctt

SEQ ID NO: 49761 - DNA, 306 bp, Ricinus communis
  Intron number 2 from transcript 28966.m000546 (locus 28966 .t000025) derived from phytozome v7.0 (chr-ID 28966; pos 2 19325 to 219630 reverse strand)
caagccgacaccctacaccttcataaagcgcagtatccattcaaattttatgagttttactttataatctcattgtggttgccttactaatcttcattttctttgcaggagaatgattttagtgtatctcttttgggaaaagaaaattcattgatctaaattgtctttgatttcttgttaatgaatttgattctttttttgccctgatcatattcctgtaggccttcatttctctctttattattttatttgtacaaactgacaattttagatatatatctcaccaagagaattaaaagacgtctt

SEQ ID NO: 49762 - DNA, 758 bp, Ricinus communis
  Intron number 1 from transcript 28166.m001054 (locus 28166 .t000017) derived from phytozome v7.0 (chr-ID 28166; pos 1 65925 to 166682)
tcaggtaactaaaaaaatctctctttaatatattagttaggggtgctttgtactcttaagaaaaaaaaaaacttatggcgttgaattgtcagaaaattttgattttttctgtttcctttgtttaaattcttgtgctaccgaataggcttttgaataactggagaagattttttggttacatggttatttatctatttcgggacttctattggtaactgttagcattttgtctctgttatttggaatatttatttgatgtctacttgatttggtttaaggtggagtttattatgaggaaatttttttgtcccaagtacgaatttacttcaggtgccatcagagtttgcttatatggatttgctttgaactgtataacactggggttataaggtttgctttattttactgaatctattcgttagaaagttgtttaactttgataaatagggaggaaatgatttctgctatttcagagattgctacaaagggttgcttttgtgtttgctggattaattgtttgtttgtgtttacattcataagtgatatcctatttcttgctattagtagtttcctcttcacatccttgctttggtctgacctcagactgttcgaaatttgtacattttacacatgcgcacatgtaattgaaacctaaattgcttttgatatctgtttcttttctcttgtattgtttctttgtggctttcttttaccctaatgtctatgtttgtgaaattgtctttctagtgtggaaattg

SEQ ID NO: 49763 - DNA, 785 bp, Ricinus communis
  Intron number 2 from transcript 28166.m001054 (locus 28166 .t000017) derived from phytozome v7.0 (chr-ID 28166; pos 1 66700 to 167484)
gctgacacccagaaggactccacttccaagaagaggtagacttaattaattctactgtactctatttattagtaaatggaattgtctttctttggggcaatgtggtcactagtctttgtaatgttgtagtagctcgattccttttatatacattttgtttagaaagtgtcggcaactagaactttggaatctgccctactttttcgttttctttctattgtaaaatatccagatgcttaagggtttttagaagctaaagttaaaggaataaaaatcaaagattatcttttattttctgcaagttgcaaccttgctagctaattatggtcttacttttgaagtcacacccagtggactatggatttgtatatgtggagtagaactatgcaacattcttatatgtggagaagactttgcctatattgactaaatttggcttttcaatactgcaagattatggttgacattgtggcataagctgaattgatctatgccaaaggcttcactaaattagttctgtgaaatattttactctgagaaatagcctggaatggcatggaatattctgcaacttgagtatcccttaattcttttcttttcttttcgtttctcccctcaccctgccagttgctatccttttttggatagaagttcaatacatacttctgctgtttttttatttatttgtttatctatttttattttgtcccttagtggaagaatgttgtctaatctctctctctctttttcgcacctactgcctgctgcaggggtagatctgactc

SEQ ID NO: 49764 - DNA, 558 bp, Ricinus communis
  Intron number 5 from transcript 29759.m000277 (locus 29759 .t000002) derived from phytozome v7.0 (chr-ID 29759; pos 7 3867 to 74424 reverse strand)
gagcaaattgtaagggcattacttgtagaaatttcttttcctattttcattttctaatttttaaggaaaatgagaacttgtcattttcatagaaaatttataaaatttgtaaaacttgtttacttgttattatatagaaaacttttattttctatttgggtaatatcttaagtataaatggtaaacttagaataataaagtgaaaaatcattattttcattcaaaaaacaagtgaagaaaaacatagaaaacatgttaaagcttgttttccaaagtttagttagaatttagaaaacattaaaaactgttttccattttcattttagacaagtaacacaagtaaacacaaaattttatttttggttttaatttgaaattttttctagaaaactgacctagttctctataagtaaacaaccctaagcttgattagcgtaagtaactttactttatgtgttcagggatgttgatcttttcaagtggttggggttgctctttatatacatatctcttaattctgcaggaagaacaacgtgttatagaagcaaaaattaggat

SEQ ID NO: 49765 - DNA, 402 bp, Ricinus communis
  Intron number 2 from transcript 29759.m000277 (locus 29759 .t000002) derived from phytozome v7.0 (chr-ID 29759; pos 7 4767 to 75168 reverse strand)
ccctatttgcttcttggttagtatcattttatcaatatgtttctttctttccattttattgtatttgttttaatttgcatgtttggctgcttggtgaatttcagaagaaaggaaataaaaagaatgtgtaattgacttgtctttgcttttgttgaagaatccaattctcagtcatgtgttcatcattcttgtttactggcagagaacataacattaagttatcaatttgtattctctttcttattcaattttttggtgactgaggagaaaaatcaggttgctgaaattcttttctactttgatttttttccttaatgtggtacatatcactcatccaaccttctgttcttttttctttttgtctcagtattatccaagtcttaatcgatcacggtgttgcat

SEQ ID NO: 49766 - DNA, 1048 bp, Ricinus communis
  Intron number 1 from transcript 28842.m000931 (locus 28842 .t000026) derived from phytozome v7.0 (chr-ID 28842; pos 2 40448 to 241495 reverse strand)
caagctcttcatatcgctttggattctgatcctcggtatcctttcgcactctacccactacgttttttcattggaaatttattctttatggtttctttatatgctcatcaataatgggtctttgatttttctattttggcaaatggaataggactgcctctttactctttctcctggctaatccttatttttattgttattctcggcatgtcttattgaattggtgttattctttgtgaatggtttgctttgattgaatctggtgctaaaaataatttttaaggtttttgtattgaggtttctaggtaacaactcaaatcttttgagggttctttttttaatttttattacttacctacttccagtcatgttaagcaatgtgacaaattcttttttttttttaaaaaaaaggaaagaagaaggaaaaaaagaactcccaatgtttgtggattcttataaatgtcgaaggcatataaactttttcttttctcttgtacttgttttacaatgatcagccgtatattccatcaaaaagatgaagtttgtgacactgttgtcccttgaaaaagtgatgacggacagaaggaggggtacttttgcaaactctagtcaaagatcctgtatattattgtctttacatgctcaatggaacaagaaagttttatggatggcaattgagcgactcatctcttatcatgagccattagttttcttcttctgttttttttttttttttttctaatggcttggttgaaccatttgatcttactttaccatttcatgttaaaacctttattagtttctgaagattagtttcagcattagttaataaaaacttttgtaccacttatactactttatggcttatgcactctggacataatgtggtttgcttgcaaacaggttgaacagctttgaaccttagaatattcttctaatgacaattttgtgtgtgctaaaatctactttgcatcatcatttattgattatacttctcgtttcaactcattgattaaaccatctgtcagttcttacgtatttggagaag

SEQ ID NO: 49767 - DNA, 693 bp, Ricinus communis
  Intron number 4 from transcript 28216.m000017 (locus 28216 .t000001) derived from phytozome v7.0 (chr-ID 28216; pos 7 09 to 1401 reverse strand)
gttttccacaagtaagagcactaaagactcttataattgactccataagaaccaaattacaaattcaaaagctgtagcactgatattacgtcaatatctcaacataattttgtaaattcatttcattggtgaaataagcaaaacatttttgttaatgacttattattaacttcaaggcagacaagaacttgttgtctttaattacacagaaaaaaattcttaaaaaaatctgtttggtgaggagatagaaccttgtgagatttattaataactgaacggatcagggaagatgagtgatttcttcttttgtttatgtaattcatattggtgctcatttctcctactattgaggatgtttactggactcgtgaatcgagtaactccttgctcctttatacacaccttttcattgattaattgttaactttgttatgggaattgccaatggaagattatatacagaacaattctgttccacatgttgaattcctttgccttgaaaagaccttttactggatgggttatggttaacttaaactgttaaattatttacttattacttttttttgaaatcaattatttatattactcatggaacaattttctataaaattctatgttttagtactgaattttttcttctattttggatactgattatgtacctttctgttgatgcttctagctggcaaa

SEQ ID NO: 49768 - DNA, 692 bp, Ricinus communis
  Intron number 1 from transcript 27742.m000256 (locus 27742 .t000011) derived from phytozome v7.0 (chr-ID 27742; pos 1 53297 to 153988 reverse strand)
ctagaggtgaattttattttattttctttaacttccccttaattctgaccgaagaaatataaactcaggcaacaacaacatgctttttagtaaaagtctgctccttatcattcccaaattctattcttgggtttgtaccttgagctaaataacagggggtgaactttgtgttaaatgtcaaaaagttcagttttaaagctttttctaaaggatgtaatgaacattaattgtggtgatgaagttgattttggttttagattgggcaaagactttatgggtttatgatgacgctgattttgtttcttgcctaaccagtaagcttggttttatgcttgtagtctaagcaatacctctaagttgtgaaattggctgatgcgataatatatataattctgcttgtatgctatctttctttttgttgaagattctatctgctgcaactgcgatattagttagttaataaccatctgctttctaatcttaaggtgtagtttttgttctgcatctcatcaattaattaagaatttaaactctttctgatatcatagagttattttgcaccatgatgactatttgtctacgcagtttatatatgaactatgagcataagttgtatggaaagacatctttcagctgtatctgaaactcaatgaatttttacagttgaattgaagcagacaataaggcaagag

SEQ ID NO: 49769 - DNA, 567 bp, Ricinus communis
  Intron number 1 from transcript 29657.m000484 (locus 29657 .t000025) derived from phytozome v7.0 (chr-ID 29657; pos 1 76187 to 176753)
tggttgttggtgattgcatcctagttggtttacaggtaactgactcattttgtcttcattcttaatactttctatatggacacatatgttaagaattttatcctctgatgattcatctaattttagatgtttgatttggatgatggagttagtattacttgagagttatttgtttttcacaacttcaagtatgaggaaacactagccttacagtgaagtaatagttcattcttgtcctatacatgttgattaagtgaaagattggctgttatcagactgtttaagttttagcctagttattgctatccttgatgcatagccaacttatattttgattgctgattgataaactcattccattgatttaattgttaaacttccccaatcctgtcctgtacatattgttatgtcctaatgttttcttggtgttgagatatcatcctagttttatttagagtgctctaggaaatgagatgattgctttagctgttagttctcttctttattcgtagtgttgctcacctcaccagttcattttacattttctgccagcctattttggtttat

SEQ ID NO: 49770 - DNA, 775 bp, Ricinus communis
  Intron number 1 from transcript 29625.m000714 (locus 29625 .t000041) derived from phytozome v7.0 (chr-ID 29625; pos 2 11962 to 212736 reverse strand)
gttttttggaggtatccatttcttacctccagttttatttctttgttgctctaataataaattcataacaatgggcaatgataacttattcttatgtaaatgatagaaagctaaaaactagggataaatttagaagaaagaactagaactttcattggaataaatcctgtgtaagaatcgaattgaaatgaattctggcaatagttttgtcatgtttagcgtatttatttcaaaatgccttgtaatttttaagtcaaaagaattgaattctagtaactataagctttttggacagaaaaaattgactgaactagaattgaattgaagtcttgcattttagactttgcaaaacaatatttacattttctgatcgattttaatggacctacaaaaaatggatgctaaatttggtacacacaggttttcttgcgtaattttgatagtttctaaagcatgggatattgctgatagtcatatgttggattttatgtattttgactgcaaaatagaaaactgaatattctaaccattgtaaaggatataactgctggaacaaggataacggatcaatgattatttctttcttgctcattggatttctgttctatgatttcagttgctaaccccatcaattttttgagttggcatttccagagttgaagaaattgtttattattttcacttctatatctgggctctttgaagttcttgattttatgaatgctattatttgtaagatggtctcaacaggtttcggacgagggtgacgtgcttt

SEQ ID NO: 49771 - DNA, 949 bp, Ricinus communis
  Intron number 2 from transcript 29801.m003108 (locus 29801 .t000053) derived from phytozome v7.0 (chr-ID 29801; pos 3 19002 to 319950)
aataaggacaaccttcgctactggctcacctctctgtaagtgactcaattgtcttttgctcttgttatttatatgcaaagcacctaattcttgaagatgcatggacattgctgttactacttgtttgatataatatagcataacaaactgataggttctgctttaagtttatatgatgactgagaggtattagtggacttttctgcatcagcacaaaaatgggttttattgtcaagagggtaaaattgagtttaaagggtttaagcatacttagttagcatccccaccttttatgggaattcaagatagattctttatcgtttaggatacattggtattagttaggtttcatcaaatcattttggttattatctcaatatataagctatttgggttatgttgataattgtttagtatatttttttttcttaatttgctatggttgaaattgttatatatgcccaacgagcccaataaaaaagcaaagagtgcaaggacaattggaaggaactggaaattggctgaatcaacttcgttatgcgtattaatatgatgttatattatttgattttcgtctttttaaatgcttacttgcaagaattctagcaggcatcattctgttttattactttagcatggattaagctgaaacctccgttttcttcttctctgaatattacacattgttgcttttgttcctttttcttgctgtacttaattgtcatgaagttggcctagatatcatattattgaaccactttaattgtactactcttgaatcatggctgtgatgctccaaaaagttttctttttctttttaaattttttttgctattattggcaactaaaggactgttcagtgctcttatcatgatataatagtcagagagctaagacttactttcattttccagtaatatcaagaacttctccccaaaggaaatctgca

SEQ ID NO: 49772 - DNA, 470 bp, Ricinus communis
  Intron number 1 from transcript 29428.m000333 (locus 29428 .t000017) derived from phytozome v7.0 (chr-ID 29428; pos 1 59130 to 159599 reverse strand)
tgccaggtgactctcttcgttatactctaaattgttaaacaatgtcttgtgtttatttttattattatatctatttttattatttttatcggtctgtggaatttaaattgatttatagtaagtattacagtagaatcaaaatcccgaaactgaaactgatttatttaggttttctttttttttaaatctcctatgaatttggttattttttatgaatgcaagttgtctaaaaaatttaaaactctaactatgaaaggatatatttcgttatgtatttgtggccttgttctgaataattatgtgcaattgaattgacttcttgtgaagtatttgaattatggactttccaaacatgagaattaactaaatagaacagaatagaatagacttgatatcttgcattttgttttttgaaaaaaattcccagacaaggggtgtaacttctggtgccacttttgatggagcaggga

SEQ ID NO: 49773 - DNA, 257 bp, Ricinus communis
  Intron number 2 from transcript 29765.m000725 (locus 29765 .t000007) derived from phytozome v7.0 (chr-ID 29765; pos 6 7041 to 67297)
caccaagaccaacttccgtgaggttgcaatcaaaggtatttgtttttgtagtttaccatcaaatttgctttcatctgtgcccaaaatgtaggaaaccaggatatacattgatagaaaaatttagtctgatatcaatttctttgatggtgtcaagttttcttcttgttattatagcttttccgattaaatgtggttgtcccatatttttattattgttcatggtttgctaactttgatctattgtaggattctgggac

SEQ ID NO: 49774 - DNA, 298 bp, Ricinus communis
  Intron number 1 from transcript 28962.m000437 (locus 28962 .t000006) derived from phytozome v7.0 (chr-ID 28962; pos 2 4562 to 24859 reverse strand)
tttcgttcttgtctattgcactgctgggatttctggttggtacttcacatgatcacccatcaagatcataaccttttgtttcttttctaataccatagacgtaggatttggctttctgttttcctataaaacttggaaatgcaataacagattcatttttgtctggtttattatttatttcctacaaaactttagtttactatttcttttctgagtttaatcaaaaagggtaattgtctatatggcttgaaaaccgcttgcaggagggcacatcaacccagcagtgacattcgggctg

SEQ ID NO: 49775 - DNA, 737 bp, Ricinus communis
  Intron number 1 from transcript 29758.m000647 (locus 29758 .t000010) derived from phytozome v7.0 (chr-ID 29758; pos 1 29151 to 129887)
aggccgcgtcgccgctgtgccgcttctagttagcagtaagtttcaatttaggtgttttctttttcatttctattattatgggtaaattctctcttcatattatttcttttggagataatgtcgttttgtttattaatgtagacaatctgatgatcttataattttacagtgaattgtgtgtttttggtatttgattttgggctcttaagtcacgttttagattaatttaggttttctttttcatgaaatttaatatggttgatgagaaagtggatgcaactagagatgttatatttatatatgcatatggtatgcctctttttcattcggtgttaaaacttgttttgatgatctctctgtatatgtgctttacttccaaattagagataatttatcatcttatttgtgaaatcatgtgctaaaattataatataaacgatctcattgatcttcttaattttggtaaacgaaattgtaattgcatgtacttttatagggtagttttatcatttaaattgaaaattggaagggaatcctaaaatgcgatgtgtcgagtgacttctggtgccatctctctttgtaggatgaaaaaaaaaaatgccctaaacaactcttgaattctggacttggaaaagcttgcttattgctaagaacccaaaagctgataattcttaggtgggctctttgctggcattttatgtgactaagatgcaatttattttgttctttagcttttt

SEQ ID NO: 49776 - DNA, 566 bp, Ricinus communis
  Intron number 1 from transcript 29794.m003477 (locus 29794 .t000176) derived from phytozome v7.0 (chr-ID 29794; pos 1 168534 to 1169099 reverse strand)
agaaaccgagtctcagctctcttctctcctctacggttcgtttttggcgctttcatgttccactctgtattatcttttgtccgttcaacttttttttttttttaagattcagtattattcataaaaccgactttataaacatttgcatcttgtagatatgcatatcttttttgctttatctagtcagatcattataatatgttcaatttctgtactaatcttgcgtttatgaattgattttgggacgatattgttttgagagtttttcagtttcttacaacaacgagaaatcgcatctcacaactcaacaatataatcatcgcaaaaatacaatgaaaagaagagtaaaaaagaacataaagaaaatcttctaacacgaaacagtttcttaaacgtgaaggatctctggattagaagcaattattttaacataattgagtctgtcttaagtattttattgtattctcttctgttagaattaaaatagaatcaaacatgatcttgcttctgtttcttattttcccttttttatgcgttttgttgcagatttgtcacagcaagtccag

SEQ ID NO: 49777 - DNA, 269 bp, Ricinus communis
  Intron number 1 from transcript 29599.m000174 (locus 29599 .t000006) derived from phytozome v7.0 (chr-ID 29599; pos 5 8926 to 59194)
gaaatgttagaatttctatttatgtaaaagtttactgtttccaggtttaagtaattaactgggttaagtttctatcattcagatatgatactagggcaacatatatattatatataatgtttgtttttttatttctttttcattagggagttttctgtttcttttctttctttttctccaatttgttactttttaagtaattttggttggatatatgataccggaagttgttttgagatcttaactggttcagtttgccttcagatcat

SEQ ID NO: 49778 - DNA, 694 bp, Ricinus communis
  Intron number 2 from transcript 29326.m000015 (locus 29326 .t000001) derived from phytozome v7.0 (chr-ID 29326; pos 1 319 to 2012)
ctgggggtaccaaaaccacaatcacgcaccagcctgtaagatattcttcccttttatcatgtccatggttgttctttgtttctttgtttgtcttgaaatatattttataggacatttattgaggctaacactgtagactctttaatgtcattgatttagtcagttctattggtgtgaattctagctaagtttaaaagagaatgtgcatgtagtggatataatttttaaaacaaatcacagcctcgtagcgataataattttaagaaaaaattaatgactaatatatagaacacttaaaagataacactcctccaagctattgcttatctccagcttcatttgatgcttcaggcaatatgttttgcgtttttgccaatatgttttgctgttctttttttgtcagcttaggcatagaaacttgtttgcctcttaggcttatgtatatatatatatatatatatgttaaaatatcatattggcagctaataataaaatatatatcagatcatcagtctattacatttgactatgtttgacgagcatcaatgtggatatagctaacaaattttacaaaggatctaagggttacaaatttggacagaacttttgattttttttgggtttaagtttctgcaattttgtataactagttcaattgaaatttttgggcaggatcctcgtgttttaaaggcat

SEQ ID NO: 49779 - DNA, 651 bp, Ricinus communis
  Intron number 1 from transcript 29739.m003643 (locus 29739 .t000079) derived from phytozome v7.0 (chr-ID 29739; pos 4 96606 to 497256 reverse strand)
tggtcttgttatttgtgttactggtttgtctagaggtatgtaatttacagcaataacaattttgttttcttgattttgacgtttttcgtgttaagatgttgatttggttccaccctgcaagttggggaaagaaaaaaggaagaaaatattgtgattctgcgttaaaaactgaatctttttggtaatttttatttgattgagttcttggcaatatgtgcaggtccttacctttttgttcactatctttttgttaataagatacagaaatatttggttgtatggagtcaggaatatgaactctgtagttagaattttatcctctatacttggcaaaatatgcatgtccttttcagtagtttgtccacctgatgctaattacggcagaagtagtaatggctcattttaattagctgacagaactccaagtacgcgtctgactttgctgggatttgtagcttgtacttttatttatttatttattatttattattattattattattattattattattattattatttcttaacattttctgtttggaatttactgatgaatttgtcttaagaagtcctgtttttcttgctcagtttggttaatctatggatatacgtttctactctccatgtacagaagcaaggaagcaagtc

SEQ ID NO: 49780 - DNA, 964 bp, Ricinus communis
  Intron number 4 from transcript 29739.m003778 (locus 29739 .t000214) derived from phytozome v7.0 (chr-ID 29739; pos 1 305020 to 1305983)
agggcaaagcctaaagctgaaaagaaaggtaacttaatttcttatggattgagattagaattagtttgttgtccttccttgttcatctgaatttgctcagtagataattttccaagttggttgattggatgtgattgctatgttgtttttgtctcatacatcttgttgctgtgattgctcaacaattattgaagtaatgaggttaaacaatggaattagacttgttaaaaccagtactttggttcaaatgactttctgctccatgcattttaaggttcaacataggcttttctaatcatgtcatttatgtcagtctataggctattgtatctctctagatgaagtatattcttgtgtaagcatatacaaaatgtggaaagaagatatacagttatatgatatatacacaatgtacatcatgcgtgtgtgaatttcatgagaggaagaagacattcttcccaaattctgaacaagcacgagaggagctgaaggataattaaattgtagtgtaagttaatcagtctttcatagatgaatctagggtgatctattttgcaagtgactttctaacttgtctataatcatgatcagttaagctagctaaattctcgtagaagttgtgacctgatgtcattattgtcagaatagcattacttttagatgtaatttttcttgtgttgaagattgagattattcaacatatgcaaacattaacaattagtcgcagctgattttctttactgttgccaggacagcatcgctattataccattttactgacgacatgtggataacttatggtctgcatgaattgtgctagaaatactggaattttagattcatcatgtatgttctttcatcaacaatgtgttacttgtcatcttttattatatgaatcgcgaatccttgttcctttgatttgtaaacagtgcaagcttctcaaattgcttttggctttggagct

SEQ ID NO: 49781 - DNA, 678 bp, Ricinus communis
  Intron number 1 from transcript 29693.m002009 (locus 29693 .t000047) derived from phytozome v7.0 (chr-ID 29693; pos 3 64878 to 365555)
cctttctctccactgagataaacaacttagagaaggtaagacccttttcttttttctttctcttttcctttttatcttttaaaaatacttgatgccaagcagtatctgatatttacatctctgtgatagggaaatttcattttattattattattattgttattattattattattatttttatctcaattgcatgttttattactctgtctgtttgttgctgtaattgctattgtgagaagaaccatactttagtggtgggtttgatttaagaaaaatgagaaattttctcttacgatatgttccgaccttttctttttggccatagaactttaaaaacaaaccaaacaacattgtgtttaacctcaatgctaaactgactctaattattcttctgtcaaaacttgcgaaggttaatgtttgttgcaaatgaattaacacagttaggcttttaattaagatctcttaatcagctatttctgcttttattggattttcagaattctcattggtattgtggaagtattttctgcatttttgtcctcatagttagtgttctagactactctattgaggagacttatttgtaattctccaatttcatgtgcaaagcactgattcagttccttattcccaagcatagttgtcaaaggggcctgtttctgtgccagctgttgc

SEQ ID NO: 49782 - DNA, 841 bp, Ricinus communis
  Intron number 1 from transcript 29745.m000365 (locus 29745 .t000012) derived from phytozome v7.0 (chr-ID 29745; pos 1 01085 to 101925)
gaagctcagtcatccattaaaagcatctgctgaaggtgtgtgcttgcattccctcctcattttctcatccttatgtttaattcttttggaggttgatttcatcttgtaattgacatctcatacatatatctgtctttgattgtgctatggtgattttgattagtttcatttattggattgttcattctatagtgattcttttctcttggtttttgattcttgtcacacattgtgttcatgatgattgtttaagtgcttgaagatgggaagttgagcagacccagttttggtgggatagaattgcattatcaaatgattttatttgtatgtttcaagttgaatgtcaacaccttatgatccttaagattgaaaaaatggatattcagttaccaattccttttaatttgaaagagaatggtgtcgccgtaaatttaattctcggcaatgctaatggtgtccatctgaaagtccaattgtttgccaaccattttaacagaaaaaaaaaaaaaaaaaaaaggccaacttacccatattccacaggaataatttagaaagacctttcggcctggtcctttcctttaccggtccattcggtcgatcacccacattaggattactcgttaatggttgatcaagtttgatggattcccttctcttttctatatgtgaaataacagatttgctcattgtaattcttgttaagaagttgaaggcatttccctactttagttctcttttcagtttggttttaatattttctatatctgccttttctttggatgagaattttcacttgcatcttgcaggaaatcctagtgagctgactgaagaatccaagttt

SEQ ID NO: 49783 - DNA, 236 bp, Ricinus communis
  Intron number 2 from transcript 29646.m001069 (locus 29646 .t000017) derived from phytozome v7.0 (chr-ID 29646; pos 1 11484 to 111719 reverse strand)
ccacttggatccaacattgtgattcgaacagcgtgagcttttgattagtgtgttcttctcctgtttactctttgcttcatgtgttttttttatttcttttttgtttccaattcctgttctttagatttgatgcaaaaactgatactgtgcacatattatatgcccagtataataataaatagtgtacatttggtcatgcagctgttcagttggggtcgtattacctgtgtactcca

SEQ ID NO: 49784 - DNA, 619 bp, Ricinus communis
  Intron number 1 from transcript 29804.m001505 (locus 29804 .t000036) derived from phytozome v7.0 (chr-ID 29804; pos 7 49755 to 750373 reverse strand)
accgtgtcttctttcttgacaactctggcaaaaaggtctcttcttttttatttctctctattatctttttttattttttattttgcttttctctttctttttgatgtttcgctgaaatattaggatgtgagtgagtttgaagtggtttaatcttggattatgtgaaagctgtctattgtagtgtcattttgctgttcgcaatttcatattttgtttgtttcccaagaaaaaaatgcaaaatagaattttctggcttggttgaggtgaattttcaatgtttatccacaataacatgtgcggcttgtaaaaaatatttgtttgaagaagtaagggatgttatgtagtagtttgtttttgagatataattgggtcgacagtagttctcattatttgtgattttgatttctttaactatttaaagcataactttcaagtgttttatggtgatgatttcttttctttctgggtaaaaattatttgttcagtagcattttagagaaataatataacaattgtttcggatataatatgacaattgtttcattgtttctattggttttattttatctacctgcggctgacatgtagttgttgactaacatgcaggtttctccttggc

SEQ ID NO: 49785 - DNA, 474 bp, Ricinus communis
  Intron number 1 from transcript 29585.m000578 (locus 29585 .t000006) derived from phytozome v7.0 (chr-ID 29585; pos 4 5328 to 45801)
ccccatcgccactgagattctccaagttctttcaggtacaatatatatatatatatatatattagctttttttaattaacacacctttgtattggttttaatcagtctaggttctctggatggtgttggtataaagttatgaataactgttgttgcaatttgtggtcaaaagactccttttgtgctttttcttggtttacctgcagctgcattgttgctcaaagactgaaatttagtgcaatgtggttattcttgttcttgttgctgtttactaaaatacagttgtgatttcgttagtttgttaaagtaatgaaaagctaaaagatcccaaattggacataaagatacagaatttatacttgccgaagatcccaatttgttgttttgagtttcatgcttaagtgaggcagaaaatgatgttccgagtacctattttgatcttataaaactttttgcttgtggtggcagtccaat

SEQ ID NO: 49786 - DNA, 921 bp, Ricinus communis
  Intron number 2 from transcript 29673.m000945 (locus 29673 .t000046) derived from phytozome v7.0 (chr-ID 29673; pos 3 34670 to 335590 reverse strand)
tatcagagcggctgagagaaaaggctgttgaagaggttattttattattattattattattattattaatttttttaataaatttgttagggtttgtgtttcatttagtttttatattaaatttgagatatatatttacaattgattgctgttaatgcttttttgttgattgaattctaagcaatgcatttgttgacttgtaggatctagtttcatgaattttttcttcagtcagtaggaaatgtagatcctggtagtacatgtctacgatgtaagctgtttatttagtgttgatggttaatataaggtcctccaaattggtgaaaaacaagtatactatttcgttgggtgctgcctaattttttaactttcatcattgcttggtaatcttgcaatgtcaaatgatgagccattacaactaacagcacaagaatttttcagaatactgccggatagcttccttttgccttttctacttctttttggtcttgtattttttttctctctttgacatgcatatacttatatataaatgtattctatatatttatttgttactttctatggattggtttgcgtgccaatttgctatttgatttttcgtgcaagaactggattggttgctgggacctaatttctggttaatatgtttcaaattactactattatgtatcgttttagtttgtatgctaaattgaagtctcagaaaattaaaaacaagtctcttcattcttttgtaatggttgtatacttttattgcattgacttatacatctattaatgtgcatcttccttgttattatattttatttctcttagtaataggcttcaattttcttctgtttcattcattttgaccattatgtgttttgaattcttcctgattttgtttatctgcctccctgttgttgtagctcactg

SEQ ID NO: 49787 - DNA, 911 bp, Ricinus communis
  Intron number 4 from transcript 27568.m000254 (locus 27568 .t000003) derived from phytozome v7.0 (chr-ID 27568; pos 2 6496 to 27406)
ttcccagagaccaagttagagcactctctcttcaggtacatttcaatcgactaactgctctgtttttacaatcatttaagtacaggcagtgagtttcactgtcaggtttttgcatattatcgttttgagattgatgatttgaaaaagtgtccgaaagaggcaatgtgagttagactttcattaaactgcagtaagccctttttgtagttcttatgctacttatatgatccagaaggtcaagagggaatgaaagttaagcttttattaagctgcagtgaacgctttttaaatgatccataaggtcctagatttaagtacttttgtttagtgcaattatttaagcagaatagtttagtctcacctgtttgtaaaacatcttgttcttgctaaattctatatgcccctatgagtgattcaattctaaatgttagttctcagcaatacttgtgttgtatatgtccttatgcatgcctatgggagtcaaactgttacatatcattagaaaaattcagcactttcatagacttaagttagctgcttcattatgaaaattactacttgttgcgaatgatacgatctgctgtcagaaaatgtatgtagaggtaggaaatttgctttggcctctcctaacaattagaagacaatatataggaaacataattgcacttgagcattgttgctatttgtctgtattcacagtaactttatcgtgtgttggcttctaacattgttgcctcagtatgttcatcctgtaatgtgaagggcatcatcttatgaaataatgctatcactcctttccttttatgttgttcctgctgtccaactttttctctgtttcatgtaggggttaccaattttgttttggtttgtaaattttgcagcagaaagggttttctgtggtactctctgat

SEQ ID NO: 49788 - DNA, 601 bp, Ricinus communis
  Intron number 1 from transcript 29799.m000647 (locus 29799 .t000025) derived from phytozome v7.0 (chr-ID 29799; pos 6 15199 to 615799)
gatctatcagagaaaaggtacactctttttagggtttttattttcaaatttgggttctttggatttttagaaaagcgcgaatattttaatttttttgtaaaatttaaggtgaggtttttaagtgtttttttatttttctgattaaggaagtctttgaattgcgggccaattgtaagaatttcagtataagtgggtttgacgtggtcatcaattcctttctttctttccttttctttccctgctttttttttttttcctggcaaaacaatttgtcgttttttttctctttttctttttgaattaaatagcagtggaatttaatctgtctcttatgagttgaaataattataattattaattcctcgactgtcagatatttgtaataaaaagtgtaaatttgtcttttctttgcttcttattattcctccagattcttttctttctttggttttcttattgttattatgtgttatttagagacttgaactgaattctagtatatctgctagtgcttaatggtaaaagaaattatttgtttttattggttcttatgaataatttttcagggagataataggactgtttcaggtgcaaaccccac

SEQ ID NO: 49789 - DNA, 866 bp, Ricinus communis
  Intron number 1 from transcript 29589.m001286 (locus 29589 .t000065) derived from phytozome v7.0 (chr-ID 29589; pos 4 59026 to 459891)
ggaccgttcatattcttgattttcttggtaatcaggtgattaattgcttagctcaactgttcatttgtttgattttatcctattggatctgagtttcgattacaatttgcaatctttactttttattagggacattgagttaatgatacttattattcagctctttctttctttctactgttacttaatctttctgtttttgttgctttgaatttcatcaatctatagctcccagctcatattagtaaataaaactatatattggcaatgtcaacgtttagctagaattttaattgtgttatagttcataattgagtaatgtttttgaaaatgtgtattttgctctcttttcttttcttttcttttcccctcgtttgtcttgtcaagtgaaaaatagctatcctgtgagatggaaaaactatttggttcctgtttttccattccttgaaccaaacaaggactataagaggacgtttaactatgtcatatgtgaatgtttacaggacactcttacattgtcataactatatgcttgttcttttactatcaaacacccatgttagtgtaccaattattacttgcttcagaagttttggagctaaaataagatgctttgaagttaggaattagtcattacataacaatcaaatacattaattttcttttgggaatggaagaagggaaggaatgagggttggcaacaaacgtttgaagtgctttatttgcgtggccaataagctgtattagggttaaaagattgtttgtaccttaaaattggtattgcggtattacagtatgcttgaaccatgtccttaatttgtttctttccaggttaaggagtttgctgctcacactgctgcagtcaa

SEQ ID NO: 49790 - DNA, 581 bp, Ricinus communis
  Intron number 3 from transcript 28779.m000141 (locus 28779 .t000005) derived from phytozome v7.0 (chr-ID 28779; pos 5 4164 to 54744)
tcttgtgttcatcagctgaaagggagtagctcaaggtaatgaattgagttgattcctttgtttgccataaacaaatatgcatatattagagtttcctttttaagtaattttggaaaatgtaattattttagctagatattttggataaagttgccttttcagatgttatttttaacctaccaacagcaacttgtagccaaaacatccaacatagtactttttttatcattattatcttttggagtattaatggccatgttactatacaacatgagtattcaatctattaatgctctgggcttccatcaatattactaaactgcaatcgaataaattcaaaccttttcttttctcttttctttttgtcttttttgcatttctgattgacataaacaattcatatgtcctcaaggaatttggtttcgacctttggtgtattgctttatacagtctaaaatacttttttcttatggctgttaactggtatatcattctactgaatctttgatgaatcgaaattattaatttcattatttgattccccagcattggcgcgcagcgattgaaacttgcttgtgctg

SEQ ID NO: 49791 - DNA, 392 bp, Ricinus communis
  Intron number 1 from transcript 29648.m001927 (locus 29648 .t000014) derived from phytozome v7.0 (chr-ID 29648; pos 1 05228 to 105619)
agattcgtagagcttattatcttaaggtttgatgactaggtttcttctttagacattgatatatattttgtttgattcctgatactggttggtgaccttcttgtgtgtgtgtgatggcttaaggtttcctaatctaacttctattctatcttcttgtttgattaaacattagaggatgagtaatttcaattgttcattaagacaattgttacccttcttgttaatttagatccttcctgatttattgttactttctttttctgtttgcataaaatctctattgagtgtcacatgtaattataagaacctattagctctgttgatttatttatcataaaagaaggaaatgttgtaattacaggccaggcaagttcacccagataaaaatccta

SEQ ID NO: 49792 - DNA, 520 bp, Ricinus communis
  Intron number 1 from transcript 27613.m000635 (locus 27613 .t000028) derived from phytozome v7.0 (chr-ID 27613; pos 1 71817 to 172336 reverse strand)
gacgcacggttagcagcttgatcgcaaataccttacatacattgtgacttttaatggcttgatcctagcttcttctttgagttcatttgtaaagtagttaagagtctaaatctataatttagagataatccctgcgcctaattctgctttatatatacattttacttagtgagagaaaagttagaatctaaatatgatttcttatttaattttaagtggcaatttactttgaactgtctgaactttttacttgggacttgggaaatttcttagcctccatcatgctctgaattcacattttagagtatataagaactagaatcctggtcattctgtctatccgtttatctcacaggtgctaattgctgaatttaaagacatttatatcttctaatagagtttacttttgggtagcatttctcttcattgtttgttcagaactaagatgacatgtaatttcctgattttagttggtacattctcatttttcaggttgaagcaaagaaagctgttccaaggg

SEQ ID NO: 49793 - DNA, 724 bp, Ricinus communis
  Intron number 1 from transcript 29584.m000247 (locus 29584 .t000014) derived from phytozome v7.0 (chr-ID 29584; pos 7 9766 to 80489)
gctgtgttttggaagctcaagcatcgaactcgaatgtaagttattcagccttttaattctctattttgttatgcttatggtatttcttatttttttcaaaagaatatatgactagtgatttattttttcagcttatggatgtttgatgattttgtaataggatcatttggaaatttaggtattataatggcatatgtaatacattttgtgttttaactaatgtttgggttatttttaagttgatgatcaggagattggttgtctagttttgtttttgaagaattctttcaagattatgatggttaagatttaaacatgctgaatatgggcttaacttagtttgtatggggtgggggtgggggtggggggggtttcagtaaattattctactattttactttttactaatctcaacaatggaagttgagatcctgattttgttgatgcccttgttatttaccttttttcaattctcagaaaagggaaaaaaaagatagtaggtaattttgccttgtaattgtgaaaattatgttcctgtcaaaatttctgtctgttactgattactgacttaactgtttgctaatgctttcagtaaagtatgcagaccttgttgaggtttatacacaatattatacgccttaaactctattctcatatattttctgtgatttttttttatatatatttcaaattttaatgtttgccagggttttaacttgggaag

SEQ ID NO: 49794 - DNA, 782 bp, Ricinus communis
  Intron number 1 from transcript 28320.m001084 (locus 28320 .t000011) derived from phytozome v7.0 (chr-ID 28320; pos 6 2872 to 63653 reverse strand)
gtttggctttgggatattccattccggcattgaaggtttattctcatattttttttcctaatgatttctcttccttttttgcctttaatttatgtttattatctttttatacccattttattgaggctccttagatgttgaatctgtgaggaaaatttccatgggttttgattgctggtacttttttgtgattaaaaaatgcagtctttttgcgattgaaggtttgggttctaaaaatcatagtgtttgttaatgttactgactcgaaacgttcttttctgttcctatttttttggcgtgatgaatagaagactactgttgaaatgtttgattggtgtactggagctaatacttgtagaatttactggattgaaatttttgtttgattttattgatttgtaactttatagtttgaacactgctcacaaggaactttcaagattttagtattatgttgttcattgatatgcttagtttttagaaagaaaattgatatgcttagtccaaaatgattaggctcctttctttatctctttatctatgcagtacattctgatatgtgaattcatgattgtcatacagagggcgtacaatatcaggtcttcccgtggttattatatgttgttaaatatgcaatacttttgatattttgtccagagtctttgggagagtagttttgtgctagggatgaaagacgtgaacttgacatttgactctatgttgataatccctctttctaatctgctgagctagaactacttcttgatatgtgtgaacagtcc

SEQ ID NO: 49795 - DNA, 218 bp, Ricinus communis
  Intron number 1 from transcript 29693.m002007 (locus 29693 .t000045) derived from phytozome v7.0 (chr-ID 29693; pos 3 63674 to 363891 reverse strand)
gtggcgacagttccaactcagttttgttgtttgattctctaatattttggttgtttttcttttcgatttgtggctttaatggtggatgcagtttttttgttctttttctttcaatttgtattgttatagccgttaatggttcttgttatttgatggtattgttatttttggggatgatggttttgttattgttgatggcaatattgacaatagtggcg

SEQ ID NO: 49796 - DNA, 695 bp, Ricinus communis
  Intron number 2 from transcript 29797.m000353 (locus 29797 .t000009) derived from phytozome v7.0 (chr-ID 29797; pos 1 22450 to 123144)
ccccttacctaaggtacggagaacttttgatttgatatttaccttttccattattaattagcatctcttagattaagaatttgtatttaattctgttgctttctgagagggaccagcttttatcactggtttccatgtgccgtgatcacttctgatcatcgaagatgaagaaagcacaatcaaaaatgagcctgaggcgattttagaaattaagcactcatgttatacaagaactgaaaatataacttgccacagccgccgatgagtttcatctcaagaatttaagaattataagattacaagatggaagtccaatccaaactcaattaaataaattagatatactaattctaatggaagaatgtcaaaccattatcattagttatctacaattaagaatttagaggagagacttgaattctggaccatactttattattaattgtagaacttaggaagcactaaaaatattatcaagaattaaaacgatccgttttgacatctggtagccagtgaactgttggatctttttgggaaagcacgtctgttgacatcctagttttagaattgcccatcttttgtagcagtgatccttctaaatcaatctttgtcttattagaaagcttccaagaaaagtattcataaattattttatatttattaattggtgctaaattaatgcaggacatagtctt

SEQ ID NO: 49797 - DNA, 684 bp, Ricinus communis
  Intron number 2 from transcript 29657.m000486 (locus 29657 .t000027) derived from phytozome v7.0 (chr-ID 29657; pos 2 02494 to 203177 reverse strand)
aggcggatttctgttgctggcctcgcttcaagacagtatgaattttctttacttttcttttttctttttttctccattaaaattcttccttgatcaaattgattgtccaaaattgctggttgtaataggatctttataatttaatagcttaaaacgagaattcgggaacttaattgatttgctcatttcagtctccttcagaagacccaatagtatatagaccatgttcacatgattactcgagatttctcatatggattctcatttaatttaagaacccagtgaggattttcagtagaatttctcattttggttttgcatggttaaaattgttgtgacttctgactggatatgctttcttttaaccgcttaagtttaaaatgcattatgtctacaactgctgaaattgatataatgtgtttgtttaattgattatgtcttagtgagatgcattatgtctaggactccatgttattttgttgtggttaatggaaatatggcatccttctaaaggctaatttcacccttggttctttctttctgttggcgtagctttgctatttacagcttctttagttatttagagttaattcttcaatgatttataaggaattcactatttgttcttttactggttttcataccgcagaagattaggaaatagagtctttctctctgcaccaa

SEQ ID NO: 49798 - DNA, 542 bp, Ricinus communis
  Intron number 3 from transcript 27538.m000325 (locus 27538 .t000012) derived from phytozome v7.0 (chr-ID 27538; pos 1 19280 to 119821)
ataaactacgttttgatccaaggtattattggtctatttgttcatattcattttggcttaatgcttatggaataacggattctaccatatctgaaccaacattattttccaattccgtggatattatttcttttgttctacaatgtaggatatggatgttaaatctggttgaatgcctttttgaagtgtttccagaaatctcttttctcttgttgtgaaggaattcacagtcctcaagtgtgggaacagtatcacaaggatttgcgtgtagggaatctctactaaagtatcaaaactagaccaaaactagacctgattctaatctaataataattttcttgcataattttacaagggggaggggatgggaggggagagtatacaaatttttgtgattccatttgaagagaaggatgaagaaacgcttcttctgccttcttaaatttgcatattactctatcactgctgcttttgtatagcatctttacttatgcatgtttggaacttgtgcagcaaacagaagtgcagattgttagttactc

SEQ ID NO: 49799 - DNA, 616 bp, Ricinus communis
  Intron number 2 from transcript 29676.m001665 (locus 29676 .t000056) derived from phytozome v7.0 (chr-ID 29676; pos 3 43513 to 344128 reverse strand)
ctggacatattattcaggtcagtactcctttctattatcattcatgttattatgcttgaatttggtttattcttcttctttcttttttcttttttatgttttttgtctagttgtttatgcttgtaaaaacctggctcatattactttatgaccccaaatttaaattaaactgcatgcaggatggagttatagttatagttggttaggaagaagcaatcaagaagttctaggttcatttattatatgtctatgctcaaaacatttgttaaacttttagagttcatacagatattggatgtgaaattgaacttgatttctttttttctcttccaaggaatctgtaataataacagttgcgtgcaggaaaatttagttcacaataaaagtataggttatgaggcaaacaccaacttgaaatcaaaagatatgccttggatttttcagtcccagcaaagtccattcataagtcttaatttttgggaagaaaaacagaagaaaactggtttaggaccaagccaatttctcttagctgattatagttggtcctttggttattttatttgcatgataatttttttaaccgttatctcaggagcttgggggaatcagtacttct

SEQ ID NO: 49800 - DNA, 556 bp, Ricinus communis
  Intron number 1 from transcript 29676.m001665 (locus 29676 .t000056) derived from phytozome v7.0 (chr-ID 29676; pos 3 44204 to 344759 reverse strand)
caccctgattcccagaagtttctgctccagatcgagtaatgtttcctttttttttttttcttttgaaaaagattggatctttttgcattttgttttctgggtttttatttgcctcagttcttttgttagcacaagtataataaaattattaaaattgcaatgttgctttcttggacttatcagaatccaagaagtagaacttttcttttctttttttggtagaaaataatgaatttgagactttggtttaatttcttatataaagactagtaaaggagttttggttttattgacttaataaaagtttacagatatatacggagtgtttgacgtatttgattttacattaccctgatttttcaggagctggttttatttacttggttggtttgttcatgtggatttttaattttcatgtggcagaagttttgatttgagttggaaattagctacttttgctaatcattttgatgcttatgtttggttacaacattgctgtttctttaagatgctctagtgattttggtgtgtagggagcggatattggagtacaggg

SEQ ID NO: 49801 - DNA, 779 bp, Ricinus communis
  Intron number 1 from transcript 29751.m001869 (locus 29751 .t000084) derived from phytozome v7.0 (chr-ID 29751; pos 4 40231 to 441009)
gcttccctcatcgaatctggctggctggtaaaacaccttttctcctctcttttctcttttctcttttctcttttctttaccccctctctctatcactttctttttatgattaacccttaaagatgcgatgcatttttctttttctttgcttcttctggatctagctatctaccaatattgctctactttcgttctgtattcttaggattcgaggcttttactgcatgtaattagtagaatgtgtggtagatctttttctttctttctttcttttcctttttgttgttcactgttatgaaagtgtatcaaatcattgttattttatcattgcttcttgtttaaagatttgggtcattgtcactacagcttactcattatgagatctctattaattttattactgaaaagtgactaattatgaaagttgggtacagatattcgtatgtatttcgtgccttctttctcccatttattaatttatgcctcttgtgcgatttgatttctcaaaacaattcttttacaagtcaacatgacagagtcttataacttcccttatagagctgtgaaaggttacaaatgattgaccaattgaaattattaatttgaatttttggtcttgatcaatgttgataagttgtcaatcccatttgtttctcaaacaattctattgcaacgctttattattattattgttcccaattatagctgaaacttttaaggttttaatagttttgttttatgcagtatctgattacacatttcagcgattttcaattggc

SEQ ID NO: 49802 - DNA, 478 bp, Ricinus communis
  Intron number 1 from transcript 29676.m001670 (locus 29676 .t000061) derived from phytozome v7.0 (chr-ID 29676; pos 3 62127 to 362604)
gacctttctacacttcctgttcgctggggcccttggtaattcctaaagcttaccataatatgcactatactctatgctgtttctcaattagtaacttttagttttagtttttatattttaacgaaaattatatgattttgagagactgaagtgtttcacaataattaataagaaagacatagggactgaagagcatatttacattttaggattaaaatatagttatctttaacatttttagggactaagctgtggtaataatgaatcttttctttttttaaataaaagtttataagcagggactgaggtgtagggtgttatcaaactcaaaacactaaatttgctaattatagaatggtgtggactaaaatgtacattactgtaattaacctaagaaagagaattgagtgttctttttctggtttaatgtttgtattttgcaggttatactatagaagagttgaagaaggaaagcaat

SEQ ID NO: 49803 - DNA, 912 bp, Ricinus communis
  Intron number 3 from transcript 27504.m000619 (locus 27504 .t000011) derived from phytozome v7.0 (chr-ID 27504; pos 8 7391 to 88302)
aggtatgtttttgggaaattattacacagaagaaaagagaagggaagacacaaaattttcttttcttttcttttggtattcttttcttttttgaagagtcacagccttaatcaactcaaaaactgaaaagaaagtggtcaaacaaacaaaatggtgaatgaggtctgctaattgtctcttcttttcttttttcatgccacttttcttgaagacaaacaattttttttttcttaaatagataaagaaagattaatagagtaatgatacaaaaaactgctttttgaattgtgataaggttttttaattatttaatccaaaacatcaatgtttttgcttctttttctttttattgtcttctctcttgaatttgatacttgtttgatcaaaacaagctaaagatttctgggtttcttatgagaaaatagagcacttccaaatcaatatttttttcattaaagctcaaattttaattcaaataattatttaatttggagaataatttctttggaaaggaattaatgaaacacatggccaagaaagcttgtgttgttactattccaagaaaattaaggaactctgccatctgaatgttcttttatttcagtcatcaaacatatcagattccttattgtagtgattgcagaatttcatggtctccatatcaagtactactaattattcagttccaaaataatatttatgtatatgaacctgatagtcatactaattttaaagaaaaataaaaaggaaaacacagctgcctattttcttttcctgtattgtaccatcaagaatataaggttagcaaattccttaataaatgatactatctagaccaggatagtaaaatattcatctaaaactcaatggtgtatttattgccttttccttttcaaactgttgggttacagc

SEQ ID NO: 49804 - DNA, 900 bp, Ricinus communis
  Intron number 1 from transcript 29726.m003906 (locus 29726 .t000018) derived from phytozome v7.0 (chr-ID 29726; pos 1 32001 to 132900)
agaatttggcgctcctcttatagagaaactaccttgtcagtatcattctgcactactctttttcttttcttgtgctaatttaccattttgtgtggaaaagtttgtttcgtttttggcctatatgctgtgaattctgataatcttgatcaaaggttggaatctttttggcctctatgctgtgaattttatcaattccgaacttagtacattaatctatctgtctggctatgaaatttgttaataattggcatgatctttaaattatatagtaaccttgtaatctttgtgcaaattttgtattgggaatggtgtgcaatggatgtttaaaattttgattctgttaggcctaaacgctgtaaattttgacaattgagaagttagtaaattgattcatctgagcttttaaaattgttaataatttgtataattgttcaagctgcatatttgagtttctgatatttgttgaggaagcaagttgggttttctggattaagtttattaaggtatattgctaattgggattatttagcatgaagaaattcttaatctgggtcttctctaggaattattagtgaaactgttgcatttagtttacatgagcttggctggttttaattttaataattttgaatgggattctcattttagtaatggcttttaaattttgtgtttgttgtcaactagctgcctaagttgtttgatcatgcgcttcaagttgatttttgtttgtagcagacagaaattagccatttgatattgccaaaatagatattcctattttaatagtttcataatgtagatcaggttataatttcatcaactctttactgttgtttagatggtgaaatgaatatgttacatgtttgcagggataaagtcttctgttactcactcaaaaga

SEQ ID NO: 49805 - DNA, 298 bp, Ricinus communis
  Intron number 2 from transcript 29706.m001280 (locus 29706 .t000010) derived from phytozome v7.0 (chr-ID 29706; pos 7 4186 to 74483)
cttggagagaacaagaatcaactttgtcgcgatcggtgatttcattcattacttctttttcttagtttattggatatttattctataaaggctttgcttaaaacaaacctatttgaggatttgttgtatctatttaagttgctactttttgtcaactatttggcaacgttcttctccttagcaattggaagcttcttttttggtccttttgatttttttggtgaagcttactgccattcgaatgcatcaatttgattgttgtgatacaggttccttttgttcttgttgaagctggtcg

SEQ ID NO: 49806 - DNA, 264 bp, Ricinus communis
  Intron number 2 from transcript 29794.m003393 (locus 29794 .t000092) derived from phytozome v7.0 (chr-ID 29794; pos 5 86262 to 586525)
agaacagttactttcgccaacagacacaaaatgtataatcttttaattccattgattaaatactatttttacttctatttgataaaacttatattttttaatcaaatagattagagaaggattatgttttagtgtggtcaataatctgctggtaacattttggtttttgaaaattcgattggtttttaatgttagagggtgggttttgagtttttcttctttgttacaggctaccaatctggccaccacagacacaaacacgag

SEQ ID NO: 49807 - DNA, 660 bp, Ricinus communis
  Intron number 1 from transcript 28469.m000073 (locus 28469 .t000001) derived from phytozome v7.0 (chr-ID 28469; pos 8 936 to 9595 reverse strand)
acccttctgctcttgaccctcgttgtcgctttcaggtcagtgaatttgtaatcgttttgtcatttcttttctgggctttgattttatagcgttttgatgataatggttcttttagtgtgatagatggagtttgtggaattattctttttggaataatttatatacaagagctcaattgaattgagtttgttgcaaaatcatgtcgtttgaattgatttcttatattttcagacttcccaaacatgctattaagcaatcaggttattgggttctgatagttggggatttgagtttctgtctgcattatgaaaaatggaggaaaatgaaaaatgaaaaattttgatagttacaatatgagccctgttaatgtaagaatgctaagtttaatgttggagttttattgttttccagtcctcagcttttggttatgctcacagagccagccaccagtattaaaaatttatggtttttggatattgatggcttgcatgcgtggactttgatcaattgctcatgaatgtatgtgctactttgctttgactggcatctctatagcataatgctaaatacttgatttttggtaagttttgaatttttcctgtcaaacaagagataatgaaatgtaacaaatgttataacaggaagaggattctgaggaat

SEQ ID NO: 49808 - DNA, 550 bp, Ricinus communis
  Intron number 1 from transcript 29805.m001480 (locus 29805 .t000011) derived from phytozome v7.0 (chr-ID 29805; pos 5 1455 to 52004)
gtttctttgtttcttcttcttcttcttcttcagtgagtgctgatctttctttatatttctttgtttctttattgcccagttatttttttcatcaacattttgcataggattatggttgatttttgagtaaagtttgtttctttccagtcgattatactcttaaaatacggcttagggctttgggttctgtttttcagattgagattattaagattgacgggttttgggttatgtgattttgcgggtaatgtcagctgggatcatgagattttttgattttagatttctcacaacaaagaatgagcatactggcttacagctggtttgttggaacacagattttcttgttgttcaaatagtgaagttgattactctttcttcctctgtatgatatttttttctaatgtcctatactacgacatagaagttgtacttcacttttgtgatctctatggtgttgcatgggagaaaaacaaacatcgtctcattaatatcttgagtaaaatttgtatcaggttgcaccaatcatagcccaggcgtggcaggcgtt

SEQ ID NO: 49809 - DNA, 981 bp, Ricinus communis
  Intron number 2 from transcript 29805.m001480 (locus 29805 .t000011) derived from phytozome v7.0 (chr-ID 29805; pos 5 2069 to 53049)
acaaagagggaagcaggaatcaggtactgttgtcatatcaagtagttaaaacttttatttactattgatagcttggtatatgttcttctttgagatgtacaaggaaaacattatgtaattagaaagtgtgtattttaaatcataaaatttgatgaatggtacttcaaaaaaaattatttatttattcgaacatgagtgtctctaatgagatgagcactgagccctttagagagcgtgccactgatttgcttcttgcaattaaagttcttggcttttaaacctattgccgtgacattgaaattcctagctcttagtatgtatatgtactgtggcttagaataagggacttgagtttgttaagttctcaatttacacgcctgtcagaagagggaggatcatcatacttgtagatatttagatctgtctgcgtagtgagtgactacacaatcctattcagtaggtgcaaatttattcaagaggcttcagttacataatcaggctacttggtgcattcttttgatgctatcgacatgtcccatttaaactagaccattctgcaatggcttagcattccaagttgggccccacaaggctcgtatccaattcttgaaattactgcaatttgaattactgttggattcacattgatgtagtctaattggagaatcatgaactcttctatttcatgttcactgaattgattttacacggacattttgcttggtaggcataatttaattccacaagtcctgtttaagcctgcattttgatgctgttgacatgtcccaatcttgcttcctttgtcaagtcaaggaacagacagtatccttgcaattttagccgtagtttaactccacaattcctgttaatgtctggcttgtcagatgtgaagttctgcagtgcctgcggtgatccttgctgatttatttatatatatgtaaataattgttttcatcaggaaaagtactccagcaattaagg

SEQ ID NO: 49810 - DNA, 495 bp, Ricinus communis
  Intron number 3 from transcript 28592.m000288 (locus 28592 .t000016) derived from phytozome v7.0 (chr-ID 28592; pos 8 8022 to 88516)
aggtaatgttcttccaaacacctttgcgtcttctatccagtttatctccattcttatttgtcaaacaaattatcttcatcaccattattatcttgtcaacttagtatttggatgcagttaacaactttgggtttcttgtttttgtggattgttattactttatgataatgttgtatctataagtagctgtgtgcaattcagtttaatttcatgatgtatagttttttctgttctttgctctatgaactcagagcttgattgttatctgtattctttgtttttgagctattaattattcttttggttgattgaccaaaatagagaaaaaaagcttacatctatatccactttatttggctcattacatctatatccactttatttggctcacactttttttctataagatttttactttttcttttgtcatggaacatagaaatcatattcaactcattgccatttatcatagtttctctccaggagcttgaaaaa

SEQ ID NO: 49811 - DNA, 614 bp, Ricinus communis
  Intron number 3 from transcript 28327.m000365 (locus 28327 .t000016) derived from phytozome v7.0 (chr-ID 28327; pos 1 73840 to 174453 reverse strand)
gaagctgagtttcagaggaaggttgcagaggtgagaacgccaaaccaaagatgtcagaattaacttttcactttttttgttttgaaaaaggaaaaaagaaaaagaaattgatgcatgtcacagccagtcatatctatctgcaatctgaagcatcttgctagctttaggtgattggattcatggagatatacaacataatttcaagacaattgattatctataaatcgtgtgctagacttgtatgctacaggcatgtatttgatgattcacaatcatattttatgatcagctttgatgctgatgccttttatttcttttccttgttgataatcaattcaaattttgaaccattcttgatagttttggtctaatttagctgccattactatacccaagtgcatgcacatgttttctcatgcaactgagacacacacacacacgcaccagatttcctggtcatagtagttgagctgcttatttatagactgagtcaaacgcaaatcaactgcttgctacttctgctagattcttgtattattaatattattttacttagaacgtcacatgattccgctcatgtaaaaacaaacagagtagcggggattctggtgcaa

SEQ ID NO: 49812 - DNA, 638 bp, Ricinus communis
  Intron number 2 from transcript 28327.m000365 (locus 28327 .t000016) derived from phytozome v7.0 (chr-ID 28327; pos 1 74520 to 175157 reverse strand)
ctgccagaagtcgtaagtattctcccttttccttgtatcttgctcttacctgaaagtcacacttctgacattctgtttaaatcatctatcatccctgtgattgtataacttctgatattttactatcttctgatatcatctttgtgctaaggatactaggcatcttgatgaactattttatcttggcacttaggactttactatacaaccttcttgtttatttgcatctcttgtctgtttatgaggaggctaaaagaatgggatggattctaattgggtagtcaggaagatcagctttctagcctttatcagtgccagctgctgtttatttaccataaaattccccatctatttggcaagagctttgactttttatacatgcaaaacatggcttgaagtgaaaattttagtattatattattctcaaagaattatatgcataactataagtttgtagttttccttgaggtgaatttaagggaagcaattcttaattgaacctttaagttttaacaaatttatcccccaacccccaccccacactccctccatccttttgttcattaaaagagatgatggaggaagtcatcacattcattgagatattaataagtcctgtttcttttcctgtagaaaaa

SEQ ID NO: 49813 - DNA, 733 bp, Ricinus communis
  Intron number 1 from transcript 28540.m000037 (locus 28540 .t000001) derived from phytozome v7.0 (chr-ID 28540; pos 3 571 to 4303 reverse strand)
tctcatatccaggtaatttttcttttcctccttgagatttatcttttattcttctttatatatgatgtctaattcttcattaattggataattacataacctgaaagtagctcttcttctatattttataagggtcagtatcataaataagatttgatttataagttttttgttaaaaaaatccatgtttagtattatatctttaattaaataagtttcaattgggattcaaacttgtaatcttctattatgtcaaagtttgaatgtctttaggcgtatattataaagataacaattgtattgaaattatgtgataattaaggctcttgttgtttcatggaaaacatttttcaagttcttctctatttgggatgcttaaaacaataagtcaaatgaaatatcttatattttaaaatgactttctttttaaaaatgaaataaacattttccttcgctcttgataacacactactctctttttccatctttacctttattcctaactcttcctgataattttccgcattacaaccaaatatagaaaaataaattatttttcttttctagaaataaattatttttcatgaaatgaacaaagtctaaataaataataagctaaaaggtaaaatttatccttgtcctttttactttgcaagttcttgttattacaatactttgcaagttcttgttattggttgtaatgaagtttgtaatgatttttggtgcagtctgg

SEQ ID NO: 49814 - DNA, 632 bp, Ricinus communis
  Intron number 2 from transcript 29620.m000549 (locus 29620 .t000019) derived from phytozome v7.0 (chr-ID 29620; pos 1 49494 to 150125)
atattattagaaggccttctctatgtaagctctattcatcgttttatgtcaataggttgacacttatttaaattctttctttcttttacatatttgtgctttcctaagtcccttctagactaagagataatggtttttattgaatgaatattattttctataattgaagctatttattaagtttgttatttcttatataacaatcttatacttcatttaattcagaatggagagagtgaattttaatagtattgttaaagtataagaattaagttaataaggtggagggaagaggacatgtgtaggcataataatgttcttgcatgccatttgagataggaaagttgaagctataattcttgtttgttgggtaggggtccaagctaattgggttccattttgccagctataatcataaatgcttacaccaacttaacaataatttagtggtacctggtaatcaaaagcatgcatgcatagaatttaatcaagaggttttagtaagagtaatttaaatagttttccttttaataatactgtgaatttgttttagtaaagaatggccttatataaagcaattgagttttaaatggtattgggtgaatggcaggatttgaggtgacaggagtggc

SEQ ID NO: 49815 - DNA, 1046 bp, Ricinus communis
  Intron number 1 from transcript 29727.m000488 (locus 29727 .t000027) derived from phytozome v7.0 (chr-ID 29727; pos 2 04920 to 205965 reverse strand)
aatcctcaaagagaaagctcgaggtaattgtcaaaactttctctgtttttgaaactaggtaattgtcaaaacttagtcccggttaatttaaaactatcagattagcaaataattactcaccccggttgtgtgaatctatcaaattagcaaatatttgaaagtctggttttacatgtgtatatatacgttctgttatgttaattaagtcgagcattactactcaaatcttattgacattacttaagcccctatcattttgccacgaggatggtaactgaattgaagaggttgaccttgtcccctttgctgtccttacttggaatctgtttctataacttcctcgatttttgctttgtgttagttacaagaacttgcttcattcttattactgcgctttaatttgtatagttttgttaattccggatcttatttcttggacaagcctgtttgccagaaaagagtggagttcaatacctagcaatctatcttactgctgcttactctactgagtacataatgtccctgatgcaaagccacagatccaagattctgttttttgccttttaccaagtttgttagtttctgaacacagcataacacgctgcataaatgcataatttgatcagtgaatgccttaacttctgctaaatatatattttggtaattggaatgcctaaatgaacattgttgctaaatatattttcttttctttctttttatttttctttttccttttcctttttcaatagaaatttgctactccttttttaacaatgggttcttaaacattgatttaatttccttttcctgtttttgcaaagtgtcataggtggactctgtctcttaggttgccgtcttctttgctttcctcttataacaagggagaaatttgcttcctttatattcgagagccctcaagtgatttgtctggggatagtaatgttagtttgaacgcaatattctgttttctgtcttatatctatgataatgtggacttctttgtgatattaggttgacattggtgaggatctctctggtgcttcaag

SEQ ID NO: 49816 - DNA, 574 bp, Ricinus communis
  Intron number 4 from transcript 27471.m000403 (locus 27471 .t000003) derived from phytozome v7.0 (chr-ID 27471; pos 1 7838 to 18411 reverse strand)
tacagagttggatcaggtttttattcttttcttgaatatgttaaggaaacttagttttctttgaatttctgtatgaacttagtttccttatatataactcaagaatcgcaatataagagtataatatcaagccttgttttaattttctagtcttactggggttttgcagtcttgttcatttactctgtttgtactggtaggtgccattatgaaatgagattgcaattcccaattggttttaccttctctttgttagatgccaattgataattttaactagtgacaatacttgatgccttttgacttcaattagtcactctgaaagagatgcaattatattctgaaaactgtcaaagagtagaggccaaataagaacagcaaatgtttgttttaatttccaagtgcaagtgcaaaaatgattccagaatttaaggactgtggtcccaaaatagattttgtattttgggattttacactagcatttttttttacttccttttcccattccacctactactctttatctctcatgttctattaaaatctaattatgtttctgtctcttgatgtagga

SEQ ID NO: 49817 - DNA, 161 bp, Ricinus communis
  Intron number 3 from transcript 27471.m000403 (locus 27471 .t000003) derived from phytozome v7.0 (chr-ID 27471; pos 1 8444 to 18604 reverse strand)
tcaggtattgattcttgctaactattttggaagtaattttcattgcttctttgcaagcgaaatgtctgttgcttctttggttaaataataaacaagaaaagcagttgttttgattacgtatggaaaacgttgtaggactcctgaagagttcagtgctggac

SEQ ID NO: 49818 - DNA, 815 bp, Ricinus communis
  Intron number 1 from transcript 27955.m000373 (locus 27955 .t000002) derived from phytozome v7.0 (chr-ID 27955; pos 8 168 to 8982 reverse strand)
ctttcactactcggtacgtctactcatctttctctctcgaaacatatacataagaagatggttacagtatgatcatttgttattatgatgcctggtgcaacattatttgtgtgcagtgttggcttcgctatattagtgattatatgttgatgaagagttaatttggctattttgatactcggttctttgcttgttataacatgaagatctatgtgttttaatgtttttaatttggactagagtttatttatttacatctatagggagagatctgcagtttgtcctgtgttgttggacctattcttctaaagtggaatatttcttgttaactagctattctagagttttttttcttttaattatgttattttaggtattgttctccttgtctgtttagtattttatttgactattgtttatatattagattctgtacgtttactgtcctataatgacttcttcttcttcttcttcttcttcttcttcttctccctacttatatttattgcattttgtgttgcttgtttcagtgttgtgttatagtctttgctaattagtgcattaatttataatgatcacctcatattgacataattattacaaagaaaagaacccagatctcaaaatttttgttcctgcaagaattctttgttattaagtttcagggattctgtaatttcatacttgaagatttggtttttgtgaaggatgtttttgaactctccctctctctctctcgcacactcgttacgcctgcctttttgtttcggaagtgtttgtaatgtatgtgctttctccatgcagtatcttttctg

SEQ ID NO: 49819 - DNA, 678 bp, Ricinus communis
  Intron number 1 from transcript 29657.m000462 (locus 29657 .t000003) derived from phytozome v7.0 (chr-ID 29657; pos 3 0567 to 31244)
tagtcctattgctaattggaagatctctagtcctggtaaagttcaattctttttaatttttttatatatactggttgtttcttgttgattgatgtttgaagttggttatggttttgatctggtgttttgtgttcttaacttggcattatgagattgcttttggattcttgaactgaaatagaaaacaagataaataggtcggtacttctaatttaaaatttagtttgaactgagatcatatgtttgataaatgtaactattgattgtgtgttgtgtgatatcttgtgttgcttctcgttcaaattgaaatggcttttgggattttgatggttattaaaaaaaaaaaattatttggtgggatcttttgtttagaagaaatgttctatatttgaattttgctctgtaatgcttggggtgatctttgtagatgtgaatggtggcctgacatttccttgtccttttcttttaattcttccaaagttttggcttatatttctatattctttatgctgcatcttgcaaatgatttaagtaataggattcagtgagctttatgaaattcatgaagcagtactgcagatttcttactttgatcctaatctgagtgttttcttgatcattttgttaactttgatattaacttcatatttttcatctatccaggtgaccatccggaag

SEQ ID NO: 49820 - DNA, 420 bp, Ricinus communis
  Intron number 2 from transcript 29739.m003726 (locus 29739 .t000162) derived from phytozome v7.0 (chr-ID 29739; pos 1 032396 to 1032815 reverse strand)
ccgaagtgtgtgagtgttttagcttttcttttttcttcagcttttcttttttcttcttttttttttttaatagaaaaatatattttttaatttgtttgttgttctgacattgatacctgaacttggtgactttgatagtttaaatctttctctccatggtaataatataaagtttgtttccttaagttatgtgcttatctgttcacctaactgttttatttttgtgttcagtataactatgtgatttgcttacagttgacatacatttctctcttttttttgtttttgtaggtagattctattgattcaaatgtgtttttgaatttggctatttaagttttctgtttttcttcttaattttttttccctgaatgaaaaattgcagatacgtaggaaatatccaccctcaggttacagaac

SEQ ID NO: 49821 - DNA, 594 bp, Ricinus communis
  Intron number 1 from transcript 28162.m000126 (locus 28162 .t000004) derived from phytozome v7.0 (chr-ID 28162; pos 4 7594 to 48187)
cttctcctgttgatcagccttttagaaaactcactgtaatattcctttttattgtaatgttttttatttgattgatttgatacacacaaataattttagttgtttagctcttccgtgaaaatcgtataatgggtatggttttaaagttaagagtgtgttgggaagtctaaaaaatttgcacgttcaattctatttagttcaactcttgtgtttagacagcttttagttgatagaattcaacataggaaacggcatgattttgtaagcattcaattcaattgaactcttgcaaatgattaaattccaaattaggcctgtgacttatttttattttatgaaacatattattaggctattggttttgaggtctgtggattatggaatcaagtaataaaataggaggttttcagggaattgaataaccggtgttgttgttcttattattgatctcaagctattaagtttcttcaggattcttttaaacgtttgcaaagtttcatttttacacctcgtggtgttgtcagttctcttttgtcttctggtcttgtttacactattgagcatgtgtgctattgcaggtagttctggacttgg

SEQ ID NO: 49822 - DNA, 933 bp, Ricinus communis
  Intron number 2 from transcript 29667.m000356 (locus 29667 .t000013) derived from phytozome v7.0 (chr-ID 29667; pos 2 70426 to 271358)
ggtatgttcattcatttattctccaaagcgttctgccagtttttccttctcaaagattagtaaaattcatttgagttgctggataattgtaagcctcaagcaagagaacataaagggttgcatggtaccggtatacttttcatttccaagcacttgtaaggttaatatctgtagtctatgtaatgttatcacttgatttgcctaaagttgaaggcttaatagaccagtgtaaaagctctgcagaaaagaaagtatgatgctccctacgaattctcaagcataacatggcatgaaattttcagttcatcacacaacagaatttttctcaacttttagatattgattgcatattcactacttactttcataaaaatcttgcctttatttatgtgaattcttggtctaacaaactggagagtagatccatagttcaaccagttttgggttaagagaaaatttggaaaatggtgaagtagctttaaagtcaggtatcaaactggacagctcatgtgatttcttatacttaaagaacaatgcatgtcttatttataacataaaatgcttaaagtatttatggttctgaaaaatattctcaatttgtatttcttttgaccccctgttaaaagcctttctctttcctgcttactcatgcatgtggaaatgatggaaatgttaggcatctccagggtatcaagttaaaggttaacttgactttgttcaattgccatatatgcttcaggggaatatttaagctgatttgcacaaggttcataaaataaagaaatttactatttaaaaagttcatttaacactttttttatatcttatcaacggggaagttctgttctccttagacgctataaacaatttggtgtttaatgaccaaagaatcgggtccttaatactgcattgtcataaatattgcagattgtg

SEQ ID NO: 49823 - DNA, 650 bp, Ricinus communis
  Intron number 2 from transcript 29626.m000155 (locus 29626 .t000009) derived from phytozome v7.0 (chr-ID 29626; pos 5 1093 to 51742 reverse strand)
cttaaccagcgccactggggtaatcttctcctctcttggatctcttctgttttctccttttaccattctcaaatactcaggccattcatgttttttccccttttcaattcacaaaactcagataaggttttgggcgtttataacacagaattttacagattttatgaaattttttttttaattcattgtttgatttaaaaagaaatatataaaaattgttcttataaaatatgtcattcacttaaaaaactataatgtgagagtctttgaaatccatatgaaaagagttttgtgaaatcattgattttaatgaatgagagacgtctcgattttttctttatttgataaatagttatcttcaaatgtgtttttgtgaaaccattgattttaatgctcttgaaatcttacagttataaagacgaccgctgtcgaatcactgattcagtaaaccttcaattttaggagctccatttctatatagtctttgtaataatgataaattgccatttcttaaggatcataatttgagaattagactagttaattgaaatgaatgcttcaattgtgtctactactcaattaatgatgtttgaactttgaagtttgttcaatttcaaatattacagggaagtaaccagcgcccgaagctt

SEQ ID NO: 49824 - DNA, 543 bp, Ricinus communis
  Intron number 3 from transcript 28401.m000076 (locus 28401 .t000004) derived from phytozome v7.0 (chr-ID 28401; pos 1 9534 to 20076)
ctcacaagggagatagaatcaaagtacactaccgggtaagtgggatttcaactttagtttggtcattaatttatgccttatttgcgtcctttctagaggtggtgaagcctgtatataatctacgttgcacatttatttggtaaccatgaatttaatttttaccactcatcttagcatgtctttgttcgttaaacttcaggacttcttaattagtgctccattctttgatttggacatgttgtggactgtagattgttcgttgaacttcttagagtagcataatggcactttaaagagccattgcaattttagaaattataaaccttgttaaggccctggatgtccaatattcttccttttttgtttatctggtaaattttttgttatttactcttgcctgcaattttgttcttttttcattttattcttcttcttttttccttttttccatttccaactctttctagattcttatagtgaataagttacgtagttctcgacttacatcataaattgttttgtacttacagggaaagctcacag

SEQ ID NO: 49825 - DNA, 384 bp, Ricinus communis
  Intron number 1 from transcript 29813.m001473 (locus 29813 .t000025) derived from phytozome v7.0 (chr-ID 29813; pos 1 38800 to 139183)
agttagttggcttcctctcttctccttctttgccagtaagttttccttttgatcgaagagtaaataattagaaactaaaaaactattttatgcaagtgaagctacaaaatttcgagtttattctttcgtttaatttgatttttatagctttaaacaggtcagagtttcagtttcttaatatctgatacagtatttagttgattattatgcttaaatttcatattttttcttttatatcttcttataagcttcttgtggttatggtttataattgcttttttattacgtcaaatttaagaacttcattgtgactttgctttagtaatggcgccaattttaatggattcaggtgcagaaggcagctgtccttatcgttagggactt

SEQ ID NO: 49826 - DNA, 292 bp, Ricinus communis
  Intron number 3 from transcript 29813.m001473 (locus 29813 .t000025) derived from phytozome v7.0 (chr-ID 29813; pos 1 39674 to 139965)
ctggtatttcatcattgcttcaggtgacttcttctgtttcatgctattgttatcattgccttttgaatttatgttgtgtatagaagtcttatttttcaaacgaattttatttatgaagaaatatttttctttttcttgcttttttttcttcttcaattgatatagtaattattcttttccatttggtggaaggtagtagtaaaatgatttcttttaatcctactccgaacaagtaccataccagaattgtaattagttatcatgagcattttcactatttgctaggctgacg

SEQ ID NO: 49827 - DNA, 913 bp, Ricinus communis
  Intron number 1 from transcript 29044.m000169 (locus 29044 .t000007) derived from phytozome v7.0 (chr-ID 29044; pos 7 6860 to 77772)
gtgtttgtaccttttttgaggtatgatacgcttgttacctattccattctatatatgttcttatctatcgtcttgttttttatgttttttcttatggctcgtttaatctgggtttttaatttttcttttgtggcttagttatggtaatgtgttttgcggatttggtgcctgaaatagtgtcctagatgttcattttaggattaaatgtgagaggatgtattttaatggaagatgaagattctttgttctttatatagagtttaatctttagacgttcaaaggtgtctgttttgaacatatacataactacaattgatgaacgggctcagtcaagcatctgcaggttcttgagcttgacgcttgatacatttagctaatcgtgcttaatgtagaacactcgaacttggaacaagcacaaactacagtcatacttgattttctatccactcaacatgccaaaactaggctaagttggtttgttttcattgctttaccttgcttttacattttgaattgcattgctgaaagggaatttaacttgtcccttgtatttctcctgcaatttgatgtgcttgaatcattagatatgcttgtgccttcttatttcattattttcttgggtagttctcacttgctaattgttatgctgtagaacatgcagcaagtccttctgtttgatcatttagactgcgtcttgccaaaggctggaggcttgcaattttaatcatagagtattaggaatattcgagattgattgatgtggaaagctgaaaacataatttcatgcaccagcattgttacttgacaggtctcaagttgtttgtaatataaataaataacaacgatatatgtgctgttacaattgcattacgtagagttattttagtttacttctggtgatggatcactgcag

SEQ ID NO: 49828 - DNA, 719 bp, Ricinus communis
  Intron number 4 from transcript 28592.m000280 (locus 28592 .t000008) derived from phytozome v7.0 (chr-ID 28592; pos 4 2765 to 43483)
tgggcttctcttgcctcacaccaccactgaccaaggtgagaatttttatgtttgaaattaagtaaattttttttaatattctttaattatggaattcctttcatgcattccatttctcaaccccttgtgctaagatttgctcatgtttgtctcgtacttagaatttctatagacggctttgggatgtattatggggaactaattattctccagttaagagatattgaaaatgctatgtattcttggtttacgatttacttgttattgatgctgttaccatttttatcctttcctttcctgagattattaccaactttatttagtaccagttaatcaacatgaagaaataatatgtcatacttgcttgtctttacctaactcaaagatgtgcgcacttattccttgaaattggggcattatggcttgttgtgtttggaatattttttgccatgcagaacttgaattgtatgcaaaatcactgtttctgagtttcttgctcaaatccatttcaggaacatttcaattcgctgtggtctttctttaatcacatggattgagataatattattgctttctaaatctaagatttgcactaccaatgatcttataattaatatttgaccatataatattcttttcttttattgaccttcttttcttatgatttctttcttataattgaagaacttcaacatttgagaaacagtctacccgataat

SEQ ID NO: 49829 - DNA, 584 bp, Ricinus communis
  Intron number 1 from transcript 29653.m000293 (locus 29653 .t000004) derived from phytozome v7.0 (chr-ID 29653; pos 4 3439 to 44022 reverse strand)
gaaaaccggttagtgcattataatgcctcttcaccgggatattattacattatcctaatttaccacgttaataaaagatttcagacttagatttcattttttcttttcatgttagctttactctaagaataaattaggattaaaaaaacaattagaagatcaaaacatttattttttagaatgagattgacacgagaaaaaagaaaaaaaaaatattatcgctccgtctatatatatcaaattgataaatatattcattaattttaaataattaagcactgaatacgtcaatcaactaatataaaaatgtaaaatattataattctcattttgattcagtatatcacgttatttgtagataaaattaattatatattaatatataacattatttattagttgttgtatttgtataaattgatatttaatcattggtggttactggtaatacataaattgatcaatgtaaatgcaatacttaataaataatgccacatattaatatttaatttaatttatttattaacgacgggatagattatgcatgtcattaatctttttgtgtgcaggtcactacgagctac

SEQ ID NO: 49830 - DNA, 265 bp, Ricinus communis
  Intron number 1 from transcript 28470.m000428 (locus 28470 .t000007) derived from phytozome v7.0 (chr-ID 28470; pos 7 0947 to 71211 reverse strand)
gcgatcttctcaacaagtatctttacctcacaagaagagtagacatgaaaatgattaaaaagactgttcagtatctcattggttgtggcatggtcagtcatcttatgtgtttcttgatgttttatcaccattttgattcttattagaaactgacatttattttttcattctgtccatttcttcgtgaaggatgcaaaattcgaaaacaacccatatcatggattcatatacacttcatttcaagaaagagcaacattcgtgtccc

SEQ ID NO: 49831 - DNA, 773 bp, Ricinus communis
  Intron number 2 from transcript 29814.m000724 (locus 29814 .t000011) derived from phytozome v7.0 (chr-ID 29814; pos 5 6117 to 56889)
gcaattcaagctctctcactgtcttcaaaattgaggtacacatctcttttccactctcaatgcagcttctgatatacatacatacttctgtatagttcttgatgcatacatataatttctatacatagttttcaagaaaactaagacttgattcatggggtctttaacatttttgccatttgagatttgaagctcactaagaatcttctcgaacagtgtgcaaacagaaatcaagttaatcagcaggatatttaattataaattggttacactcctatttacctttgtatgaaaatgtgggtcctccagccatcttttttttattttaacatatatcaagctatatagtacaagaaaacaagggcatgaaaaatattggatcaaccacatattagtaaggcccacttatcatatggtgcatgttacttgtgaaatttgtttgttctgtctacatatagttagtctatagtgtaacaaaaaggacagtctcatctaatttgtatctaatttgtatctaatcaagaaacttcacacacacacatataacacacagtagatagtactaatcaagaggctatttagtattattaattgatcgttatagttatttattagttggtcaatattctttttggtaaatcaccaattaatgttattgttcaaacaccaactaatacaactttataatttgattaaggttgtattccttgtactttgattgtgggtcagccatcaacaacacagcttggtatatgttttgaaatttcaggaat

SEQ ID NO: 49832 - DNA, 676 bp, Ricinus communis
  Intron number 3 from transcript 29708.m000189 (locus 29708 .t000005) derived from phytozome v7.0 (chr-ID 29708; pos 1 36547 to 137222)
ctcaggattttgatttgcggaaaaagttccgggaggttagtgtttgagtgccactttcatttcaaattgttttagctcctctttcattaactgttttcccactgtgcacaacttctctgctgcatgatgttctccttttcaatacatagggaacgcgtgcatatatgttttttaactttgatacatgctaaccatggaagatttgatttaaactggataagaactttttcaaagaaaataaaagtgtccatttattttcatcaactacttctaaaagttagctgatctgacagtaatttcattctttaccactccaatttagatgggttcaaagttggttttaggggactgaggacattgtattttaccatgtattgacttgtatatggacctttcttaccctttagaaggttaattaacaatattactcttaatggacctgtaaattactcaatgaacctatatgatataatcagcgtgattcctgtcatctcgctccaatgtgaaatgcacactagttggtaaaacttttccgcagacaagttgagtggatatagttttactctttactgatatttgagaaaagccccttttggagtaaaccccaggcctgccatataccatttttcaatactgtgcaggtcccagctgtccctcttatatttggtctgagaaa

SEQ ID NO: 49833 - DNA, 212 bp, Ricinus communis
  Intron number 2 from transcript 29813.m001527 (locus 29813 .t000079) derived from phytozome v7.0 (chr-ID 29813; pos 4 90632 to 490843)
gaacagtcagttttttttcttttcattctctctattccttatacagtaaattaagtgttgtctgcaatctgtaatctttatgtagttaattatttgaatccatcattttgattggtttttgtaaatttacttcgtaaacccttttcttttcttaatatgtgaactttattgcataaaaatcagggcaccgcctgcaacatttccacgttgtg

SEQ ID NO: 49834 - DNA, 171 bp, Ricinus communis
  Intron number 1 from transcript 28202.m000129 (locus 28202 .t000001) derived from phytozome v7.0 (chr-ID 28202; pos 3 727 to 3897)
gctctgttattgatcaattagacgtgtaagtgatttttggaattgatttttaatttatttgatctttttttgtcttcttgacagtttataattaatcaaattattcatacattgttgttttgtggtttttaatggtgttttttcttttgcagatttgagaaaggagcttat

SEQ ID NO: 49835 - DNA, 724 bp, Ricinus communis
  Intron number 3 from transcript 29751.m001866 (locus 29751 .t000081) derived from phytozome v7.0 (chr-ID 29751; pos 4 29456 to 430179 reverse strand)
tgaaaaaatcagaaagcggaaatcggctctctgaggtagcaattcagctttgatttgatttatttatttaatatttattgtaccaattctggaaatgcaagaattcagttcaattgaattcaactctcatgtttggaagctagaatttgaatttgattcttttaatatccaaaaaaaaataaaaaaaataaggggttttcaaaagaaatgaaattatgctaaaagtgccataaatttagataaaaagactgaaatgtgaaactaggtctgaataaagatgtttttttattgctttatttcacagtttttggtaaaaataaaggaaaagaatagcatccttttgttcctttttaagttttgatttgaaaaggttagattggtaattgagccatgagcaatgttatacaagtattatagattggacctatcactttgtaagcaatgatcgttattaacatgtaactcttttaaaatgcatacattcaagtgcttattttgtgatgctttcatgaaaaagggttgagctcttcttaagtcattaggtgcatttgcatatgcttggatgagaatggaaaagtttgttttcagttatttaagtatgtggtaatgaagcaggtcagtcttagaatgatttttaatttaaatagctaagtcttaagtcatgttaagattttgtttgtacattttatattaagatatagttttcaatggcttgtgcagactg

SEQ ID NO: 49836 - DNA, 931 bp, Ricinus communis
  Intron number 3 from transcript 29638.m000524 (locus 29638 .t000023) derived from phytozome v7.0 (chr-ID 29638; pos 1 68035 to 168965 reverse strand)
ctggcttctctatcccaaacttcctccctcccaaggtattttatttcttcttcttcatccttttatgtgtgggcaagcacacaaaaaataggggacatggaaatgatgatcactcaaaagaagcattcattatggataaaaaaaaaaaaaaaaaagaagcattcatttcttttcttggagagggtcctttaattctaaagtccccacctaactaattaagaatattcaaattgtgatataaaaaaaagaaaatagagaataacttatttacttttattacattgcatctaattattatcgaaatattatgtattctgaatattttatatatgaataataaaaaaataatttgtattttaaattttataattatctaatatattacttatccaacagttgagtgtaatacacttggattagctaagaaaattccaaaaaaaatagttccattgaacttataatttagtggtgtaatacaaccttcatattgccaaaagttgggagttcaaatctgataaattgttctttgaaatattttttttgcaatatcaaaaaaagaaaaaaatgtagcaattgactaaaacagattagaaaaatgaaggtggtgaaagaattatggtttcttcaattccttttcatattttaaatttaaattaggagaaatacatttgggtttctacaaaaagtagctagttttctttatttgcttttgccctaccaaacagttggtgccaacttcttttagccgtcaagcaagaattataacaagtgtgataaagagaacaaatgaactacaaagcctactaactgttaatttatttcaattctaagttatgccataattaattaattggcttattaacaaaagaaattattttgtatctaatattttatgtatacacaggcaaaggagctcctagcagaattagcc

SEQ ID NO: 49837 - DNA, 321 bp, Ricinus communis
  Intron number 3 from transcript 29792.m000612 (locus 29792 .t000020) derived from phytozome v7.0 (chr-ID 29792; pos 1 33061 to 133381 reverse strand)
ctggtatcattaatcactttgctcaggcggttgaggtaaatagagcatgcctatgtttctttccattaaatgtgttttggtatgcgcatcagttatccacccatctaagatatccaaatgtaattttgatctctaagcctaaaaactattaggtcctttactataattaatggacaatgagatagtattgctacatgggagactcttcttttgttcttgttttacaatcattcgtaattctttttcatagataaagcaaaattggtgctgtgatttactgtttcagaaattgtatcaactaggagcaagaacattttggat

SEQ ID NO: 49838 - DNA, 504 bp, Ricinus communis
  Intron number 1 from transcript 29801.m003204 (locus 29801 .t000149) derived from phytozome v7.0 (chr-ID 29801; pos 8 09752 to 810255 reverse strand)
tggtgaggaatagcttgagttttgtagatctgaaggtgaattccgcagcttaatatagcttcagttcaaatattattattattttcatttcagttttacagtgaaggctttttcctcgggttaaacaaacaaaggacgagtttaaaatcactttcagtttaatatgaaaaagaaaatgagagaagaggaattgtttttcattggttttgcttcgttttctcactacacaaacacagaacgtgcttaaaatcttgatactatagaacgtgcttaaaatcctgttactatctacgtttgcttgtctgtttatttagaaaaactgaaggaaatgaaacaaaaacaagagtttcttttcgttttcctttgttttctagagaaacaaacggagagtcgcttttttattccactaatttacgttttcaagtgattgaaatcaaagcgtatctcacatttaagtaaagagtgcattaaacgtttttccatgtatatatgtaattgcaggtc

SEQ ID NO: 49839 - DNA, 696 bp, Ricinus communis
  Intron number 1 from transcript 29631.m001050 (locus 29631 .t000057) derived from phytozome v7.0 (chr-ID 29631; pos 3 73629 to 374324 reverse strand)
tgtcttgcttatcactaccctttttctcttaataagtaattccttaattatgtaatttgaattctttatttcttttgttgttttcttgataatttcggaatttagctcctttagagtaagttttaatttattattttatgagaattattgatatgggtaggttttgtaggggttaaaggtggcatctttgaaatgattataagtgtttcttttagtatatgcatccctcgtgggtgttgaattactggcttaacattgaatttgaaaacaatatgggctgtgactgaggggtaaagcgttttggtgtcatcttttccatgttgttgcaagatgttatattgcaacttaagaatgtgtttctgggatgaatatattcattatatgttccagaattgaagttcaattctggaaattgaggaatgtaatgtgatgcaaaatctgggaagattggtcttgctttcttacagttaagagaataaatggtgttgttgattcgtcaaatgtccttcgtgatgcatgatgtctctgtaacaatgactgtttccattacactgcatatctagcatacatttagaggaagctgccaaaaaaacaaaagataagtaacctaatttgaaatcatgtgtttttttgttctcaactcttattcttttttttgcagttcgcttcttcagacgcactaaatctaataccatt

SEQ ID NO: 49840 - DNA, 611 bp, Ricinus communis
  Intron number 1 from transcript 29739.m003565 (locus 29739 .t000001) derived from phytozome v7.0 (chr-ID 29739; pos 6 137 to 6747)
atttctcgagcttcattcgccagcttaacacatatgtaagtactaaagtttcagtatttggttatggatcttgtagtcttgggaatgtaagttgtgtttgtgatggaatatcgaacttgggctttattgttgtagtcttgtagatgctgtgtttgtgaaaaagggcagagtattattttaactgcgataacttctctgaaatatattaattatggttatagaataacataatgaaactagtcgttagttcattacttcctccagataaacaaaacgtaattttcttgagagatacactgataaaggctgaatttgatacaattctttcaatctgataaagactgaatttgctataactcattcaattgtagaacttatagctactgattttgttaaaaaatagtattaatagttatcccttaattttttaagctttaatttttacgtttgttttagttgtctgttcttccctgaatcatttatcgttaactgtactacggctaaaatcctgcatttcttgtgctactcgtatttgatatgttggacaatgtatgccgatcacattgctgttgctgtttgatgcagggtttcagaaagattgatcctgaccg

SEQ ID NO: 49841 - DNA, 559 bp, Ricinus communis
  Intron number 3 from transcript 29629.m001425 (locus 29629 .t000076) derived from phytozome v7.0 (chr-ID 29629; pos 4 65548 to 466106 reverse strand)
gcaaacaggtaaaatatattcttttttaaatatatatgtttacacattagttgacttgtgggatgatgttatctgtttagttttatgtgtatattggaaaggattggttttttgattaattttggttagattatgtttgatattgcactagaagcattttaagcctgtttgggattgttgttggataggtcgattttttcaattttatgaactgcttctcctcaaaagcagtttccaaaactcaaaaagaaaaaaaaatgccaactgcaatcccaatcgggctatagccatgtataggtcatctatggggcaatagtgaagctttgatttgaattgcaattttgggggcttgaatcaattggcaatcaagattctttcttcatttcatatgctttgtgcttgagcaaattattaatcatatattggtctgtatttgccttaggttgattgggaatatcgtcatttgtgtttataaatttggctttaatattcaatctataatagcataattaataatgaaacaggtggagataaagaggacaattcctaaaggttctgg

SEQ ID NO: 49842 - DNA, 754 bp, Ricinus communis
  Intron number 1 from transcript 29726.m003975 (locus 29726 .t000087) derived from phytozome v7.0 (chr-ID 29726; pos 5 04780 to 505533 reverse strand)
tgttggtcctcaagtatgtccttgttataaattattgcgtaattgtgtggccctgtgtttgtcaaatgaaatacaaaatggtttagcttttaaggctaatagtatagacatgggtttatgggtgcatggctttttaatgtagatgtgatagtattcttttattagtatcattatgctttaatgtgttgccttaatgtaagcatgattgcatttgtgtattcataatgaaaataatgtaacgattaaagttagttcatgggtggattatatgttgtttcttgatttttattattatatactgaaattttttgtctaaatttcttcttcttgcaatataactcaagcaaagcatgtcagagtgatctcttatagttcctgaactttttgtgccttttgttttcctgctattgtttaacttgtcaggtcaatatattggaccacaatgatgctttaacatggcttattggattgtgcacttaaacctatttagaatcaggttcttttggaatttgattggtaagggagtgctataaagaagaggcagttagggcaaaagcagtggctgagaataagatgtaaaataaggattttagtaccgcttgtaaatttgctcttaaagtccaatgcctttataaagatttggagaatatttcccagatgttaatggtttgtgatgtgcattgttatgctgaaaagaaactttttgggcatgcaatggactggtgtggcatccttcagatttagcagacaactg

SEQ ID NO: 49843 - DNA, 474 bp, Ricinus communis
  Intron number 5 from transcript 29815.m000503 (locus 29815 .t000015) derived from phytozome v7.0 (chr-ID 29815; pos 1 12498 to 112971 reverse strand)
ttactggtagtgaaactacctctgtgtggctggaggtaataaaaagatcaccagaggattaattcaaaatagagctctttgtttgtttttgccctttttccttttgatgcttaggttgctaggggattggatgtcttttagttaatctgtaattattacatttagttctttcgactgtgctttgattttgttggtgggaagttgaacttggactccggcttgcattgttccaataccattcagaaaacaaaagattttattggttgaaagaaattcaatattaaatttttttgttgactagtaaaattgagtttaaaggaacttagtcatatgggctacatgcatgcactcgtacacaccaaactattttaggaagaaatttcctgttcactacgatgtccagcaacctaaataagcttattaattattgttgatctgttattggaattgagcaggtttctgaggtgaagggca

SEQ ID NO: 49844 - DNA, 500 bp, Ricinus communis
  Intron number 1 from transcript 29585.m000594 (locus 29585 .t000022) derived from phytozome v7.0 (chr-ID 29585; pos 1 60210 to 160709)
atttgatctacgccactcagctttcttcttttcatgtatgcccttttcccttcatggttttttcttttaaataaactttgaattataaaatatcatttgggtttatgttaattcatgcacacatgttgatactctaaatgggcttttagacatttttgtttaattttattgaaatattacttgtataatgtcaatcaattctattgaatttttttttttctaatgctaatcaataccagttgctaaatgggttcttggagattttgttttgtttatgcaaggttacttgggtttctttatagtaatgctataccactggtatttctatgggtttatattattaatgttattgaactagtattttctaatgctaatcaacgccattctcttcatggcttctcaaaaattttatattactatgtggaatttgaattgggtttatgtttattgatgctataaaacttgtattgataatgctaattgatgtgtgatgacccaga

SEQ ID NO: 49845 - DNA, 771 bp, Ricinus communis
  Intron number 1 from transcript 28320.m001112 (locus 28320 .t000039) derived from phytozome v7.0 (chr-ID 28320; pos 2 29795 to 230565 reverse strand)
ttatccgggttgcaccaagcaaagctatcgaggtgtgtattcttgattactaattttatgtttacattatcttatccaatgataagtattcttctttgttgggtgcttttttttgttttctagctagaaaatggacttacaagaccactcacataatttaacactttattagataatgctgctgttccccttctacttggtgtttgttgggtgctattttaattgctcaaattgttctgtttttggcattcgaacaatttgactaacggtttcatcatatttggcatgtgtttggctgtgggttgtggtccttataaaaccaactcttttctggatgttactgtcttgttagattatgttcttaggatgaaataattttttgggcctttgaagggagggcagtttgttttgcaattgtgatcctggaatcttaatggattaaattttggtgctccagttcccttcttttctgtttcatacgacttgggcagactgataataacatatcatttcaaatttctgtctatgacctttagtacatgcgagcttgaatattgccgttcctgattatgtgtttgtgtgagaaaacacctggttttgcattgaaatgtttgtcttcctaaaaaaccaaattagtctattacaacaacctctgttatatttgttacattaaataggatttgaagctttattagatctgttagttttcttatcaaatatcagatgaatgtattaacaatgcttatggatcctttctacagttatttgctt

SEQ ID NO: 49846 - DNA, 496 bp, Ricinus communis
  Intron number 2 from transcript 29646.m001103 (locus 29646 .t000051) derived from phytozome v7.0 (chr-ID 29646; pos 3 20458 to 320953 reverse strand)
gtaattgcaaattcccttccaggtaatggactacaatcagtgatattacttctcttttccttaatctcttgtgtaatttccgttgctctgtgtttagacttaaagtgtatgtttggagaagaaatgaattatattaagtcaattcttgtgtctggaaatccaatggtttccaattctggtaactgtgcaaaacaatgcatttcaattcaactgaaatcttgcatgatttatttcaatcaagattttagaagtacctagaaattactagacttgattgattaaagagtaaaaacaaattcgcttggattgaaattccatgaatccattaatgtcctttaaattgaatataagttatgtgagttttcactcgtaaggaaatcttgtaatgtggattataaaatgttctctttgattaatatctttattaaatcattattggggtaaactataaatggaatggtacaatttggtttgtactgcagttcatcagtgaaga

SEQ ID NO: 49847 - DNA, 688 bp, Ricinus communis
  Intron number 4 from transcript 27504.m000626 (locus 27504 .t000018) derived from phytozome v7.0 (chr-ID 27504; pos 1 42013 to 142700 reverse strand)
cgaacttatttgaggtgtgttgtccactgaaatttagtgttaatttcttatttagaaaggagaatgattagtagattttgtggatcattgttctttaattgtcaaatccgtgattcttattctaataaaggctttcatgtttgccttctgaaaataaagttttgatttgttcaaatttcaaaagcctgatttacatttgattaaatatttatattcggtaattttgattaagccagcatgacatgtgttatgaacctatatgaatagattatacgaaccccttttcaattacgaacccgtatgacactaacatacaaatcctatagcaaattgaattcaaatcctaggatcaattctaaatcatattaggaatgatcaaataggaattagaacttaaaagaaatcaagcctttaaaccctaatcctagcacgccacaaagatagatcaaatctttgataagtgttaaatgcattcaacaagaatacaataaatcaagcaaggttgaataaacaaacatcaattttaattatcatccccaatgaagcttgatatatccataacaacatgacttgcagatatgtaatgtatcttcagttacaacttctcttttgttaaaaaatggtcttacattgtaaaggcgactagcataaaactaatttgtttcttttaactttacggcgcagtggc

SEQ ID NO: 49848 - DNA, 921 bp, Ricinus communis
  Intron number 1 from transcript 29171.m000268 (locus 29171 .t000005) derived from phytozome v7.0 (chr-ID 29171; pos 1 07462 to 108382 reverse strand)
aatctggacaattgcaggtaaccactataagtttcagcctattccacttatcagttattattaattccacatttttgtaccatgtctgttgaataagtgcatttgattaccataatttcagctttaacttataaatgcatgttgctatatattttatgcatcagacacattgagcaattccactgctataggtatctttatgtgtcctgatcagacgtgtttagattccgcatcttctttttcagcattctgcatcttgaatattctaatccgacttcatagtatctaactattaatgacaatccttgttttggatgtatgattggacgaaggacatgttacaagtaattcacttagccattggtgagcagcaccatttcttttagttgatgaatgtatgtattcttatctcttaggaaataggggatggcagagtcttttaccaactggactatgaattttctagtttcgtgactttttcagttaacttcttcagaaatatagtcttcttttacatagtcctaaaaatttggatatattttaacagtattgtattttcagcctcttcaacctaactgtaatatgatatttgaaactggaaggtttctgcataacttgtttgcttgtgtcatgcaggaaacatcggattgcttgaatgaccttttgttgccttctatgctattttcttttcttttttgtttttcattcagttccctagtgttactttgactgctatagccttgtccaatgttttgttgacatccttgatgcacatttcccgacttcttatgctttgtaggagctttgtctttcctgccagtcgcaccatgctcaatacttgccgacaatattattgatgagactgctgctttttttttttccacaggtatctgacattagacgaggctgatagactggtgg

SEQ ID NO: 49849 - DNA, 654 bp, Ricinus communis
  Intron number 3 from transcript 28883.m000748 (locus 28883 .t000038) derived from phytozome v7.0 (chr-ID 28883; pos 2 15870 to 216523 reverse strand)
gatcatactctggtatactttttgctttatcctcattttgtgaaaatgatttcttggttgataatgctaggttgtttttcgcttgcaaagcttacctagatttgtgcagatgttacgtttcttcttgcattcctcttctaacttcaccttaagtgttttttttatcagcacaaggttatataagagttttgtagagttgaatttgggtttgctggttgaatcttcatttgtaaatttggacttataattgaagttgaaattctggagaactttatgtgcattcacttatatatcggatttcctttaagttttaaactttattggtgcatagtctcaataatttgaaaagacatggagtttgatatgcatatttcttaatctcccattaaactgaaaatcttgcagtaaaatagaaaaaaaatgctaagttactattacttgattaatttaacaatactctaagcttgaattgcaccaacagtgcaatatgctaggtgatcatatattcattgtgccatagtagtataaaatttgaataatgattccattccactctgtttatgctgtactttgcgaactggcaaaagtaccaaaatctcatgtactattctttgtttagcttgccttgtgcaaagaagtggctggacgagagat

SEQ ID NO: 49850 - DNA, 937 bp, Ricinus communis
  Intron number 2 from transcript 28883.m000748 (locus 28883 .t000038) derived from phytozome v7.0 (chr-ID 28883; pos 2 16560 to 217496 reverse strand)
gcaggtctttttgcagtggtgacttgacagggcaggtaagtccaaattttcaccttgattaagtcataacaatcttgatcttgttactgaatgaaatttaatttaattaagctatatgggaaatacaagtggccaaatgtgtaaatacaattcctattgagtgatctaaatagatttatgaataatttggtgtctctctgtttagggtaagctattttagtccatataactgcttcttctttttgccttatcattgtgtacttgaaatatcttggctctaagtgcaattggagcccaaggttggaggtgatcgaaaggcaaagtagtgatgtcaaattggccaaagtggacggtatcttgcatgaattaggctagcttataatgggatagtctattttgttgtgatgtggcagtgaattgtgacctaatcatgcgaagcaaaatgctccttgatttaggcctggtcattacactttggctgcaaaatgctaagatgagtcctttcattttacgtcctattgctataaacttttatgttctgcaggcaatgtgacattaccatgtcaaggagcatatgctttacgtcatgcttctctcttcttgttggctttttcctagtttccttccttcctcgttttagcaatatttggtttgaaccagtaggctgctggatggaaataacgtttatatataaaggtctttatgttaatcatgacatgcatgcaattacttggatggaatatttgtttttctgaacttctgtttacttttggtgcttcagtaatgttattttttattggagatttttccatcaatttcttttctgtcactttcttttatattcgatggcttgcttattatttcctattgtatgatcatatatctttgtttgtgtgtttgattttcttttatggaatacagaagcccctgacttcta

SEQ ID NO: 49851 - DNA, 853 bp, Ricinus communis
  Intron number 1 from transcript 29751.m001786 (locus 29751 .t000001) derived from phytozome v7.0 (chr-ID 29751; pos 5 350 to 6202)
gttaggcactacaagtttaatgtgagtactattcaaatttatttggagggttcaatcgattatcacataaagaggtgattcttagagtattaacttgcattgaaatgaaattctcatcgtacggagaaaatttaacgcacacgagatgagtttttcaatcaaaacgaactacgttttatttttaacttttcagatttctaaaaagacggaatctgcatgattttgagtttcacttcgagctattatcataagtttcaacattacttacttgtataaatataagtgagtttgtatagaaatgatgatgaattagtaaaagtcactgatgcaagtaaatgttcaattagctagctgtctatattatgagaaagtaattggcctttaaattataaattatacatttggttgatatatagtcttagtcatcttattcattttcttctttagatgagcaaaactggatcctcatgcttccttctgccattaaatcttctttctttaatcagactccagctgtttatcattgctagtaattgtattttgcacgacttcatttctacatctttatcacagaaacaatctttttaattaaaatgactgagcaacacccaaaacctgtggtattttttgacgtgggactttcaaactttgaaatacccaaaaataattaatatttgccacaataattagaggaaacaaaataattataaataatgacaagaaaaataggtaataataaggtattagcatctaattatgtttttggtaagtgtaactcaatgaattaaatagttaagaagttagcttacatttcaataaacctcttagcatggcctatttgatgcaggtggtg

SEQ ID NO: 49852 - DNA, 672 bp, Ricinus communis
  Intron number 2 from transcript 29269.m000247 (locus 29269 .t000009) derived from phytozome v7.0 (chr-ID 29269; pos 6 1068 to 61739)
tatcgatccctatatccaaactcttgaacctgaaggtctctctctctctttcttgatcttattcctattaatttttgtatttacatttcggttattatattattggagaaattttacttttcaatttaattccctatgtttgaacaaggctaagttaattacaactctttgttacatgtctaaaatcgaatcaacatgatttaaagaatgatgaatgtgtttgaaatatcaaaaaatgcaagaattcaattgaatttggtgaatagttgctagaacttgattctttcaacttaaaaggaaaaaagcaagcatttaggaaaaaaaatgaaatcatgcaaaaaataagaaaaagacattgcaataatttaattcaattgaactcttgcaagcaatttgataagtgaaatcattctacccttcttgcgtcagttatatagtctgggtctggaatacatgtgattacactgccattgttaaagatgagttcagaaattcattttatagtgcaaatgttggatttcttttggaatttttagatccaagttctgctaaaactgaaagaattttgatcttttatcattgagttgtttattcatagaagtcttcaggtgtttgactttgatcatcagttactgttttcagggattgggtacttagaggcgaagaagattt

SEQ ID NO: 49853 - DNA, 616 bp, Ricinus communis
  Intron number 4 from transcript 28049.m000306 (locus 28049 .t000014) derived from phytozome v7.0 (chr-ID 28049; pos 7 9687 to 80302 reverse strand)
ttgctctgttagctgttggaacgaccacaagccaggtgccatcatttatcaattgttttctctgcggtcttgtattttattttccatatgctagtcaatatgtgcaggaaaacactaaagttaaggaaatttttcccattagcattaatctgaaaatgcatgaactcaaatatgtagcttaatttttgtcacatggattatagagtgtgttcacaagttaggacaagaacgagaatgctagactaactgcagtagggtgagtgtgaagagggtaatggtacttatcattgagacttatcttttccaatttgactaccaaaatgcaagcatgagtttttttttctccctcctcccaacaatggagtgcatgccatatgaatttaagacatgcataaaatgctttacgtgcagttttgatataattggtgagctaaccaaattcaattgtgaaaggtgatgatataacttgctttttgtttgctattgactgcaaggttgaagcttcttaccatctaatacaaagtgtagttaaccccttatctattaatgtgcaccatcactattgaaatgactcttctgtggtatcttgataggtaaagggctgtggagaggcttc

SEQ ID NO: 49854 - DNA, 986 bp, Ricinus communis
  Intron number 1 from transcript 29656.m000471 (locus 29656 .t000004) derived from phytozome v7.0 (chr-ID 29656; pos 1 7935 to 18920 reverse strand)
ccaataactcaaaatcacaggtctttctcaatttccctatttttactgttatctttggtgatgtattgtagttctgtttagtcttttagtttatcattcataactaagctcattttaggatgatctgcaagtctgcaactcccacatatagatgaataggagtcttccaattgttgttctggtttttactatgtttgttgtactttgttatcatctatcattgcattgagttctaccattacaataagcttccaattctatcaagattagtcttcctaatcgtaaatagatacatgtccttgttcgaatcaagttatttgagtagaatccgactatgattcatcttttctaaacttgcattacaattagaatttgaacttgatcaactccgtctttctcaattattcctatccgatgtataatgctgggttatctatggacaaaccacatcattgttttatcatactataatagtttcatttcagtttgcagtttgcaatttgcaatataactaaaaaagtagcttaccaggcatattacatacgaccatctatattctacatcacacacttgaggctagcttaagtagactggctttgcttttggagagaaagatcttggatttaagttctctcttctgcactctccctggaagttaattccattggagtcaaggcttctgatgtgatatcaaaaagcctttcttttttaaagttgatattagagaagtagacttaatatagtgtagaattctagtccctattaccatttgaattcattttattttttgtttaagaaaaaagatttatgactgcaaatttctttctaaggatgctagatatgctggacatttacaggatgataaaatttcttatggatcacaaatacatgaagcttactaatacttcagaaacaaaaatgataaattgctactctttcttccttttttccatgtgttttggtagagtgcaaaattatccagggta

SEQ ID NO: 49855 - DNA, 708 bp, Ricinus communis
  Intron number 2 from transcript 29620.m000554 (locus 29620 .t000024) derived from phytozome v7.0 (chr-ID 29620; pos 1 98202 to 198909 reverse strand)
ctcaccaatcacttgctcaggtttttaatagttcaaattacaattttttcttttcattctatctcttgcaacggtggatataatttgaaatgataaaaaaaaaaaaaatctaatgctgtttactgcatagatttcaaagtcaattcgcatgagtataatttctttagctattcttatgttggtcattgattaatttctgtaagtagaaatggcttttgtgggactcaaatgagtaatgttcaatatcaaagttttttctcatctaaggagcctaaattatgtttttccgttttggaagcaattctgtctagaggcagtaacagtcgaggatatttttcttttccaattattattcatctcttatttctctgtggtactattgatgaagcttttaatgttctttagaagattctgtgagccctatcacctggtacatgaggtgccatctctatgcaatgtgtaacctttgtacatatgtatcctggctattattccaaaagtttcttgcttcattaaaaactgatataattccatgagccccattactttgtatgtgtgaggtgccatttccatgcaatgtgttacaactttttagatacgtgtcctggctagtattccaaaaatttcttgcttcattgtgtttttctattcctttgtactgtactgttgtgacggtgaactagaattgtttgattcctgtataggagt

SEQ ID NO: 49856 - DNA, 685 bp, Ricinus communis
  Intron number 1 from transcript 29629.m001357 (locus 29629 .t000008) derived from phytozome v7.0 (chr-ID 29629; pos 4 6894 to 47578 reverse strand)
gctatcaaagcagcacctacagggtgatcggtccagtatgcacttctccttttgtattcttgttactttggcgtatgttctatataatgtattttgatatcataaattttagttgttggtttgtaacatggctagcgtgtcataaatctatgatctgttgacaaaagatgactacttggagaattgatagctgtagggtaatttggcatgtctttcttttttgttgcgttgggttacttattctgaactgcaaaaatagccatccaagcattctggctttcatgcaacttaatattctttcttattggattaattgtttatccgagatgttttaaacattctggataataatgggtttagaatttgacttctgttactctaggatatccacaatatttcaaacaaaaagtttttagctagaatatattattatgaatttcagactctatctctagacaaccctaggtcctacatatgtccccatactatgaccgtcgtgattaatttaattctagattctgtctgttattttctctttatagtaatatccagagtattaattgcgcacaactacttaaaaaactggctaatggattttactcttttattttccgagttacagttggtttatgttttcttagcgatcattaattagaataccttttgatggcagaatccccaaaac

SEQ ID NO: 49857 - DNA, 495 bp, Ricinus communis
  Intron number 3 from transcript 27383.m000156 (locus 27383 .t000001) derived from phytozome v7.0 (chr-ID 27383; pos 3 403 to 3897)
gtcaagaaaggtggtgcttttaccggcgaagttaggtatgttttaatttttctattttaatttcttcagttgtatacagtacttgctctcaattgttactgacttgcagcctgagtccatagtaggtgcattttgtgtaattgtgtctaattttccctttctccaagaaaaaagtgaaacgtaaatccttaaaaatgaaaggaattgaaaataaggcatctatcctttaaaaaaaaagaagcagaactatttggttaaatgcaactgcttcaagttgtttttgatggatttaatctatttggtttgttatttcttatgtgcccttgattcttgtttcttatgtgctgttaattttgttggtacttatgtttgtttctcgaccaatttgtttcatggacagatgcatattgcatacatgaattactgacataatattacttccatcaaacatttgtagaaattttaaagtttttgcttttaatgcacagtgcggaa

SEQ ID NO: 49858 - DNA, 775 bp, Ricinus communis
  Intron number 1 from transcript 27516.m000170 (locus 27516 .t000003) derived from phytozome v7.0 (chr-ID 27516; pos 3 0541 to 31315 reverse strand)
tcacgattcttctttctctcctctctccatatcaggtacctcaagaaagttatcttctttttaagttaattgttgttggttttgcggttactgacgagttcttttctgggctttctttctatgctatagttttttaagcatgtctttttgtgccttagtcaagattttaactttaattaaatgctcgctatttctcgcttattatggattcttatgttttcttggatgtttgattattaagaactaagacaatgaggttataatttctaatggctttggtttattagggtataaaattgttccttttggaatagttcagtactctggagtataactgttttatatgaccacccaatttgttgctatattagttttagaggtatcttttcttagcttaatatgttgattggagattccccatttcactgcacttgctgtaaagctaaagaaccacgcatgagctataaattgtaatgtgaaacattaacatagtgagttcgggtctccaataagtgtggattgttgcaaatggatgctatgttccttgcatttcatatcatttggtcaattatttcatgttatatatgcttccacagacatttgaactacatttgtgaaattacagtaactctccagtgccttagggtcattcaaatgcttatattgtattaatcttctgttttttcattgaaaaggaaaagaagaatagtcctcagttgaatgatttgttggatactaaagcccaattggatgactctggtcattgagtgcagga

SEQ ID NO: 49859 - DNA, 648 bp, Ricinus communis
  Intron number 1 from transcript 29648.m001915 (locus 29648 .t000002) derived from phytozome v7.0 (chr-ID 29648; pos 2 2195 to 22842 reverse strand)
aaggtatatataaattgcagtattgtatagctacttagcacttcttgattactattttgcctttcattatatatctacatgaatctttttttgttgcttctacctttggggttgagtaatcagtcttgaaaactttgtttataagttcaaatattttaggttcttataaattttagttttgctaataaataatggtaactctataagttatataggcttcatataagaaaagggaagactgaggttctgcttttcatatcatgtaattagttactttttaattttgtgggttcagaaaaaaagattgtattttctttgaagtcgttaacttgttaaagttttgatgtttcgtctgtctataaaaaagaaaaatggaattgaagaacatcccatctgaaactggaatctaatccaaatttccaactgacactttgtgatgaaatctcgcaaatatttgaacccgaaatatcatcaagaaagcccatttctgaatttgctaatgttcttccttttctggttaattttgctgtgaactccttgttaggggaaatatgtatcacaaatgcatttgtgtatatgctgcatgtgaagtgatttatgcaaaaatctgcagttcaagcagtgacagattcaggctgggagagtctt

SEQ ID NO: 49860 - DNA, 159 bp, Ricinus communis
  Intron number 2 from transcript 29738.m001031 (locus 29738 .t000033) derived from phytozome v7.0 (chr-ID 29738; pos 2 65551 to 265709 reverse strand)
tttggaacatcagaccctgcagaggctgagagaaggtatatttgcacatcttcatacagctcgattaattatttgcattgcataattaccaatcaaattctagaccaacaaacaaaaggacttaaaaagaaaaattgttacagggcaaaagctctagga

SEQ ID NO: 49861 - DNA, 926 bp, Ricinus communis
  Intron number 1 from transcript 29680.m001670 (locus 29680 .t000013) derived from phytozome v7.0 (chr-ID 29680; pos 8 3972 to 84897)
ttcttcaagaaagtctcaacagctggttgctcttggtgggtcccatttaatcctttcctggttattttgggaatttactttctttagaagatttttactacttcaagattgcacttgagctaaaaggttttgatctttcttggttggttaattgtgaatttagttcagtgttttatgtttcattggaaaattcagttgtttggaaagtaaattttgtgttgcactgtctgcatggtcaattcaagctttaaaagggggaaaaataacatttcttttatcttcctttctttctccttttcttgttctctagtttattgaagtccttctattgatttcttggattctgacggtctaagaaagctactgtctttctttctttctttctcttttttttttttaaactttgtgcaggttgtggagaattgggaaaattttttggggaggttgttaggtggtatttgaaatttttatctattgaattgatgagggagttattgtgcatgtagcaaaaccggttgtgttcttcgtggattacatttttttagcttattgtaagatttatttatgtgtttgtcatgcgttattattagtctttgcacatcttcaggtgtttgttgtttttatatataattggatttttgaacttctatagaatctgttcttttaacatgttttcaagtcagagtcaaattgaataataaccatgtgtctgctaacctaattttatcattctacttttggaagtgttttaaaatgttatatatcacttcttacatcatgtatgatacggtggctactcatcatggatggaacggtgtctatttccatcctttgctttatttctgatcaaatatatttggtttcatgattctcagttgagtctacaataggtacttatatttcctgcacattggttgttgcaggca

SEQ ID NO: 49862 - DNA, 907 bp, Ricinus communis
  Intron number 1 from transcript 29813.m001492 (locus 29813 .t000044) derived from phytozome v7.0 (chr-ID 29813; pos 2 73120 to 274026 reverse strand)
agtcttgcagattttgaactcgaaaaggcaagaaagtaagtgacccactttgatttacattcctaggaaacttgaccttttctttttgttttagggttcttaaattttttattttcatcctcattctcttcactcttcattcttgctggtgttgcttcctgtactgaaccagaccttttcttttaaatatttgtactttctggtaagcccgccatctatctctctcttattattattattattggacttttcttccgttcttttagtattattctacccattgacctactgttgttttctattttgttccaatcaatggcaaccttattttatcttttccttttctttttatttatactctacctttattactcaacttacattgctttactgttgattaaacaaaaactgcaactggcctaaatctgaaaataacaatatgatgtgtactttatttttgctttctttttgaactgggtttttatagatgtttaggtatcaaccctgatgccattagtaaatactagtgggttttgttattttgcaatttttttccagaaatgtttggttcaatttcattcttgtgttcttggttatctatataatgtttagagtgagcatttattcttctactatactgggaaatttcattattcttcatgtttgaatctcaatttgtcgttgtaaatggttcagtgttagcttatgattaagtgtctcattattcttcatttttgaattctagagacaattttccccctttttacttaaattgggccatggaattattagcaaaaggtctataaatggaaagctagattttgtgcattttgacttctgtcttctgtttgtttgtttgtttgttttcttagtttttagtggttctgaaagtagagcagcgtgttat

SEQ ID NO: 49863 - DNA, 784 bp, Ricinus communis
  Intron number 3 from transcript 29780.m001322 (locus 29780 .t000008) derived from phytozome v7.0 (chr-ID 29780; pos 7 5192 to 75975)
ctccaagcatatttggccattaaccgcacaagctggtattttctttttcaaatgagccctttttacatatgatgttggttttattatctttttataaatagataaaaaactatttggtttaatttataaaaggtttctaaacaattcaattagccaagactattttctgcataccctaatgttacttgaatactagtatcaccctagattagtttttatcaaatgtgtaaaacaccacttcaattttgtatctgttcaaaattaactggagtacttccttccatactagttgtactcaaaacataaaaagtaaaataaaaaaatctgtcttagcactataatgcaattgatatttatacactttgaaactacagtaatctgtcttatcatgtaattattcttttccttcaagacttttctgtgattgttttatcacacttctcctgtttctttggctttggcacaatactctattatctcatgaatactgatccttttctggccagtatttggactattttagggtgtttatagtttctgcaatcttcaactaccacaaaaaggcttcctcattgaacctgcgcttttttttttttttttaagttttcggtatataatataattttcttagttatttatccttagagatatcctcctgaagttgcaagttgtatgtgtttgattgttgtattaactaatgccattggtgagcaatcagaaaatgagaagctgaaggcaaaagatgaagatggtgatgattctgtatcagactcagaggcatcta

SEQ ID NO: 49864 - DNA, 559 bp, Ricinus communis
  Intron number 1 from transcript 29739.m003616 (locus 29739 .t000052) derived from phytozome v7.0 (chr-ID 29739; pos 3 11044 to 311602)
cataataaacgggctaaagtttactctgcttctcggtaagattctattatacttctgttttttcaatgtgtgtgcttgagtgttgtttactacttttcatggtattataattgatttgatagttttggtgcattatttatatttagccttgtgtgtccctgcttgaaatggtatttatttatggagtagtaaaactaagggaaatctttaactcgttgctttggtgttctcttgtgacatatttggaagacttaatgtagatgaagcttaaatctcaacatggtagcaatctttattttccgttcttctccatgatcactgaacctgttattagtgccttcttttcattttctcatcaatgcctgtttttttttttcccttcccgtttggatattaagctttaaactttaaagtgttgcctctagatgtgcaacttgcagttaggattaagcaatgcataaagtgagtggattctttgatagtatgtgctttatagttttgacagggttttgtctctaacaagtggaactttatttcttgctccagtgcttgccattat

SEQ ID NO: 49865 - DNA, 885 bp, Ricinus communis
  Intron number 1 from transcript 28049.m000309 (locus 28049 .t000017) derived from phytozome v7.0 (chr-ID 28049; pos 9 8552 to 99436 reverse strand)
aagtctcttgttgccggaggtgtcgccggtggagtgtaagtctttctctttctctctttatattttgtttgtttacagggatataataaattacagttttcaatggaaataaatgtcagaattaggtagaattggtctgcttggaggttcatttttagctcatttctttttttctaaacaaaatttgagactcttatttggatggatgcgtttctttggtcagtggattccttatatggaagtttaagtagcgatcaaatatgcagcaaggaatactgttagcctggctgggaagttaggattcaaaactatcataaatgatgctttagagaaaaaacaaaaaaatcaatttgttttagaaaatgtattatagtatgtgccttggtaagtactagttaatgttgttagtttgttggttctctggaagtcttatgacactatttgattttgttctcaagaaaggtcagacactagcatttgtaacacttaatatttatacatcatgttttgtttttcagaaaaaaaaaataaatatggatcaatagcataaaattttttgtcctcctgaaaagtctggcatttttattgaggaattccaaacacagccatgcattcaattagttaggttgttgctgctgcttttttttttttttcatagtttcctttgtttttcttctaatgtggtgagcagaaaaattgaattctttggattaaaaattctttctgtgattaaattgtatgttcggtctgttaattgtgttatattgcttcagaactgcctttaaatacttttgtggctggtattgctaggtgattttgattgactgaatattgtgggatttgtattcaggtcacgtacagcggttgctccattggaaaggttga

SEQ ID NO: 49866 - DNA, 961 bp, Ricinus communis
  Intron number 2 from transcript 29634.m002094 (locus 29634 .t000040) derived from phytozome v7.0 (chr-ID 29634; pos 2 76333 to 277293 reverse strand)
gaaaaaggttttaaaatcagtgtctgcaatcgaaggtatgttcaccactctatgtatttttttactttgtgtttcctttattctttttatctttttcctttttcagagaattcatagaaatatgcttacagatttctgttttttttttttagttacaactaagatgaggagattcggtttcgaactcaaaatctagttcgagttgagatatgcacctacatcaaactaaatttgtaggtgccttacatatgttttcttattttaaaaaataaaattaaaataaagaattatatttgcacacacttatttagcttttgtagaattggcaaaagtttatctcctcatgtcctaaggcaataaaatagagactgaatctgtaagttttatggttataaaattctattcttttatccttttcaaaaaaattattttagaataataaaataatgtttaaaatgataagaaaaattgatttaggtaataaaatttattataaaaagttagatgtataaaaaatttataaatatgagaaaataattccgtaaaaaaactattatttaatatgaaaaaataataccgtaagaagaatatatttataaatatttaaaaataattttaaaagaagagtatatttatgattataagaaaccaactccgtgaagaaaaaattttatttttaaaaagagataataaatacttttatttctctcttcatttatcatttaatgtattgaaataatgtagttgacaaagtttattttatagtaattagtgttatttaattaatgtcagattgtttttagagctgtgagatcttgaattcgaatgcgaattatttaagaaagaaaaaaagaagagccagtttattttatgaaaccaaagcatgcatccaggtaatttattactattgcttcacctgtttgtaggtgtagataagattgaaactgacgaggccaaagga

SEQ ID NO: 49867 - DNA, 630 bp, Ricinus communis
  Intron number 4 from transcript 29812.m000203 (locus 29812 .t000012) derived from phytozome v7.0 (chr-ID 29812; pos 9 9163 to 99792 reverse strand)
cagaggttgcaaaggtatctctctctctccatgtctgtgtgagcatgatgcatgcttgtgccgtttttcttttcctttagaaattatgtcatcccaagtgattaaacaataatggaaaacagtgatgatgagaagtgaatcaagagaataggaaatagatttggcatgaactcagtgcataataagaaactatcatagaaatggagaactacctaagtgctgcattctaagactcttttgtcctgcaacaggcatgagctgaatgagtgctatcatgattaaggatctagcttgatctgttatcatatttcttacagcagagcatcaaatttattgatagcaaagttttgctatcataaagaacagatgcagttgccgacaagaaaaattagtgtttaagtttcacctgcagttggttgaagtcattgactgagctgctttagcaagctacaaagaaatctataaagcacttattcttcttgtaatttttgtttgctttggaagaagaaattactcaatgcaatttttgcagtgaatattgggattatgctttgattagtggttgactcctgacatgtttctttcctttttccagaataaggaggcagagaagcagctgaaattttttca

SEQ ID NO: 49868 - DNA, 882 bp, Ricinus communis
  Intron number 1 from transcript 29610.m000409 (locus 29610 .t000024) derived from phytozome v7.0 (chr-ID 29610; pos 1 57981 to 158862)
tggttgaatccaccgttcgtcattataatttcacagtaagtataacatatatatatatgtatgtatcaattctttttggtgaagactcttgttgctggcatgcacttgtttattgatcaattcttacttacattaaatgcatatattgtaacaaatataaaagtgattcatatgtgtaaatattttatattttaatattagataattaatgcattcttaattatttaaatttaatagatatgtgtcagttatttattagtttaatgtatatatttaggcatatctctaaactaagtaaaatattctgtgtttgtggtataaggttatgccactctaccttactaggcattggtcttataataatggaaaaggggagattttatattcttatttcacttcatgtatcataggattgaaaggggtaaagaagaactataatagcaacacaaagcttcaagaaaagctcccgatgagtgcaaatatgagcatgagaatttatttaacatcagttttgtctagtttagtagtaatggaagtaacccaaaccattttaatagcttgatcaactatttaaattcataattttgtgagaaatcatagtactattttgattagtaggagaaacttaattcgtaccttaactcacatttcaagtttaagacaaattttagcatggatttcttatgtagaatgacgattacaacttccaccaactggctttaaagcgaacctactacatccatcacaagaaaacaccataattaacctcaaacgataagaagaatatgtgaataaaaagagagttgaactgaaaaaatgcatccttaaatgaaaaatatacatgcaggtggccacaacgaacactactaagctttgttcaag

SEQ ID NO: 49869 - DNA, 362 bp, Ricinus communis
  Intron number 1 from transcript 28359.m000282 (locus 28359 .t000010) derived from phytozome v7.0 (chr-ID 28359; pos 1 96606 to 196967)
caattaaaaggccagcaacaaactcctattgaaatgtaatactttcagtttttaaatcttccaagagtttatggtattcatttatttgcattttttatgtctttgacatatgtcatctcctatttatagtagtttccaatcataaacttttattttccagcatcttcagcagtatacttgaggttgatggaatcccatatttcttttgcttctttgtaagaacagtagacataaaaaaagttcattacaaagattaatcataattatatgcctacataccttattagcatgatccataatttgatttgctttgaatctgcatttggctcgggtttggggtttgttatggcagaagtaacgcc

SEQ ID NO: 49870 - DNA, 509 bp, Ricinus communis
  Intron number 2 from transcript 29676.m001623 (locus 29676 .t000014) derived from phytozome v7.0 (chr-ID 29676; pos 1 27030 to 127538 reverse strand)
gaagacttcaggtattaatatcttttcttttttgttacctatttccattattttcccaaagttgaattgatctagtttttattctgttttaaagaatttgtttgtttaatatttattgaacttttaggtatattttagtgactgtctgtgcatttaggtaattttaggttgatagataacatgttatatattgcttcggaagatttgaattcctgccaaagaattcaattaaattggattcttacagaatcatgtcattcgtggcttgatatcatttcgttcaaaatatcctgtttttctagagttgaaagaattgtatctattctagcaactatgacctctccaaaaatgagatttgactaaattgaactcaattgaattgaattcctgcattttttataccttccgaacaatgtagtttacagactttgtctatactctaattacattatctaaattctcagattgcctttaatccacattatttatcttttcatagggacatcttg

SEQ ID NO: 49871 - DNA, 780 bp, Ricinus communis
  Intron number 1 from transcript 28124.m000236 (locus 28124 .t000005) derived from phytozome v7.0 (chr-ID 28124; pos 3 6036 to 36815)
ttgggtgagtttagatcatacttcttatgtaatttttggcttttctttctttctttttttttttttttttctttctatatgcttgtatttgttttgcttgaattaattaatatgcttattttctttgagaattagagacaaaatgtaggggaaaataatgatcagctcatgaggcaaatgcctgtagctaaactaaaggtaaaggtatttaatctgataaaaagttaatcttgagaatgaataatatttacattagaaactgactttacagaagcaaaaaattaaaaatatttagatttacacgagtaatctgatccagaatgaagctaggattatgaattagtgccataaagaaatcaccttggatgcctagcagcttttgtttgtggcagagttgcaggcctggcatgatttggtggtttgtttccactattgcttagacttctgaggatttaacagcggagcagggagaggatttctatctttatttcctagacatctctagttaatgctgtagcacatcacgtttgatgctttaattcatcattgaagttctatgttcttactttttgatttgtcaaatattctaattttacctcttacaattttcattattaagatgatatttcttgtactaaggctttgatcacttcagaattcaacttatagttttcaacctctcttgagtagaaaatttattgcctaataagcttttcttttgaaccttgatctcttcaaacaccaggcagcagtgcttctctgaagtatcaactcgtcgac

SEQ ID NO: 49872 - DNA, 438 bp, Ricinus communis
  Intron number 2 from transcript 29619.m000248 (locus 29619 .t000007) derived from phytozome v7.0 (chr-ID 29619; pos 3 9795 to 40232)
tctatattggttgcccttctacataaggaacacaggtatttgcctcttcttgcatatgcatcttccattaagattttttgatttaggatcatgtggtagttcttgcttgaatttctatgcatgtactttgacacggatgggtctatgattggatattatgttctgtgacaatactaaaaaattcagaactccatgttatttataaaatctgttcgactcattttttcccatttcgtggggcattatggctcaacctttatttaaatactctatttaggtattgcaattataccttgaaggttatcatgtgtccaaaaggatcttgcatgtttaggcttgtgataatttattgaatttgttaagagtattggtttttgatcacaagtttgtatctaaattgtagctattgcgggtgtgcatttgtcacataaaactgct

SEQ ID NO: 49873 - DNA, 729 bp, Ricinus communis
  Intron number 2 from transcript 27561.m000298 (locus 27561 .t000010) derived from phytozome v7.0 (chr-ID 27561; pos 5 2426 to 53154 reverse strand)
gcatgtaagtgattctgtcatgatttttttttaatatatatctttgactttgattttaaagaccaatggtttgggacttgcaaattttaaggttccttgattaggggaataatagtagagctatatcgttggaagtatttccagcagttaacagaagcactatcatctttaagactaggcctatgcttcttcagttaggcagcatcgaactagcaagacaaataggaaagaagaagaaaaaaaaattgacttttcagctagaaagaagtttcaaagtcataacgaaatttgtttatgcgtcaagcctaagctggaaaagtaaatcaaaaaatatgtaataagttccaagtctgtgtggccttttcctccaaatgtcaagatatatatgatttccggatgtatcaagctttagtgtgatccaggatatataacttccatttgattgcctttgtattttatttcagaagggcattccaaaagattgtctttagatttaccccatttatatgtagtacaggtatttgtgtgattgcaaatgcattgatagtacactttaatttttcttcatttaaataatcttgatcccataattgattatggactagtattattagcaactgttcttaagtgcttctgaaagtttgttcagaaaatattttttaattatatgtatgaccaacttaattcacccgatcattttcttatctacattttctttttctggtcagt

SEQ ID NO: 49874 - DNA, 413 bp, Ricinus communis
  Intron number 1 from transcript 27561.m000294 (locus 27561 .t000006) derived from phytozome v7.0 (chr-ID 27561; pos 3 0426 to 30838)
acggcagaaactgtaacctccgagacaattttcaggtatttattcatttttcttgtttttcttttccaataatcggtaatgccattctcttttcaaaatcattagttaatgaatctgagttggagctgaatgatttggtttttctgcgatgatgatgtaaaataaaataagatgacgagtccgatctctaattcattcccgtgctccttgacgacacaatcgaggcatttttctgagagaaagaaatcctttccctttattttgctcctttctgcttttgtttctattgctttttttttttttttttttgtcaaaaacaagtttttaatatgacctaattttggttggaaaactctattgttttaaaatagctgtgacatttatttatacaggaaagcttgggaaatcttgac

SEQ ID NO: 49875 - DNA, 617 bp, Ricinus communis
  Intron number 1 from transcript 28281.m000377 (locus 28281 .t000016) derived from phytozome v7.0 (chr-ID 28281; pos 1 28798 to 129414)
gtttcaaggtgttttgtcttttctctactaagcttttcttcataattgttagacagttggtataaatgaaaatgcacaagtgtttgcagtcattttgtttattactgtatgttcggaactaccattagttaattattggaagcttttatctttgtgttggataattctacacaagagtaactaattcaaatctcattttcaaatactatttacaaattctaaaagtccaagaattaaagtttaattgaatcctattccgtcgattttcatgttcggaaagctcacagttgctagaattcaattcttccttttcttttttttttttcctgaaagaaatgaaagatgccacaaatgcacttgatttaattgaaattaggttgacttcgaataagaataaaaaatcttgatgattcttctcttggtaatgaattctattatatttaatgaaattcataatagtaaatcttttagcatgcatgcaattctccagcaatagtagttttgcagattaactaatagctttcaagtcttttgtttatgaagttaatattgtattgcaatacattttgtatgttgaaacagaacttttatagcacctttggagagactgaagctcg

SEQ ID NO: 49876 - DNA, 892 bp, Ricinus communis
  Intron number 1 from transcript 29680.m001720 (locus 29680 .t000063) derived from phytozome v7.0 (chr-ID 29680; pos 4 08236 to 409127)
aggcgaaagagcaaagaaaggtacttacataaatgggtgctttagggttttgatgtatatgatgttatttttgtcttagaaacaacaaaatgaggactaatgtcatatcagtgatttatgtaatttgagtggcttaagctgttttaacattatttaagagtaagttcaattccttttgctttatgtactggttttctctaagaaatacaatcagtacaatcaattgaataagactgcggggatcacaaggtgcaaatcaaacaaccaaaatgcagtgaactgattgactgctgcttaatttaactactaagaagtcggatgaaaaagcatccaatatggaatgcaattaggaagatgttaaacagcgtgtatgatgttttatatgtttgttgttgaatcattctatatgcattatccttagaattagacaaagaacattatgtttatgcatgttgtccatgcttttctgttcaagaggaaggccacctgcattgaaccttcctatgccttaaaataacggaaaccttgtgatgctggctagcagatattttagaattacaaggtgggaactctgatgagcattattcaataacttatggcatatagtattatgtcccccttgttggatatttcttagttttcttattgtagagttttcaaacaaatgttgcaactagattctccctccttcttcttcctctttataatcttgacatgtatttgcttctgtggttttgatattctgtagtgaatgtgtcattctttgctgctctatcgttttggtgctcgatactctagttcataataaggttgttatctgttgatttccttatatgggcattttaatgtgcttgcagtccgcgaagcagctctattaccaaactttccaaat

SEQ ID NO: 49877 - DNA, 683 bp, Ricinus communis
  Intron number 2 from transcript 28694.m000680 (locus 28694 .t000023) derived from phytozome v7.0 (chr-ID 28694; pos 2 20426 to 221108)
atcagcccatttacatacaagacgaaaccaaaaatgttagtgttccctctctctctctctctctctctcttttggagtaattttgtttgcttttgtttgtgtggttttagtgaagtgaattctatctcttggagtttgaacaatacctatcttttttaacttagtttttcttttatgttctaaaattcaattttctttctttcttctttttctttttggttttttgatatgagttccattttagacacaagaaaaaacaaaacaaagtgtcaccaattttgaacctatctctgacttcttcttctaagttttcacatgctcttattacaaagttattatcaagaaaacactatattatgcatgtatatagaatctttctctctctgtctttcctttttcttttttcctttctgtctatgatcactagtgaaggaaatgattgatgtttgaattttaagctctggcttctacttaagttagaaattattttgctacaaagtaacaaaacaacaatagtggagtatggggttcacaataattctgcatgatcatattgtctacaaaatcagactcataattattgcatatcatattccaaaacttaaagttactaattaagaagaaataacccttcttttctgtctccagattgcctttcaagtactagtcaaggcattgattag

SEQ ID NO: 49878 - DNA, 625 bp, Ricinus communis
  Intron number 2 from transcript 29628.m000757 (locus 29628 .t000011) derived from phytozome v7.0 (chr-ID 29628; pos 4 9413 to 50037)
ccccaactccccaacacctccttcaggtctgtaaaatttatgtataaatacccatttactggttttacggaatgtcattattattttcaattttatagatacacacacagagactggtgacaattttggattcaaatgaaacagaagctagctttgtaatggaagtttgagtttgaattgtttggaaagtcaaaaagtgcaaaatagcattcagttcaattcttattagtcatttggaaagttgttcctagctgctagaattcgattcattttcaaggtcatgaaatattatcaaaattaaaatgattttgcaattaaattgaattcttaggcatgattcattccaacaatacctaacagaatgtggggaaagcaatccattttaccgactcttgtacacacacacacccattacagaatatggatatgtatgcttattttcgcctttcaatttagttgatgcaacattacccaattagtaggctaggttatcttggcgttgagagtcttgtgtctttatatgtgtaagtaccccttcaatcatatttttcttgtcttttttcgaatgcctaaagtaatagattcaacttatttgggacattttttttggctaaatagttgatag

SEQ ID NO: 49879 - DNA, 664 bp, Ricinus communis
  Intron number 1 from transcript 27942.m000154 (locus 27942 .t000001) derived from phytozome v7.0 (chr-ID 27942; pos 2 235 to 2898)
agcttgcaaaggtattcaatcaagccttattcatatattactttttaattactcttgtactactagaaatttgattattttatttgttatcagattattactattcgtttcttgaccctttacttgtatgcttgagctctaggttgagcgactgatatcagaaccaacagtcaattatttcacaatcaccattcttatatatatatatatatatatatatataaaatgaaacctggtatcaaagtcaatttttttatttaaacactaaactaaatatattatatgcataatgcctgaaattgattctgatggtggaatcttttggcatcaagtattgtttagagaaggtcctaaccatagtcttctatttatttcttttggtacgcatggtcaaacttttaaatgtcaatttttgttatgtttttattttgtaagcctccattagtttaggatactgtttttaaggacatcaacttatcaagatttggaggaattattaaaacaagcttatcccatccttagacttgttcttaatttttgatttttgacaacatctgtgatcatggttttattcaagttgcaataccagttgattcttgtgaagctaccaaatggcctcactattaataatgttattttctgaatcaacaggtcagtgattctg

SEQ ID NO: 49880 - DNA, 628 bp, Ricinus communis
  Intron number 1 from transcript 28470.m000429 (locus 28470 .t000008) derived from phytozome v7.0 (chr-ID 28470; pos 8 7473 to 88100 reverse strand)
cttctttttatactagagagccatgtaagttgacatctccttcttattttttatttttattttttttgattttctccttctgctcttcttcatcccttttctcttgtttcactagaacattagtagatacattgccttagaaaaatgaaaaaaattggtgagaggaatttaacatatgatttcatggtaatttgatgaaaagacattctcagtaccatgtaatggtgttagtacataggaattaagaaattcatagaaagaaaatgaaagaagaaacccttcattttctctctatcattttattatgaatatatatttttctttcttttctcatcaaagtctacagctttactccttcctgttaattttctttttcgttttgaaatgagtaagttttaaaccgtctcactaattactattagactaaaacagttatactcggatataacttaaaaataagaaacaaaatcaataaaatgatcgattgataggtaaaatagtttgtaattaattttaattagtgtcttcttcattgtagcaaacaaatatgcatataatgagttgttaaaatttaatgctcctcaaaattgcaggcttctaccagtgaagctccagctccacaaccaca

SEQ ID NO: 49881 - DNA, 878 bp, Ricinus communis
  Intron number 2 from transcript 29739.m003576 (locus 29739 .t000012) derived from phytozome v7.0 (chr-ID 29739; pos 6 9300 to 70177 reverse strand)
aagtttcttctattgataaccatcttgaatctctggtagtagtcataacttttttttattttattttattcactcttttttaagttacttatttcaactaaatgctcatagttgctagaatccgatcccttcaacttaaaacagtaacgattcccacaaggccattagaggtcttttttggaaaaattactcacattgtatttgcttcgaagttcaagttgattttggattggacacaatgcatgggggcatgaacgaatgtcatggaatatttccatattgctgctgacatattgaagaatgttaagatcaacagtctcaaagctcttagggttattagaccaaaatttcaagtgatactgaatggccaaagatgatatttttagagggatccgacgttgagtttgtttagggagtctcaaaagttaagagcttcaccttaattgatttctgttgggtcaattcttgtgtttgggaaacctatagttgctagaattcaattcttgtctactttagagaaaaattgcattttgaaagaaatgaagtaatgacatgtttttgcaagtattcaatcattgagaagctcgaacaaagcttttaaatgagaagctcttgggcacatgcttttccttgaatatggttttgattttaatatgaacatgttaatgtattcatcttaattaggcacgttttttgttggaaggttgagatacatttactcggaactacaaaggagttcactgaatatcatccaactccattttctaatttctctatacaagattataagaatttaatgaattcattctatgttgatgtttggtctttttctcctattggcagataactgagatcccaaagttgacatctggctgcac

SEQ ID NO: 49882 - DNA, 569 bp, Ricinus communis
  Intron number 3 from transcript 28225.m000019 (locus 28225 .t000001) derived from phytozome v7.0 (chr-ID 28225; pos 5 686 to 6254 reverse strand)
aaggtattgtgtcaatttgcattatgatatttgttctttcttctctattatatggttgttttggtctgctcggtgtctgtaagaatttataattcaataaatgccttgcccaaaagaaatttcatcaaataggagcatttgatgcttctgatgcatttttgctgcttttacaactgtgctattggtttacattttccagtaaagaaacagtttgatttctgattcaaaagttgtaatttttattgtataaattcatcgtgcaattagttactagctgaatgatgcacgtcaactgtgtttggaagtggttgtaattttaatttgaaaattatttgtttatttactagatgcctgatgcatgttgacttgtgtaacagtaggaattaatattctagtaaaccaattgataaaggggaatacgccaattactaatagtcattctctatttacagggacacacaggggtcctccttactgttactggagatagatttatctgctattttgatgatgtttagtctatgacatgacttttgaattactattaacagtattttatttgcttcaga

SEQ ID NO: 49883 - DNA, 161 bp, Ricinus communis
  Intron number 1 from transcript 29776.m000487 (locus 29776 .t000021) derived from phytozome v7.0 (chr-ID 29776; pos 1 80833 to 180993)
tttatcgctcttacattgcccttgggagctatcaggtttcaacccctttccattttcttctgtttattttattttttgaactctaatttgtgcttctttattaaatcaaaaaaataattgttattattattattattattttgttttgcagttggtgatca

SEQ ID NO: 49884 - DNA, 811 bp, Ricinus communis
  Intron number 2 from transcript 29776.m000487 (locus 29776 .t000021) derived from phytozome v7.0 (chr-ID 29776; pos 1 81039 to 181849)
tgttggctttgtatctctctagccctttaaataaggtttaattgtgctcgatctctagcaatttaattttttcatttcatgatttgttttgttttgaagtatgagatctgagtctgattgtgtttttattttattagattaatttatggttcttttgtttggtttgattggtaagcgcttcaaattgaattgggatttgtatattgactctggatctactggtttgagtttggttttggcagtgtttgattttttaatgtgtcattttggaattggcttagcatgcataaagagagatttcgattttatttataccctttaatttatgggccaaatcccggttggtccttttttctattgtgaatgtaaattgtaatgaaaatgtgattggcattatttagactaaatcatgtgaatttaataaattttgattcgtttcagaagcttctctttttgttcaattgaaagaatggagttctaagaacttatgagctttccaacagtgagaatatactagaatgcaatggaattgaattagattttggttaaaaaattgcagcctaatcttttattttccagtaaagaagatgtgtagttagttattatttgctttcttctgcatgctttctacttcttcaacgattctgcattttgattaccagtataaccaagagaaaatgatattaggtttgaaagtctaactgtatattataataatttggaacctcgagagatgtatagtttagcactgcagtaactggtttcgaattgttcaggagtccactatttcaagtttgaaagggtggctagc

SEQ ID NO: 49885 - DNA, 452 bp, Ricinus communis
  Intron number 2 from transcript 27999.m000063 (locus 27999 .t000003) derived from phytozome v7.0 (chr-ID 27999; pos 2 4711 to 25162 reverse strand)
ggaaaaagtgagaaagaagctcaaaagaattgaaggtaatgtatgtttattaggtgtactctcagctttaccattgtgttgtgtaattattgatttagtaatttttcttttcttttttacattctttttagttgtctttgatagtttacatgttgcactcacaaaagatttatgcatttctagggattttgtttttctattattgttctaactactatcataacaaaaatcagttcaaggataaaaagaaatagaagcaaacatttcaaggaaatattcagaactgttcttaccttctttctttcttgaggaatattttagatttgagtatatagcgtctaatgcaatgtgattattttccaagccttttcccctatctcatgtaaggttttctggaaaacctggtattggattcaggtgtatattcagtggagatcgatacagaaaaccag

SEQ ID NO: 49886 - DNA, 437 bp, Ricinus communis
  Intron number 1 from transcript 29589.m001261 (locus 29589 .t000040) derived from phytozome v7.0 (chr-ID 29589; pos 3 01054 to 301490 reverse strand)
cctgccttctacttaaattttctactcacggcgtcagtaattatttgctccttcttaattaattgcaggtctttgcagcgtgtaatctctctttacgtattactcagcctaacgtaatccatattaatattagtgggatggaactcgaaattcttccaatccttacgatcaaaaatactaaccaggcctattttgcttaaatttcttgtactataagacagtagcttgaccgctagttgaaaatatcttaatatcagtctttccacctaaaagtataaggtttttggtagggaattgtagtaaagaagaaaaaatatctctaactaaaaaaatgacatgtgctgatatttttctttgttttgatttttctaacaagactaagaaacattggaatttatgcagacaacatcagcatttgctttatcctctggagtgaa

SEQ ID NO: 49887 - DNA, 571 bp, Ricinus communis
  Intron number 1 from transcript 27436.m000292 (locus 27436 .t000017) derived from phytozome v7.0 (chr-ID 27436; pos 1 70309 to 170879 reverse strand)
ttccacgtctgttctccatttattatattcttattgttttgcatattctttttttgggttatgggttcttttaattgcttctctaataaaggcttcgaatttccatttccatatactctatgataatcgcagcccttacctagtctgaaatgcagtatttttacaaaagaaactacaatcaaattaaattccaaaaatttgcaatcaaaattttctaaatttcatattctgttgcaaaacattcattttactttcaaaagacatccttaattaatggctttcttaggatttggtaaattgaaggaaatggtgttattgttttttcataaaaaatatatgatgtgaagtaatgtataggctgagactttgaggggaatgagatattctatctttatctgatgctgatgctatcggatgcttgttaagagaatatgaagacttattaattccatgagagaaaagatggttgttttttttttttggtaaagtacctcatattgtttgctgttatcttaattttatgttctgcaatgcaggaggaaaaaacagtgcggataggtctcttcttgta

SEQ ID NO: 49888 - DNA, 456 bp, Ricinus communis
  Intron number 1 from transcript 29726.m004010 (locus 29726 .t000122) derived from phytozome v7.0 (chr-ID 29726; pos 7 21732 to 722187)
gtatgtagacaataacaatttctctcctcgtgcagctccctgtggacatagcaacagaaactactgaaaaactctgtaaaaccagaaacaaattaatatgcatagacaatacaagacattacttccatataactcacatagccaaagaggacatggagaaaacaacttgaaatgagacagcaatatttttatctccttttttggtcaataaactaattccataagaagtattccttatttgattaaacaatgcacatgctctatacgagagaaaaatccacataacaataactggcttggatgacaataaaattctaattccttaggcaggactttccccgactcaaaccaatgcatgaaagcgccttactgacgctaaaaagctttacttttgttttcttttctttccttttcttttaagcaccgaaactgttccatttccccgagtcagaaagg

SEQ ID NO: 49889 - DNA, 491 bp, Ricinus communis
  Intron number 3 from transcript 29676.m001649 (locus 29676 .t000040) derived from phytozome v7.0 (chr-ID 29676; pos 2 77120 to 277610)
aagacgttgatttggaactttttgaaattacttatgtgagttatttctcctcgtcctttgtgtatattgctcgttattatcctccaattgctatcatctatctaacctgtaatactaattgaagaactgggaatatcccatctaaatacatattatattgaaatctcaactagtagcaaagtgaagttccttgtacagcgaaactgtattctatgaggaaagactgttgttctaccatattgtttgagtggaaaattttttgactaactaaatgtggcacttattctttttttttttttttttttgtttattcattttcttttcgtacttattaattaagttgaaacatgtggcttttttctatgccattgctgcattcagattgaataactggtagaagtgttaaattgtatgcgggataactgatattgtcagcttttgattttctcattttggtcaccatcatttgtgtttctaatcatgcaggtgca

SEQ ID NO: 49890 - DNA, 986 bp, Ricinus communis
  Intron number 2 from transcript 29596.m000696 (locus 29596 .t000010) derived from phytozome v7.0 (chr-ID 29596; pos 6 5575 to 66560)
tggcctggcaccctcgttcagatctcccttttcaggtaactgtagctttgggttgtgatacacgtagcacggaaattgaaacctgaaacttgaaaatgtggaaacacagtggagttttctgtgtttcgcatacaatgattaagacaatttatacttttaactttattgtgcagtgggatttcaccgtcattgccttggtctgatgttaatggccgaatgattttgttcactacttgtgtcttggacttgttgcacacaatgttacttgtctcttgtacatgtttcctttgcatgttgcgaataatccctaggtggattattggttattcttccaagaaaatgtttttgtcttctatcaaatcattaaaatatcataaaacttttcatgtctttacaaagtcactaattttgattaaagtttctccatctccatgaattaaaatggttttctttttctggttgttttaattaatgtgcattgaaagttaaaatctgaacaatgaacccttctcagaatttaatgttagtaccaaaaatttgcaaagcttttacatctaaattgtggtctactgtcccaaacttttccaagctatgactaatagtacatttacttacatgtcatcttgcaatgatattttgccttgatgcaccttcccgaacctaacacctaacattagcctgttaacatcatccaagttgatccctttatagcccaactcacaattaattacaaagtatctgctcagcaatctttctaatctctttttatgccacatatatgatgaagtttttttttttttggaaactttcttaattaagctaaaccaacttcaatctatagtctgttttctctctgacctttgcttgttgcaaggtttcctgtatggcacttactttgctgaatttgtatatataaaaagcatcgtaaatgaatctcattttcaatttataacttgtgattcttcattgaatatgcaggacattgc

SEQ ID NO: 49891 - DNA, 527 bp, Ricinus communis
  Intron number 1 from transcript 29759.m000284 (locus 29759 .t000009) derived from phytozome v7.0 (chr-ID 29759; pos 1 84617 to 185143)
acacttcccactatcttggacgctctactccaaaggtgagcaacgccttgcagttcgggaaatgggttcttatgagttgattgagttggtgctttctttgttttattagtgttgcaagcaagggagggtgaaaatcctgtagatacccagaatgaaatgctggaatattgttaatttgatcatgtctagtaccttgattaattatgtatttttcgtgctataatgtctctttattatatgtcttttaggagtaagctgatgagttgaggaatgttttatattggggaatttgggtctcagattgttaggactgcacatattttaaagatcatctcttctcttcttgattagaagggtttgttgctaaagaaatggctttaatagttatattggttctgctgttgtggtttattatatttttgagaggtaatgcagatttattgttgtcttacatacttatattcccttttgaatgtttctggtgattagtaggttttaaatcatagagaaacttattcctggagttt

SEQ ID NO: 49892 - DNA, 891 bp, Ricinus communis
  Intron number 2 from transcript 29759.m000284 (locus 29759 .t000009) derived from phytozome v7.0 (chr-ID 29759; pos 1 85167 to 186057)
agcagattcatcatcagagcagctcattgattgaggttgagtgcactgatttccatacatttattgttcatatgctgtgtgagagcatcatagtctatgactgtaggtgcagaattgtgacatttaaggggttatgattttcataccctttgttttacttgtcaaaagaattaaaaagagaatgactgccggaaatgtaggatgcttgataatgagttttagcatcagtgagatgtttgtttacaatatttgaatgtctgtttttggctgaattgacagtatgtggatacacgacttaaaattaaatgaaatatgtgcatctgttcatagtcccgtccccacctagattctgatactcagtattatcttaatccctattctgctttattcatctccctccctttcctccccctcaacccccaaccccctttatttctgctttcttatgttttggtcaattattggtttcccgatctgtctatgagatttgaagtttcagtagtgcgcatgattagtgcaatggtgcaaacatttactttttttttttttttttttttgttttaattgtggtttcattttcttcgtctagtgcaaatcttaccattggaaaataacctttacgtctcagcttaattttatttaatgtctatgaaccttagacccttttcctttaattcagaatcatgattaccaaacctcaggctctagtctaccacaaaagcaaatgcatcatttaaatcaattgcacaagatttccttatagttcctctgttattatccatttgcatggaattaatatttttctattcaaagtatatgtttgcctacttaattgagattgagggattttatttttgtaggatcaacttgacccattctcacttgtcgctg

SEQ ID NO: 49893 - DNA, 875 bp, Ricinus communis
  Intron number 1 from transcript 28359.m000283 (locus 28359 .t000011) derived from phytozome v7.0 (chr-ID 28359; pos 2 00979 to 201853 reverse strand)
gaccccaaatctaagctcaggtgctcttctattctcttctttttcttagatacggtttcttttctccttatgtttttcttttttaaaagagtctgatttagcttctttttttttccttttgcatatgtcagattctgttgaatggtttcccctataagagaagcctcttcttttcatttctaatttatccactttaattattctctaccaattcgcctggtttgtcaggttatcattttatgtttttcgctaaaatcttaaaaactccatctcaataacccaatcttctgctatattttcttttatgcttatgagggcttagtggtttatctctgtttttatttatctttaaatatttgttgacatttcgaaaacttgggttcaaattgatagggtttacattgttggttagttctttctttcttttttcttttctttctttttgttgttgtttttgcttctttattgcatttgatttcatctggacctttcttatttcttgtggttagtgtaaacttcaaatttattcaagtatatcatttgtactagttggcatcgaagaaccattaactggtagttgaagggctactagacttgtctatattatcataacataacattgatgagacatttctttggcctctgagaaaattcggaacacgctagattgtaatgtaaaataatgaaggtgcaaggtataatgcgatagcttagcaagttcaaatataaccaccatgtaagatagttctcctggtacagtaaacttgcaagatcatgatgtttctgtatcatgttcagaaattgaaacatgtgaatatttctctcgaataaatatttgcacattatgttggagactagttagaaggttcagggac

SEQ ID NO: 49894 - DNA, 647 bp, Ricinus communis
  Intron number 1 from transcript 29660.m000776 (locus 29660 .t000029) derived from phytozome v7.0 (chr-ID 29660; pos 2 14695 to 215341 reverse strand)
tcgttcgctattctcctgagggggaacgcactcgtgtatgctttagccttaatttatacatcttttgtacataatttatttggatttattatacgtatattcttatctatattttacagtattttgttaatggatagtaacggtaacatagatatgattcttttagtaatttgatgtttgaatggagattcaatgtttgtttatgtatctgattacattttgagttggaattatatgaattcaatcattagcctcttaattattggtttcattatgtgtattacgtagaattaagaaaaccagcatttgaggaaactcatgtttcttctgtttggtgcccatgaccctgttttgcataacgcataaacactcttgctagcgatattaatcataaatttgaactgttagcactattttcttttccttctagtagtttcagtctatccccagaagtggtgtattatattttagtatttcttgcaaatcaatgtattgcatgtaatttcgtgaatgtctgtgttatcagttattctatctatcattttttttttggttacttttttaattgtcaatttagtgcttatatcttttcattttctttccaaattccagatccaaaagcatagagaatataggcagaagattat

SEQ ID NO: 49895 - DNA, 571 bp, Ricinus communis
  Intron number 1 from transcript 28408.m000204 (locus 28408 .t000010) derived from phytozome v7.0 (chr-ID 28408; pos 1 00787 to 101357 reverse strand)
ggtaactgtctccatatccttgtctctgcttattgccttttcctgttaatttttttttttaattgcttaatgaatctatgcaatttcttgattttttctttatggatctactagcttgtaattgatttgttaccgccgttaatctagttttgatctaaagttcgtctcattaaattcttttatcattttagttgttttctttaggttcttttcagctgttggttttgtaatcttttttattagttggaatcagcaagtgctttctctttgaaattattatttatgtgtatagattgtggaattttgtttagataattaaatgctctgctagaatttcttatccttctttagtttattttatgcattttttttatgccctgctaattggaaattatgatttctgagtttggagtggtgaaattttgattgacataatcaagtaaattaaaatgaacaatgtttgggatgtttgcattggtttacaattgatctgcttgtgcttaacatgtttaattatgtatttcttgtgatggtagatattgaggcggatattcgctctttacagcttgac

SEQ ID NO: 49896 - DNA, 643 bp, Ricinus communis
  Intron number 1 from transcript 29737.m001254 (locus 29737 .t000048) derived from phytozome v7.0 (chr-ID 29737; pos 4 07497 to 408139 reverse strand)
tgtataagcgtgatcctcacgagaatcctggcattgtaagctcttttctctcacttttttcatttgcataattaaatggtttaatttgtaagctgaaaatggagctgcatcgagttcaagcgtcattggaattttcattttgtttcttcattctggagtgagagtaaattcaagaaaacattttgtagctgtctgtcaaacttaatttttaaattcatatttgagtatatgatcaacttttgttaatttactgcacacgttagttatttcactgaggaaacgaatcttgctgtacaactccattgggttttgatatattgaaattggcaattgcattaagagagctgaaagtacattaattgttaaggggattagtgatagaacgccattagtctactatttcatggatgatagaattatgcttgttatatatatatatatgtatattagtctgtttctgttttaaaatgaacatgttttcagtgttatacgattgtgcccaagttctaatagccaatgttttattcattattctagcctagctatgttccaatttccaagtgcttaattagatatttacacttgatgcttaactttttcttatccagaaacctattaggaggggtgtcgcagggcctacact

SEQ ID NO: 49897 - DNA, 975 bp, Ricinus communis
  Intron number 1 from transcript 29719.m000318 (locus 29719 .t000005) derived from phytozome v7.0 (chr-ID 29719; pos 9 2790 to 93764)
tcttttgctgctattattgcaaaggttctttttaaagattaaattttttttttaactttttagtggaggtttgttgttaatttttatttttatgcttcttttctggttttctgttggttttagttaatttctttagttggattcagttttaattgttttctactgttgaaactcattcttaattatgaattggtatttgtttttgggggtaaagatttggtttttgttatcacccaagagaaaaagttttgatttttaataaaggattttagatggttcttcgttttgtattctaatttaatagaatttagggaaataattggaattaaatggagttttccaatcaatattaggcttattttataatcattatatactcttgaagtgtacaaatgataactgatatggtgctgcaaatttagaggtacactattatagtgatcaaatccttgaaatcaccatgttcaataggtggcaaaggaaatgattgttaagtttttggaagtgaaatggcagtatacaagtgtagtttgtgaaatatatgtgaaggcgaagatatgaatccatgtactaaagtgttgacagaatccattgatgttgaaattttttttctgtagtatgtaattgtctgcttttgcttatgaagtcacatagctatagccatgacacagaaaggttttccaaataaccacactcagattttagccttccattttctcagtctatgcatctatatacttgatttagaaaaatatatataaaaactatggtttagagtatgttatgactgtaaattctcggttagggatggtggaagtttcccatagagtttactggaattatgctctttgtagttgcatagaacttctgcaccctaaacaataacaacgctatcttgactgataaaagtattgctcagttaaccgttagtatcctttggctgatttatgcatgattgcttttttattttagttt

SEQ ID NO: 49898 - DNA, 420 bp, Ricinus communis
  Intron number 2 from transcript 29608.m000209 (locus 29608 .t000008) derived from phytozome v7.0 (chr-ID 29608; pos 1 05751 to 106170 reverse strand)
ggaacaaacattggcagcttcatatccctccaaaggttaagaatttcctttggagagctgctcgaaattgaattccagctagagataatctacgaaaaaagatgttgaggttggagctgaatgcctggtttgtgctagagaagaagagagtgaatttcatattttagttgattgttagtttgcaagagacttatggttctcaagctctattggtttttatagaggtaatgtgacattagtcaaagagtggctttagtttgtttttattatttatccgaaggaaggtgctgctttagctgctatgttgtgttggaaattttggactcattgaaatagtgtggtttgggaaaattagttcaatgggtctgccaatttgattcatcagggtcagagctatttagaacagcggtgtatagctca

SEQ ID NO: 49899 - DNA, 896 bp, Ricinus communis
  Intron number 4 from transcript 29729.m002348 (locus 29729 .t000081) derived from phytozome v7.0 (chr-ID 29729; pos 4 54578 to 455473 reverse strand)
tctaaggaacatcatcaatgtaatcttctttactttcaatttctcttatttcttactctatcattatactcatattgaaatatggaaatgatattacaagttggagtagcaggaaggttgaaggttagactgttatcttcaaatataatttcatttaagctgcagtcatgtttatgagtaaacgtgatgatatcgaatgttgacaaagtgatgtgaattgttcaaaggcatgagcttgcgtctgtatttggctagtggaatggtttctttttgggcagggtggggtccacacagtcattctgatcctgttgtttaacaaaagcctgttggcatgaatatttggaaccacgcctactgcccatactgtggttctgaatggtcttgggctgaccacgtgtcagcctcatctttcatgattttgttcgaagcatatggagtattgctgcattagtcagattgacaaagaaaaactatgctgtggtttctactgctgcttattgtttttgatttgaagttagtgaagggggagtggatcaaattcctgagcagaattccaaagtgatttcataatttataatttatggtgactgaaagtggaataacaaaaattgtaataatgttttgatttttattcagaccagttattactttctggggcctgcagtttgtggttcttagatcataaacacatttgagcatatgcctttttatgaattcttgtgacttaaattaatgtactagcataaattttctggatccacgaagctttttaccacttttctttgcctgcctaagcaggtatgcatgtgaggatagtggtaaatatgtcatacaaggaatatcgagaaatgatttctcaaaaatgaattgtatcctttgccctcaccttattgcag

SEQ ID NO: 49900 - DNA, 664 bp, Ricinus communis
  Intron number 2 from transcript 29703.m001518 (locus 29703 .t000054) derived from phytozome v7.0 (chr-ID 29703; pos 2 75475 to 276138)
ctataacagaagacctctctctatctctagcagaggtaagttaatatagtgtccccatgtacattatgcatccctctaaattagaattttggaaaaactttgtattggtcatgagaaaattctcatttctaccttggcatcaggaggccccaaagccaatgctgaaaatgaatttttgacaggagacatatcgaaagtattttaggagtaggacttgaaccgtatttatggagtgctttcagattctgtgagccacttccaaatgcagagtcgaatgttattctcaaattccaagattaagatgatatattgcaatattttggaattcattataaccgatatgtatgaacagtgaaataaacaatagaacaacagtatgtattacaataagaggcattgcattcgagaaaagaaattgaggaggcttaacattcattgctattggatgataaactattatgtctacgaatgatcaaaggattattttcacaacatacatttggaatgaagtcttactatgacctttttctttctcaattatatttcttctgatatagaaaaaaaaaaaaaaaacctttagattttatgttcccaactgatatattattaatatcctatgttacatgcagtattccgtatttggttccatattgacatttggtgc

SEQ ID NO: 49901 - DNA, 359 bp, Ricinus communis
  Intron number 3 from transcript 29739.m003634 (locus 29739 .t000070) derived from phytozome v7.0 (chr-ID 29739; pos 4 35782 to 436140 reverse strand)
ggctgaaaagcatattcaaaaactcctacttctcggtactcattattcatatcacattacacactttaattgtttgagatctacaattaagttttaattagtaatttctcaaggttttagacttgctttgaatggctaagaacagcatgggtgatggggcttagttcttgagcttcagttccataattttatattattagtgctattttttccttttactttgcttttctttgttttttttctcttaaatgatccaatccaatttctgctatctttcatttcttatttccttcttttggttgttttaatacttccatgatccaggagctggagactctgggaagtccacaatatttaag

SEQ ID NO: 49902 - DNA, 1058 bp, Ricinus communis
  Intron number 1 from transcript 29739.m003634 (locus 29739 .t000070) derived from phytozome v7.0 (chr-ID 29739; pos 4 36464 to 437521 reverse strand)
cgtagctaaaaagttgtatcctttacttctacttggtaacttttcttcttcaagctcactccttttttgctttccatttgcttaatttgctcctttagatcttccctttttctgggttcatttatattgatggatctttgaaatgctgttgtagcagcggatcaaagaagttctattcttttcttttttgttattcgttctcttctgggtttgatttttttttttatattcttatttgtgatttaaaattgaatgtgcataggactcttaatctgcttcatttttatttctgtagttttcctgtttttaaaatgtgaaattttcagatgggttgcttaaaactgggtaataaataattatgttggaagtgcttctgatggaaagttgatgctgaattactggactgcaactttgtatatgatttgttaattgattagttgattagtcaagactgctaactgctgttttttgatggggtaggaaagaaactagcttagtccataaagagcatgcactcaactggggtatatttattgtggcaaaaagcggagatacatttctgagcattctgggcattaatatgggtattaattgtcttgcagcatgttttatagctgaaggtgtaacttgtattcacgagaaatggcatgtaaatgttgggcagcacttgttttgttttgtctaattcatgtgtgcatgagtttgataaaatgaagcttgattcgctacacatttatatgacatcactatgcttactccagttctaacgttggttttggcatttcttatgaacctttactctgtctcactttcaattataagttacggaaaatcaagtatagactgttaaaggctcaatgtattgcctaattgctatttcatttttgtttttcattttgttatcccccatttttgcattattagtcaaatgagaatatatcattattatcatttagttctactgactgatgattaaactttgaccgccagtgaaggtgcatctaatcttcatttcttgtataggttcatagtatcgtcttcgggttaagtaaaccaca

SEQ ID NO: 49903 - DNA, 781 bp, Ricinus communis
  Intron number 1 from transcript 29176.m000138 (locus 29176 .t000002) derived from phytozome v7.0 (chr-ID 29176; pos 2 7808 to 28588)
atccggtcctgcgacactacttactgtcatctcaggtatccctctgatgccatatagcataaatattttcctctttctacagctggatcataatacctctttctcttacaggtgaagattgagattggccttaaatttaattaactactctttcaatttgctattttttttttgtaaaaaaagaaagacagaaggaaaaagaaagaaaattgagaagaatgatataaagcaagtttcgtgctgctaaaactgtgcatcaaaacgttttttacctctctcgaatctgtcagaacccctctatcttacaggtgaagattgagattagtgttaaggaaactaggaaggtcttaggattagaagatgtgaaatagcggatttgtttctagcgtaccagaaaaagaaaagaaaaagaaaaagaaacagtgtataacaatgaaataatggggtggggataaggaatgctgtgtatatgaggaatagggcatattgtcttgttttttcaaaatgctaatagcgccccaagttttagctacttgttttggcacttaagttttgcacttggttcttttatctcaatcatagatttgattttcagtattccaaaagatcagatgattttttaggtctaccttcaatccgtttttgatatttaatatcattattttcttctattaaagaagaattgtttcgtctcttcttcttcttttttttctttttttcttttttttgttcattatatctgatgtagatacttgtttttctgttctagagtttgggaaag

SEQ ID NO: 49904 - DNA, 954 bp, Ricinus communis
  Intron number 1 from transcript 29729.m002298 (locus 29729 .t000031) derived from phytozome v7.0 (chr-ID 29729; pos 1 90538 to 191491 reverse strand)
ctttattagagaaagctgaactcttggtcaataaggtttttttgcttttttctttttatgcctttctatattccatacaaggagttctggttttcccctcttattattccttgttggtgtaattcatttagctacctctgttgtaactatggtgggatcactcttttgtggcttaaaatttaagaaatgctgccatacttggaacgatcttgaacttcaaaggtgttcttgatttttgcgacagtcgagaaaaggtataaacagaaagtgagattgcttaatgtgttttacaggttataaataaaaattggcaatggaattactaatgacttgaccaattatactgattgcaggtttattacaatggtgtttataccaaactattgttgtcaagccttcttttgactattgtctgaattagactattagatagatatcttctgcaagcatcagaaaagactagttgatccaagctcctgaattaaaacgttgtaaaacatttcaatcggattcacttactgaagattaagcaatcttacctgtattcattctgaagacatgttgcaacattatcttactaaaagcatctaacccggcggcacccatttttgcctatgtgattcatgccattaagcttgaaggccgagcagctccattactaacaccttaaaacaacaacaagaagatgaagagaatccaacctaatagcacaaatcatattatccgtgcctttacaaattactcatgtaactcagctctcccctgtatccatacagccatccgctataggattatgcacaacacatatgcaatgcaaccatgcttcatataaacagaatcctttcatcattcctcctttccaaggaaatcaagaagctaatagcttgtaaaacagtctgatttgcgatctaatattcagcttcaatacagtgtgccttgcagggttgggatctt

SEQ ID NO: 49905 - DNA, 385 bp, Ricinus communis
  Intron number 1 from transcript 28320.m001145 (locus 28320 .t000072) derived from phytozome v7.0 (chr-ID 28320; pos 4 63498 to 463882)
cctgctcttgttaactacagtggtgagttctttctctctttcctttcttttttatattttctttagcagttggtcttctgtttttaagttgtagatgttagttatgttaattgggtatttcttagtttctaatgttatttatctgtttactggttttagattgaattctaagtgaataggtaaacaatgaatcaaactttagttacttaattgataggctttattgaaatacatgcaaagaatttagcttttagttgttttaattaaaacataatttagtttggtatgtagtagattgtaaagtagaataatttattttgaggaaaaagaataaagaagacagcttttgcttattggacttcttttggaatgtgtttttcaggtg

SEQ ID NO: 49906 - DNA, 883 bp, Ricinus communis
  Intron number 1 from transcript 29569.m000151 (locus 29569 .t000007) derived from phytozome v7.0 (chr-ID 29569; pos 5 5859 to 56741)
ctcctgaagagcttaatcttgaagttattagatctgtaagtaaaatcaaaactctctgttttaattattacttacttgtcaatgtcttaactgcatgtcacgcgccgtgagtgagagtagtgagagagagattcatggtgctgtgtgttttttgacacgtcggcacgtgtagggtccacttagaacagatctactagtagcaaagcaagaatccagttgcaaattatttttattttttttaatttaaaaaaaaatatcccgatttttaagcatggaattttggaggcaaagctctgctaacttcacggccggtgatatagtctatgttgtgtatgtgtgggtcccctaccatttgttttaatttttagttaaatcgatttatagccgttcgatagaagttaatgaccttggcgtgggtcctcctgctcatgaatctcgtatagtgtctacttgtgctgtaaattattgttatggtcccactctgattttggttggtggcatggaaatattgaaaaatcttttatgggtgggttgggggcaagcttgtgcattaaagatgcaaaattgattatgggtttgatggcaagattgaaacttttttttttctttttatggttttgaggtcaaagattgaagatttaaacaataatctgagctaaagttggcaaaattgaaaaaaaaaaaaaattcttttgtgggtttcagggcaacattgaaaattcaagcaagttaaagaaattgcaccacgcgcaacctcttttttaccacgcgccacctcttttattttgttcaaagaaaaagctttgggtgtaatataagctgactctgaatgattgtttgtttgtttattgtgtgtaatatatataggcaaaaatattccact

SEQ ID NO: 49907 - DNA, 628 bp, Ricinus communis
  Intron number 1 from transcript 29691.m000286 (locus 29691 .t000009) derived from phytozome v7.0 (chr-ID 29691; pos 2 18440 to 219067 reverse strand)
gttacaggttggtccatttcttaagacaagtttcgtttttggtgggtttctgatttgttttatattaggagtgattttgatttctcaattgatagttttttatgtcaagaaatggtttttgatttatttggtagagggaaaaagaaagttttttttgtttttcttgagagatatgaattcttttctgcgtgtcagagttgggttttctgggctgtttatgttgtctctgtttctgtgtctcgtgtcttttatccatctcttttcttgtcagagtttgatttatctttgtactactgggtcttttcttctctttccaatcaactagtcttttttatgtatgtctgatggttcttctttattgccttcttgaagcttaaacttactctctaaaccactgtattatgtcttaccctgggagtaacaacaggagtaaatcctccaaaagttctaaattttaaaactggaattcatattaaggatctattattacaaactcaggagctatgcctttccaataatacattctatcagttaatctacgtaactaagcattacaagaataaattcggtttgattctcaagtgaatcagctaattgaaacccaggtcaactgttgatcacagaggaa

SEQ ID NO: 49908 - DNA, 418 bp, Ricinus communis
  Intron number 1 from transcript 29711.m000336 (locus 29711 .t000018) derived from phytozome v7.0 (chr-ID 29711; pos 2 40303 to 240720 reverse strand)
caacatccagttgatactcccagttcctgtttgttgctaaccatgttaattgttgtaaattattttgaatctgatactctagatagtaccagggaattttcttctagatagtagtgttgctaattatcctaatcattcttgtctcattcgactataatataaccttaatccaatctcagaatccatggtcgtcagacaaaaaatggagttagttaggtcttctgtacagtcttttgcactgatattaatttcattggtttcttgctgcactatttcaggcactcaacctttttcgttcctttgatttttttttcctcttttttcttgttttcctttctgggtttttcatttcaggaaattattaccaattattgatgaataatatgcacttttttttggttatgatttgcagactgct

SEQ ID NO: 49909 - DNA, 460 bp, Ricinus communis
  Intron number 1 from transcript 29727.m000482 (locus 29727 .t000021) derived from phytozome v7.0 (chr-ID 29727; pos 1 66638 to 167097)
gcacttgcgagcaaaactctttcccaaacttgccagttaaaacttgttaacagtaatactgctttactgcttaaactttgtcatctgtctggggattccacttctcttgaaggtacttctttcttgtagataatcttctgagctttaacgcagattatttcttgatgggttatcattcttttctccttatggcttcagtaacattaattagtgaatcttttttttttttctagtaattttatttttttctgttatctttttctgtttctaaggctactttgaggcctttaaagtcaaaccatgaattatggtataagtaacaatagaaagtgtataacaaaaacatttctaagcctcttttagattcctcttagcttatgctgttgatccttttttagtcatctagtattgataatgattaccagaaaattagatactaatgcaattatttttaggttac

SEQ ID NO: 49910 - DNA, 878 bp, Ricinus communis
  Intron number 3 from transcript 28543.m000389 (locus 28543 .t000006) derived from phytozome v7.0 (chr-ID 28543; pos 4 9287 to 50164)
ttgccagaaggttatcgaagacgcataactgggcggtatgtgcgtcacattaatactatttcttgatccaatacctagaggcatgaagcaaatgaaatctattatgttaattttccagattatcattctattatcttgcatagaatgaggatcccttgaatttatattagtgcctatgcttgtgtttaaattattcatgtatattagaactgccatgtagctggatttatataagctatagaaaatgcacaagtagtggcagttgttggagtgctaaagaatccgttagattaataaaggcctaacactgaaggagaggttgatgatatcaaagccaagatatgcttggtggattatggcggacagtgtcttgtatactttgtatggcattttgttattttttccgtagtttctagtgtatctgtactaatttcgtcccataagaaggaataaacaaaaatatattttcccaatcaaatgtatgaaccaaattttggttctgttacataacttaccttaatttggaaaagaaagatcagtagttgtttcagctgtgtgctgttatgtccatcttgctctaaaacatggcactgtaaaagagttttattctcattgaactttcagcactttatcagttatggctatgatttttatctctatttctataaaaggttctgattggctaaacaaaaatcagtgtatcagatgcattaactgtattggcctgaatgagttattttcagaaattgatgcttccaaagattttatgtttacaaaaaaataagtcaatcatttttatgtattttactttagtacatttctctgaatgctgctggttcttaggttgcattgaaaaccttaattgttattcatcgtgc

SEQ ID NO: 49911 - DNA, 637 bp, Ricinus communis
  Intron number 2 from transcript 29647.m002056 (locus 29647 .t000064) derived from phytozome v7.0 (chr-ID 29647; pos 4 17723 to 418359)
ctatcagagaagatcttgacttatcattggcagaggttaatccaataacttgcacgtaattttgaatgttcagctattgctaatgaagtttgagatgaataatgcatggtgaactgcaatgctcagtagaaaaatatgaacaaaagtttacatgtacaattatcttgttaattgctacttctaagctgaacctagatctttctgaagatgtaggaagtgagtgctatggaagaaaataatcgttgcgacagaagaatattatagttcttttcatgtaccgtagatggtaaaatcaccaggacaaggctcttaggaacatgcaaaccaagttacacatagtagacaccctacattataagttgaaatctgaaaacatcccataagaaagtgtgctagtttctgttggaaacttggagcactgcatccgatttactaatttcttaatggcaatcttgtggctttgtcatgagggcaagccacttccttggtaaaactagcaatgacactctggtggtcacttcttcttctttttcaaaaaaaaaatcaagtaaaccttttacctcatgacagttatactccccttctttgatttgaattacagttctcattatttggttcaatagttactgttggttca

SEQ ID NO: 49912 - DNA, 700 bp, Ricinus communis
  Intron number 1 from transcript 29812.m000202 (locus 29812 .t000011) derived from phytozome v7.0 (chr-ID 29812; pos 9 0503 to 91202)
ccaccattgcaagggcactcttaaggtaaacttttttactgcaaatctgctccataaaatgatttagaaagcacatgcccttttatcctttttcactgtaaaatcaatatatatttcaaatgacatatgttaattgtacaaatgagaggacctgctgcatgtatacatcccttatatacacctctctttatatacgttgtgtatgctaatgtatgtttatgtaattcctttttctttatattctgttgaaaagttaccaaggaaaatcttggggaagatttttttttgttttttgtttggtgtttggtgttttcttgcaaaaacatttgccatcagttttcctttaaagctagaattgcgtttatcttcttgtatccatttaactgttgatgagatttcgtgtctaagggaatatataagatatttctgagaatcatttccgatttcctttcttctttaacaaagttttcatttacattaattacaaagtagagataacttatgtgttaggtaaattattgcacagttgatcactagatttttgtttgatttttcagttcagtaaaatgaagattatttaatcaagatattattgctgatcgctagattcttgtatcatgaccttcaaagacaactcaatgacatgtgtttttaatcatttgcagctaagcaactactgttcttttgaaggggttctgta

SEQ ID NO: 49913 - DNA, 650 bp, Ricinus communis
  Intron number 1 from transcript 29631.m001022 (locus 29631 .t000029) derived from phytozome v7.0 (chr-ID 29631; pos 1 78022 to 178671 reverse strand)
gtgatcaggttagttgcttctcttcttcttttttttttttttctctttttggtatgcaactgtttttgagatatgattgattactgttttgtggggggtgttcgacttttttaactgaatttgtttctgttcgcttaaatttgattactttgtagtcgtaaatactgttgtctcaaatttgagctatttttggttttaagagtttaagggcagcttaactattaaatggaattattgggtgattattaattgttgttctcttgtctgtgagtgatggcaattctaaaagttgcatatgaggtgcaactagaagtactctagcacacgtggtgtagtattctattattgatactttgtagccacttgaaagtcgtgttacctctttgtattgtatattttagcatagtgtaatccgtcttgggttttgacggtcttggtcttttgtaaaccatgtgcttgtgtgtctgttttttgggttggtttcataatctgccctgagattagttgagcaaattaatcgagtatcttgccaatgagcaataagtagtcttataattatggaattggattgatagaaaagggtatcattcattcgtataattatgcattttacaggtagagattgacagcttgaaggggaagaagcttgg

SEQ ID NO: 49914 - DNA, 967 bp, Ricinus communis
  Intron number 1 from transcript 29804.m001510 (locus 29804 .t000041) derived from phytozome v7.0 (chr-ID 29804; pos 8 04531 to 805497)
agctcttcaacaacttaaggcatctggaattgatagtgagtactgttcttcttttcatttatttgtttatgtttttgctttatttgtgttattagtttaatttgtgttgttataaatgtaaaatagaaaagtcaaaatctatgatttttatgagggttgactaatataattgttcttgttcaagcttttattcatttcatttggtcttgttcaattttgaaaaaaaaaaaaatgatggaatttaccaagcttcttgggaaatggaattcaagaacttaatctggctttttgaatgtgaattggaccttggactaggaatcatgatggtgataatgagttatgagaatagaaatgaactgtattgagttgaaatactgttttttttttttctttttgtaattattatatagtgaagatgttttaatttatggagtcaaaagattcatatttctgttagttgaaggtatctttttccattcagaaatatattttgtaaagggtcatcactttgcttttatgagtttgctatgatccttgacagaattttagtggtcagctccaatttaagagtgtttattttagtaatagcatgtcgcttttagaggtgggggaatgtgattagagagcaaataaggcttgctagttgttgaagatgggtgcactctttactctcagcatttagcttttatttgccgtagacatttgtagtcttaaatgtcgatttctttatttcttgttccagatgcagttttcatttgaagtaggattaggttatacttgcaacttcaaatggcgctgcatattttgatacttttacataattgaacaaaacaaggagaggcttctgtccaattttaatttttcccgcggtccattattgtttgagaattatataatgtggattaattgttcaagtatttggcttttatcaggatatacaaaggaaaagagcagcattgttgtcatt

SEQ ID NO: 49915 - DNA, 408 bp, Ricinus communis
  Intron number 2 from transcript 29669.m000823 (locus 29669 .t000032) derived from phytozome v7.0 (chr-ID 29669; pos 2 09805 to 210212)
atttgattcgaaaaactgttcaaagtcttctcaaggttatcactttcaatatcaaaatcaaattgggttttgaaaatgttggtttgaatgccgagaaaatgtccacaaatgaaaaagaagaaagccgctttccgagaaaaaaaaaaaaaaagaagctttgtttgtctgagtgtgtattagcctcttgtttggtcattaaggaaagaataaaatttttgaacattttgtcatctgggcattgtggaaagaagtttgatatgattgtgcaagtcttgttttgctttatatgtttgcagagaaaatctcagaaagggaaacttggaattcttttgatttttttcaaaagttccaaactttgaaattttggcattatttttaatgtattgttattgatgttttgacaggctt

SEQ ID NO: 49916 - DNA, 608 bp, Ricinus communis
  Intron number 3 from transcript 29669.m000823 (locus 29669 .t000032) derived from phytozome v7.0 (chr-ID 29669; pos 2 10326 to 210933)
ctggagaacggaagttcaaaggtaaaaactaatttagccttttagtatagttgttctgttttattgcagagaacattaaggcaaatgagaaaagaaaaatagaaagaaaaactgaagcttttaaacagaatgaatttagtgtttctatgcaatcatgtcttcgacatggtgcaagtgaatatgtaactagaaattactcggccagtttgtcttatagatgattcaaactgttggaagcatttcagtatgtcccatttttttgctttttgaacaatgtatgcctaaaattgactgtcctttccatatcctccaggctcacttgtagatgtcgtacaagttttataaatgatcacttttgcctattcaaatctatgtttgtaatatacagtagatgatttattgaattgaaaatagagggagatttggatagttgtttgccagttgtgcacacaacttgtcgaggatactaagaaatgaagcccttgccaatatttgaggtttggcaatttgggtcttgtgcgcagctgtgccaaacttaaccctagtactattggttcaacaattattctaatgctgcaaattggattccgttccattttttttgaagg

SEQ ID NO: 49917 - DNA, 543 bp, Ricinus communis
  Intron number 2 from transcript 29344.m000103 (locus 29344 .t000001) derived from phytozome v7.0 (chr-ID 29344; pos 5 974 to 6516)
tccttagcaataacttgtgcaagaaacgtgaacaggtctgactcttgaagacctcttacgattttgttcttaattccctaaatttgattcagacttgaagtaaaattggtaggagatactgatccttagcaactttttgttaggttatgcacgtcatttgtgtcaaatatgtgcatgaacatgcgtatgctttgtacagatgcctgttatgttatgagcagtaatacatgatgaccaactatacttgttcttcttgcacctgacaatttaactttgaagtcctttattgaagttctgtatcggcttcatcaattgattacgggtcaatgcaaaagcaggcttttggttagtaggttcataagtatgatgttctcctacataattggatgtgtcctttttcttctttttctaaaaaaaaaaaacaatttttttattctcttttaatgtttgtctcttgtagaggaacctgctcttagtgttcctcttatgtgaactgatatttggactgtttttccttctgcaatgaacagcctaaggaaatta

SEQ ID NO: 49918 - DNA, 874 bp, Ricinus communis
  Intron number 1 from transcript 29640.m000409 (locus 29640 .t000007) derived from phytozome v7.0 (chr-ID 29640; pos 4 1688 to 42561)
taaactctaaccaggtgcggttttacacagaaaagtttcactatttgatgttgggttttgctagggttttgctagggtttaaggttttaattgaattagtcaaatctttggtttttccggctgattttggctagggtattctggaattttcttgttcatgcttgatatttaatagagtttttggttttatgaagtcgcaaaggtttcatttttttggatattgattctattagcttcctcgtgtgttggtttgttagttatttattatgagcgtatgccaattttaagtcttccaaatatttaaggtatcatttgcgtattatagtactagacttaacatttgctatcattgtttaattgaacttgctcacacggctgaaaagcattgcaaatgttaaaaagtattggcaaagtatttgacgaaggatttttctagatcgccacattgattcattgtacttttacaatataaagtagcattgtgatactcatctgtgagagtttatgtgattcatgatgtggcttattggtttgaattcaaatcttaggattaaatttaagattcaaaatcaaataaaatgatctcttacaaaaggttaattaggaatataattgttttattctctagtcagaaggctataatccttttaccactatatgtatttccagagaaatatgattacctttgaaactactgctcaagtgttgtgtatatatgcatcaatatcctttttgcctttagatgaactgttttgcaactcaattttgaatttcagcttctttattggtaaatttgtgacacaaaatatcaagtcaaagctgaagttttccaattctagtttgttgctggccaggtgtctttgtttcatcattc

SEQ ID NO: 49919 - DNA, 721 bp, Ricinus communis
  Intron number 2 from transcript 29706.m001290 (locus 29706 .t000020) derived from phytozome v7.0 (chr-ID 29706; pos 1 67077 to 167797 reverse strand)
ctcattatcagacttcacaacctacttgggaacaggtgctttttcccttcttcttttctcttttttcttctcgttaatttcaaattcaaaaaccaacaattctttgctcggtaatactacgcagccttaataatattttatgtgtatgatattaatttgttgaaaaacaataaaaataaaggaaaataaagtactgttcgaaaaataaataaatagagttacttaagggtcttctcgactatatgtctctagctctttgcttcttatatatatatatatatatatatatatatatatatatatatatatatatatatatatattattcttttcaaatccaataatgatgactctcattttactattccaactacatatatatgtataaattaatatatgacgttgcatatatgaaggacatcacatcatatgaatatatacgttgacacaacatgctgtagtggatgcagatggtccctcattgctgggaggttgccagggcgaacagacaatgaaataaagaattattggaacaccattattggcaagaaattgcaaaaccaagaaaatacctcttcaactcatactcaatcgaaccaatctcatcaaaacgtaccaaaccctactatcaaaaactccatatcacaatatgctaatgatggtgatgcaaaattgtcccctaccaaccaagtggtggttcctagaaagccaagaaagtgcg

SEQ ID NO: 49920 - DNA, 665 bp, Ricinus communis
  Intron number 1 from transcript 29761.m000416 (locus 29761 .t000010) derived from phytozome v7.0 (chr-ID 29761; pos 7 4703 to 75367 reverse strand)
caggaggcggaggggttagtgcacttctgatgaacttcaattgattcatacttttttttataaatggatttgattttgatttgaaatataaagggccagctttattcaatattgcttcgtatactttgctgtttcttttgaatatattatggcaaattaagttgaaagttactgatctttgtgctcatgtttgagaccctgaaacaatgagggaaatagggaaatggaatcttgattgctttattcggaagacttgttttaccatttgttcttcagtttattttctgattgtgtatggttttccagatccaaatgttttttaggtgtttacctattgaagccgtttgacttgattataagatatttaaatagaccagatctcctacctgcaaatatctgagtttttttcttatttatttgtattgcctttatgctttgcttggtttttagtgtcttcatttttcctgttatcttttaatgctgcatttatatccatcgtgatgattccatgtagaaaagaatctatttcttgtactccctatattttgggtggaaattctgttttctttgatctattttgtcagtgcaattgtaaaatctggaacggagtggcctttttttctgaactcactttgaaattattttgcttgttattcagcccaaaa

SEQ ID NO: 49921 - DNA, 830 bp, Ricinus communis
  Intron number 1 from transcript 29681.m001301 (locus 29681 .t000006) derived from phytozome v7.0 (chr-ID 29681; pos 3 4777 to 35606)
ccggtgaaggttagtggttgatttccattgcctgttgtttaatttgaatatcattgttctcttgttatgttgctttgagttctatttaatctgcagtttttgttgatattcattagctataattgatcaaatgaaggatcagacaacattatttaagggctagttatgtgtagttgtgcaatgcgaaagcttcaattcctgaatctttttagttgttggatttgaaatggtcacaattttagtctttttcttttaaaaggaaattctcatggctatgataaccttaagtgagtttcacatgaattgagcacagaacaggattttccgctttggttaatatgagacatagttttagagttggcattcatattaaatttgcttaagatcattaacaaggtctgaattgtgtttgtaagatccatttgttaggataacttggtggcatccaatctaaacagatgaaaatgatggtacacatttacacatctttttcaggtgtttgtgctcttgttgttattaaaaaaaaaaaaaaaaaaaaactcatttatgatatatacatgatgctatcttttgatgcgcttctattcacggtagtatttagttcttgtgttctatgcaattcttgctcttgctccattagtgctgtcatcgccgaataccataattctggtgatcaccctagtctgtgttgcttgtagcaagttgctctacttgtaaggctcatgcggtttctttagcttgtttttaagttccatcttttttgttttttcttttcaatctttaatttgtgatacatgaattgaagctgataacaattccattgttacaga

SEQ ID NO: 49922 - DNA, 881 bp, Ricinus communis
  Intron number 4 from transcript 27970.m000076 (locus 27970 .t000001) derived from phytozome v7.0 (chr-ID 27970; pos 1 0812 to 11692 reverse strand)
tggttcctggcttaactagtgattctgctgctgctgtaagttgttctgtgctgaattcttatgttattatcttatgcatgtacagctcaattggacatttgagttaacttggtttgttgcatgaagaaaaggtttcagcagccgatacaaatttcttttgtttgactgacccactcaaaatcatttgaactttgaaatgttttgttttgtttcatgtaatacttatgcctaagttggacagggcagacaatcatttaaatagaagtctagcctaatttacactttttatattgagttagtccagaaagagacatgcttgatttggtaaagtatcttacttcctgggactagctttgttttctcattcatcttactgcttcaggtttctcacgtcctcttggtaagagttttaaattgattagtgcgactgcccaaagaaagggctacaagaaatagaaatagtaaagaccttttatatatccatacgaaaatttctttctattatgtttgatcatcaaagttttcttttcaatgataataaaacgaggggacattgctttgtgggatcttggcagtaaatattgataatttcatattaatgtggattattttattacattgaagttggtagcctgcatgttattaatcatatatttaagtattgttaacttgaaatcttaatttattacttctcattttgcctggtcagatttatagttaaattgtcattcatatctctttcccttataccattcaacaaagactattttttggagttactttcatttcttgtgctattcatgtaatctttctatcttcttcctttaaatgtctaatagatgtctaccgtgtaacagtatataaagcatcttgctttcact

SEQ ID NO: 49923 - DNA, 846 bp, Ricinus communis
  Intron number 2 from transcript 27446.m000479 (locus 27446 .t000009) derived from phytozome v7.0 (chr-ID 27446; pos 5 7961 to 58806 reverse strand)
gaagctgctaatcaagccaaggtacctttttttttttttttttttttttttgtaatcgctaccgtatgatgttgaaatcaattaattcttttgatttcaattaatgttgttcttgatatgtattttgtttcttgacactaagaaattcttgaaaaaattggaagaattgttggggttttaatttatgatatcatacatacattatgagacaagtattagtctaccagctttaattgcaatttaatatattattgctgtttgctcaggtgtctttgatttcttgatatttttatttatatacaagtaatttttaaagaaatcaaatgaattatagggtattattagctcataattaatgttgtttttgatatattctagctgtttctttaagtttgcatttaatttcttgaagaaaaaaaagaaggaattgtttaaaatctgaattcttagtgtcaatctattagcatgttatcttgatacatgacgcttttttatgggtttttggtgttctatcttacaaaattttatctttactagtacttgaaatttaatgttgcaaatgattcttgcaattaaaagcagatttctctttcaacaattactcaaatctttcctaataatgacgatatataagtatttctgtattgtcagaaaagaaaatgataataatacacattagtgtaatattatttagacaatcaacctgtaccattcttttgatgaaattatgtttctaattaacagcttatcaggtttgtatatgcttgtgactcccttccttgccattattttgctgactggcgactttgatataataacattgtcaataaatactattgtaggttg

SEQ ID NO: 49924 - DNA, 208 bp, Ricinus communis
  Intron number 2 from transcript 28192.m000254 (locus 28192 .t000012) derived from phytozome v7.0 (chr-ID 28192; pos 1 03342 to 103549)
gcgtgattacaaacgtaagcacttttctcttttgaggttttgaggatgtcttccagttactccgttatagttatttaatatatagttgtatccttgatgcgattttattcttttgtttgtgtttttttttcttttggatcaatatttgcttgttaattattgaatactttcttatgacttttaatggttgaattgaatctataaggta

SEQ ID NO: 49925 - DNA, 660 bp, Ricinus communis
  Intron number 2 from transcript 28635.m000022 (locus 28635 .t000001) derived from phytozome v7.0 (chr-ID 28635; pos 2 793 to 3452)
gtgattacactttgatatttgctacagttaaagtaagtaaaatttcttaaagagtgttcaagtaaagtaataaaaaattatgaagaaaaattaaattaaattgtatttctaattcaatattttctactgttttttaatgacacttttaaaaaataaaagtcaaatatctcaatttagtacctctcgaatttaaagaactctctctctctagtctctaaaatatccactaaattaaatggccacattatttaaaaagaaaaaaactaacttttctacttattatatgtaggaatagagccataaccttatattgactttataatatcacttaagcgaataaattaattaatccttaaaatttaaaataatttcttaaaaatatttataataagagcaacttgatcaaatgacaatttttattttaaagaatattatttatatataataaaaaatattttaataaatttaaatatacaaatataaatcctatttagaaaagttttactatattatactaaataaatatagtaaatattgcagggaattatataaggaaattaatatttttttttcagtatattaatatcatagcaaaggcaattatattattgttcaaaaaattaaatatgttaatattatttgtgtagggtgcgggtcacg

SEQ ID NO: 49926 - DNA, 889 bp, Ricinus communis
  Intron number 1 from transcript 29597.m000280 (locus 29597 .t000002) derived from phytozome v7.0 (chr-ID 29597; pos 1 9179 to 20067)
ggacttgcttaatcttagagatcaagagaacgcaggtagaattgtattttttaaaacaagatggagtcgtgttgggttatatttactatgtttattttatatattttatgctaaaaagatatttaatttaattttttaaatatatttatttaacattttaatcattattaaatataactaaaaaaataagatatagatttaaataaatatttaatatatatctttattatttgtttatttatattttgtaaataaaaaatatttctgtatatacacatatatatttctaatagttcgaaacaaattattaaaccattttcgtcccatcactagtaagtcgtatcacagatttactaataaaatatgaaataaattattatttctatatttcagattggttatttcaaaaaatatattttatgatggattgtacttttatttgtaatttttgtgcttccaattcaaattatatatatttagaaaataagctgataaataagattaagaaaataactttttgtttataatttaatttttttgtcatattatattatttaaaaaattgaataacaaaaactaaaattccgagctatagtattatttaattttatgcgagcattgaacgttagaatgtaaatctcccactcatttttcattttgtttttttcgttttcaaatgggccaactctaaaccctaaacctctcttatcactcttgtcactctcgcgttctcatttctttctttgtttttttttttttcttttgaatttcccttctcaagaaacaaaacgtaatgttctctccgggaacaaagagaagaacaaatctaagctctagaaaagagcgaaatctagggcaaaaagcgcctgattcaccgatcacacctttg

SEQ ID NO: 49927 - DNA, 754 bp, Ricinus communis
  Intron number 1 from transcript 27538.m000329 (locus 27538 .t000016) derived from phytozome v7.0 (chr-ID 27538; pos 1 62104 to 162857 reverse strand)
tttggaagctcactgctctgtccgcttcttctcctgtgagtctccaattcttagctttcatttcttgattttcagctttgcttaatgtttatagcagtctatttttgttaattgctgctgttttgtggctcatgagctcgttcatgtctcaattctgatttcaatttttaatgcatgtttgaactctagagctgcttggatttattttctttattaattaatgtgctttctagtagcagagtagctgcctggaaatgcacatgttaattcccctgcattttaccgtattgattttagctgtttaattgtaattgaataggatcttaagggcattttaccatattttttgctttgcaattgataagtgaagtgagcattacataggcatgaatgttattttaagtgttacatttaccgaaggcatgacgtggcatacagtttagcttcagtctttgcttctattatgtaggttccaattttgaattttaagcagcatttagcagattttactttatgaatcaatttagttttagtcactcggtttcttggatttttcttttcagaactaaacatttttagatttaaataaagttctttaaaattaaaaattcttggaatgagatattaataaaccagctaaagttcattgactattcgcttttgtttacttgctctcttgttaatgtatctgtcttaaatttgccatttattttttgtaggtggagtcggtgctcgacaaggaaaatttcacatt

SEQ ID NO: 49928 - DNA, 824 bp, Ricinus communis
  Intron number 1 from transcript 27985.m000872 (locus 27985 .t000035) derived from phytozome v7.0 (chr-ID 27985; pos 2 55615 to 256438)
gaggttagtttggttttagttttatcctttacctttctttcttttttatatttcgtttttgtgtaatttcaaattttggtgttgtttgctgtcttgtcttggtaacggggttcttctattttgtttcctttcactcactttttagctcaagatgttttatttttcttttttgactgtacttgttgttggtctcttgtccttactccctcccatttttttttttctttctctatatttgagttagattttttttttcttccttggttttcctgcttttctaaatacatgatgtgccaaatcttttaattctgttatgtgcaaggtttatttgtatttccagattctataatttcgatacttctgaattaatttctggtcttagctttaaagagactaactgcatatttggataatactgctattcaactgctgtgtttgatttctgatgttcattccaaaaccaactttcacaacagtacatcacaatactgtttgtaattttcaaaaatttgttcaaattagccatgaagcagctttattcaaagcaaaggtaatagctttattctgcttgtgttggcctaagattgatgtttaactaaatattagaaaataataagctacggtgttgaaaggaatgcattcgtacataaattcaatccaaaattgtaaaagaatgtacaaaattataatttttgctgcgaagtccaaaagtcttgaactttcacggataacctttttcttctgtaactctaaatatggaaattattgacagttggatcccatgtttaggtcctggttgttcctccattggtggaggtgccttc

SEQ ID NO: 49929 - DNA, 1043 bp, Ricinus communis
  Intron number 1 from transcript 29634.m002082 (locus 29634 .t000028) derived from phytozome v7.0 (chr-ID 29634; pos 1 88919 to 189961 reverse strand)
gcagccgctgctcgcgattatcagaaggtaattgctttttttaaaaattgcgagatccgtttatttcgtgagaaatttgtcgccatgttgctagaagagaaggcatatattccatcttagaattttgtgtggttgtcttgatagatttttttctgtatgctactcattggataaaactttggctatatgtgttcttgcaacaatttatataatgaatcatgattaaatgaagtagtggtctgatgtggtatttggttcaaatcctacaaagaattcatttcatttataaatgaatttctaatagaattcatttgtaaatgaattctttggtttcatgtgctatgtaatagataacaggaagaaagaaataggagagatgaattaagaagacaagaaatagaggtgagagaggaagaatgtatttgaatcaacggcatttttgtcttgattaaaagactttataaatctagaatttatttggaaattctatcaaatttgatataacttgatttagtcataaccaactccaaggatttactgagatagaatttcaaatgaattttcatttaccaaacatataaattatggatttacgaattaattccataagaacttatgaaattcatttataccaagcacgactgagatggctggtacttttacgtgtgaaaattgggacggttgcgacttccagtctccatgtccaccatctaccaattttggcatgagtttatcaccttaatatgagacatatttctggatgattactaccattgtgtattctatgtattgggactccagtgaaccctaaaatgaaaacgcagaagtctaaattgtttttgttttttcctgagtttccttctctgtttgttttagaaactttatgtctgtttagaacttggaatttgtatgtatagactatagacacaaataaatatatagaactaatttgttttaagttgcattgtgtattatggtctattatgagtctgcatgttgattttgtaggaattgcttgctcaagagaagacaccagcatcaag

SEQ ID NO: 49930 - DNA, 523 bp, Ricinus communis
  Intron number 3 from transcript 29596.m000701 (locus 29596 .t000015) derived from phytozome v7.0 (chr-ID 29596; pos 1 17644 to 118166)
tgtatgcccttttcactcacttcttttcacattatgctcaaaatttaatgcttaatatagttcagtcagccaaagttattgataagttgattttttcatctttctagtgacaagcaattattaccacagaatatatctcatcactagctaaaaagttcagatgcatgtgtttatttttcattggccaaagaagagattaggatcaattaaatagaagttcatcattgttcagcaactttctttctttcataacattgacatgtgatcctttttagaagattgcacttttatatatctttagacttcactatagttgtgagaagttggagtacttcaaattttttctttataatgcttgtgctgttgcctgaaaaaggaactagtttactggaatagagaatttagaaagcatttggttgtaataaatttcctaccatttgagctattgcttttactgatgtgtgaatgaacaactggttgctatgcaggattagcggaacaaattttagggtaattgtggaaa

SEQ ID NO: 49931 - DNA, 858 bp, Ricinus communis
  Intron number 1 from transcript 29668.m000328 (locus 29668 .t000017) derived from phytozome v7.0 (chr-ID 29668; pos 2 47486 to 248343)
tctccttctggtaaccctctctcttgttattattgtatttgctaaagatgcttactttatgttgtctgattttcatggtgtttgagttgtataggttaattggataggtacttcgttcttttttatgggattttgtttttgattattgggcattcgttattgtttgttttcactgaatatctgtaactggaaagcctggttattttatgtttctggctatgctgtttaataatatatatatatatatatatatatatatatatatatatatatatatatatatatatatatatataattattattcttctttcctgatgaaggtttgttttctccataagaagacgagatttccttttaatctatgcttctatgagtgcttttgttttgcttacttaatggtctcaatcgtatggtgagttctgttttcttctatgttatttgactacagggtagttgttactttcattgcctgaatgatagagaaatgagtttagacaggactcaactaggtagaaggatcattcggctgaacagttaaatatggttgttaactttcttttgattattgagttaaagtttagttgatactatgctgttgcgccttttgtgcatgcttatttaatgattactgttgtttttgaaagtcagtagtttgattgacagtctatttgttatctgtagtcatcttatattctgctgatctctctgtttgtgcaaataatgtgatatctgatttctcatatttattagtaattatatgtctgtataaacttgctgtggcatttgactaccagacatattttgctaaagctgtctccttgtgattcgaaatttggcaggtgtgcagaaggaaaga

SEQ ID NO: 49932 - DNA, 1032 bp, Ricinus communis
  Intron number 1 from transcript 29792.m000614 (locus 29792 .t000022) derived from phytozome v7.0 (chr-ID 29792; pos 1 44916 to 145947 reverse strand)
caagttttcctcaatctcaggtaggtcataatgtacttatatatttttattttgtttctttcttaaaattttattttaatgtgaaatgtaattaaggtattaattttaataaaaagtgagaagaattttgaattccacttgctttgattcaattgccggtgctttcacaaaattcaattgcatttccatgttatctaaatttgattacagttattaatgacggaaaagatggacttggaggttgagtggcttaattatgtgatttgttgctgatatccacatctaatgtgctgagaagtataggaaatagaaaaggacatgaatttataggcgtcagtcacccaaggtgactaattttaatcattttagtaatggtcggattctagcccattaagatctaatttttattaatggatattacactctacccattttgttgcactttcttcagaatctaacagtacctgctgtttttaaacttttcctgttactgaaaacagttagatagtggtgcatataattatgtattgagaacagttactatgatgagtttaaatgggcctagctttgaaggaagggatttttgttgaaagtgtggtggttatttgattgttgttcctactattctatgtatgatgtctttacatgctattgagtgggtggtacctaaattttgacttccaaaaagtgatgcaattcttgggtatttgtctaatatatagatataagcgagtaaaccttgtaatgttgtatctatgtgtaagtagttggtcatggcattgaatttggaatgcatattgataaatctgtttagcagtgatagctttgggtgtttgatttcaagctccatttgcctgagatgtcctgagtgcaattttgggtcactattaatctcaagatagttaacatttattctcacctattttcattttgatatgccagatggattcttttagcactactcttttggaagtctgtcactaatttgttgatgaagaaaatattcttagcttgcaggtggacaattcacct

SEQ ID NO: 49933 - DNA, 371 bp, Ricinus communis
  Intron number 1 from transcript 29648.m002014 (locus 29648 .t000101) derived from phytozome v7.0 (chr-ID 29648; pos 7 28136 to 728506 reverse strand)
tgacgtggctgctcatcgcgatattgttgataccagtaatcatcttctctctccctctctcttagggtttacgcttataatgttatttaaattatctacttagttcagtttcatgaaaggaggaattagaagaattcaaaaaagaaaaaaagaaataggaattgatgatgtgtattctttgtctcttgagataccatatgagaataataatttgtgatttagagtgtgtgaatttgatgttattataatgtagcagttccaattcaaagctgcaagttaagctaaatggagttcttttctttctgtatctttattaacgtttctctctctctctctctctctcttggattgaatagttgataggctgacca

SEQ ID NO: 49934 - DNA, 736 bp, Ricinus communis
  Intron number 2 from transcript 29720.m000132 (locus 29720 .t000002) derived from phytozome v7.0 (chr-ID 29720; pos 1 8404 to 19139 reverse strand)
tgacccctcttgttcttgttaatttttcagttaatgtaatttcaccttttaattttagaatctggcttcgctccaggagtaggtaagtcttacctaatttttattcatgtgtactggttagccttggacgttgatgccatgttgttttagcttacaaggtgtttgaatttgatggctgttaaatttgtaggctatagagcatggaatatcaagttcgattcttgacaaagtacacgaaattggcaaacaattctttgcacttccaacagaagagaaacaaaagtatggtcgagaagcaaatgatattgaaggctatggcaatgacccaaatgtttctcgcaaaatcatatttgatcaatctgaacgcattctacttaaagcagccccagaagccgaacgaaggcttgaacgttggcctggcaaccctagtgattttaggtaatttttgtttccatcatatactggtaatactttttgttaatttctgtcattcatttgataaaaaattgcttcaaaataaaaaatgaaaaatagaaaaatattgtcgtttgatattaattgttgcctttgttttgaaaaccattgcttatgtctcaaaagaagtgttgcctgcacccataggttaagtccggcagtaggtgtatatttcaatttgagtaagttgtatatagatttgtactgatcaacaagctgttggaaatcttgcagagaagtagtgaaggaatactcggccata

SEQ ID NO: 49935 - DNA, 805 bp, Ricinus communis
  Intron number 1 from transcript 29657.m000487 (locus 29657 .t000028) derived from phytozome v7.0 (chr-ID 29657; pos 2 16094 to 216898 reverse strand)
gttctggtagcattgtggtgtatacaaatggaacctatttaccgtccttcaatgcataaagctatagagatgctggaaggagatgttgaaaacctacaaatgcctccaaaaccttctctctcgataaacgatagggcaaaagagaaagtcaaaattgagataaatccacaaggatgatatatataaatggtgtgcatgtcttttaagtaactgtttttaattgcttaagcttatagattcttgttatatatttctttgactagtttcatttgaactcttccaagtttgtatcagatgaaatattattggtgttcaatattatgactataacttaatatctgtgtaatatgttgctcttctatattttagtctcatctcgtgtaacattttttgagagtaccactgtagcactaaatcaataagacttactattgcagataattaattaatttatgatagtatcattttattataattcagctatgagtagattacataaagtactcataaaaaatatcaaatattttatcaatttagatccttttctttttttaagaaaaaaataaatgtaagatatgcacaaaaaaaaacttcctgcaaccaattgaatgttggcagaacaatggacatggaaatagatccaacataaacagaagggaaatagatccaacataaacagaaggagattatgtatgattttcacatataataagttatactgggaaactaaatgagtgttcttaatatggaaatttgtttgaacggtgaaggatatttgattttagacctgttaaagcaagtagta

SEQ ID NO: 49936 - DNA, 916 bp, Ricinus communis
  Intron number 2 from transcript 27553.m000328 (locus 27553 .t000014) derived from phytozome v7.0 (chr-ID 27553; pos 1 14800 to 115715)
aattgttcaaccgctggaccttcgaggacgttcaggttaatatttgtattttttttttgaagtatatttttgtaagcaattgtatatctagatctgtgttattacggtgtcgttcttatattgtatgttttctgtgtgttttgttataataaataacttggatgtgatcatgagaacgtaaatgatcagttaagttgtacttgggaaatcttgctgatacaattgaattggcagtaaaaccgtaattttggttaatgaaaatgtgaataaattattctattttgttttattagcattcttgtaaaagctcaataagttagtttagtttagattgacataattggttcattgttgaggttaagcaacttatatagacgtggtacaaaaattctttgtcatgtgcagggtctcacttttgcattattttgtcattggtactcaaaataactagtcacacacaaagaggaatgtgcatatgtttgtttctcttggtgttctcttctgtttatataatcactgtgcatgagttatgtaaatgattggtaatattgtgccttgagcaattacccaattggttgacctattgtaatttttagcacttcttataggctcttataagatctgcttcatgatttggagatgtaatatttatattttttgatttgaaagggattggttttgcaataatcatttccattggtttgctttcagtcaatagataagagttttacttgatcaatctaccatgaagaattttttaccttttatttgattagactacagaaattaaatttgctgtatttaatgccattttctttgtaattgatgtgttaagagtcagtctaaagattacttcttttatgatgttaaccatctgtatgattatgcattgactgttttgttttgaatcaggtga

SEQ ID NO: 49937 - DNA, 543 bp, Ricinus communis
  Intron number 3 from transcript 29646.m001073 (locus 29646 .t000021) derived from phytozome v7.0 (chr-ID 29646; pos 1 42713 to 143255 reverse strand)
aatatcttcttcagtttcaccaattcatagtccaggtatactgttgactcaaagtttgaaagaaagtttgcatttttcttgttggaattttttgtgggtttatattttttttgcctttacaaacaagaaatcgtctttgttttgtctctctttagttggatcttggagtctagtagtttttgtctggtattgatctttgtatttattaagataaatagcacagtatattattttgctttagtgctaaaggaagcaagaaatataaattttctttaagacttgtgagattcagtttacgcaatctttgatatgataaagaaaacaagtcattcaaaagctaaaagagggggaaagagaagtgggtttagtttatggaaagggatccactattggctcttgctttttcatctaaagttcttcataaagaaaagcctgactttccatgactgaatgtttaagtaacccttttatgttttcttcttttctcttgtttttttcgcatatgcagagttgccaggtaatcccactccaattgtagaagaa

SEQ ID NO: 49938 - DNA, 924 bp, Ricinus communis
  Intron number 1 from transcript 29801.m003219 (locus 29801 .t000164) derived from phytozome v7.0 (chr-ID 29801; pos 8 62934 to 863857)
aaaatctttttgaggtttcttagtttagtcttactttagtattttaatcatttccagattcttgtgagactattttgcagcttttggattacctaacttacagatttcttaatattaatcatatatgctctctgcctttcagtcagtttgatgtttctcacgttgccaaggtgggctgggcttgcatcaacccaacccattcagttcttccatgcttttttctctttcttataccatgtattgttttacttttacaactagaaaaatggagcttagcctgactttaagcttctctctgtctgtgtttgtagacatattcaagtttcatatatatatatatttctgtgaaatttgttaggtgtggaggccatgtcctcccgttgttatcatagccaaattaatgatattgctaaattaactttcatttcatgccttttgagtttcaaatttcacatctgaaataggaaacgaatatgatagttgtatgcttcaaagtttaaaataataaggtgtagctttcaattgttggatttttgtttagatgggatgttaaaagtctaaaattagagggtatcacatatgcatgcatacttggttagcagaatcatgttacagatatattttcttttaaagtgttgttggtgataattaacttaattccccaatgaagtttcccagttgctgttaaaaccttttcctgaagattgtgacttcagttcgtcttcttgttcaaatgatttaaccatcattttatttatgtattttatttatgtgcttgatgtccgttagtctctaaaagtttgtgtacgttaacattcttaatacgtattcagtcaattttcttaccggtcttttcaaaaaaaagatctcatgtttgattgttttgtaggtggaaaagatccctcaaacatttgaatctgttca

SEQ ID NO: 49939 - DNA, 593 bp, Ricinus communis
  Intron number 1 from transcript 29794.m003443 (locus 29794 .t000142) derived from phytozome v7.0 (chr-ID 29794; pos 9 19840 to 920432)
tattttcttgatatccgctgcttatctttgtgcaggtaaatgacttctcttttcttctgtttagtttttggttgaaatcattgttgttttttggttgcccatagagtgtgtatgaaaattctaaaatatgcaggaatgcgattcaataaattgttaccaatttcaattattttaactttaaaaacaaaggcattttcaagtaaataaaatcacgccataaatgatataatgtgattgtgcaaaaactcagtagaaatgaattcttgcaatttgatttacgttaaacaaggtcaaaatgttagaaagtaaatggtaaaatttcaaggtgttgtccttgataatgtaatatgaaaatgtggttttggaacatgaagaaatgtatgttttagttctcaatcttcaataggtcattgagcgaaatggattataaaattgagtcatggggaattggttttgggcgttcggggttgaagaattgagattctggattggcatgtaattggggtattgatgttgttgattattcggtatctcatggctttcttatgcatgatacagggctaaccgttgcttattctgctccagcaagacat

SEQ ID NO: 49940 - DNA, 592 bp, Ricinus communis
  Intron number 3 from transcript 28179.m000465 (locus 28179 .t000010) derived from phytozome v7.0 (chr-ID 28179; pos 9 5908 to 96499)
tttttttgtacaagcagtgaacctttgcatattatgtatgtttttcttttgcactttttaactgtttatttttgtcattgtatttcaattttgaagattgctggtcttatcctataaatgtttgcacacagaagtaaatgcatgcctactcggacttcaagaccatttaactaaaggtaactattttatacaatgacgttgagatcttagcatatgtgagcctgcaactctttcttttctttcctttttttcttcgaattggttcccatgcatttgaagtttttaattattgaagttctatgaacttttttgtggacctctctagttggccaattgagaagaagtgagtgcaatgttgcaatatatttccttgccacgtttggttcgcctctttcaattatttttactttcttaatcagaagacaatttacattccagtaattctttttctgatttttcaagtggtactaaatacattgatggatgttgcagcaaaaagcatattaaatgaactggaaaatcttctcgaggatttagctagtgcaattaactcttctaaagaaagtttctcacctttgaaggataaagatct

SEQ ID NO: 49941 - DNA, 519 bp, Ricinus communis
  Intron number 1 from transcript 29461.m000131 (locus 29461 .t000002) derived from phytozome v7.0 (chr-ID 29461; pos 3 6606 to 37124 reverse strand)
gtttggagcaagcggagttttcctttcactcggtatgagacactgtacgctacatagaagaacacaagatttgtgactgagtttcacatgtcatatgacatctgtaccaacagacttcttcggacaccagtaaggtaagtaggtactccagctgatctgactcatctgatgcactggttgaggcttgatgacacacacatgttcctatgtatccattctctttctaagagtacgtagtaccgtactggggtgtcggtcatataaaaatttgtctttgtaaggtttttgtaatcgcctatctagacctctaagagaatggaagagcttttggtttgccatcattgaagccttaaaatatcgctatattctctatttctttcttttgagttttttgactgtctgaacggggataatattgactgtagctccattttcaatctataccttttattaaggatggttttccaagtttgcttccatatagagtggtctgaggtgcgttaccttaggggtgggtct

SEQ ID NO: 49942 - DNA, 767 bp, Ricinus communis
  Intron number 1 from transcript 29716.m000308 (locus 29716 .t000011) derived from phytozome v7.0 (chr-ID 29716; pos 1 16270 to 117036)
acgctctcagattttagctcttgtttcttcttgctgtgagttcttttttaatgatattgatcgattgctttcttactcgtgtatagatttattttcttttagttttaggctctgtttgtttcgttgaaaacattttcctgtatttggtccatcaaataaattatcggcgatcatatccggtcaccgcaaaaaatctcaaattggtcttatgactgttgtgtttggggtcttttttttttttctaaagcaaggattaagtggaaatgaattcttttcgacaagttttgacgcttgaaatgtatttacctgtgtttagcttatttataaatttatgtaggtattctttttttctgtactttgtaaagcattaaattggtaaagtataggttcttttcaagttagtaagttaatttgggagaacaaaaaaatcatgtatggtgaggaaatatatcttaactaatctcaatgaaaatcttttccccgttgtttgaagaaataaaaatgttgccttaagttatggattgagtaattatgcaattgtgcatcttttggtgcctctatgttggattgtttgtttagaacatgggcaagcagtggtgggcaagcgagaatgtgaaagagtataatttccaccaaaaacacttgaaaactttagtccggccccatttaaattattcttttacttctctaggaactgtgttttagtttaaattatcatgtaaactgctttttttttttttttttttttgtatcttcatttgcaggcc

SEQ ID NO: 49943 - DNA, 951 bp, Ricinus communis
  Intron number 1 from transcript 27394.m000361 (locus 27394 .t000022) derived from phytozome v7.0 (chr-ID 27394; pos 1 67314 to 168264 reverse strand)
ttatttccttgatcagctgccacttttctgttcaggtttggttcttttctttcacttttgttttttttttttttttgcatgttttgtttgatgtttgtgagtgaataaaacaagttaatgaatccttgtataggttgctcattaattaactcgaagtttcatgctttggctagttttatctctgcctctgattcattctttttttatttggtgatgtgtgtagggcaattttggttctactgtaaggattaagcattttttagggctttaagaggtgggatttcgatctatagcttctttagcaactgggttttgaaacatatactggtttgatgggtaggtattaaggacctggactaatggttgcttagctcatatttggaagagatagtaaaattcagtatcaaagcatcaatctttcgccaattttgtgaacttggtttgcaagacgaacctttgagtttgtggtgatgaggaagaattgagattttctgttcaaagcaatttgatctttgaacttcaagtttccgtggaaatttgagtttcagtatcctggctctctgttctgtcaggtgaactgggttttaaacaattcactcaagtatcatggtgattgtgcaaaattaacttatctgaattcagcactttgaaaccgtcaactggaatactggtttttattgagcttcaatcaatggttgcctgtcataatagataggctgcactggatgtgaattatattggttgcggtttttacggtttatgacattgcagtcctgcgtttccagaacttctatatagcttagttgtggcttgtgggatatagagatgttattatttagtttaaatgctcaaatgcggaaatggagcataatattttgttgagaatggctatttctgcatttactctgttattgttggtgcaattttcacatatacttgcctctaggtttg

SEQ ID NO: 49944 - DNA, 716 bp, Ricinus communis
  Intron number 1 from transcript 29681.m001358 (locus 29681 .t000063) derived from phytozome v7.0 (chr-ID 29681; pos 3 15543 to 316258)
tctgggattttgctttttcatctcttcatttaaaggtatctgttcttttttcctcttcttcttactgtttattgcgacaaattttctttttctatttgttgggctgttgtgtagatgagttttacaagtgtttatgtttttgttaggttggttttcaaacgtaggtaagtaagggaatttgagttattggctggttaggttattttaatactatcagctgtgggaaactaattattagttttgagttttagtgttaattaaaaaacatcaggagcctgtaacagggtgtgttatttagacggtacagtcagttttgtttgtttgggacttgagcttgtaaccgatttctgtttcttccattttttttttctttttcattttcgttaaaagaaggtttcttaattttagttgtatcaaatatggttttctggttgcttctttaaaggcttaaaattcatctgcaaattgcgtgccttttgttttttaaaaaagaacaatttttatgcttgttttccttacaatttcctcaagttcaaatatccttgctttcatttctgttccattgttccttttcataagtttttgtctttctccatctttgcttgtattgaacaaaaccgtgtctattttatgttgatagtgtgtttttaaggcttcttttgttgttactttgttgaacagaaggagttccgcaagggttttgagaacagagtgct

SEQ ID NO: 49945 - DNA, 929 bp, Ricinus communis
  Intron number 2 from transcript 29680.m001699 (locus 29680 .t000042) derived from phytozome v7.0 (chr-ID 29680; pos 2 81816 to 282744)
gagaagaagttggtataaagctggtattgcaccaatcttgattttggttgaaattgcaagctgatactttcttcttttaattctttttaatgttctttaattattattatgatgattattattattattgttgttgttgttgttgttgttgttgttgttgttgttgttgttattattattatttgggtattcaaaccaaaacagatataagaaatttagggctagaaacttttggataaattttagtggagtggggctaagatttgtttttaaagattctggtggaaaagccatgagtcctgattaggagatcaatgggtgaggcagtatgcggttaggtggataacttaatacagcacttatatggagacagctaatgaacaccttttcttttaacagaagatcctcacctagtagatgtaggatagatagataatgtagttagaagtgttcatcaatttgaagcagcgtgctttttactgtgcttccttcatgcattcatttgcatgtcaatatattgataggtttaacctaggacctgctctcatagactgccttagccttgtgactatatcattttggagattgtggctattcccattcttatccgagtcattttgatataattgagcaaaaacttctccggataagggctagtgaggtagatgctttacttggcactggtaattgctatttcttaggagaaaaagtgaagtcatttttttcctgaagatgtatgccattaacccttgtatacttttaagtgtcatggtgctaaaacagaaatacaacctattcagatacagctgctagtttattaacaatattattttggagcacatctaatgcacttgagctctcaacatatatttatttttcttcttaatttttaaggaacctgcaaggaccaagcatccccagcttcatta

SEQ ID NO: 49946 - DNA, 682 bp, Ricinus communis
  Intron number 1 from transcript 29729.m002375 (locus 29729 .t000108) derived from phytozome v7.0 (chr-ID 29729; pos 6 03536 to 604217 reverse strand)
catcagctcttagcaagcatctttctttacattctgtaagcagtcttcgcgtgttattattcttcaattatgattcttgattgctgattactatactatgtctttctattaaatgcgagtccttttgcttccgaaagtaatgtttctgagcttattaagtaataaatttatcttcagtgtcaccacattgtttgggatcctttgtgggaagagcagcagttttagtttaggtgtggtgctagtatcaataaatttgataactttcttgacattcctgttcatgttcatcctgaatttcattctatttctttcagtttggtcagtttgtccacgtaattgataaaatgatttgtccacctccttttcttgataatgctctgaaatgacggtatttgagttttgattgaaagcatgatttttcttttgaatcaagtaagagtcttgaatattatgtttttgctgcgtttcgtcaatttctatgttctttgattaaaaaatttcatccactattcatgaaggaaaggacatttgggcttattgatgcattccgaaatggatttcttggcaccaagttgtggaatttgagaattttgatatgacttaatgttagtgtgattagttgttttttcatgagtttgtggctgagttggatttgatttctgcagggaacttctttgagtga

SEQ ID NO: 49947 - DNA, 754 bp, Ricinus communis
  Intron number 1 from transcript 28726.m000069 (locus 28726 .t000003) derived from phytozome v7.0 (chr-ID 28726; pos 1 5182 to 15935)
agtttgttgagaaactgaaatccagtttggtatgtttcttttatccttttgctttattgatgtttttataaagatttctgttttttcttttactttttttaaaaagaaactttcgattgacgcttatttgcttgtaatttaaaacttaggaattgaagtgttttgaaattacttttcaattcaaactaaaaaggtatatgattatcaatatgcataagtgctgtttagcttggagtttttttttttttggttaaaggagatgaaaccttgttcacattttagctaaaaaatataaaggaatgaagggatttatttggtcttttacttagttatatgtatcgtcagaagaagcaaacaaataaaatatgtaattatgtatgcatgtttccgtgtttgtgaatagtcttctgttttcattacataaatcgctattttttctcagaaacataccagtctaatctattgcattttttttttttttatttggtatacttaaccatgccatctgaattggaaaagggtggaacttcgttcagatttcttccctagttattttgcgatggtgtttggtttggtgttgaaaagctagcttgtaaagttgaataatggtatcaattaaaattgttgatgctccttttctttttaaaaaatcggtattcatctttatgattacaaactgaaaacatcctattaataaaggatatatctatcttttgcagaaagcaatccgcgagcctcaagagtcaaaggttag

SEQ ID NO: 49948 - DNA, 724 bp, Ricinus communis
  Intron number 1 from transcript 29759.m000279 (locus 29759 .t000004) derived from phytozome v7.0 (chr-ID 29759; pos 9 6036 to 96759 reverse strand)
ctaccggaactggtttcttacagtaagatatacataaatatatatgtataaatgtttaaatttttgttccattttgtttctgcttattgattgtttcatattttaagataattataaaccagttcaatctgtctttttttcttttctgtttaaggaaaaatggttgttaattaatattcagtgtctcaacatattatgagtttaataagtgttagttcatttattgttgctttcatcagttgcaagactaggtagattaagattttctatgtccattaatttgctagagtaaaggaagttgggttattagtatatattgatagtgaatagaagcatcatatcatcttaattgaaaaattagtaatttgttattgacgttctacctttgaatttattgataagcaaatatcaaaaaagaaaaaaaaaaaagaattatattgtatgagataaattgctcaatcgactcgagattttcatttattgttaaaagctattcttggcgtcttacctaatagcttaaacttttacacaaaatggttctttaatataatatcaaagcgattgtaatcgaaagacctagagttggatcattgattgccttatatttgtgctggaacactattgtcaaggctttttaagtgttaaattgtattaaaacgctcctgagtcatggttttgatggattctcacaggctatttgactacattcaagggaagaatagtt

SEQ ID NO: 49949 - DNA, 504 bp, Ricinus communis
  Intron number 2 from transcript 29762.m000500 (locus 29762 .t000028) derived from phytozome v7.0 (chr-ID 29762; pos 2 06068 to 206571 reverse strand)
cacctggtatgctgctgtaagaaactaagagtttcctcaaccaatcaaaattggtggtttttgataactcctagtttagagtttctctcagtcctgcaagataacaaccgagaataaggagcgtcagcgaagagatcaatgtgcccacttcgaagatcaagtcagacagagaaaaaagaaatgagattagggttgaaatggaacttcttttctcgccgattgttatcttgcaggaccgagataaagaaaagtactttaaattaattagaagttaacactttaatttcattaaaaatatatttgtataaaaaaaggcaacttgtgaaagattctagtttacaaattatgatttatcatatcaacactcacgcctttcagttctggtacttttaaaagcaatggtagcattaatttggtgtcttcggaagagggtctcaaacttattatattatgttctctcctccacaattttggaaaatgtagcattcttttactgtgaggtgg

SEQ ID NO: 49950 - DNA, 923 bp, Ricinus communis
  Intron number 1 from transcript 29785.m000959 (locus 29785 .t000028) derived from phytozome v7.0 (chr-ID 29785; pos 3 05228 to 306150)
aattttccaaagatcatattaaagctattcttgtaagccaaataattctttgttctttttcactcttctatttatttattagaggaataatgcatcttacagaaatagagtgtcatattttcttaatgatttttatcataaaaggattaagaaataaatataaaaaagtacgacgtggtttaactgttttacaatttttaataatgtgtttttttctttcaaataaaaaagtatgtggttataaatcacaaaaacaaagtatctcgccgttaaaaaaaattatattcgtaagaatttagccatttttatttcgattagccatcattattagatattgctcgtatttgataacttttaattttattttttgatcagcaaattgcaatttaaaaaatttctaatatgatggaatcgatttgatagttaaatatcaacattccaagttgttaaattctaaattcaaacataaacaacgtaataattatagatgatcagagtaaaaatagttgaatccttacaaatcgagattttttaatagtaaaatacttttttatcacaatttgtaaccacatacctctttttatttaaaatttaaatgtatatattaaaaattattaaataataaaattacataatacttttttatacttatttcaaatattaactctcaccgttaataatcataaactaaaatttaaatgtctttgcactctcaactactaagaggcccattcttgcaatagaggacaagttgaagtaaagagctcctagtgtaatgtggttttattttaagaaaaagtgatgaaaaaaagtagaaaaatgtgttagttttagaaagttacatttctttagcttttaattgactatgttacaaaattctttattcagaatattttcttggctggagtggacactggagcaat

SEQ ID NO: 49951 - DNA, 357 bp, Ricinus communis
  Intron number 1 from transcript 29801.m003131 (locus 29801 .t000076) derived from phytozome v7.0 (chr-ID 29801; pos 4 55093 to 455449)
agaaaaggtgcagagctggagggctgccttaggaggttggtaatttatctggctggcattcaacgggcaccagattagtttctttcaatcagtgctttaagcagaattctgtgcattgttttggaaaaatctcgaagaagattgatagtcaagtacacttttgagttacatataaaaggtaaagaaggactagtatcttatctcctaaatttctaaggtccagcaggttggaaatgattctaaatttcaaagatttcgggtatatgggtcatcttaattaagaaaaattttctataaaatatttgttcttcatgtttatcaggcctgaagctgaagtcatcaaggaaataatagagg

SEQ ID NO: 49952 - DNA, 886 bp, Ricinus communis
  Intron number 2 from transcript 29745.m000363 (locus 29745 .t000010) derived from phytozome v7.0 (chr-ID 29745; pos 8 6121 to 87006)
agggagtgtgagcacttctgtgtttgtcaatcgtaagtctcttcttgattatacctgcttgaattgttatttactgcatttcctcctctttgatggtaatttagctgaacttatgtaaatattcttgtgtgtgaacttttattactgctattttttgtgctactctataatcctcaagtagtgtcattaaagattagtattttagagaggaagaaaagtagctcgtttgatgcatggatggactcatcggaatgtccatgactttcttttttcagattggttaatgatttcattgagatacataacttagtcttttcatagaagctttttttttttttttttttttctatttttctgcatttttcatggtttttggagtgcttaggaaaattagtcaatgaaatcgtttactggcaagggaaaaggtaagccactttttaggagaggaaaatgatggtgtgtttaaaatgagaagtcagttacatgacttcaccattttgtaacatgcatctatgatgtcacctgctgtttgttattcaggaccgaatacacagaatgaaactttcttgcatattcaggaggaaatgaaattttttgcaattatcctaccaattctatatctgaaacaataatacatattggcatctctccctttgtgtgaatagagatggatggaattaatacaattactatatatgtgtaagcttctcgatgttcagaaaagatttagattttcagaagttatatctttatttgttgtattgagtcatctctgctttcctttgatgtaatccacatcacatgcttgttgattcatttttttccttttccattttgtttatttcatatctccttaatgtggccaaatgtattattgtagctgcaa

SEQ ID NO: 49953 - DNA, 888 bp, Ricinus communis
  Intron number 1 from transcript 29804.m001495 (locus 29804 .t000026) derived from phytozome v7.0 (chr-ID 29804; pos 6 24140 to 625027 reverse strand)
gagctttggtctcttgatcctaaacgagccaaaaggtctgtctgttccttttttgtttttttctttttcaagtaaaatcttgagatggatactcctattcacagtaattttgggtttttcctggatcagatgatcaattaagaattctgttactcatctaattacccattagttgagtttcatgtcatggccagctctttgctttttgattttagattaatcaccttttctgctgattttggattttagctttcattccctattttcagattttcctaacctcttgcacttttagttgcggagattaacattatccaagcattttgagaagataattctacatagaaccaaaatgctattggagtttgtagattgaacttttaaagtaaagtttttgggttctaattctatgtccttctggtttcggctctcaaaagtcgaaccatgttttttgaaactaaaataagctctttccttaggaagtaaaagtttccttgggccttgagtagcgtctcgaattcacaaaagttttggttcagaatttaattttctagttctgacagatgcaaatgaatttcaaagttgggattccaagcagttccataatccttgaagtaacatgagaactttgaaatcgtttgtcaatttaaaagaaaaaactggtgatattaattcagatattcaatttgacaatggaagtcccctttttctaatttatgtatcaattttagagttggatgctggaaagtttacagaaattgaagtttttaaatgctcatgaactcttcctttaaccttatttttagttttgaactcttttcgcttaggctcaaaacttagttgctgcatgcagaatacttgcgaaccggcagtctgctgcccgctcta

SEQ ID NO: 49954 - DNA, 723 bp, Ricinus communis
  Intron number 2 from transcript 28629.m000557 (locus 28629 .t000012) derived from phytozome v7.0 (chr-ID 28629; pos 6 7793 to 68515 reverse strand)
tgctcggaccttggttcgcactactattgccagatgtatgtcctttctcttatctgctttttatccctattccttgtttattccttttgtctatgctaatattttgttttcaaattgcatgcaaatcaagagattgtcaattcaatggccttactgatataataccaaattagatgctcaattatacttacttgtcttaagctgtatctgacgctcaacaagttactgatgtgatcacagtgtggagaattggtgttgaaattcatctgttagtccaacttggaagcatatataatttatgattaatattgttcaaatgatgttcctgctcatgcaaatttgattgtctgtgtcatatgtatacttctctaaaagaaaatgttatggttaaagttgtaggaactaccaaaagataagctcaaattaattcttttgactctttcaatgtatgcatataataacattgtggctttttaccaagtacaacattttacagcaactaggaacatttaatgtgaattttagcgtaggaccataatctttttatgttagagctatagcactatcacttttcagtttaatgtgcattgttcttttctcaatatggataatcggttgcatttaatctttcaagtatttgaaaagaaatgagttgcataggatgttgaacaatgtttattattactagatcagaaaaattgccattttgatccaagatctttg

SEQ ID NO: 49955 - DNA, 391 bp, Ricinus communis
  Intron number 3 from transcript 29736.m002064 (locus 29736 .t000060) derived from phytozome v7.0 (chr-ID 29736; pos 4 59885 to 460275 reverse strand)
ctaaggtaaaagagtttgttctacttgtatttctttgctcgtatgttttcactcttcttagttcttctcaaacaattgcagtatgcttcaaatgcttcttcatagcttgattatctcctcttggatgtgttgattcttttgtgtttttgttgattttatttttcttctaccgcaattttgaagtcaattacttcttaaattcacttattttgaagaaaagtaactcttagattttaatggattagagcaaagtgaatgacatggtgtttaaagtgtatttttcaggtggcctgattcttcatttgcaattctttttctcttcttgctatctggtgtttttgtgcaaaatttgcaaattgtatttgatgtctattgtttttgcagctcttga

SEQ ID NO: 49956 - DNA, 507 bp, Ricinus communis
  Intron number 3 from transcript 28349.m000062 (locus 28349 .t000001) derived from phytozome v7.0 (chr-ID 28349; pos 9 079 to 9585 reverse strand)
ttgagacttgggattgtcgatattgaatataaaaggtaagcaagcatcttatctcatagtctttgattgctatgtttactattctatttattataatttgcttctctatattggaacacaaagaaaactttggattgcatcaatttctatggtcaaaatatatgtacacttgacttaattaattaataattaatgaggaaaagcaatctgatcacactttaatattcattctgtttcaaccacataaacaaagaaaaaaatcattgtgatgtgggccaacactgtgtataaagaaaaaagaaaaaaaaaaaagaagtcaccacattaaatgctataacggtcaagtctgtaatttattgtccataaaatcaaataaattatatgattgattgttcaggatatgaaaaccctataaaataattatgaaacctaaaaaaaaatgcgtaataatatcactagtacatttcatatttcatattcttctttggatgcttttgacagggtacc

SEQ ID NO: 49957 - DNA, 665 bp, Ricinus communis
  Intron number 1 from transcript 29661.m000907 (locus 29661 .t000009) derived from phytozome v7.0 (chr-ID 29661; pos 1 02668 to 103332 reverse strand)
gagacaatataaggtgagtcttggatccttttttttctttttctttctggtatctactgaattaaaatagttctatcttatccaccaataatataacttgtctaccctctagtcatttatctgacacgtttattttccatgtcttttccatggatgtttagttttgtaattcaaggacacacttccttcactggaaaaccagccctttcaatttcatctaaattggagcaagtttggctcctcaatggactgctttgagaattcttacactttctgagttcggtttattgctctgtgcttgattttatgaacgttttactatccgtaccctgtgcttccggaaatgcgaagggtctttagacagcttatcttagaaaactgggctcctcttgtaatgacttgtactattcaacgttctcttctttaatgtcgcctttaatagttaaacatgtcttttgctttttcattttcacttgggatttagtagttttaacttcaagataaaataaattcatttcgtatgaagataaaataattcaatgagtttcatttcactgtgttgaattcatttattaactggcttctctgctattaaatatttgaggttaactaaattttgtatcgagttggtaatctcagtgaagaacttctaaatgtgtgcaggt

SEQ ID NO: 49958 - DNA, 548 bp, Ricinus communis
  Intron number 1 from transcript 29588.m000869 (locus 29588 .t000024) derived from phytozome v7.0 (chr-ID 29588; pos 1 59403 to 159950)
gcttggacttggagtttatcattctggtgttcaaggttagctttacttattttgcttacagttcttgattttttcttggattttcttcttcttatatgatgcatttcttgataattagatctaagattttgttctttagatttgtttgaatctttgaggatttagtagtgagtttgtttttgttattttcttgaatagtgatttctacctttaggacaattacttgtttggttattgggaatgtgaaagaaaagataatgtgttaaaaaattttgctgtaagcttttagcagaattagattcctctcttctcttttagaaatgcaaagtttctttattcacctctgcacagttttctctgtaactcggtgattgggtcttattttcaattccagagtctttcgagaattattgtaaagattaatcaatactactgtctatccattttcctttctgggtgttttgttttatatttctgggttagacataagcatgttcaatctgtattctgcaatataaaattatttttgggtcatgaaattgcagttc

SEQ ID NO: 49959 - DNA, 942 bp, Ricinus communis
  Intron number 1 from transcript 28448.m000365 (locus 28448 .t000014) derived from phytozome v7.0 (chr-ID 28448; pos 2 35809 to 236750 reverse strand)
tttggcggtctctctctctctctctctatatatatatatatatatataaatgcaataaaattttggacgtgtccgtgctggatttcttcctcctgcctgctggatattcattttagaacttacaattcacagtaaaccattgtttcaaagtttagatgtcattctctgatgttcattatttaaatttggctaaatttatcaaagagtgttggataagattgtctgtttggcctgttcatgttctcctgctttgggggctttaaaaagattgtcctgatcctggttgatattgtttgagttgttaattgtagtttcatttcttagaggtttgtatacatgtcttacttagcattaaagaatgctttatcctccgtgttatgctcattgtattcttacatttccttgtatcaagaatattcttgaatttagattgatcgaacttactccctctctttacttactagtttatttttgcttgatgtttgtatgcatgtgttgcttgctttttgaggatactggatcccttatgttgtaatttcatgctcttctttttttaagaaaatttatttaactaaaaaaaaaacaatattagtgaattataggttgtactttgtcttcttgctaattttaacagtgcaattatttgtagtgcatggaaaatgctgctgttattagttcaagtcatgacgtgatcgctaatctcttctatccatcttatgtatggttgattatatttaataatatgtaacaatgggcttccatcctatttgaccttaaaattcttatcaatgattaaatttgcctgcttttacatctctgtttgtgcatgggtgccagtgtattttacatggccatgaggtgaattggtttttggtttggttctttactgaaggttgtgctgatgtaggttgcacctgattggaggcaggctctggtcctcaa

SEQ ID NO: 49960 - DNA, 788 bp, Ricinus communis
  Intron number 2 from transcript 29631.m001004 (locus 29631 .t000011) derived from phytozome v7.0 (chr-ID 29631; pos 7 1175 to 71962)
aactgggtatgtgaatgttatttaacttgatatattcatttcaattgtgtattttgcgttgttaagtactgggatatttggcttcaactagagaacttttatcttactatattggggcctcatgtcatatactagacttttgtgtgtagaagaatgacgaagtattaactttttgatgttccaatttatttgcaatttgtggaattgttgactagacatatgtaattttttcagttgatttaactatcgttttttgttttttgtcagttctgtgacatttgtgcttcgtttcatacgattagttatagaattttgattataggctagagatatcttgtcttttttcatttgataggattatcattttgtcaatttcgttacattgctgcttctttggatatgcttaggttgacaactttgaaatgtaggctaggaataataagtctttttcatttaattttctcatgattagttatagaattttgtcttctggttcatatggttggttcctccaacaaaactagactatatgcatagaagaatgatgatgaaatacagttttggatgctccactttatttgcaaattgcaattgctggaatggttagtttagacatgtattctgttcccaattttaacaaggcaagtgtgaaatttgatatgattatcctttttgtcaattttgtgacattttcttgaactaagttgaattgatcttgcatttatttaggaatttctctaatttctttttcaggtgcccaaggaccccagatacaaaaggtactggaa

SEQ ID NO: 49961 - DNA, 447 bp, Ricinus communis
  Intron number 2 from transcript 27747.m000114 (locus 27747 .t000007) derived from phytozome v7.0 (chr-ID 27747; pos 4 9906 to 50352 reverse strand)
cttggaaaaggtgctttcaagagagtgtatcctttggttttgtttcctccaatggtacgaggatttgattctatttcgcattttaatcatcggcatgggcggacacaataaagctccagtgggggcttgagacctcatgagattttgaaagtattcttttttcaaaaaaatattaaaattattgaaataattataaaagataagtaaagatatatgcacctctgaaagaagtaaaattagtttttctggctaattaaattattgagaattttattcatattttttggactatatatacataattaaggttaatcattcgtgttatatatatatatatatatatagtcttttctcctcttcaataaaccatacaaaaacattattatttgcaaattttccttaattaattgcctttgcacattagctacaaggcatttgacgaggtca

SEQ ID NO: 49962 - DNA, 594 bp, Ricinus communis
  Intron number 1 from transcript 29588.m000877 (locus 29588 .t000032) derived from phytozome v7.0 (chr-ID 29588; pos 2 09834 to 210427 reverse strand)
gaagctcaatctccaggtatatcaactatgcgcattttgtactttttttcttttttgttttatttagtactgtcataagaatgggttttgattcttgagcttgttaaatgttgaagcaccttttccatatgcttcttttgatttcatgcgtaagtttttttgcttggttttactatttaaaatataaaatttgaaaccttaattattttgtttgtgaagatacaagattttgtcttaatctgtgcagtttttggttgttgagtaattgtagaaagaagaaaagatcctagagtttgcaagccttgcctttataatttcacttgattccacttgagtctgcagttatatttttctctttcctccttgtttaaatagatggtagaggaatttcatataatgggatgattatgtgagtgaaatgttatttctttctttgataatttgcaggttctttttaaccttttactgctgaaatatgtcagattaatacttttagtaaatttcgtaacctgtaaaggacattttaatttcttatctttctcttttgaactgtgatttgtttaatgctgctttcctacctgtccaggaattact

SEQ ID NO: 49963 - DNA, 751 bp, Ricinus communis
  Intron number 1 from transcript 29589.m001295 (locus 29589 .t000074) derived from phytozome v7.0 (chr-ID 29589; pos 5 28090 to 528840 reverse strand)
ttgacgtcgctgatagagatctccgtcaatacgatgtaggtcacgttccacatcctcacttttatatgctttacttttgttttttcttatgctgtactctattttgtttattccgttatagtgagtactctgtaatgctcttctgtttgtttatgttcttttttggtgtttttattctattattttattattcatttatctttatttttatgtgcaatgataaatgattctatttcctttttccttttcaattttttgattagaatgtttacttttctacggtttttagtttctccctttggtttgtttatttgttcttttaattatatttcttttttcgtattttgattatttttttgtttggcaatttttatattttgttttggtgacagaatcaaaattggccgatatgcgcattctgatttgtctataatgctaataagtttgaaattattttaaacattttgctggctcactgtttctattttgttttatttatattgttccaattactactttgttttggattatttttgctaaatgattttctgtttgtgtatatgcatcgatgatatgtccatagtggatgcatctaatatgtccattgtccaataaatttgaatggaattttcttgaagttattttctcccttttcctccctatacatgtaaagagaaactgatgaataacattcctccctatacctgccaatctaggtgagcataactcctgaactaacctcaaagaagat

SEQ ID NO: 49964 - DNA, 967 bp, Ricinus communis
  Intron number 1 from transcript 29728.m000823 (locus 29728 .t000029) derived from phytozome v7.0 (chr-ID 29728; pos 1 83805 to 184771)
cttagcttattattacatctccgctgataataaaggttagagttacttttgtttgtttggctgctgagaaagtctgggaaaattatgtaaagtttgaagtgtatggagctgaaatttgatttagttaacctgcattttagattacttcatttatctattttatagaaaagatagagttaatgtagttttgagattttgatgtttaattaggcatgtaattaaagtctgatagagatataagatttttacaatgaagcttaattgacgaactaatcttgattacctaaaatagttgctaaaagcttaatttagcattcatttaagatataaatcataattctcttttttagctgtctttattttgaaacgtggctcaatttgtttgaattaattaacctgccttttaatttgcttaggtttcttcatctggagaagagcttattctattttatatgtttatttatttattttattttttcttcttcagatttgatttttgtatggtttttactctaatctttttgagtttatgttcaattgaaatctttgattagaacatgaaattatttatttgtaacaaaccatatgcaagaatttatttgagttgaattcctgcaaaatcatgtaactttggcctgatcttttatttctttcaaaatccctttttctttttgaaattataaggaattgaattctagtgactatatggttttccaaacatgagagtagactttgcagaattcaattctaacaaggggaaagggatattagaagagataagtgagaagtatttgaacttgatttttggtttgccaatgaaaaatgtgtaatcctttctttactgcagttctatgcaaaatgaagcttgattggaaagctaatcctgattaactgaaatagttttctaaagcctctccctctctgtcttactcatgtattcatgatgtctgaaatggtgcagaaataa

SEQ ID NO: 49965 - DNA, 942 bp, Ricinus communis
  Intron number 3 from transcript 29700.m000755 (locus 29700 .t000011) derived from phytozome v7.0 (chr-ID 29700; pos 2 04474 to 205415 reverse strand)
taaattttacgaaagtgggtactgcaagaaaaagggcataatgtaattatttgcacccatgatatgttatttagattatggataagcacaaaaaaaaagcaacagtgtgatttcactattttataattttgagtacgtgtccttttttaaataaaaagaggtatgtggttacaaattgtgataaaaacgatatttcgcagttaaaaagtttcaatttgtaaggattcagctaccttcactctgtccagccatcattatcatgttacacgtatttgataatatgcgtttagagctgaacaactcataatttcattatttgactattaaatcacagtttaagaagtgattgatctaatgagatcaatttaacagtaaaacaacaatattttgagctattaagctctaaacccatattatcaaacacggaaaaaatgataataatggttgatcggagtaaaaatgactaaattcttgccaattgatactttttaacggcgagatatctcttttatcacgatttataatcacatatctctttttatttaaaaaagaaaacatgtactgaaagttgtcaaataggataccacattgtaccttttttacttatctctttagattattagattctaattttcacgcaattatgcgttcaattttgtaacaatcagttgtattattataattagaaacacaacaagcaaaaatggaacatgaacaaaaggattcatattcaccgagaaccaccaccaccagaaatgtcaaccatgattgggtatagctattagctttggaatttttagtttgttacaatgtcttttgggaaattaaaagccttgtcttgatgggtggtcgccatttagaaaagtggttgttaggtggtattgttgttgttgtgttcttgtcctagtggtggtagttgtaggaggagaggagaaggatttg

SEQ ID NO: 49966 - DNA, 877 bp, Ricinus communis
  Intron number 3 from transcript 29815.m000491 (locus 29815 .t000003) derived from phytozome v7.0 (chr-ID 29815; pos 1 8794 to 19670)
ctttaagattctgctggaaagtattaattgcactggtatgtcaatttgtaagaatgtataatttgatttgatttggtttgaatttgaaattattggaatttgatttgatttctgttttctaaattatttagttgcttttttgaatagatgctctctcttattcaacctggtttttttttgcttctcaattactgtaagaatgtttaatttttaatgagtcaaataaaataagtattcgtgtaattttatgcagttagcaatggggttacctataatttcatccttttgatttggcttaatcagagataaactgtttgtagatgtagctattttccaaaattgcagcaatctgccaaaaaataatttgactaacttgtgcatcaaaacgttaagtaatactagcagtatatcaccatttaacaaggaaagtttttttcttgccatggcaacagattaacacgaggacttcttcttcttcttcttcttcttcttcattttggtatttatatatgtatatcctattccatataaagatctgaatgcctgctgtgtagccagccataaattcctggattgaaatttttgggctagcaggggaggggagatgagcataaaaacaatgatttagtgccacactaattgctcaatattcttgagggcctaggggatatatcagataatgatgacaattttattccttgatagctttaaactacccaattttatggtatcatttcagtcagccatcaacctctctctctctctctttctctctccttttctgctttaaacctgctcacttcataaacagctgatttcctctctcttattcttaagggtagattcaagaaagaacttttgctccctatcagtgggt

SEQ ID NO: 49967 - DNA, 622 bp, Ricinus communis
  Intron number 1 from transcript 29582.m000251 (locus 29582 .t000009) derived from phytozome v7.0 (chr-ID 29582; pos 1 15195 to 115816 reverse strand)
tctgcagctgaagaagttcaagcgtctgctgacctgtacgtctttccaattcaattcattccctgttcgtttttcttttctggtttaatttctcttatcagtttcttttgtttttcaaaggtttatcgttaagtgtttcaacttttattgccatagaaaatgatttttcagatgggtgttgtttaatatgcgtcaaagatgcatagttattaattggttcagtagtatcaaggatgctgcttactttgtattgggatatcatattataggccttgtttggtattatcatgttcaagaattaaatttgaattcgattccttgcgaaattatgtcacttgtggaatgatttcatttcatttcttttcttcttttttttttttttttgttttacctgaatgccttcgtttcgcttttactatgtggaaagagttgcatccctattaactatatgatatttcaaaacaggagaatttactaaatagagttgaattattttatttgtagacttcccaaaacaagggaatagaattccgttgcaatttcagtgtcatcagaatatattaggatctttagttaagttgtcaagtccagtcttctctgaatattggtttgtttgtccaga

SEQ ID NO: 49968 - DNA, 793 bp, Ricinus communis
  Intron number 2 from transcript 29579.m000200 (locus 29579 .t000006) derived from phytozome v7.0 (chr-ID 29579; pos 5 5107 to 55899 reverse strand)
atattcaacaactttttgacaggcatgcaatatccattcattggcaacatgctttatgcatttttgtttatttgtttgatttgctctttttagttttatatttccttcaaaaatgagctttgcaattgatcattctagtagcatgataactttgcttaagttgggaaaatggtaaagatattgagttcttggaagatgaagggtgagccagcttttaaaattcataaactgggaatataagcaatcagtgcatactgacaaaagcacagctagaactaaataaaagctatgttgtgggccctgtaatatgtttagagtcttaagactgcaaagtggtcgtctttaatatttaaggatgatttattggtcaataatatattctataattaatcttccatgaattacaacaatgtttgtagcagagtttttattttctttcttccctaaaagcaatttatgcagctattttcaatgtgttacaactaacacctagactggaaaagtatagaatctatgtggctgcaacatgagtagcttatgtagtaggatgcttttttctttttaaaaaaaaaaattaattaattagacaatgggagtgcaatatggacttgttcatgaatctatgacagtttagggtcttttgcttataaaaattgaaagttgaaatttttatgcttagcctgttttggctacattgtttagtattttctttctggttttgttcttcgttgaagaaattgtttttttaaataaccattaatgtcagatgcctgtttctgcttcagaatatcaa

SEQ ID NO: 49969 - DNA, 815 bp, Ricinus communis
  Intron number 2 from transcript 29648.m002007 (locus 29648 .t000094) derived from phytozome v7.0 (chr-ID 29648; pos 6 78813 to 679627)
tgtggcaggtaaaagtttgaatttctttttcattcttataatgtaaattcatccaaatgaaaacttgttcaactaaaagttttgagctttaattgagcaaaattaggtgtgtgctaaaggtgaaaacaatgtagcaaaattatgtattaacttctctggtctttgtttttctccatttccacatttgaataagcaatgatggcctaaagaatgtgatatttgttctggttaataatggcaagctcgtttttatagattgattatgattcattattatgttttctgggctaaattccaacctgaggtgaataatggtttaattttgtactgactttggaatttgtaaaacataatacatacagaagttaggaagaagatgggagtagatggaacacatcaagagtccttgcaaaagagctacattctgatgttattatcatgatgatgcttagcagagctgcactatttgcttgttggaagtgaccttccttgatatgttactgcttgacataactgcagtgaatatttgctgataagatggcataaaaagaattgcatttaataccttagtgcccaaatgatatcattttatagtcatcagatagtcctgtgtgtattaaatacaacttggggttatttgatataatattctaatattggaacttggaatggtaattggtagaaacaaacaaggaattgtctacactatttcaattaactttaataccattgcattataatttcttataaaaagaggttgtttttttgggatttgcttagattgctacaagacacctcctacctgagcttgcagg

SEQ ID NO: 49970 - DNA, 877 bp, Ricinus communis
  Intron number 1 from transcript 29646.m001125 (locus 29646 .t000073) derived from phytozome v7.0 (chr-ID 29646; pos 4 36730 to 437606)
caattttacttgaggtatattactaaaatgtttgaattttgccttgagatttattcatgtttctgtctcataaatgggtcacaaaatgtttcttctttctttccttttcttctttaattagttttggatccaaaattatcagtttctattgaatcaactttaataattgctctcacaactttgttaaaattatttaggaagcttaagcaatcaaagactctaaatcgtgaattacttagagcccaacttgataaaaatttatttgagtaattatttcctgaagctcatttaataaatgggccagatctaatttaaatacaattgaatattgaatattgaatataatataatttttatagttttacttcttatggataaaaacatagctcttttagatttatttgctacaaaattgaaatcgtaaattttagtagatttattataatttttaaacaaatattttattttagtgcattgatgattaactgaatctataaaaatatgatgattaactgaatctataaaaatatgatgaatttcattgagagctcatttataatgtacaagtcttaaaggataatcgataatctcaaactagtccaagcatcgattacagtcttaaaagagtttggcttaacttgtaaatcgagtagctgttttctttttgaaaagaatattacaattttctttttactaaaaggttgaaagtttgaattccacacacacattatatacactagtttgcatgaaacgttgataaaaacaatcaagtttcaaactaacatttacgattcacttccgacataaaaatacttatctaacatatataaaattgtgatgcctaatgacaaacagtcgatattgcataactggcctg

SEQ ID NO: 49971 - DNA, 352 bp, Ricinus communis
  Intron number 1 from transcript 29682.m000595 (locus 29682 .t000028) derived from phytozome v7.0 (chr-ID 29682; pos 1 94973 to 195324 reverse strand)
cgggtgagctgaaatttaagtgtggaaatcttttctgtttgtattaccaatcattcattttgatttcattttcatgtgattgttgtctttacctgtttcctcactttccttttttgtcgattatagattatttctaaatagaaaaagtatcatagttcttagtcctccaggtggggcggaacatttttttcttttccttttattcatgtgctgttggaaatttgaacaacatcctattcttttgggtgtgagtttttgaagagatgctggacttgatattactattctccttcaaagttctgcaatacactatttttaatctacttgcaggtaagaactgtcaaagtcagta

SEQ ID NO: 49972 - DNA, 636 bp, Ricinus communis
  Intron number 1 from transcript 28152.m000925 (locus 28152 .t000054) derived from phytozome v7.0 (chr-ID 28152; pos 3 01334 to 301969 reverse strand)
actccgatctttaccattctaaggtactattcatcccttgcatatcgcttcttttttaaattaatcaattcaaaccgcagtggtctataaatgtgggtacttttctgattttaacattccttttgataaaacaacaacgaacatgaaccgagtcataattcagtcttatgtgctcaatagagttctctttccttaaccttagttgtcgtcagctttcttggatgactttatctgcttttgttatctgggacttctgatagcctaattatcaaggacataattgtgcaatcctattaacaattttaacagtatatttgctgttgtacaaaggcaaaagaaaaaaaaaaaaaaaaagcgagaaaaaggaggattgttaccatcattatgtcttgttgctagaaactggttagtcttactggaaacagcttaatagctatgataatgctctataaagtactattattgttggcacaagataaaacacttgggtggttgactggatatcatctgaaaaggaagaccttttagcaatcaaaatatttagttttctaggtatctaaatcagtcattaaccagcttagtttgtctctgactttgctagctggttaggttctatacaagaattgggttcaaggc

SEQ ID NO: 49973 - DNA, 345 bp, Ricinus communis
  Intron number 2 from transcript 28806.m000152 (locus 28806 .t000007) derived from phytozome v7.0 (chr-ID 28806; pos 3 5521 to 35865 reverse strand)
ctcggcttcagaaggaatatagagcactgtgtaaagtatgttattcttcttttttcttttcaattggaagttagattgttatttaatctgtttatgatattagcattaatggctggaccttactttacctcttgtagagggtaggttattttcactgttataacaaattatttatgaattaaatagaagaaataagactttcactaattgattatcttgttaaactggatgtctttcctaactgtattttagaaggctttaatatgtgatgtattcttgtttccatgctagagattcatttgaattgtttcttttcctatgatgttttgtaggagccagttcccc

SEQ ID NO: 49974 - DNA, 522 bp, Ricinus communis
  Intron number 1 from transcript 28806.m000152 (locus 28806 .t000007) derived from phytozome v7.0 (chr-ID 28806; pos 3 5950 to 36471 reverse strand)
ttccgttccttcttccgtacatatttttatttccggtagtacctcttttttagtaattattattattgtctttgaccattttcttcgaatttgagatcgatctgcttggttttttggtttaattttctaattgttggtagattcttgattgttgttttgacttttatatgaatagattgatgtaattgagattttctcacttgatccttcgattattgatctcctttgtgtgtgtgtgtgtgtgtgtgtgtgtgtgtatattttcttaatatgtttggttagggtcaattttgttttccttcaaaaattaggcaccatgtgtgtggaatatttgattgaattcttaatcttaaaactgtagctgtaactattactgaaatttcgctctctttttttatatgctttgaaattaattacataattgacaaattattgcatgatatatattgctaaaatcactcgcacttattttaaatttttttgtcagccaatacattgaggttttggagttcacttaaagaa

SEQ ID NO: 49975 - DNA, 924 bp, Ricinus communis
  Intron number 4 from transcript 28324.m000394 (locus 28324 .t000002) derived from phytozome v7.0 (chr-ID 28324; pos 1 9881 to 20804 reverse strand)
acactgaagtgttgggtgtttcaattgacagtgtggtaactatcttatcactcaaaaagcaatgtcgatgtcttttgggatttcatgtagcaataatgctggtgtttgtattttcttttatatattatgtaatgcatcacttctctatctcttattgtgtgttttcttgttgagaattggctttacaaaacccccttgataatgtgactatagagtgagtgaaatgttcttgtataaatatatgttctatctcataaagaataacatggtcatttataatatggttctggcgagttagagatctgtgtttgcaccacgtgtgagaatttgtattgctttttttctcccctgcatctccttcttttcaccttagcttgagtaccttattcatttatttgcttgatgtgaggatagaaccagctagctctggtttcaagtggcatttcaccccagggcaacctctttcaaacatacaacatggattggcagattcatttggacatatcatgattatgatcgccaatttcttttattttgtttgaaagtatcagctgaagtggatgtcaaaatggagaaaaagaaatatgtgactgaagaagaaactagacttggcacggaaaatctaaatcttgattttgctcatcacttcatttatttttttgtaaaagttattgcgattacaaaatttgacttggatttgcaatgtcagtgctgaacagcttctatttgaattttatatttccctttatcagtgtagctgtagtgatgttttgcagctgcaactggaaccagaatgtatccattcctgtttcacagcttctaatgttgtaaagccttacatctgaaactgttcattgatgctgcttctgctttaatattccatgtgtagttctcccaccttgcttgggttcaaactgatagaaa

SEQ ID NO: 49976 - DNA, 972 bp, Ricinus communis
  Intron number 1 from transcript 29807.m000495 (locus 29807 .t000025) derived from phytozome v7.0 (chr-ID 29807; pos 1 84955 to 185926 reverse strand)
aacctatctctcgttcttctcgcgctggccttcaggtcttcctctctctctctctctctagatctttctttttctccctctttttgtctgtttgtttgttaaagaatttagggttttattaagttctcaaattgttggggagggtttctttagagtttatagtttatgccttgtatgtttatttagtatttatagtttatgctttctgacaaaaaaaaatttctgaatgtataaatctgagtcactttctttccattgcttgaatgagaaaatcgtatggaattggatgctttctttctttaatttgctaatatcaactgaatatatgagtaatctaagcacttcttaaagtttcataattatacattaattgactgctgttcaatcgttactagagtaccagagttgtctccacctgtgaggtctcaagttcaatcagtcggagccaattaatcaaaaagaattttcataatcttagtagtgctttttatccttctagtacgcctttcacctaagcttctgctttagagattcagtgccatgaatattctatgttgtataaatttatccattccttcaagaatccgggcctttctaatccacctaaatttgtaaattgttgaaaaaaagaccgggaacttgtaacttaattggctgagtggtgaataaccaaacaaatagagctggaaattcacctccgtttgaccagtttctggtttgcttctttatttaaatccaatgggtgatgcttccatgtttgactgggcctgagacgctcacttctgtaatttaaattcttttctcttctctgtttttgcttgatggttatttttgttttttgtttatcgtttttccaagattctgattatcatctataatgggtcttgcatttatttccttgaattgtgaatttactatactttggcggaacttgcagtttccggtaggtcgtatacatcgcttgctgaagtc

SEQ ID NO: 49977 - DNA, 734 bp, Ricinus communis
  Intron number 3 from transcript 28543.m000401 (locus 28543 .t000018) derived from phytozome v7.0 (chr-ID 28543; pos 1 23635 to 124368 reverse strand)
cttcaagcctcctttcaaaatttatctctctcttggtttgttttccggtcactgcatcagctttaattcagaatttgatgaacatgatttgtcttttttcttccatgtttgtagatgatgaatgacatactaattggttttctaattatttctttgatgattcttttaagtcagacttgaatgcatctgcatggctttagttgtcacattaattcatggatggcgttttttaatctatattttttaactctaataatttgattgccatgatggactattttaactgatttattctgtgatctgtttacaaaatcctcaatcagtcggaaatatccagtcattatgatcctgagcatgcttaaggattttcttactatctaaatctgtctttaggatgcttttcatttgttttgatgatgtcgaatattactaactgcattgagcttggttggaattagtagaaagtgaactcagtctatctagactgtaaaatttaaattcctctttttctttgacactaaatgaattctgctagttatacgtattttaaacctatgaattgggccatgcataattgaattcaattgagtttctcatttttagagttttcttaaataatttgtaagtttattagtattctaaaatcttgttctctttttcactctttctgttaccttgtttccataactaatctgacaggagagctaaagaaacttaagaaccttgtggttgat

SEQ ID NO: 49978 - DNA, 792 bp, Ricinus communis
  Intron number 2 from transcript 29685.m000480 (locus 29685 .t000002) derived from phytozome v7.0 (chr-ID 29685; pos 1 0032 to 10823)
actacttgcttaaccctaagaaggtatattagggccctttttttaagcagaaattagaattctgtaataactcttagattgtttactttgtttatggtttttagattagatcatgaaataattgattgaaatgagaaggttaaacatttttgtatttcaatcagattataatattggttgactatatttcatactgagtgcccggcggttgcttaaaaccctaataaaagttgtttgattttaccaaattattagacttagatctatgaattgattggagttgtaggagattattaacttgttgttttttgtgcaaagaagatgaattttagtattttaaattggttgcttaaaatttcattgtctaggatcttatctttcatgaaagaatgcgataaatggtatttaatttttaaaaaatggttcattttaaataatgattggttcgagaagtttcttctcctgcaatgttttttcataggcatctcatatcaaggctttataattcgcatggcttaatattatttgtttttggctagttctttttattagcacttaatatatgataataaccaaatctgatattgttttaatgtgcttcctgaattatggattaggaaccatcattagtcttcgattagttttttgcttgcacgtgaatacaaacagttcaaaggtgaacctggtgccattgactgctgcttgctgtctcctacacatgattattaattgtgcttctaacagtcccttggttttgatttttgttgtgcgcagtacatccctggaactaag

SEQ ID NO: 49979 - DNA, 1025 bp, Ricinus communis
  Intron number 1 from transcript 28226.m000879 (locus 28226 .t000049) derived from phytozome v7.0 (chr-ID 28226; pos 2 45214 to 246238 reverse strand)
gccctttcctctctcctggaagcccaggaatctctgtaatcactttttctttctttaattagttctctacatttttcatttttcattgtatttctcatgcatccatttcatttcaaatactcgccctttctctcatgttagtgaggcagtagtggagagcctagagatttccaatgcacatggcggagtctcctttcattttattaatttcattttgcacatttctcatctctgtgactaactggaagtgaaaaactgctctcctcttttttgttttttttttttttataaatatttttgcttcggtggttttggctgctatttgtgttatatcttgcccttaacatcatttctggagttgcatgaatctgtctatcctctaatacactcttataggacatgttgcttcacaaaattgcagcaactttaaattcacttctttcatgtgatgttgattccactggctctactcaatgcaaagcagtggccttgggtacacacgtcctctttttacattaagatgtatctttgcccttcatcttatcgcttctgctttacggtattcaagcactatgaagatcctagttgatttttggttcagttcgttggttgcttaatttaaccataatttgaattcaagctggctgcagtaggctctatggttcattctttcccttcttaataatagtatgtagggcctaaatctttctaaagatgtttgtggtagggaattactttaaatacctcaattggctcaatttttttttccaaattcttccactgtttcctacaattttgggggtgttcatatgtgcttcagagtggattcttcatgcagattgctatattatgaaggtctcaatctgattacttaaaatttgatgatatcgaacagtaaacagtgcattagttgcatttggtcgaatatgctttttgttctggttgtttagtcttatggcatgctgttggtattcattcatatgtaatatgcttaataagagtgtacctataatgtatgcagatac

SEQ ID NO: 49980 - DNA, 731 bp, Ricinus communis
  Intron number 3 from transcript 29615.m000489 (locus 29615 .t000001) derived from phytozome v7.0 (chr-ID 29615; pos 2 0085 to 20815)
tcctactccatcctctggaatcagcaccaagttgtgtaagcaccgtcatcatcacttgtatttatggatacttgctaacttgcttgcaaattcattagccaaattgttaaaagattaatgggattcttagtaaaatgtctaaattttttagtatttggcgacaaaaattggccttgtggttaatgtgaatgctagcttggtaggctagtgtaattgactgttaccgccatgacagtgaaaactggaaagcaaacaatcataataatcattcccttgctcatgtgactgttgtgtgtctagttggtgttattggtcctatgacaaagttgaaaaggaaagcaactgaatgtgaaccaaacccacaaaagaaggggaagaaataatcaaattttggataataccatgccaaagagcaaatgggaaccaagtatacagatgtagttgtttactactgattatggcttttggcatgtagttgttccgtacactacatgcatacaattgatgctctccttgtggatagtagctctatgattcccacttcttgtccttgtaattattgattgttttgagaaggatgtgacaagtcattcttctatttacccttcctacataaataatgcattgcagaataattcattgaaattcacatatgcatttcctgtgttgtgtgttttttactttctaacaatttgctcaaaccttttgttgttaaatcagatttctagtgg

SEQ ID NO: 49981 - DNA, 676 bp, Ricinus communis
  Intron number 4 from transcript 29794.m003329 (locus 29794 .t000028) derived from phytozome v7.0 (chr-ID 29794; pos 1 48272 to 148947 reverse strand)
aaactccatacggcgagaatctgttcttggcaagggtaacgaactggaaaatttctgtttattctttaaatgtgtgaggattgtaaacatcgtttctccagttgagatcttgatggctttgtttgggataaatcatgtataatagcattacaattttggtacgctttcattcttttaaaatgcttgttattttcaacttgttagaattgatttatagcaaatatggacttcccaaacatgagatttgattaaatacagttccattggattaaatttatgcagttttaggctttccaaacaaggggatgggatttgaaatgtgactgacagttgtactagcatttgatggattatgattgtctcttattgataagctctcatttgagagaaataagtaatgcatttcagggatgtgaataagaactggccacacacacacacgtagagatatgtatttaagtgctgatatttgatagaaattaagttcccttaacagatatgcgaaagaagccaaatgataaaaactatgcgctcaggattatatatgatagctcatttatcttttcggaaataagtgataatgtggatttcgagcattttatttttgatgtttatcctaatattgttttgtcatttctgttccttttcttttcataaaaggttttcgatctttttg

SEQ ID NO: 49982 - DNA, 261 bp, Ricinus communis
  Intron number 1 from transcript 28492.m000477 (locus 28492 .t000015) derived from phytozome v7.0 (chr-ID 28492; pos 9 7428 to 97688)
aacatcttcaaaaagaaacccaatcccagaggtttgatcagctcttaactcttcctgaaaatttttccttcattttgtttttgatttgggaacaatgatatctatgctaaagaaccatgatacgtttttcttgaaaatttatgatgttatgtaatttaattgtgtttttgctgatttttagttgacttctgatttgtatagaacggattttttaatgtgtttgtttggactgcagaggctcttcgggagagtaagagggaa

SEQ ID NO: 49983 - DNA, 852 bp, Ricinus communis
  Intron number 2 from transcript 28492.m000477 (locus 28492 .t000015) derived from phytozome v7.0 (chr-ID 28492; pos 9 7699 to 98550)
ctactagaggttattataatttctattttaagctctttaagaaaaacaaaagaatttcagcattgccattacataacccttgatcattttgttttgaattctattattgctgttttttttttttgtgtgtatgtgttaacattatcagttattattcagtaattatataaaattggaaaagaatttgaaatagtgcgaattaggtttctggttaaacccaggaatgtcattagaaaggtgaattattggcaaagcatgtgcttcacaaatttgaagaagcctctatatgtgcaaaaatattcagaacagagccgtattatcggagagaaaaaagtaaatttgtcacggagaacatataggtatagttgctatcgaatttgaggatccattgttggagttttttgttccctctttgtactaatatgggtgctgagtgattccctttttgccaatctaaaaaatttagacttcaaaaattaggatcaaattatgtttttgctatctctcaccgcccatttgagtggcatcaagcttgtacaagtttgcaagtaattagagacaaaatattatttgccaggtcagtttgtagtatattgcacaatcttgcactttttgtttttgagtttgccttggatctcttctgttgtcattgtgcatgatcttggacaaagagatcttctcttgattctaggctcttccccgactgataatgcatgggactagatcaggtccttttttcctctgttgaattctaaagctgaagcaaatgtttttcatatacatatggatgttcttttctggttttcacgtgatttaggtatagagaaggaaattggggcactgcaatcagag

SEQ ID NO: 49984 - DNA, 545 bp, Ricinus communis
  Intron number 3 from transcript 29709.m001210 (locus 29709 .t000046) derived from phytozome v7.0 (chr-ID 29709; pos 1 91257 to 191801)
tactacaaggtctctgcccccttctttctttctcgttcttcatatttgtaatttcaattctttcattttggaggtgcacgtttccagcgaacaacactttcgcactgctcccttttatttctatatattatttatcacaacttatcatgagctatttatttatatctcttgattttatgtgcacctggaatacattttccccattattttacacttgtttttcttgtcagtgcttatcatgctaatcagcaatactctacaatcattcatctgataacagtctttttttttttttccttctttctctatgattcgattgaggcttctaatggaaccaattctctgccatctgttctgagctcatttttcatattcccatgttcatgaatctcttataagaggttacattttgagttattaattaattttatctcatttatgctggttatggcagccaaatttattttacacaaatatccttgtgggcttgagaccttaactttgtttctaaatttgacaggttctgattgccaatattgaggaat

SEQ ID NO: 49985 - DNA, 197 bp, Ricinus communis
  Intron number 3 from transcript 28152.m000909 (locus 28152 .t000038) derived from phytozome v7.0 (chr-ID 28152; pos 2 13221 to 213417)
ctatatacttatacataaactcatctgggacgcaggtagaggccttcattttccctttttcttttctcccttttcctcctagtgaaactctagataaaatgttgactaacatcctgaaatgctcaaggcgcattcactttctaagatatgttttttctttattaatttgatttcttgttgcaatttagaacgagaag

SEQ ID NO: 49986 - DNA, 610 bp, Ricinus communis
  Intron number 1 from transcript 29791.m000547 (locus 29791 .t000022) derived from phytozome v7.0 (chr-ID 29791; pos 1 90295 to 190904 reverse strand)
gcgttccaaggacagaatctcctacttctgtacgtctctctctctctctctgaccccaaaatgaaaccctagcttcacttctctcttttgtaaatatgcagttaaaattgatgtatactcgttttagctatgttttagttgctgtaataagcttataatttgattaatttcgaaaactaaagttcgaatcatcaatcagttacaattgagcttgtataactgcttcagtagtaaaagttcacatcttgttatcaattttatgattttcttgtcaaatttttgttaactagtaagtttcagctttcaactttgtgttttagttttgttttgatgcaaatcttaagatttattctgtttttatagatgtgatgagcttttgatttgatgaatttgaaaattaattctaaagtagaagcctttaatcaaattacattgaatttgctgaacggcttggataaccgaagttcacatatctctatttacttttataacttttattgtcaaattttgttaaatactaatgattcagccttcaattttgtgttagagttttgttttatgtggttcatttttttttcttttgataattgggattttgatattgcagggg

SEQ ID NO: 49987 - DNA, 445 bp, Ricinus communis
  Intron number 1 from transcript 29812.m000204 (locus 29812 .t000013) derived from phytozome v7.0 (chr-ID 29812; pos 1 06320 to 106764 reverse strand)
tctctctcgctgcgtaatcatcgcatctctccccggtaaattctcatttttttttaaatttttttttgttccaatttgagtcagtaatagaggcattcagtttttctttaatgattgatttgtttcttagctgattttctttgtgagatttgtaattctcgcctttttatttatttattagggttagttttctttcacaattatagtcattgagaagtaattgttgctgttaatattaatttgaggctcttttagtgcatctccttattaggttttttttttttttttaaaattatgttcaattttaattaggttatataattatgttttaattgttgcttattgctgttattgatattgatgtgttataatctgggttcttgattgcatgttcttatttgacttactaggttttgcgggaattggattcattttagagggtttt

SEQ ID NO: 49988 - DNA, 871 bp, Ricinus communis
  Intron number 1 from transcript 29667.m000355 (locus 29667 .t000012) derived from phytozome v7.0 (chr-ID 29667; pos 2 38256 to 239126)
ggttgggtgtgtgcaggagggtccaaatgtaattcaatttagccaaatcaatttcatatctagtgttattacacaacacttttattattcagtatatagatattcttaatgttagtatataaaattatatgctctaattgtcataaaaattttattattaaatttaacacataatttttaatataaatcacaatttcaacaattttaatattgatttaattttttttattaaaatctatgttatatcaataaatttgaccgataattttattaaaggctaacatttaaattaaattaaaatataagtaaaaattttaaaatatttagaaattacatgctaaatttaacaaaagtgcgaaattaattttttttagtaattatcaaaatctatattaaatattggaagatgaaaaattgggcgagatgttgtaaacaacagggactaaaagtgcagattacaaaaacaatgagcattatttagctaataaacccaacgaaaataacattgccaaggacaaatcaaattgggtttatactgaaacgaaattagagagcactttcaaaagagaaaaagatagaaactgaaggggagagagagggatatgggtagtaatggtggaattgctactaatgctacttgtgtcttagtaatctgcactcttttactggtaattttcattggcttttcaattctatcatttcgcactgtagtagtacaagtggagcataagaaatatagggttttatggtcaatgagattgtgtttatatggatatgatgccattatttctctataaatcgttacatttttaacttctaatgagcaaaattgttgaaacaaatgtgtatcagttgacagttagtggatcaa

SEQ ID NO: 49989 - DNA, 336 bp, Ricinus communis
  Intron number 2 from transcript 29706.m001330 (locus 29706 .t000060) derived from phytozome v7.0 (chr-ID 29706; pos 5 40993 to 541328 reverse strand)
atcgccacaagaaattcttgaacgattacggtaccttttacctagttaagactaaaagattgcttttttttttttttttgctatgtaatattttgaaatgtggacatacagggaattaagcaaataatgagatttatatttgtggaatcctgttttttcatgtcctaaagaaaatgagggatggtgaacaatctcttctactaagataagaatggggctacaatcatccttacatttgtttatatgacttcccaaattgctagttttcgtgtgcaagtgtaagtttgttgaatgaataattttagtgtgtgtaatttgattatgcagttagtttct

SEQ ID NO: 49990 - DNA, 640 bp, Ricinus communis
  Intron number 3 from transcript 27428.m000107 (locus 27428 .t000002) derived from phytozome v7.0 (chr-ID 27428; pos 1 9497 to 20136 reverse strand)
acactgccgaattctttgaggctgatccttgctctgtgagcttctttctttgcactttctataatttgtttatggaatgtggttttctttcttatatagaaaaaaaagtaatggctttcaatttgatgtggtgatcatggtaaatgttttgatgtttaacttgtgaagagtggcatgttcatgagatgctctatatgcttccctgtagttataatgtttgtataataactatgtatagttgaaatgatgaagtatgcatatgtattaggactaccaaatgagctccatttatagaatacgttggtgatcgtctctgagagactattccaatagcaccatagattatctgtaatcttctacttggtgaatgagaaactattgcttgaaacgaagaagtaattagaaaggagatatataagttttactggtcagatttcttgctcaaatttagggtgcttcttaatttcatgttttcactagctctttaagtgcctttttttttctgctttctaatcatgttaacatctgatgcttcaacatatagttttgattgttttaagtttagcctacagttttttaacttgacattacatttgatttgacaggaaattttcgaaaagcagctgcaggagaaggccaa

SEQ ID NO: 49991 - DNA, 639 bp, Ricinus communis
  Intron number 2 from transcript 29638.m000505 (locus 29638 .t000004) derived from phytozome v7.0 (chr-ID 29638; pos 4 9008 to 49646 reverse strand)
gccggaggtatttatactcttaaagaataaatataaaaaagtaactgacatttttcaatatttaaggttgttttaaataaaaaaatatatatgattagaaatcatgacaaaacaaagtctttcactattaaaaaatgtcaattcacaaatttaattattttttctccgatcagctatcattattatatttttcgtatctaataatatgaatttttcttgagttctctatttagttcctttcaagcgttgatcttgcaacggccttccagcacgtcttcatagagcttaatcaatttcatcggatcagtgactttttaaatataatttaactattaaacaacgaaactaagagttgttaaactataaactcatgttattatacatgagtaatatgataatgataactgatcaaaataaaaatgattgaaatttttgtgaatcgatatttttaacagtgagatatttttttgtcacgatttataatcaaaacacctattaaaaattgtgaaacgataaaataatatcatacatttttttgtatttattccacttaattctatcctcattttaaacagtaaacaaaaacatgcaatagcatttactaatcctttgaaatgccattacagatttgccctagag

SEQ ID NO: 49992 - DNA, 945 bp, Ricinus communis
  Intron number 1 from transcript 29676.m001696 (locus 29676 .t000087) derived from phytozome v7.0 (chr-ID 29676; pos 5 35546 to 536490)
ttaggcattgacttctacagttatactgctttctggtactttcctcttcattagttctggatcatttctcactagatcatcttcttataatacctttctttttgtcagttatgtatcatgttcttgcagctggaacctctctcttatgatcaaactgttttgttctcttctcttattgacttattaattaatcagttatagccagaaagttataacagaaagatgataaaagaattatagatcattgagagaaaggtaaaaactgaattgggttcttaagagggggtcttgttgatgaaacaatatgcaaaagttaaaatcatgtttcttggaggatttggccacagacacgaacacacatacaaactctgtggaagaaaagtaaacttgcttgttgttttttactagctagatgtttctgtttctcaggaatttatatatctatatatacagagagagagaagagagagagagagagattttggttatgctaggacaggaattctgcaattactgttgcaaaatgtcaaacactagttctaattaggaagttatctttattacaaccttgtttgaagaagaatcctgtaattgtagcattaattcttagtttgttcatgattaatagtctgataaacagttagacaattatgtatttctaatggtgggttatccaaggaccacttggatgttgagagttagaaggaggtaccatagttgacatcaaatgctgaggtgtttatatgcttgctgaattttatcaatgctattttgagaattctttgtgctaaaaacctgcagcaatctactctacatatctttctgataaaacttatagattctccaatctagtagatatgtattgctatcaagccacattgagatataatttcctccttttgctgtaatcttttgttcattcattgcagctacttggtgacagtc

SEQ ID NO: 49993 - DNA, 765 bp, Ricinus communis
  Intron number 2 from transcript 29492.m000071 (locus 29492 .t000002) derived from phytozome v7.0 (chr-ID 29492; pos 8 514 to 9278 reverse strand)
gattatacggtgacgttttgcccttcttccccaaggtaaataataaacacaatcgtactcttttttctttcttttgtttgattaagacttgttttttagttactacatttagtgtaaagcttaagcttaagacttactctttgctttagaatatatgctttggccattttgttattgtctgaacatgatcaaatgctgtacatgtttttatctgggtgaggatctgtctgcgttttttcttttttaattcttgaaactagcctggacaggagggatttgctcttgtttctgtctctgatggaggtatttagtcttaaataaaggactttatatgacatgtgacttgctggaatagctgatgataatacttttgtgggctttttgagttttgatttatcaagtggcctgataataaagttgtaggtgtgttgataatggaattggaaatgcttaacttttgttttaatatgtttattttcattctctctttgtgggagagctggggaagatggcaaactggcaaggccaaagattcccttttgtatgattagtttatttttgcttttgattgttaatttatttacttaattaagtattgggggatttattcaggttgttggtagctacgaatgctagtgtttattttataccgaagcttctgatcaataataagtatttctgttaaagaaagtgattaatattaatattctgttggcatgggtgtgcacagtcagaaatcttcaagctattcaacgcccgggacag

SEQ ID NO: 49994 - DNA, 698 bp, Ricinus communis
  Intron number 1 from transcript 28838.m000256 (locus 28838 .t000014) derived from phytozome v7.0 (chr-ID 28838; pos 1 01474 to 102171)
acaagaaaggtattgatacttctcccagtcttcttatggccaatatgccaggccactgaaaattttatatcatatttggtttagaggtatttttgtttccaaacagtatgctcatcttggttattactttagcctataattttcgtatgtctttagtctcatagaggaacttgtaacttcttccctgcaagaaacggttcttttgtgacttttttttgatattatctcgtggttgctgcaagtattttgagcttaaaaagattgttaatggtgatgttttgaaattctttaaaataaattgggcggagatttggctttggtcataactgggatcgaggtttgtgtttgatcgtgttttatttctaagttgtattaacatatatcctctctctggtaatttcaagaatttacagtcaatatgcccaaaaccaatacttccttgctgccattgggtctgctttctgtgtagtgaaagataaaagcttcactatgtaaaatgtttcaattttaaaacataatcggactgaactttaccttctgaaagggcagtcaagggtctgtaaagggaatggaaaaccagaactctttatttaattcacaccatagttacagattcttcttttctccaattaaatatttgacgaggtatgtgttatgttacgcagtctttgagctttctttctcatactgaacagttg

SEQ ID NO: 49995 - DNA, 729 bp, Ricinus communis
  Intron number 2 from transcript 28616.m000147 (locus 28616 .t000008) derived from phytozome v7.0 (chr-ID 28616; pos 5 1017 to 51745)
acaaggtttgaatatctgttttaatttctcattggatacattacatatattcctttgttctcttcttttatcatttgacctgtaaaaataagtttggaaaactagttgcatgcaacacttccataaattattgtccagaaaataaaataaatcagttgtgaagcttttaattctgtaagaatgaaaaaatgcagaacttcttcagcttcttttaataaatgaggggttgggttattgttttggaaatttggtatcaaaggttttgtagaatgtcagtggaatttttttctcatgataatataaattgcttttgtgtgtggggttgccaattattatccttttgtgcactttaatttattcaagggttaatttttgttgcacctcgccaagttgcaaactaagatcttatcaactgcacatgtgaagcacatagtacttgggatgtatgagtcttctggctgtttgtgtataacctttccctataggcggcttagatgagaagtccaattcaatcaattttgctctccctttgagtccagggtttttgaatttaaaaaactttgaattttcttacattgtactgaccttcttgcaactggatgttagagtttaatgtcaaaacctcaagtttccatctctcctctctctcttttaatttataagatgaattatttacaaaattttcaactgcatgatctcttaatgttttgcagataattaagcgagcaa

SEQ ID NO: 49996 - DNA, 569 bp, Ricinus communis
  Intron number 3 from transcript 28226.m000866 (locus 28226 .t000036) derived from phytozome v7.0 (chr-ID 28226; pos 1 65777 to 166345 reverse strand)
tgcgttactttcttcatcagcacacgttagtctcttttcttataatatttttgctcgctcttcactcattagcttttccttcctacttcgttgtttctgatattgtctgtccactttattttctgatttcttttgctcatgtattcctaaccacgaggattagtgtgatcacatttttttcttgctaagtttgttgccccgtgacctgtgtgcttcacagtttttttattttgaaagaatataagcactgcacaatctgttgctgcttgacatggtgtttattgttggtaatttgaatgccttattgcttaaagttactggtgactgctagaatctatataacaacctgaatgctgcctttttcatgattgctttctttctgttgtgatgattcctcttgcttatacatttgtaaatttatttgtttattcaaattttcttcttttttatactatataacaagttcttaggatgttatttgatgccagttattttgtatgtttgaatcttctcaatcatcaattatatctacagaatacagctggggcagcctgcaacggtcaaagttg

SEQ ID NO: 49997 - DNA, 633 bp, Ricinus communis
  Intron number 1 from transcript 28535.m000124 (locus 28535 .t000007) derived from phytozome v7.0 (chr-ID 28535; pos 4 2071 to 42703 reverse strand)
gagcagaaccttcaaggtatattttcccattctctctttctttttttctcctgatcacagaaactggattgtgagagttcatattagatccctggatattccattatattatatgaatccaatctgttatatagcagttgaattaatttatttcttcatgtaggaaatgattttgaattgactaagataattcagacatgttcctgttcctgtccatgtacaatgttaatacttcacacacacacatatatgtatagaggacatgatcatacataatagccaggagaaattagtctattggcataagagtggactatacatttgcttgtatttcaaggcatgctagtgcaattttaagcatgcaaagtttcctacatctaattttagatttttgcattttgggctgatagatgagcaagatcctgttttcttgaatttggtgttctgggaagtgtgacaattaatgcctaccaacttgattgatctgttttggttgagcttgtttaacttaactttaagctaattttctagggcagatcatgttaatattgttcggctgatttacttgtatcgaattaaaatccttatttgcatacttattagagaactgatgacaattgtatattgacagat

SEQ ID NO: 49998 - DNA, 457 bp, Ricinus communis
  Intron number 3 from transcript 29154.m000215 (locus 29154 .t000009) derived from phytozome v7.0 (chr-ID 29154; pos 5 1404 to 51860)
gactgctaggttgcttccctcaagacaggtcagtcctggaaacaaacatcttacactttaaagaaaatagttttcagtttgaacaatattgatttgggaatttattttcattttatttataagttatttattttggatcacaattcaacatatgttattttgtcgcgcttgtctaatttgtgactcttgtatgcttgttttctttgtattatttgattttattgcttgaattgggttttttttggacatctgcacctaagatattcttcgctcgagtgattttttcattacaagttaatccgctaatgtgactatatattggttcctactcatctaggccaatggatgagtgccattagaccttatttaaatttaattcttcctcaatcccaaagggctaattttacaatgaatatatgcagtttggctatatcgtgctgacaacatctgctggtat

SEQ ID NO: 49999 - DNA, 862 bp, Ricinus communis
  Intron number 1 from transcript 28859.m000316 (locus 28859 .t000002) derived from phytozome v7.0 (chr-ID 28859; pos 3 9516 to 40377)
gatatcttcagcttcctctcattttcactccacaggtctgagtttctctttattctctatgtatatattatgtatacttccatataagtaagttatttattctttttctctattccttgatctttgatgcgtatgttagtttcttccttaatcagacgcatatatgtatttaactttgcaataaaatacatataggatggaataaagtcaaagtgaagagtgccatcaaaaatatttatgtatgtcaaaattctatgtttagataagaaaggtaatctcatttgattatgtccaatggctaattcagaatcattttgagtttctttatgattgatttcacatgctaatggaagttcagttactcgatagagctaaagtcagaaaatacttaatataacgtactcgaataaggaaattcgcagactgactccaacaaatttgagactgtagcttaaatgattggattgagtagtgatagttctgatgcagttaagggagactagatttaaggatttaaaacttagttatgaggttcagttttggggctctttaatcatttaggatgtgatactatttgggaattttaatctcttaagaaattccatcttacttagtgttagtttaggatgaaaggttaaggatttttcatcctggtttaggatttcatatcctaaatttcattggttcagtaattatatgtttaagtcagaagttgggttctacttggtgttaaattcactgcttacaagaagcttttggtctccataatttgacaatgcataaaattttccttgcgagatttaaattttccagatttctacatccaggtccctgcaattcgattgccaagaactgctgaaat

SEQ ID NO: 50000 - DNA, 798 bp, Ricinus communis
  Intron number 1 from transcript 29805.m001485 (locus 29805 .t000016) derived from phytozome v7.0 (chr-ID 29805; pos 7 2217 to 73014)
gggtacgctccctgtctttttttatttctttgatttttttctttgtaatctgtaaagatgtagctttagaacgtgttttcttgttgttctttagtgactggaaaatcttcaagctttatatgtctattgttgtcctaattctttacgttgtgtaaacttcgtagtgcggtttattaataaaaaatttggaacttcggttataataaaatggcatttatgcttagtgttaaattctattcatcttgttcttagataaatttgtattcgtggggtaattaattatgatttgaagatggttttagcgtagataattagtctatgaattgattttaaatttcgctcctgatgaagactgaaaattacctgagagttatgtcaaatagcagggtctttttccaagatataagcttttaggttttggtgtttgttttagttttagatctcatgctaagtattagatcacagtttggttacaaatgtattgcaagactatttgtcattagttatgatcagtgactgctcccataagagcaagtattactcattggatgataaggagattgttatagttggcgtggaggggaaaaaatattaagaatctaaaagatatatgttatatatattttcatttgtggagcatgtttacagtttgctgatttgatagatagtccatccttgcagcatgtattcgttatttttgtattcaccgaagtaattgtagattctattcttataagaatatgtttcctgatgcgctttgctccttttgcacaatcatctctcaggaagacacgtggt

SEQ ID NO: 50001 - DNA, 700 bp, Ricinus communis
  Intron number 2 from transcript 28725.m000320 (locus 28725 .t000012) derived from phytozome v7.0 (chr-ID 28725; pos 1 34825 to 135524)
aggtatgttattgctgtacacactttcccttttcattttttaataagttgcacagagtctttcactctctttcgctgtctgtctctctttatatgcatatatgtgtatctccatgttgaacaagtattgaatctcatcttctctagatatttgcatatatgtgccattctttaagatatatggaatacaatgttcatttagtgatataggaatatgggaaatctttgtgttattgaaactgcagtgaactgttataatacacaagcacttatcgagaaacttcagcttttgattatagttttatggaaaagaggttgatgcttacattataatcacatcattaaagctttctttttattgcattgttgtagccccttcttgttcacttaattgcttttatttttggactttgggttggggcatgatattattggattaaagactttttaagtgttttctggtggctttgggttatctttccttaaaagatgtattactttatcatgttgaagcagtaaaacagtttcaattaccagtcgattgtagaagaatacttgagaaacttggatcaatcattaagtgtctgtgtctttcaaatcattttcatccacatttctttaatttcatatcaacaaatcttctaagatattctttgttccatttaggttaacctgtcaaattcagagttttcaaagattgc

SEQ ID NO: 50002 - DNA, 209 bp, Ricinus communis
  Intron number 1 from transcript 29586.m000610 (locus 29586 .t000015) derived from phytozome v7.0 (chr-ID 29586; pos 1 09126 to 109334)
ctactggcttcgctctccttgtaaagctttttctcctcttcttttacaatggaaaagaaatagaacaataataataaactgcaaccagcgataacttttgaatatcattggttttgggtttcttttatttttattttgatatgcgattaacagtatattttacatgccaagcagataggattatctggagctctagaaactctgtgtgg

SEQ ID NO: 50003 - DNA, 410 bp, Ricinus communis
  Intron number 1 from transcript 29689.m000184 (locus 29689 .t000005) derived from phytozome v7.0 (chr-ID 29689; pos 1 39579 to 139988 reverse strand)
tttctagccatcaatactctataagaggagataaggtaactcatctacaatacgcagatgatactctgttttttctgcaatgcaaacactcaggagcttatcaacataaaaagattgctcaagtgtttctcacttgtttcgattttaaaagttcattttgacaaaagtgctcttacgggtctcaatgtggacacttcatggctggacagtgttgcgtcttcattatgatgtaagactctttccctacctatcacttatcttggcaagcccattggtattaatctaaattgcatcccattattgctagaataaaaaagaagttggttgtgtggaaatcaaagttcttaatagcctcccaatctaatacttatctttattcaagattcctaagggagtgctaaaaagaatag

SEQ ID NO: 50004 - DNA, 933 bp, Ricinus communis
  Intron number 2 from transcript 27585.m000148 (locus 27585 .t000005) derived from phytozome v7.0 (chr-ID 27585; pos 5 0512 to 51444)
gagcaggtgctctggtagaaacttttaaaggagatgtaagtatatactatatactaatacaatgacaatatatttacacactgcaagaattgtttttccttttattttttctttctgggttctggcatacacactattcttagcatgttatttaggggaaccttttcactcatagaatacaagactgagtgctactttatgtataatcaactaattgtctgattttgaacacctttgtcttttgatcacatctttttattttctcctttccgttatctttaccttaaacttatatctcccatgtgggcaagaaaaagaactttgaaactcttcatatatttgattgtgaaaagaacaaaagtataaaaaggtcaattaaagatcagatatcaaggcattaatggtgtatacatgttatgttaaaatttgaagaggtactattgacccaattcttgaggatgatgtaagcttagttgagacagtttttcttttattggctggatgtacctaccgttttgggtccactttcttcttccaaggggcataagtagcatgcttgacatgtcaaaatcagaagaggagaaggacccagaagccattaccgttctcctactcaaaattctcacatttaaaatcaaagataagaaacgaattttgaacggatgtgcaaatcaatttttaaagcgaccaagaaaaattaataatagtcaaagttgtgcatattattatgataaatgttcaaattttagttccggttagaatttttgcatattaatattagaatcgtttttcaatagtatggaattaagttttaaaaaaaagaaaatattgcatttagtattttggagaatattggcaccaaatagtcatatcattgctattgtttttcctcttttaggtgattgaccttaaaacacaattgagcaactacaa

SEQ ID NO: 50005 - DNA, 537 bp, Ricinus communis
  Intron number 1 from transcript 28489.m000045 (locus 28489 .t000003) derived from phytozome v7.0 (chr-ID 28489; pos 1 4733 to 15269 reverse strand)
gggtggaggatccaacgactttcgcaggccttctggttagttcttatttctttctttctttttaaatttattcttcttggatgttataacttgccctagttcagttcggattttaattggatgctgccagtaatatcttttgaagcaaattaaattgtttacttttttgccataagttattgatagttattatccagaatttgtaaatctgggtattctctttggagatatctacatttgagtgctttgtcgccataagtaggtcttgcagacttgtaagcttttatattcaaggttttatcctcttttcaagggtttttattcaaggttgtttctagttatcttctgtcaatagatctgacttggttcaggtttatctgtatttgaatgatttttctttagatctggggttcttatgctctgttatccttgttttgaaatttttaattttttttgccttggctagaatatattttctgcttgtgtgaattgtatgtaattttccttttttgttggtttaaatattacttgaaggtc

SEQ ID NO: 50006 - DNA, 781 bp, Ricinus communis
  Intron number 3 from transcript 29726.m003991 (locus 29726 .t000103) derived from phytozome v7.0 (chr-ID 29726; pos 6 18584 to 619364 reverse strand)
gcttacactactgcattttctgccttaaagtgccggtacactcttgtcttgcattttttttttttgtttgtttaacagcaatggttgttccttttgtctaaggttaatgtggaaaaggacttattgcatgtatagtgctttgcaactcttattttgtcaatttgtgtttgaaataagccctttgttttacactcttagaatagttaaaagatatcgtagtctagctgtaaacctataaatttgtagatatctgtaaggttggaggggaaagtaatattgtctaattgattagtctaaattctctatcactgagttttaaaagaagcaagtggcttcgttcgagatcaaaaaaggataggacgagagaataagactttcccttgattcaatttgcaactcaaactagctaaagaatggctttcaaattctagttcacaggctttataacttatccacctttcagcaacaactatcgcaggtcatttgaaatttaggctattgtcagtcagtattatgctgttttgagatttggattttggataaacacacttgaaaaaaggagaccttgaattaatgcagtaatcaacatatacagcaaaagcaggtgggctgattgcatgtagataatctagatatgtggaaccaatgtacatcaatctatgagaaatgctagattcctgcatcattgcattataggtcaattctttgctatgatatccagttcttgtatgtaagctcctcgtctgatatctaatataataatggacaggctgagcatctc

SEQ ID NO: 50007 - DNA, 630 bp, Ricinus communis
  Intron number 3 from transcript 29475.m000226 (locus 29475 .t000001) derived from phytozome v7.0 (chr-ID 29475; pos 1 219 to 1848 reverse strand)
attgaacaagataaaggagtctcttaaaataataggtaataattactgttttttttttttaaattgggtcatacttactattaaacctatcaaaaagaattcaatagttgatatatagtctgtgacaacctgcatggggagatttccaaggctttttaagaggctttgcttctagtttcagctgttgtaccagtaagaatacaaattgcaagattacacgggaatcggcatcgattttgcatgagtgactctttttcttttaggtttttagcagttaagtgaaagctataattgatataagatcataagattttatatagtaatttttaagattaaatcaccattcattatattaatatagttattcaaataaaaaataataattaaaaaattataaatattacatatgaatattatacatgaatatataattaagaaataaatatatatgttaaatatatatatatatatatatatatatattcgacaatcaaaaacacctattcccttctcttctaagaaataaatattttatttccatgataattaaatcaagctaactaaataaaaaaaaaaattatctttttatttataggagtcccaataggctgtgagctatataacaagggg

SEQ ID NO: 50008 - DNA, 480 bp, Ricinus communis
  Intron number 2 from transcript 28748.m000219 (locus 28748 .t000013) derived from phytozome v7.0 (chr-ID 28748; pos 1 04932 to 105411)
ctcattgtggtaggaaatgtaaagagtttctgaaacgttcccaatttgattgctgcattcgatgtttccttgaacataaagataagtccttggttctccaagaagagaaagatggcattgtttttattctgtctaacagagatgaaaagtttgggaatattattacactttttactattggtccttcttcatcagggcctggtttctactatgaacttgcagcaaaaataaaatatgtgaatcatagatttcagtctgttacaaagaacgtttaatgtaacaacactgatgctcttctttcaactaggatgcttctcgacaagaattgtcactttgatgataacggcttgatagaattaaggctgtgcatctggagtgatgcatcatctcctcccaggcttgggatttaaatgataaatcatgcatggtactttgttgtttctagactccagagcttagaaattacggaagcacttttgt

SEQ ID NO: 50009 - DNA, 610 bp, Ricinus communis
  Intron number 1 from transcript 29569.m000152 (locus 29569 .t000008) derived from phytozome v7.0 (chr-ID 29569; pos 6 3628 to 64237 reverse strand)
ccaagcatcgtcttcaaataggttttgtttttcttctttcctttcttaatcgttatttttattttttttatcggtctttagcttttctattttcttgattcttggtttcaggctatctttgaaattggacattaatttttctttcctggtttatataacttgtcatcacatatcttttatagctgggaacttttatgtttgttgataactgttaaagatagtctattgcttcaatatccattatcagtgtttggaaagtctaaaaatgcaagaaattaattcaattgaaaactatgtagccaattatcatgttttgaaaggtcatagttgctagaactcaattctttcaacttaaaaaagaaccaagtaatttttatagcattttgaaagaaatcaaatcatgctacaagtgacatgattttgcaagaattcaattcaattcttgcaaatgatttgttctaaagtaggtcgatataatttaattgactggtgcaattgtgtaagttcatgtttttatatttgtagagttcctgtttgttgtagaagacactaaattatgaattatttttgcatcttctgaaattcttatttattggacttcttttgccag

SEQ ID NO: 50010 - DNA, 584 bp, Ricinus communis
  Intron number 1 from transcript 29628.m000777 (locus 29628 .t000031) derived from phytozome v7.0 (chr-ID 29628; pos 1 45382 to 145965 reverse strand)
cctccgttctgctcctagctggaaggtacatgctctcttggcttcagctttctcgtaattaattgtatcataatttaattaattggctttgggtctatcgtttatcctgtgctgctttctgattgttggttattttgctctcattttgtaagattaatatgttaacacatataggtaattttccaaactgggtatagaaactttacagcatctggccttattatttgtttttttcttttaattttaatttctcaaattttccacattgtgattgcctttccatattgtctaattaatatctggagtttttttctaactttgtgtttagaaagtctaaaaactcaaaaatggaattcaattctattttgtcaattcttgtgtttggattgaaaagaaaaggctgtttgaaagaaatgagacttttgcaaaaagtgacatgattttgcaattcaattgatgtcttgcacatgattttatttcagaatattctcttagcttgaaactcttatgcttggtggtcatcttttcatgtgtcagcattcaaatggccaactatgtaaatgtcctttcctgttgcagggcat

SEQ ID NO: 50011 - DNA, 637 bp, Ricinus communis
  Intron number 1 from transcript 29801.m003123 (locus 29801 .t000068) derived from phytozome v7.0 (chr-ID 29801; pos 4 08777 to 409413 reverse strand)
ctgtctctcaaaataagcgaagataccaggtgtgggattatctctgctgtgcaattttttgaattttatttaacgtgacatagatcgctttcatggtttacttattgttcctttcttccttgtgatggttcgtttcatcaatagtgttctttctttggttattcctacaattttaatgatgtctagcagatgtttacatgctagtctaccaccattcttagaacttgtttaataggaatagtgttaaggaagaagtcagcattttttatttttttttgtacttgctgttgttttcttttccctgataaggaaaaaattattcatcgaaggagagacttagagacacagaagtggttgtcaatcatgtatacttggggtgaactttggcaaatcccttatatattctttatactaactaagaacgaaatctaaggaaaaaaagttcattaattcagaagagaactagtttggaatgataacgcctggattaaaggattacaaaagtaaatataatctatattcattaattatttttttcttcattttgtgataatttatttctcaaaatgatgcatgtgtatgtggtttctggttgatggctgttacttctctccaggaaggaggatttgatttggac

SEQ ID NO: 50012 - DNA, 644 bp, Ricinus communis
  Intron number 1 from transcript 29794.m003346 (locus 29794 .t000045) derived from phytozome v7.0 (chr-ID 29794; pos 2 47540 to 248183 reverse strand)
acatcgttctgtgcttcgcttcctcatcataaatcgtaagttttttttttcttaagtatgttgtttcttttctttttttcttatttgaattcttgaatcaagtagaaaaattttgtatgatcttgttaaaattttattaaagaatcatcgcagttatgttttaataggatttgggtttatttagaggtttttttttattgggttttgattacagttggatttgattttgggaatatctctatggtaaagattatatgtcttgaaaagaaattgagcttattgttaaaagaaggcccctcaaattagtgtgtgtaattatgctggaatcatcataatagcttgtcttgcttgtcttgatatataacatttttggaacacaatgttattactttcatttttatgctgcaaggaggattgttagttggactgacatttgatttttggaccctattttcacaaacgaagtatgcatagcttcttgataatgggtgttcagaagttgataaaacatttcgagttatatatgtagtttgttttagtgctatgtgtatctacatagtgatttgtccattgacatcaagatatcaaatgagtttttcttgtttgcaggtcattgcttcagtctcggtctatcacctctgtct

SEQ ID NO: 50013 - DNA, 601 bp, Ricinus communis
  Intron number 2 from transcript 29641.m000386 (locus 29641 .t000011) derived from phytozome v7.0 (chr-ID 29641; pos 6 4741 to 65341 reverse strand)
gtcaatcatttacagagcttactacaagctcttaggtaagctacagtgcttgtttgaccctttgacttatatcaagcgcttttgtatcttggaaatcattttttgttgcgtctgactgttgcattatggttagatacagtctggtgccttaccttgtccattcatttgaagtatccaagtttcttatagaggaattagctttggtgtctgcaggtcttctgacgggctaccattaggatttgttacatacataatgtaaaggcattgcatcagatagtggataccttaggatttttctagcagctagtttattgaagaaattgaatgtctgttgaagacatagataattattagtggttgtatggatttacagtcttctataagggccttatgtatttagtcataatataattgattactattatggttctcttctgaattagattctggtcattaaattttgttttaacttaaagatgtttttttgtggaatttgtttataaattagagcttctgcttgccatgtttatccattttaacaaatgtatattaactggtccttttctccttttcctttgatcgagagcagcaaagttacacc

SEQ ID NO: 50014 - DNA, 744 bp, Ricinus communis
  Intron number 1 from transcript 29799.m000638 (locus 29799 .t000016) derived from phytozome v7.0 (chr-ID 29799; pos 4 91858 to 492601 reverse strand)
gtgttgaggtgaaatctctgtgtctatctattgctgttgttgtttgttattgtttttatggattctcaataccgtatttgtatgtttggaatgtgaatatctattacatgaattccctgtcggttataggaatcatttagctgcagatttgatgcttttagattaaaatttgcggctttcaagcctaatttcaaacccttcagaaacataaaacaaataaataagctagagaaaataattagaacagatgcaatgaaattatgttaagtaggatggctattcttacagttgtcaactaaatcttaagagaaatggcatactagttgcagatttcctgtcataggtgctttctacataagcttaatggaagaagatttagttggtaatgcgtatctttgtgattttggtgttactccattttagactatcttttaaatgcaacatcatgctcaacgtttttgcctttctgtgggtgttttgcacattcacttttgatgtatctaaataattatatttccttctgacccattacactatggtttattattcatgtgtcctgccattgttttcttattttcggtattgattatttagcttttcagtgttaaaagtggtcttctactgtcatgtttgctttgttgttgttttctcttatgtagctccagcattggttaacaatgtaaaatttttcctgatcccatgagtgtaattgtttgtgacatttaggtagctgacattaagaaa

SEQ ID NO: 50015 - DNA, 992 bp, Ricinus communis
  Intron number 1 from transcript 28052.m000040 (locus 28052 .t000001) derived from phytozome v7.0 (chr-ID 28052; pos 3 4677 to 35668)
gaagctggcgtgccttgccagctaaagcaggtgcttgattctctccatataagttcttttgcctcagaatatatcaagaaacatataattaggtttagttcagtgatgcagactgttaagtttttgttatctcgtgtgtataggtcttcaaagatgtggaaagagctgcaggcttagatggactaattatctaagaccagatatcaagagaggaaagttcagtttgcaagaagagcaaaccattattcaacttcatgctctcttaggcaacaggtatattcaatcttctgctacttcttttacaatcaatttcatgcccacttctgctgcttctttttcgtgcttccgaaaaatctattgaatttatagtgtttagaacattttattttatccaaatcttttccccttgaccaagaatatcttggatggttgaacactgttttcttggttccaaagaaaaaagttattaataacttttcgttgactattagagcaaaactgctgttactatatataatattagtatgattttgattttaatgtcatagccttttaattaattatacacaactacttattactcttatcatccacttgattaattcatctctttggcctacattttgaactatatagtttctgctatagagcattatttattattttctgacatccaatccattttcatttattgggtatctctaaatgtatttcttttttttttttttttaccttaatatgacaaaggaaatgagttcttttttttttttttgctttgccattgtccatattatgcgttgaaataaggagcttttcttgcatagaaacatgctgggagatggatgatagattctagggttttctagttttctttatttttcgtttaattataaggtatttgtctctattatgtctttgttgtaattgtttctgttgttgtcttgtcttcaggtggtcggctatagcaactcatttgccgaaaagaacagata

SEQ ID NO: 50016 - DNA, 517 bp, Ricinus communis
  Intron number 1 from transcript 28565.m000334 (locus 28565 .t000012) derived from phytozome v7.0 (chr-ID 28565; pos 6 4669 to 65185 reverse strand)
gtcagaaggttctcaatactggttctcctatcactgtaagtgtttcttttcttcttcttttttttttctctttttttttttaatttggggttttatttgtttttgatctgatgatattggatgtgacatttatgatctttttcttatattgtttcgttattttaagttagggaatttttagatctgatctttttgtgtttacattttttggaactttgcgtttactgctcttttattgatttttctgcgatcagtttattgcgtgaattttttttgtgctgcacttattgtttagatgattggcttaaggatgttgtttccacaatgctgattgattaacttcataatatttgtggggttttgactttcgagtaaaattcactgatggtttttttattcatatttgatggttcttgcagtgatgtggctatagaaatttttatagaagtggtaaaacctaaagctgatttttgttttaataggttcctgtgggtcgggccactcttggtcgtatcat

SEQ ID NO: 50017 - DNA, 1003 bp, Ricinus communis
  Intron number 1 from transcript 29790.m000835 (locus 29790 .t000030) derived from phytozome v7.0 (chr-ID 29790; pos 2 73245 to 274247 reverse strand)
aggggctttgatctgcacgtctccttacccacgtattgcatttgttccataattgtatcatctattacttgttgtgtgtgtattataaactccctaatcttgtgtagtgatctcacatcatggtataaacagatgttgcgactttgttttctgtttcggtattttcattcatgggttatttatgattttttgtttttttttgggtttgatggatctgcaaatgtttacgatattggaaaatgagttatattttgcatctggctagttcatatactccatagtagataaactttttgatttcttgttcttgtggttgaggagaaagtggtttttgagccggattgaaatagcattcaaggtttataggtatggctttaacgttgctttaggagctcaaatcttgtgttgctgactttaaattttatgactggaataattctgtgattgtgattgagtggccttgacttctttcttgttctgatttcaaaatatttaggtcatattttcaggatgaaattagctaggaaagaaatgataatttcaaagtttaaagtgtagtagaggagtttagttaaatgtactatcttcatgtttaaggggaaccgaaaaggtggcttcaaactcagttttcaagatggtttggccactcaatagtcttcatctcatctgtaaatgccccattgtttgtttgtataatgatatgcttgtatagttgtttggctaggaattacagcctctttgagggttgaaaaaaatggtaattatgctggaaatctatagctgaatgtatatgccgcaccagacaaagaaagcagctcgcaaaatatgctttgtttattgacaaaaattcagcagttctcaatgttttattattatttttatcatgcttttgttcttttgaattgtatggcaataaaagttgcaatttttttctcctgtttgttcatctatttgtatatttcttacaggctcccaaaagaggtgtgaaggccccagtattggc

SEQ ID NO: 50018 - DNA, 761 bp, Ricinus communis
  Intron number 1 from transcript 29648.m001999 (locus 29648 .t000086) derived from phytozome v7.0 (chr-ID 29648; pos 6 29813 to 630573 reverse strand)
aagggtcaagaacttcgattccatcttctaccttggtgggtttttaactcattttcttctaaaatttttcttcctttggtttctgggtaattaaggaaacttaaagtaatttagtgggtccgacacagaatttttgtttttgatcaaatttttgcaatgcacgtcgttttgttacatagggattgtaatgcatgtctttaggtttttgataaattgataatccttcggagaagtagagaaaagttgtctgattcttgggtatgataaaccaagaatttgaaaaatgatattcgacagaactataatactataaaatgcataaagaaaatcctaaatttagttaatcttaaaatgtttcttgaatgttcatcgtatgcttacttgcaggcttgtactgttataacatcgagcatatattggtgcctgatatggtattagttagttgtatttatgtggaaagttgtcaggtaccaagaatgtgttattaactgaatttcacagtgaggtttctgtaattgaggaagcattccaacatgttacatgaatctacttgaatcattattattaaaataagtaactcgcgttatttatagttcacgaatatgtgctatgaaatgcctcgtatgtcagtaattttaatgaccatcttaatatttcaatttactgtggtgctgtgtttaaatttgaaactgggttgttacttttcgttttctgagaaaatagtgttttctaattaaattttttatttgtgaaaaggcacc

SEQ ID NO: 50019 - DNA, 719 bp, Ricinus communis
  Intron number 1 from transcript 29736.m002039 (locus 29736 .t000035) derived from phytozome v7.0 (chr-ID 29736; pos 2 76586 to 277304)
agattgcccagtcaggtaccttttgcatttatttcttgtttttcctttgcgggctaaattaatgcaattaaaaaaggtatacttctcgctgagaagtaattgaggaacgcctttgattttatatgatacattcggagctaattaaatgcaaattttgttattttttttggagcaaaagagcaatttggaatactcaactaaactcaactgagccttaatcccaaccaagttgactggggttgttaaatgctcaaataacttacttttaataattggcattgtctatggttagtttaacgggataaatgcaaggatataaaaactaggatgagcttatgtgatagtaatagtgagtgagcagggtgtactagatgccaaattgtgaccatagccatatgctgtattaagtattatatggtttggcaaagcagttctttttggtcagccgccatgcttttcagtgttaatttttggggcactttcttaattgcaaagttgctctgcttgagatgtatggggataaatgtgaaaactcaaagttggaatgcaaattttttttttttggttagcttttcttttttttttggttagctctgtgtttctgctttagttcacttattgtaaaagcttcttctactttctcccctgtattgtataatctcattaactgtcatctctcctatagcaggcaacagaactgaatcaggttgatattccac

SEQ ID NO: 50020 - DNA, 650 bp, Ricinus communis
  Intron number 2 from transcript 28152.m000892 (locus 28152 .t000021) derived from phytozome v7.0 (chr-ID 28152; pos 1 13654 to 114303)
ctggagaatcttatattgaatcaattccatttcaggtgtgtattttaaagatttgatttttgaacgtgtaatggttttaatttttgtttggcgaaaattaggtgtgatattttttaatgtgttgtttgagacttaggttaaaagtattaagaggaactttattgaaaaataaagctgacaactttgggatttagtttctttttttttgtatgagttaagagtaatttatggtgtggtattggaccagaaagttaatttttcactgatttgatgtgtaattctgatatttttcagttgttgtcttgtttgttgtaagattggaaaatgataattatacatgtttaatgaatgtagtgactgagaacaagaagagaaaataaattgaattatatgcaatcccaaatggtggggtctgtaggaagatgctggaaataattgatcaaacaaaattgatgtatcaaattgctaataagtaacagtctcagttctctaatgaagtagcttcttctgttaaagataatggaaatgaataggatatgatgttttatgccaaagtagtaattctttttgtgacttattttagttgtaatgttggtttctgattttgggtttcaggttttaagctggaaaccaagagctgtttattttcc

SEQ ID NO: 50021 - DNA, 624 bp, Ricinus communis
  Intron number 1 from transcript 29673.m000936 (locus 29673 .t000037) derived from phytozome v7.0 (chr-ID 29673; pos 2 72109 to 272732)
gtcgatttgttcaaggctagagctgctagttggaggtgtcatactactattgctactgtctactcaatttctgtatttttatgactttgtttcatttttttgaattcttgaaaatatatgtcacttttgcatgatttcatttatctaacaactccttttacaaaagataaaattggaagaagtgagttctagcaattctatttaataattttttatatttcaaacagtgacatgattttacaagaattcaaatcaattcaattctgcatatgagttgctccaaacaacaggcctgtgtaaatataatgaaagattgaggtgctgagctttagaatcatgaagctaaagtgttgttgataattgttcttttttatcatttcatataatgtttaatccatatgctaaaaccgtagaattgaagagtacttttaagaattttctagtgtacctggaattttgaagagtttttggagtttgaaggattttcttttctcattcttactcgaccaaacatggattatatatggtttctttgagaaaaaagaatcgcatgaaaattctaaaatttactgataaatttattgcgcagggatacgcttcagatcaggctgggtccaaacttac

SEQ ID NO: 50022 - DNA, 611 bp, Ricinus communis
  Intron number 1 from transcript 29693.m002083 (locus 29693 .t000121) derived from phytozome v7.0 (chr-ID 29693; pos 8 17469 to 818079)
tcaagctaagagaacaagttgccaagcaacaacaagtaaattctttggcttttaccctttttccttacttcacttccttgatgcctttgcttctgctcgtttgacttttcctctaagttttgtttgttttctgagaaattttttgggaatgctttaattcttgctgttttgggatttattcttttggtaactaaagagagaagtaattggattgagctgaagtatgttgactggaatcagagtcctagcttttagagaaaatgagctgaaagtaaaagagaaagagagggtagttaattgttattctgtaagctatgtagcgattatgatggttttagattgaatcaagatgttaaaagtgagataatcttctttagaactgccggtatgtgtaacttactctacatagtaatagattcattagaagcttaaatatattaagttctaatgattaagaatgttgtgagagtatccagcgaattactgaagatcatatggtgcaactctttttttggtcaagctgacattgtaatgtaatttactattaaatttatttgatttatagaattttgggtttcaggctgttataaaacagttcagtgggactggtt

SEQ ID NO: 50023 - DNA, 850 bp, Ricinus communis
  Intron number 2 from transcript 29693.m002083 (locus 29693 .t000121) derived from phytozome v7.0 (chr-ID 29693; pos 8 18137 to 818986)
tggagaaactctataggtcaactcgtgctgggaaggtgaggatttttttttccacttcaagattaaagattgatgctagagttatcttctcttgttgtctttcactataaacagcatctattactgtgtcaatatgaaatctaacatgctaaaattagacacattaatgtctagctctccatttagtgaaaggagtttcagacttcagtgtcataataagcattacttttggggatattgagatcacttctttgagtcttccgctattactcgtgtcgaggcctgatttgcaggaaagctcagattgacatatagcacacaaggaaatataatgtgtattagcattctaatttttgtggttcaaggaagtacttttcatctctttgtaaaattcaaagtaccgttgcttggtcgtcctattacagacttttgtaattgcaaaactgatttcatttacccacttggcgaaggtattttcttactttgtttgcaatacgatatgcgaggattgaggtggaagatatgacacttaatatgtaggttgcgtcacattgctgtttttgattgcattagtttcaagaaaaaacaggatatcaagagaatgagacatttttttttcttttttttttttaccattaaaagaatgattaaatattttgcagaatgtaacttttcctgttgcccttagttcacttaccccaataaattcctctcttggttatataggatcatgaatatgcttctattatttccctttcttgcaaatttcttatgctttactgctttttaattggctataatactctttgttccaggattttcagaaagatattgttaaagcagcagaaac

SEQ ID NO: 50024 - DNA, 759 bp, Ricinus communis
  Intron number 3 from transcript 29706.m001350 (locus 29706 .t000080) derived from phytozome v7.0 (chr-ID 29706; pos 6 65707 to 666465)
cgatcctctcatcagcttaggtgcaaagtaagtaccaaacacagcgcatcagatattttcttcttttgatcttcacatgattatggcataaaccagaacttggatgaacgttagtaagaagcaaacttgattgttgacattgtttaggccatttagacagtactctaagcagtttactgtgctgaaataaagctaatttgtcacattaccaaatataaatgagaatacaaggggttatgcatgtttgttttctcatgcttatttatgttttttccttgtctactacttagatttatattatccttttggagaaagctcacgtcctttgtttagcatgacttgaaaacattatttactctacagaacttcatttagggagagcaagcatctgtcacaaggctgaaaggggagatcttatagttatttatttctcttgctttcccctattgcagttttaacttgatatttaaaactcgataccattattgacgcttgttcttctgggatgtcatggtaaagcaaggttgtgattgtgcatcatcttaacataataacatgaattcagagaattactttccaaatttgattacacttgcttcaccttgttaaacttcatataccacaaagctagctaggtgttgttgctcttgggctttcatctataatcattcacaattgaatctcagagagaacatttcacatggatagttattcattgatgcagatatagaccttctcctgaagaagtagctgctgcct

SEQ ID NO: 50025 - DNA, 861 bp, Ricinus communis
  Intron number 2 from transcript 29634.m002150 (locus 29634 .t000096) derived from phytozome v7.0 (chr-ID 29634; pos 5 83532 to 584392 reverse strand)
tctctctaccttctggggagcttcttcttggaaaggtattattattctcctctggtgttcacattttgtttctgattatttccttgttgtcttcttgcatttttgctgttttatttgttatatttgtttgtataatattattgtgactaaattgttttgttgataagagagaaagagtttgtacttcctagaggtgtcaagtgagctaataattcatttcgttttgaaaattgtattgtgcaatagatgcaaatgaattctattaaggcctgtaattttagtactttatattcgcagagagagagagagagagagagagagagagagattatcagtaagctgagaaatcatgatggcatataattacagtataatttcagtggtaggccattcatttgcacattccatcaatcttgatgtaatttttttctccattatggtgaaaaaatttgtagaattaaaaatgatttccttattagtaagaggaattgatttttgaacgaatttcatattgctatcatgataggctaggaatgcatttgaattccataaggttttaaaagaatccttttgtactgaatgctatgtaatgctgaatgacaaagaaaacattttaagaatataaattaatcacagtttgtgtctgtgaatcagaaggtctgtaatttagttcttgctatgccactgtataatcaaatgcaaagaaattgtatttgctgatatattgtccatgctggcagctccactttatgtgattcgtcatttttttctattatttaacaatacatgcaacaagaaatttaatgtgtattttctgctgccttaggagaatattggggtctttgtggaccaaaacggcaa

SEQ ID NO: 50026 - DNA, 788 bp, Ricinus communis
  Intron number 1 from transcript 29588.m000853 (locus 29588 .t000008) derived from phytozome v7.0 (chr-ID 29588; pos 4 3406 to 44193)
accttctatctattcttgacgtaagcattacccatttcttgattctttttgggttttttttgctcaaggcatgacgattctgttacctgtacactgttaaatgtttttctttcctttttttttttttttttatcgatcatatttgaattctgctttctagaaatgttatctttctttttgaggtggttgggtataaattagaaaaataataaaagaagaaccgtgctttctctgattattggttaaaatcttttgatgtaaagataacccacttgcagttctagcaatttgcggtatttattgattcttttagttgtattttgactagttttgctaattggcattggggacactttaatatgactgctaacgaatcacgaaagttttgagattgtatgctgataatgattcataaatacatttgctggaaatgcttatgacgcaaattttttgcttagaacaaaaaaatggcaatttaaaaaaaaaagattctggtttagagagagagaaatgcaattgttattgtggtcctgatttgtggtgcaagctttaatttgaattatttattctgaagttctctttgcatcttgtatacttatttcacttttgttatgtgatagatttgctttgcattttctttatatagtattattttaatttttatttattcattaatttttatttatttgttttgcaattggttttgatactgatgtgtgtagtctcttcttcttcttttattatttcttctagagaattgaggtttctctgtcaaaggtgaatcaatc

SEQ ID NO: 50027 - DNA, 223 bp, Ricinus communis
  Intron number 1 from transcript 29692.m000541 (locus 29692 .t000024) derived from phytozome v7.0 (chr-ID 29692; pos 2 53035 to 253257 reverse strand)
gggtggaaggtttgttttgattgcacgtgatgaccctattgagcttaaattttgtgacataatcttaagtaaataatgtttttcttttccaataacatataataaaaaacaaaagaaatttaaatgagactcaaacctgatatcagctttagatgatgtttattgacatttggtgatgtgggctacagctttcggttgtacacttatcatacttattagaaga

SEQ ID NO: 50028 - DNA, 838 bp, Ricinus communis
  Intron number 1 from transcript 29667.m000349 (locus 29667 .t000006) derived from phytozome v7.0 (chr-ID 29667; pos 1 36304 to 137141)
cagctgttattgagttgaatagaagtgttattcaggtgactttttaactatggccaataactttattttttcgtgtactttttagcttcgattattctgcatttacccagtatcgctgactgcaaaatactcgaggcatgttttgtttgaacctgtgcatttgagtaagaatgataagggtcctgcattgtttatttaatattgctgcaggtatatttcaacatgtcagtagcttatgatggtcaagatgggttgcaaatggtgacttgttcttaattccatattcttatcaaattaggttaaaatggcaccatgctttcttcctcttaagtatactttattttgtgacatgagtcagattagatcatctaacaatatgatggcaagaaatttcaccttggttgatacttatgaatgaaacagaaggtcattattaacgttttttttttttatttcatctaaatagttatgcagatatgcagactttaggtaattcttgtttccgcattttaatagattcttctaacttatgcagctaaaggaactggcaaaatattgccttatcaccaaattatcaattacatatccaaattatgggtgtaagtgttttgctatgtttgttgctctagttatgagaaagatgcttggtggttctttatattgataatggaccatgtgatcagcagttgagatgttaaatgagtctttagtccataagctattttactacataagatttggtttggtgtctcatcttgaattcaacttgtttggacattggcctcattttaaatttatttcaggcagggggtgctccctcgcacagtgttctatctgc

SEQ ID NO: 50029 - DNA, 860 bp, Ricinus communis
  Intron number 1 from transcript 27538.m000317 (locus 27538 .t000004) derived from phytozome v7.0 (chr-ID 27538; pos 2 4414 to 25273)
cagacccgcatgtaacatactctctctctctctctctctctctctccctctcccttttcctcgagatttcagttgtttttaaatgatctagaatcgatttttttatttttcttttcttggctgttatattaatttttgaaacatggtttttgctgtttatttttgcgtccttgctttcaatcctgatcaatctgttacttggcttcactgttttttttttttttttttggttaattgaatgcattactgttttatgtgcccttttgtgataaatgaattaaaatatcagtttttgagttgggtttttgtagaactcttttttttttttctcttatttttatatgcagtgtgaattatgggtgcatgcaatgtacttgattaattgtgttttgaaggtgtgtcttttttttattattttctttcttcaactaattttagcttaggtgcgttatctaattcttttgaactttaaagttatgttttaaacatttcttttcctcatttgttattgcttttgcttatgctttgattagattaatgtcggtttttatatcatatgtatttatattatgtttttctgtgaaaccttctcatgccaaagatatgagtctttttgtagctgctgcaagtcatgtgattgtgtaattgtggataaataagcgcttgccttgttctaattgtggcataatttaaccattaaatccttctgcttgcttcttcaaatgaatgtggacatgcatgtacattttttattattaactcgctggaaattacatacacagagatatgtgattgttatgatttatgttaacagtcatcaagtcggttatcacttgcagatttcaggactggtgctgtca

SEQ ID NO: 50030 - DNA, 677 bp, Ricinus communis
  Intron number 1 from transcript 29755.m000435 (locus 29755 .t000010) derived from phytozome v7.0 (chr-ID 29755; pos 1 90059 to 190735)
ttcggaggaccatatttggagtatcaaattcgaaggtaattatttctttcttatgtgatttttattctatttatattttgagttgaatatttttgttctttttcacagttaagttgaagaacataattcctcatattgaagagcaagaaaagttgaaattagatggctttttttataaggaaaaagagaaggttgttgaggcagagaagaaagattttgataatgattttgaagaatttttatatcattcttctaaatctagagaagcatttagttcgaagtagaaaaaggataataattctttagagaattttgagaaaaagttggatttgattgtttctgagcaaaagatgttaaatatagagtaaaagaatatagttgagaattttggctcattgaagatttagttagaaagacaatttacttctatttgttttgaatttgttatcatggttttggttctaaaattggtggtagagatgttgttttggagtgttttattttttattttatataattactatgtattttttatatacttaatatatattcaatatatacttagtagctacttatgatttacttcattttttttatttttcatttcacatccaataaaaatgaatgtgagaaaattaatgatagtgaaggacctgagaagaaagatcttgggagtg

SEQ ID NO: 50031 - DNA, 810 bp, Ricinus communis
  Intron number 3 from transcript 28405.m000015 (locus 28405 .t000001) derived from phytozome v7.0 (chr-ID 28405; pos 7 415 to 8224)
tggaatacatccgatttcttcacgaacaagttaaggtttggctttctcttttttactttactcccatgatcctagtgggtaacctgttactaaattccaattttggaaccatgtcctaactggaatgcaaattatgccatggaaacattgttgggcgaattcatttttatctagtagaatgcgtccccattggtttagctgctatgtttttgagcataagctttggctaggtactaatattatacccctgtcattcattgtggtgtaaaatctgcgtgcatcaaatgttataaaatgttgtgtcaagtagtacttgttactgacatcttatctggaattatactatgttctgggctgtagtatatattaaaatacttatcatcttgccaaaccacaggaaattttaactgaaaaattttttgttggctaccatgtgggacttgtgtcttgtagacagtttgattccaatggacagaacaacagggcatgaccaatccagaaactgactattagctgtttggttggtctaatctaattatatccaatgagacttcttaacattctgaaatattaaattaggcaagcataaaagatagaatttccttagtggcctaatttggaagattaacggctataaacatgcaaaataatatttcaacaatattggtacttttggtagttaattgatctgttggggctagtgtacttcattgcttttgtcttaattttcatgtgcaaactttgatctctgaaactttgccttgggtgatttcaggtgttgagtgctccatacctccaaggtgcaccaac

SEQ ID NO: 50032 - DNA, 492 bp, Ricinus communis
  Intron number 1 from transcript 29751.m001904 (locus 29751 .t000119) derived from phytozome v7.0 (chr-ID 29751; pos 7 17126 to 717617)
ttctgtgttcgagggtattgctgttggagttgcaggtacatgctctttttcgtggggtgttagttttttttcatatacgtatattgcaagtcagcaacatttgctttgcttgcttaggtgtaattattgtttttcttcccaagtaatataaacatggaggctttcatgtaggtaatttggtgctgagggtagctactcatataattgaaagtaaaactatactttaattcaaaaagtaggtatatttatttaggaccaaactatagtaaatttcttgatgtcaagaattaatcacacatacatgtgttgccatgtttcatgtttcatgtttcatgtgccatgcattttgcttttggttcagcatagtttagctcaaagttaactactagtgatttaattttcatgttttgagagaaagtgatgactagtgagttttgcacctttcgttttctgacatattataaatgtatggtcagcaacaaaggcagaagc

SEQ ID NO: 50033 - DNA, 599 bp, Ricinus communis
  Intron number 2 from transcript 28162.m000123 (locus 28162 .t000001) derived from phytozome v7.0 (chr-ID 28162; pos 6 602 to 7200 reverse strand)
cgatccaggtgagtctctctctctctctctctctctctctctctctctctctctctaagtttatgtattttctaagtaataactcttaatgctgttagcatttgtaattttttttaacctttaaatctgtttacatttctggtaaatttgattcaccttgatgtgtatgtttctcagttttagagaggaaagtttgtaattctttttagttattaactaagaccttgttttaattttattaacgtgcagttttcaattcaattttagtctctcaaaattttgttattttttgcaaggttttgttccgttcaaaatgccgtttaagccgaaagaattgaattctagctaaaatgagcttttaaacaagaaaattgaccaaatcgaattgaactgaattcttgcattttatacactttccaaacactacgtaagtgatttctatctcatgctagaagaaaacttgggacttttactgtaaatgttatatgttttgctgattattttatcagcatttctcataatttgtatcttttacttatttatgaaaagagctcaattttctctatgtaatttatcagaaaaggagaatttgtgtttgt

SEQ ID NO: 50034 - DNA, 373 bp, Ricinus communis
  Intron number 1 from transcript 29738.m001039 (locus 29738 .t000041) derived from phytozome v7.0 (chr-ID 29738; pos 3 14145 to 314517)
gtacgctattttattatgttgtttgattaattgatcgtactgttctatatcgcaattagggactattctatttttctggtcgaattatcatggttcgttatatctttcttatagttagggcttttattttctttgtttgaaactgattagatattttcgtgatcgtatatgatatcatattttcgaaaaaagaaaattgcaatcggttatttgagctctgtttttgttgctcgaatcaatgatataagcactgaatactctgtaaattttctatgtttttcttttccttgaaagagtttagttttaatttcatatcttgttttcgtgaaaaactgcagtcttcattagcagcagcaagagcagataatttcta

SEQ ID NO: 50035 - DNA, 882 bp, Ricinus communis
  Intron number 2 from transcript 29738.m001039 (locus 29738 .t000041) derived from phytozome v7.0 (chr-ID 29738; pos 3 14591 to 315472)
gcaagaaagatagaccaaggcattttgattattaggtatctcatcttatcacatgatttaaattcagattttgatggtataaattccacccagtagttggcggtcttgggggttttaaatttttaaatgctgcaaatgcaattagtggtttttgaatctttttattcttgtaagactaatttagaattgcacctcctgggagattttagtttgaaacttctggttaagtttatttatatttatttatttaactaagaagaagtggaagctaataaaataaatgcatcttgctttttctaaaagaagttaatgacagcctgagcaactcaaattcaaaaaattaatgagtttcatatatggtaatatgttctatttttaataagtataatcaagcttatgttaggtgacttgaaaaactatgaatgggtgcatcatacgttttttgatttaattgattgtcacgcaatacattttccatccagtattgtgaattggctttctgttggacagtttaggtttgaaatgctgcattggcaactacaatctccattttcttcaaaggttaatttagatttacataaatggggaagtgttctatccttattaggggtgaaggttaagctagtgtaaaggtgagtgtttggtgatgaagtcagaaaaaatgaaaatagaaagaatgagagtatcatgttttttagctttcataaatcaattgatcatcttagctacggaagcatacaaggtgtattttacaagtgaacgttttgttttttgttgcaagctgctaatcttaaaaaacttctcgtaagattactatcttctctttacctatttggattttaatacctgcttcacatataatttctggtcttcaggttcgag

SEQ ID NO: 50036 - DNA, 609 bp, Ricinus communis
  Intron number 2 from transcript 27389.m000067 (locus 27389 .t000002) derived from phytozome v7.0 (chr-ID 27389; pos 1 5932 to 16540 reverse strand)
ctcctgttgagcattttcgccacgcattacaacaggtcagttgttgaagattataactgtatttgggaagtctaaaagttcaagcatgcaaataaaatatggtttgttctttggtttgttgaaattaaattctttctactgagaaaaaagaagaagaaggagaagaaaaggacataatcttgaaagaaattgattcaattgaaccctattatttttgctccaaaagaacttatgagattgtagtcttttacatagagtttgttgttcttaaggtcatttggctaattaaagcaaagcagttttatttaaaatgtgtttggatcaaatgcttgtaaatgaagctttgacttttggcttaagtgaaatatagaccaagttattgatgcttgtgaggaagtctgcaaggattcaagtttagagagattttgttttaaattcaaaataaccacatgaacttatggttgtttaaatgaagttaggctagatacaaagtgacatactgacgcagttactagtaagattagttgttctgttgaatattttaatgtgacacattcttgtgatcactagtcagggctgtgaaatttcaattaaggagctggacaccct

SEQ ID NO: 50037 - DNA, 297 bp, Ricinus communis
  Intron number 4 from transcript 27471.m000407 (locus 27471 .t000007) derived from phytozome v7.0 (chr-ID 27471; pos 4 9865 to 50161 reverse strand)
tctcctcaacccaaacttcgcagctcaaaactaaagtgagttgttggttattcactttcttgtgcttaatgacttgggataagtttaatttgtgaatttttattgtcttcttgatcaaaagtttgtattttttggtttttctattttagtttattttttgaacattacaatgtctaggacttattatatctagataatgatagatagtttggattttgaaagtaagtattatttgctaattaattaatttatgattttttagattcacgaagaccttgattctgggaaaccatccat

SEQ ID NO: 50038 - DNA, 678 bp, Ricinus communis
  Intron number 2 from transcript 27504.m000629 (locus 27504 .t000021) derived from phytozome v7.0 (chr-ID 27504; pos 1 53307 to 153984 reverse strand)
ctttgtttgtcagctataaagactctcttggccaggtaattattgactaattagaattcaatttaactttagagtttccaaacactatgctacagtacggagctaaactgcattctctttcaagaaattgattgaatgcttcattggaattgggaggtcagaattcttcacacctacagtgaggccaatcagtgtgctgattggttggctaatatgaacttaagtctgaatataagatgtcacgtccttttggttttgtaatttttaaattctttaggcctatggcctccttttgattcaaacagagaaagaaaagaaaaattatgtaattaatgtgttatcggtgtagaagttatgaatctcaaattgaggatttttatctgtttctagcacaaacaacaacaaaaaatttttgaccatattttgtcactacgttggcttcttttagtttgtttttcttgcagggttggcaatgtgtgaaattgcttttattattattatctacatttcaactgtagttatacatctaattaaactcagaatgtaactcagtgatttcttttgccgctaaaatcaaaatttaattagctccgtaatttattttattgctatatcctagagacttgttttcggttgcttgcagatccagaagtttgcgttgcgattttctgtgatttc

SEQ ID NO: 50039 - DNA, 955 bp, Ricinus communis
  Intron number 2 from transcript 27860.m000040 (locus 27860 .t000001) derived from phytozome v7.0 (chr-ID 27860; pos 4 700 to 5654)
cttttgctgctgttagacattttccgtggaaggaggtaaaaatccatcttattatctaaaattcaatccagggttgtcgttttctcgtactcgagaaaattttcaaatagtaatgagactgtcaggagttggatcctgacttcttgcagtctgctctagtagaattactgtggtagtttttggttattgtccgcattgaaattctcctggttaggtttcatagacaggtagacaatataattccatgtacatctggtgacaggaacatgacaataatgcaatgggctaatttagaccccatactgaataaatccttagctttcatcatttcaaattttctgctaccttactgtaaccacaatataaatatggatgtggattattgagaaagaaatattatttatttttggggaagaaaattaaaaaaaaaaaaacttattaattatagatagggaaaagggtattgatgggcacatgtatagatataattgattcccttctaactacactcataaaattggttgaggaatgaaccaaactagaagtccaaacagtttaatatatggattgctattttacaatataattttaaaataattgctcatgcatatgttcttttattctttgtttaatagaaaattatccatttgcagatcatctatttaaaactatcaacttgaaccattttttttatactttccatcaatgaactccataattctagagcgaaatgacaaataaacagttagaaatgagaagggttagaatcaaaattgaacagtaattggaataggacactaaatttgatatcaaaatttgcacaaacatagagatttataaaagaaaaaaaaatctctttaggcatgtgaaagttattattatattctattcatggttttgttatttttcacttcaaaagattaaagaggttgaattttgtttcaggtaccatatt

SEQ ID NO: 50040 - DNA, 571 bp, Ricinus communis
  Intron number 2 from transcript 29706.m001328 (locus 29706 .t000058) derived from phytozome v7.0 (chr-ID 29706; pos 5 24007 to 524577)
cttttcttactcaacgttctaatattgacctcaaggtttcttcttctttttatgtgttttctttttctaatttacctttctttttcttcttttttttttttttttttttttttttcttttcccttcttttcctgttttcttcaaagactagtgaatgcattttctttgttaagtttttaatgtcagttttaccgtttggtttcttggagattgctgaatttatcgtataaaattacttggtttcgtgtgagatgttcaggaatttatgggattttttgttggtcaaaaaccctaaatttaccttattgaactataagttgtctctgaactgaattatttaagagataattagtttggcatggcaaaattattgttgttttttcttatttaatatttatttagagcagtagaaatgatgttaatgcaataaaagctagctttattggcattttgaaaaaaaaaaaaaaaagtcttgcaatgcttataaatgtttgacttctttttgtttaagttgccataatgtagcattagttcatggaagtgcatttgcttgcttgtatgcgcaggacaa

SEQ ID NO: 50041 - DNA, 869 bp, Ricinus communis
  Intron number 1 from transcript 29794.m003307 (locus 29794 .t000006) derived from phytozome v7.0 (chr-ID 29794; pos 3 7256 to 38124 reverse strand)
cctcgagctctgcccactacccagttgttctcaaggtaatctttcttcttcttcttcttcttcttcttcttattggatattgaagtttgtcttctcaagataatcaatcattttttattttccccttcttgttgttggatatcgaactttgtctgcgtcgctctctgtcctttttttttttttatgggaaagcaacaatctttctattggttcaagtggttttctgttgtgtttttgtcttgctcttgaggtatggagtttacatgttcgctatagtttgttcttaacacagtttgaattaataaataagttcaatataaaacaatccagatgaaagttaatttgttgttcctttgcccgcacctctgcagtcttgccgtgtatgctacttctggttcctattttttattgattttctgataatgttgacatgcttgaaactcagatggaaggaatgtgggctctttccgtattttgtagttagtgcccagctttacatggtagatcttttatatatgtttggactttctgatgtgtctacaaaaatgaaagatgtccctttctctttgcgaaattaaggactgccaggaccaattgctggatttcttgcattttctgggtgacttgacaatctgtatacgcacatttttggattcctttgctttgtgaaaatcaccgtcattcaactttcgattgtagtgctttgtctttctctctgtatccctctcacatgtagcctgatacagcctctgaaatctgaatgtaagttcttgctgaagctcagtcataaatacctatttatataattattctgaccatttatgtatttttcaggtgtgtgtgcttattttggagtagatcacctgagt

SEQ ID NO: 50042 - DNA, 589 bp, Ricinus communis
  Intron number 2 from transcript 29780.m001375 (locus 29780 .t000061) derived from phytozome v7.0 (chr-ID 29780; pos 4 59195 to 459783)
agtaccccgtcaccactgagcttcaggcaaactctctttctctatctgatccccttcaacattctctattatattcttcatccaatagtttctgcttccctgcagcatgtacattcatgacaagaaattcataattgttttgtgttttttcaggttatattggaaaatattattaacaataaaagggaggaatataagaattaaaaagaagatgcaccgtgtgattatgtagtggaatttttattttatttgatgttttggttgaaagatgcgaaatttgtctttgtagcaaaagtcaaattcgcaagttctttgtcaaaattttcaattgcctttgcatttgcgagtgggtcctagtaaaaaatagagttgttttactgctataaactagacacagccacagagaattgaccctgtttaagatgtcccagggtgaaaattcatatgcctaatttgaaagatggaaaaaagaaaaaaatctacttaatcatcgatttaatgcttacaattcaagataatggattgaataatttttgttgacgtgccaaactaattggtaaatctgcttgtacagaaccggtgcgtgaac

SEQ ID NO: 50043 - DNA, 965 bp, Ricinus communis
  Intron number 2 from transcript 28842.m000928 (locus 28842 .t000023) derived from phytozome v7.0 (chr-ID 28842; pos 2 16446 to 217410)
tttaagatcttgaccccagactcattgttcaaaacgtgataaattattcttcatatttataaaattattattattattatttattttctgtatttataaaatctccctctattctattattggagcaaagctgactgtgtgacatcaatataaagaaaaaagaccattgagtgattatgctcttaccacttattctaaagtttgtaaaaatgcacaaaacatttttaatgtgatatttctttccaacaaaatttgaattcattttctacttttattaaaattttgttacttttttattttatttttcattttctaatcattttttttattgtgtggtgacttgaaaacaagagaatcctgtagtactaccttaattctggcattggatttcaaacatcatgtttttcttgccttgtgagctgtgacccaacaaagcaaaagaagaatcagaaagaagaagaagaagttacttccttaattcttttaactattcttttccttttctttttaaaaaagaaaattaaagaatgcacaaagcacaagcagcataatggcattacaaaaccagaccactgtcaatccttcccaaaacaaacaaacaaacagaacattggttttaaattaaccccacatagaaggtggtttatactgctgtcagaagatgttcaataaatacaagcacacagaacaagtagcaacatattcttatatctgtggtcacccacaattctcatgtttacaaatattttataggtaggccggccaagggttaaggttgacatctttagaatcatgcaacaagtcaagagcatttttattgccatttctttagaatgtcattctcacacatttccatttcataatgttttctactactatgctatcttatattattttgattaataattataccctcaagtgttcaacatagtattatagtatcaatgatttcaaaatcagttgca

SEQ ID NO: 50044 - DNA, 141 bp, Ricinus communis
  Intron number 1 from transcript 29637.m000749 (locus 29637 .t000027) derived from phytozome v7.0 (chr-ID 29637; pos 2 13404 to 213544)
tcgaagcgaggtaattaagaaaaaaaaaagaaagaaaagaaaaacgtcatttgattttatgcgctttgattaactaagttattgtgactgtgaacgatgtttgtttcaggaaggggagggtcagcaggtaacaagttcagg

SEQ ID NO: 50045 - DNA, 698 bp, Ricinus communis
  Intron number 2 from transcript 29609.m000597 (locus 29609 .t000024) derived from phytozome v7.0 (chr-ID 29609; pos 1 80917 to 181614 reverse strand)
tgctctctaagtgcataaaaagtagcgaaagtcaggtattatgtttcgtttctggaatgtgaagtattttctgtttaaacatggctagttatttttattctttatttttatttttttgaaaaaacatggctagtcatttagtgttgccacattttgcttctcttgaaatctggcaattgcaaggagctctccttcattcttataatgagagcatgcagtgatcaagctataaatgccttaattccccgcttctttgaatgtgctatgtacttgcatctctcctgatgatggaaagagattcaacattagattgttctctactgcactagttcatgctttgcattatcacgtccatcacttgaactacctggtgtccaaagttgacatgaccatgttgcatttgtttttagatcgagtgattagagcatagagattaaggtatttttcttccttcttcttgtaaattttctgcatgaatttgaaaaaacataaccctacacaaagtgaattgagggagaaaaggtctattaggaaatgtggaaaacaaaggctgaatataagttataattttgtgttagatgtctctctttaaattggttttaacaatttgctcgcttcttcagataccaatcactacgaacttccaataaagctttcattttaatttcacatcctgccctttgccttctcaaatagtc

SEQ ID NO: 50046 - DNA, 684 bp, Ricinus communis
  Intron number 1 from transcript 29609.m000597 (locus 29609 .t000024) derived from phytozome v7.0 (chr-ID 29609; pos 1 81643 to 182326 reverse strand)
ggaaaggagcaagaaagagagctgaaattgaggtaaagtacccagctatcagaatttactggttttgttatgatcattcagctgtttgtaattctgtggtgattaattgcagttccaaaaactttgataaatcaaaagttgctttcttgcatttcattcacatgcagtttattttacagcagattttcttttttggaaacccttcatcttgaattgctgtagggtttatccaacaatctttgtaaaaaaagaaccttgtcactgtgtggatttatattgcatcagtcaaagagtgagatacccagtaaaggataaatgctaattatttgtacattcttttcaatggctaatccttgatttctccttttacttagatatgatttaagtttttctttagagcaggaaaagagaaaaaaaataaagaaaaaggaaagttcagatcttttgactttcgactactgattgtcatgggattcctttgataaattctgtttgtttcttagaaattgaattgaggattgcttttacctttgagttgcttattttttgtgtagttatgataacattatgaagttatctttctgtttttaaatttatatgcagcctactttattcaatcttcatttttatttttcgagtttaacaagtttgattctgattctttctttgttcacaggtgggagg

SEQ ID NO: 50047 - DNA, 1019 bp, Ricinus communis
  Intron number 1 from transcript 29805.m001532 (locus 29805 .t000063) derived from phytozome v7.0 (chr-ID 29805; pos 2 90321 to 291339)
ctgccttgagatccttgctccgcggccattaccaagtttgtctcttttcttcttctcttcacctactcactctattaccctgtgcttcaattcatcattaatttcactcctaacaaagtgtaagcctttagctaatgttctatcacattttgctaatggatcaaaatgacttctttttttttgtctttttcctttatccatttttgtaatcaactcttctcttaagttccaactattacattgcttagttttcataaaggtaacttctttgtcttaattgctagagtttttttaacctttttataccaaatactattgtactatggatttcaaatcactattcagagctctaatatcagcaatctagcttcctcactaaaagttttggatccttcatccaatttaagttatttgaagtcacatatgaatgtcttcacacacttaatctattatgctaatctaacagcctcaccggatttcccagaaagtttcacaatatattttattcttaattgtcctttttgcttttctattctattttatgtgctagtcaatcagttaccatcaacgccagaactatcagtttatggttcaagttatagatgttgtacacagctctttgatggatttgcagactaacctcattgattgcttcttctttttctaaaaattgactgaatgtcttgttttatatccgcctttgttattcttcctgccatgaaacgtgctttttttttttttttttatattatgttctgtatcgttgttggttaccttttcaagtactgcatcttattcctataaattgtacctcccagcattgcttgtctcttatattatgttctgtatcgttgttggttaccttttcaagtactgcatcttattcctacaaattgtacctcccagcattgcttgtctcttaatattacaatatgctctcaaatttccacatctgtctgtccaaatcattctgatcatgcaattctttttcctcttctctaatgtagaaagtaacagat

SEQ ID NO: 50048 - DNA, 527 bp, Ricinus communis
  Intron number 1 from transcript 28152.m000900 (locus 28152 .t000029) derived from phytozome v7.0 (chr-ID 28152; pos 1 48355 to 148881 reverse strand)
ctcccagctatctttgctaaaaggtcagtcatttttctccggtttggacctttattgctttgttttctgttaatttttagttcatattggaaattattgaattccgaagcaactaaagcaaagtagaccccgactccttgtagttaagcaggtagacaataaatattgtgtagattttgttggaaatggataaatttagaaaatatctaagaggcttcatggtgacttctacctgtgtctcccatgacaatacttgtgagatagagaaaagagccttctggagtacccattccaatgcctaaatcgatagctgtagttttcgaacaattaatgatagcgagtgatagagaagaaactgatctttaaaccgcagtctctaggttttatttataggagttggtcattcttcctcgtattcccatcttgtctttttgttgcacaagacttttaagagttaaaatatcaaagatgatcatgaatggtaagtaaacatacatttcttttactgaaattttgcagatcaaaat

SEQ ID NO: 50049 - DNA, 1069 bp, Ricinus communis
  Intron number 2 from transcript 29598.m000455 (locus 29598 .t000014) derived from phytozome v7.0 (chr-ID 29598; pos 6 2815 to 63883 reverse strand)
attgatcttggctgcctgccagtggagaaactgaggttagtgtttgtcaaaattatagccaagtcatgctcctgctttcttaaaggcacaatctttatgctcacaaagtggcgctcctatcaatttcttcctaaagtacaaggcttttaaatgtttctaaatttctgtagttgtcggcagctaggatgtgtttagtctctgattgacttggagttcatagctagatcaattatgaacttaattattgattggccagttgcaataattgagaattggagtaaagagcttcaaagatgattggagcaggtgttgtccaggtttcttttttattgtttttggcatgcttcgtgcttttctccttcttcttatttgttagatgtcttctctttttactttttgtagatctcttgcatccttccctccctccttttacctgttacttcccttatgtactaattgcataacctttttaagcaaaaatttgttttattagattcaatgtcctttatttgggttcagcgacaggtggaaaaataaagatcaagagcttataatctgtcaaaagcatctttttggtgctgaacacaaataattattgtttttctagctctagaacacgatacttttctatttaccgcattaattccttgctctgtttgttacatggtcttggactgttgctaatgtcatttaacctaatgtgaatagatgtatgtagacgtcaagattacattagatagttttagtttttctgcaggtgtataaaatccacttagtgctttgaaatcaaaatcatttgagtttaacgtggctttttatctgactttgagttggtttggtatatctacactccatgcacatgttatttttgttcgcttataaaactgttggcatcaattaacaagaatcaaacagtcaaatggctgattctgaactttctcatgtataaccaaaaaaaaaaaaaaaaaaaaaagctgtccctggtttgatgttagtatctactcagtattgtgccaacctattggtttatgcaggccagaccataatttacaggatattagggccaaaa

SEQ ID NO: 50050 - DNA, 723 bp, Ricinus communis
  Intron number 1 from transcript 29598.m000455 (locus 29598 .t000014) derived from phytozome v7.0 (chr-ID 29598; pos 6 3931 to 64653 reverse strand)
ccactactatttctttgtgtctccatacgtgtaagttattatcttcttttatttgctttcttaattttactttcctctcattaatttctttaatgattttttttttatttcaaatttttgatccgggcttgtgggttttcctcgaattgctaaatacgatctgggttgttcttactttgtgatttcttgatctggatttctctcaatttcgtttctttcttcataaatttatgttctggaactggagatcgggttcttcttattttacaattttatggatttgacttctagcgtttttgcattatggttattgtttttgttcaataatgtcccaatttttggttctttacgtattactttcttgcatgtgtagattgaatttttgaacctgctctcatgtattttacgtccttgagtttcctttggcgattacggatcagtcttttttatatttcatggatatggtgaacttacgttggtttatagatagtgtcagtgtacttagaacttctttacaatgcatgctttatggaacaatccttaaatgctttctattcctttttgggtgttaaagcatacagaaacatgcattctgaagctgattaatatttggagttatcttttgcgtaaacgtcctaacctttatgcattatttttctctttaagtggcttgtttatgattcattgtctttgatatccatctagtctgcaggaagtgcatat

SEQ ID NO: 50051 - DNA, 840 bp, Ricinus communis
  Intron number 1 from transcript 29747.m001062 (locus 29747 .t000019) derived from phytozome v7.0 (chr-ID 29747; pos 1 34374 to 135213)
tcactcaggttcgtttctgtttcttttgttttttttctttggttctgtttcatttgaatttaatattgctgaggatgtcactcaggttcgtttctgtttcttttgttttttttctttggttctgtttcatttgaattctgaactgggttttgtttcaattttgagaattttgcagattttctgttgttgcttagataaagtaactttttttttttagagagatattatattcttgaagtgttttttcttcatttcccgaggatttggtgatatttcattataatgatctagtggttatcgaacataaagcctttgtgcttcattagttacttgagttctatggttacatctgtcatgccttaacgtggagtctattaggttgatatcttaatgcaattatatccatacgttggagaagtgaccaaatttagagtgtactttcaacacaatcgtgcttaaaccacccaaagtaatttaattacatgttaaatggtcccagtccttacttatcatatttttctattttatatctaattacatgatatttagtagtctgcctacaactgctcctcatagctaaagtataagctataattgttcattttaaaaaggacacccttagttgcaaatttcataaagttttgggtttaacctgcattcatttcataattttgtcagatttgtatgtgcctcaggtatttgttattgctctctaattctactgtttgtcatttttaatatacatgaagtcatatttataaccaaataaaaacactcagtcacttgttctctatttgtttcttggattgctttgtcccacagcttattgggaaaacacct

SEQ ID NO: 50052 - DNA, 979 bp, Ricinus communis
  Intron number 3 from transcript 27394.m000348 (locus 27394 .t000009) derived from phytozome v7.0 (chr-ID 27394; pos 6 3058 to 64036)
ctttttgtaaatcctgaatctcagaaaggaagcaggtaatctttcttcatatccttgtttaaatttggggaacctagctataagttacatgaaagtcctatctagttttgtcagtatatctgtcttttgtacttcataattcctcactgtatttgtgaactttacaagactagaagtcatgttatttacataattttctcgcggcacgagcttcatgttcaatgtggcctcagagcaccaaaatgcaatggcagcatctttcatctgttatacagatattccactgaccatcttagattagtatttactgagattttgttgattactcaatatttcttgtttgaatgtgtgataggcacctaatattcagaaattactttaaactgattttccgtggggttagtgattttaattttctcttttgcccttccatttacatttataacaataatgcgctgttacagcctccttgtcctgtttcttattgctgcccatatgatggtgaactgtttacctaacatcatgttctctttgcaaataatgaaggtttttcctttatccttccatgattgttttatctgtttggcatatgatctttttcaggacgatatcagattatgaatttctcattgtatcattatcaccattgcagaatttccttaagatggaccatactaaattattaaaattgtgttagctgtaaattctggaaccaaaacattacgagttgaacgacattaaaaagaaaactttagtcttataattggctgctacatttcctttcatggctcattctaacaactcttagagagaactattcatatgagactattgtaccaaaatgcttgagcaattagccattttgacatcagttgcgtccatactaggaacttccttgaactaaaaccttttgataatttctgctattaattttttacatgcagagttgttcagaaattatctgaagcagataagggaa

SEQ ID NO: 50053 - DNA, 257 bp, Ricinus communis
  Intron number 1 from transcript 29751.m001814 (locus 29751 .t000029) derived from phytozome v7.0 (chr-ID 29751; pos 1 61533 to 161789)
aaatcaccaagattaatctctacaaggtatctctctcacatttcacctaaaaattcaaacttttgtgtgtttttcttttcgattgtggttaaataataggagggttcgagctcaaatgttgtaattcatttgtgattttactatagggtttaggggttatggatttgttttgattgttgttacattatagtaaataataaaggtcctttttcttttgggttttaagggtttaatgtggtgtgtttgtttgttgcagg

SEQ ID NO: 50054 - DNA, 445 bp, Ricinus communis
  Intron number 1 from transcript 29620.m000538 (locus 29620 .t000008) derived from phytozome v7.0 (chr-ID 29620; pos 7 3845 to 74289 reverse strand)
ctccagctctaaagttctcatcctcgccggtgcaggtctctctctttctctctgattgtgtttttttttattctctaacactgtaaatttggctacttcggtaattaatatcttctaatcatttacttcatatcttttatatttcttgatctgtcattaccgtttttaattagctccacaaatttcaatccatttgaatcttctactcttataatttccttgcagttaaagttgtcagctttctatactatagtgtgcctaaagtttctttcttattttgactcctttttctctttttcttttggggtttgttgttgatggttatgactaatgagcttgacttctgtatatttgttgtggtttttggacattggcatgtgggtttgtaactgttgtttattttttggtgtttttgaaggtttgactggttcaattattctaaaca

SEQ ID NO: 50055 - DNA, 327 bp, Ricinus communis
  Intron number 3 from transcript 29610.m000393 (locus 29610 .t000008) derived from phytozome v7.0 (chr-ID 29610; pos 4 9651 to 49977)
taacatttcgggcaactgatccgcaaatctcacaggttctgcaagccaacaataaaatcacttctaaaattcgattaataatacactaacatcctgatatatattttgttctgaatcaccatgcataaatcaatcatatgcctagtatgatccatataagtcgggaagactatatttccttttccaaacacgaggtaaagacaacaataattatgtactatgtgcactaattagcatcctccaaattgttcaagtcaaaagagaaacaaaaatgtaccatgtgcactattagcaccctgcaattgagtcagaaaaacaaaaaccaaa

SEQ ID NO: 50056 - DNA, 709 bp, Ricinus communis
  Intron number 1 from transcript 29693.m002068 (locus 29693 .t000106) derived from phytozome v7.0 (chr-ID 29693; pos 7 28118 to 728826 reverse strand)
aggtaggttgactgtgtatttgaacttatctcattggagggctactttaatgttaagcttaaattatcttagacggatttctggtccttagccaagaggatacttcttgtattgctctcaagtcaaaacttttgtgggccgagttagggacttgaataattctgtatcctgataacctcattgaaattttatttatttttaattcttttgactgtgatgttggcactttacattaaatttctgggataagtaagccttctcattctccctctcgctacaccttcactctatgcgttcttagtgctttagaactctttgtttcttcaacaaaatcgtttctccctttactgcatcttagttttttctctagtttatttattatgttattctatgttaacatctagattgaatcaaaaggctggaaaccacttttatagtgtaaaattgttggtgtttgctgttttagttatgtagatgcgctatttgattaatcattttcatttatggtcacgaaaagattgaattgggacatgtgtatggcctagggtgaatttatatacttgagcatccatcctgagtttgaaatttaattcacacatgtcgtcagtccaattgatgctgaagtgtccgcccaaaaatttgtaatattgtttacactttctgtttctatcaaggtcccggtaagggttgctggagggctgttgttcga

SEQ ID NO: 50057 - DNA, 837 bp, Ricinus communis
  Intron number 1 from transcript 29619.m000250 (locus 29619 .t000009) derived from phytozome v7.0 (chr-ID 29619; pos 4 4323 to 45159 reverse strand)
ggatcagtgttgccgactcttctcctgtatggtttcacttctttctcctattcctttctgtctcaagttcttatcttttgtttttttattttttaaacttttctgctgaccttttcttactgatgtttgaagttactttctgtcaaaattgagttctgggtatctgtatattaattgctaagactacatggatgcttcttattgaatttgtcattagtgcttttgaagtcgctgatgatttgtagcatttgatggttcttcttgtgatgctgctgtggaaggtttagactctagttgcttgtggaattacaaaaatatcattgctggatgatgtgtatatacaaatcaaacttagttgtttcaattagattgtgaatttattgcttcctgtactaactgactagcatttaaacttttgatcttatgatcatagttccattgggaattagctctcctagcaatgatagtgtgttgacctacttcagtttttcttctcataaaactaaaaagtattgttctgttcttttttcccaatcccttcttttgttgaattattaaaagaaatgattcattcttcactgattcatttaccaatatgtgctggtttagcacttggcttctctcagtctcattgtaatgttaactgtgcctaataatgaataatgtagttgttatgaaggaaaattattttgttattgacccgagtgtttaaatctatcattcttgcatacagattgcttttttaggttatgtgtcgttatcatttaagtcagttaattgtataactttgttggctatacagctagaaagcatttctgaggatagagtggctgtgga

SEQ ID NO: 50058 - DNA, 978 bp, Ricinus communis
  Intron number 1 from transcript 29405.m000156 (locus 29405 .t000005) derived from phytozome v7.0 (chr-ID 29405; pos 2 2180 to 23157 reverse strand)
ataactattagcacaggtagtggatttgcaaaagtaataagattaatgatttcccttttctttctgaaattattaattattatttgaagtcaatacactagtttagtgacttcaacatttatttattttattaaaaatgtcttttatttacttttttttaagtttccgtcaagcatatattaatacaattatatatttaaagaataaaattaaatataaataactttaacattattttattttaaatatctggacagtttctgaaagatagaaaataaaaattaaaaaacagtttttagtttttaaaaaataaaaaaaaataacaaacggcccttaagatttttgtttatgttatgaaatattcaatccaacaattttatttaatttgattattactttttctttttctaaaatcaatttgattttcatgtatactatgtgattagaagttagcgcgaatggagttgataattttatgctaaaatactaaattatgtcttccatttattctttaagaatataattaaataatatagttacctaaataaagtttattaactaattggattttttaatagatataaagggttaatatgtctcctgaatttatatctaaaggtaaaatagatttaatttaatatccaattatcaaatacatccaatttaaattttttcagcaaatctcctaaaattgtgtccaaaggtcaaaaagacccaatttaattttttttaaaagtgaaatagtattaaatttttaaattttaattaaattataaaaataaaaaatatcattaatttagtaatataatatttaacgaacgttgtacaaccacgtgtttagtaaagtttaaaatttagagggtatatttatattatactatgattcttctatctatgctttacttactgttaagttggtctaatatattaatctgtaataaagggcagatcgtgccagctgctaacaagttatttaca

SEQ ID NO: 50059 - DNA, 640 bp, Ricinus communis
  Intron number 1 from transcript 29666.m001441 (locus 29666 .t000017) derived from phytozome v7.0 (chr-ID 29666; pos 1 26808 to 127447 reverse strand)
gacttggctatttctgctcaggaaattcctctgcggtaagaatttgtaaaagctccataaatggaagatgttaaaatatttttttcaaacaattttttttttttatattttcttagcccaaactatagtctgtttatgcattttaggttagcattagtcctaaaattgtttcaaaaagatattttttatggttaaaaatcttttcttccaatttttttgtcaaaatttttgctttcttatagttgactataaattttctttattatttttttaaaaaatggtgagtgatatgaatttcttatttatggatatttgagaaactaattttatttgaatacatctttgttacatgtattaattttaaaaagattatgggtttctgatttgttgatttgtagtaaaaaaaattagatgattacaactgatattttaaatatgcacttaaggtgtttgatgaattttctgaatgaattttgttttgctcttagtaataattttaatagttcttatgccgatggatttgatattatactcgaaatagtatatatatatatatgaattttgttttgctctctttactgtaacttttgatttgttttttcattttttttaatttctatttcaataattttagatttag

SEQ ID NO: 50060 - DNA, 466 bp, Ricinus communis
  Intron number 1 from transcript 28350.m000105 (locus 28350 .t000007) derived from phytozome v7.0 (chr-ID 28350; pos 1 8887 to 19352)
gactccgtgaccagctcttcatctctctttgcaaggtatatattctaattagttaatacctagaattaattttgttgcagagaataaatcaaagaatacatatatatatatatgtaagtttttattctttattttaataggcatgatccttgtagactgcaccttgaaggcttaatagattcataaagaatttggtttagaactatttcattttaggatcattttgacatgcagaaaccaaactattttctttcttgtggatgataaatgaacctttactgtatgataactgatcgttgctacattaacgtacaaaatgaaagtacaaatctaatttttacgcaaagaagcttatatctaatttcttacaaagatttcatgttaaattaaatatagttaaaaagaaaaagataaaatccttatttcttttgttacaatttttctttgtgaatgtaacaggaagctt

SEQ ID NO: 50061 - DNA, 1046 bp, Ricinus communis
  Intron number 2 from transcript 29753.m000249 (locus 29753 .t000001) derived from phytozome v7.0 (chr-ID 29753; pos 3 5116 to 36161)
tcacttctgcatcacctgtaatagctgctagtcaggttgaattttgcatttcccaattgctctttatgttagaattttcagttatcttctcaaatcaagtatctgtaatacttttttgtgtttggtgcttggaaattttacatgatcaggttgttccgttttcatagtcttgataagtttattgagtatactagagagatgcgagtgtactagattttcatgggaattgtaatctctaaaattttatatgcgcttaattttttttttttttatgcacataggtattataaaaacagaacgatgttgtttagtcttgtttatttttctgttcattattctaattggctgctaaacaaataatttttagctggatttgttactagttgcagctcaagtcatagagtatagaatttgacaattattttcccttccttaggtttttgaccgaaaattttgcagaggctgcttgtgtgtggaacaaagacttcaagtagaatctcactgattcagttactagttttctctagtcagtagagatactgtaatgccaaccaacgcttttgctcaaatgactaatctcagaaaatacatgcattagcctattaaagtatcaatatgatagtttagaaatgtcaatttgtccaatgctggctgtgcacatgcaaatacaaacatagaatcaaaatggatcacgtcttgctaccttgatgaatgttgtgagaatccagcatagtgagttgggcaagcggacagggttcggctttcccttaacttcaagaacaacaaaagatacgtctcagagtgaaaaacatttgaaattgtcgggtgccaatgtctatactactagtgcacgtcaggtggtttcgagcgtgggtctctggtgttgcattacactctgtcttctccactcaacgtcttctcttttctgtttctatgtttctctttgtgtgcttcaggtgtgtattgtcctttttgatctcatactgaaacttcaatatgtttgatttccagaggctgcccccactctcaacagagcccaaccgctg

SEQ ID NO: 50062 - DNA, 657 bp, Ricinus communis
  Intron number 2 from transcript 29216.m000249 (locus 29216 .t000001) derived from phytozome v7.0 (chr-ID 29216; pos 5 387 to 6043)
tggacaagacccttctgctgttcaagaccaaagacgttagctctctcctctatctctatctctatatcagaatacaataatttcattttcttttcttttttcttttccttacttttgtttttctgttctggacttgggagattctctttggttgttttgggtcacaggtaaagcatgttcaactgatcaactcagttggtactttctttgaccagatccttgcgcagataaaagaaagaaaaaagatttctttctcctttttccttcttcttctttttttctcccccaattttcaagaattaacaaaaatggttctcttctcttttagaatggatttttgatttcttgaactccatcacttaaatttgtacgatgggtacttaatagggtatgggttttctctaccttttaccatttgctttcttgttttttctgttctcatggcatagagctataatcgcatgacgattcctatccttctactcaatagttcatacctctgttgccttgtctcttctctctttgtcttgggtcctcacttaatgactcaatatctctctttctcttttgttcttttttatataatacctataaagagaattaatgcgtgcaagtattttttctgcgtttttttttcctgcagagagtaatactgga

SEQ ID NO: 50063 - DNA, 765 bp, Ricinus communis
  Intron number 2 from transcript 28470.m000438 (locus 28470 .t000017) derived from phytozome v7.0 (chr-ID 28470; pos 1 62747 to 163511)
acagttcaacaacttcggacaacattgaggtacgtgcaatgttcaacactaaatacttcgtctttccaattgttataataagtttgaatatagctgttttgtatagaagatattatttaataaatttatacatcaatcaagaggaaagtgtttatgctagaagttcgcttgaatttgcgtacattttagaaaatgcgggaacatttttattcttatgaacctagacatatatgagcatgaacaattgtgcatagttaaagaaagaatttatttatttttgtattatggtctttgtttgcaagaacttaagcgtattgaattatattggtcaattcttaagtttgaaaaggctggtcttgttagaattcaattctttcatctaaagaaaaactatgaaatcatccttatatatacagatcttgcaagaactcatttcttgcacatgaagctctgtatcatttgctactaagaagctttgtatcatttctttcagtgcacaattaatggatttacccaccaattaaagaagctatatactctgtttcaccatacattcaattgtttctgttctttgattggcctttgatcttgaagcaggagagctgctatgtctataattatcctaattggtcaggcttctagagtaaacatgagtatatgctttgttgttaaatgtaaccttttgattgtatgtgtcacagtctttagtgttctatgatggcttattcaggagtgttggaatacctgccaaaggtcgcaaatcag

SEQ ID NO: 50064 - DNA, 663 bp, Ricinus communis
  Intron number 1 from transcript 29785.m000949 (locus 29785 .t000018) derived from phytozome v7.0 (chr-ID 29785; pos 2 12298 to 212960 reverse strand)
attacaacaagaaacaggtttggtttggtttggttctgttttcttttctctttctagggtttaattttattactatttcttaaaaatttaattaatatgcgttgaattctatatatgattcaatttagggttgtaattgcctgtcatagtaatattgtgttcttttcctttctgcctatttgcttgtttatatttattattagcactgaagaaattgaaactcattttctcttttttgtttttaaagtttgattttaatgataaattatctctatcttattcgctgtttagtttagtttaatttttatttttaggggtataattatattctaatgattatatttttactaaatttgctttttttctttttcttttacataatgattgacataatgtttggaaagtctaaaaatgcaagagttcagttcaatcgaattcaatttatcagtcaattctcatgtttggaaagttcatagttgatagaattcaatctttcatgccaaaaatcaccatgattttgaaagaatttaattttttcagtttgatttttattatcttttgaattgatggtttgctgaggataatttattattattattattattattattattattattataattatttgttttatatattcttttttaaattttgggcaga

SEQ ID NO: 50065 - DNA, 804 bp, Ricinus communis
  Intron number 4 from transcript 28883.m000746 (locus 28883 .t000036) derived from phytozome v7.0 (chr-ID 28883; pos 2 03394 to 204197 reverse strand)
tccctcaggttcgtatttttatgttctcttaacaagttatattttgtttctgaaaatcaaattctctgaaattacgaattgaatgtttcaatgttgttatttaattactttaatctctccacagtagtgagtagtgttactataaattcttattgcgatgaacctcaatgatttaccatagtcaagtcgagggaccaatatttttgtttactttgattactacagcagaaagttataattaagattcccaaccttagcactcactgggacacgaatacaggccattgcttttacagtagggttactgcattccaattttgaggcagaatatttcttttactaaatactgtatctggtaaaaactttagttacttagaataagaactcaaagatgaaacaagacccacccatcaatcttacatctagacattaggtaaattcaaaattgttttggaaaaccaaaagagtatgttgattcaaggagaaaagaaagattatatgtacattttgcacctccacatattcagccatcagtatttttcacaagaatgtgcacatatcatgtgtagattctcataaaattattattttttaaatgaaagacaagaaaaaacccctaatcaccccaaatatatgaagatcttgacataatttaaatcaaatatttctatattgggtagcgagttttccaaaaagaatggaaaagttcatgctagctagttaaccaattcatatcattatctgtctacacaatctcattacatcaattttatgtttctgattttacagttattcaactatagc

SEQ ID NO: 50066 - DNA, 675 bp, Ricinus communis
  Intron number 1 from transcript 27791.m000084 (locus 27791 .t000002) derived from phytozome v7.0 (chr-ID 27791; pos 2 2263 to 22937)
gactgtttgaaggtttctttctttctggcaatctctcttacttaattgtgtgcaacattttctttttgtattatatatgtgttttttgtcaagaatgagcctgtaatacacttagaatcaccacaattactacttcattaaggtgtctattgcttgtacataacatttcccaccctaaatcaactagaatttgatcatcctttttcctttttctttttcttttcctcactaaaattgtcaacattccaactgttagctctatattaagaatgaaatgctgtaagatgtgggcggataatgcagtcattggttttacaatgcacatcacagtactaaaaaaccttcgaactaaaaatgacaagggatgtccacagccctggatgcataatttgactatatatcttcaataagaagtctttagcccctgcgactcagcttcgaacctcgctttgcccagcgaaggttgaaacacactgcatactagatctgtaaacaactttaagtctgcatattactaattaaatattcattatagatttgtagaaagcaaagagagaaattttatagaaaacagaacatcttttagtaccatatatatgaatgattttacacatacattcccttcttctttttcttttttttatttttttttatttcaggttggcagcattggtg

SEQ ID NO: 50067 - DNA, 848 bp, Ricinus communis
  Intron number 2 from transcript 28011.m000078 (locus 28011 .t000003) derived from phytozome v7.0 (chr-ID 28011; pos 2 4199 to 25046)
gttgctaagaaaaataccaaaaattatcagatgtgaggagattatgcttttacaattattagtttgctatgttgactgttaagaagtcaattttttattattatagataaagtaaaaattgaatattttatgcagttggctggtgaattattgatcaaggtagctcctttttgtttgttttatttaagaactccttttaggatttgaaactactatcataaacttgagtatgatattcaaagatgatgcctatttggcatgagagttgttttcattaatttttctatatgcgtcctttcattgctttttactagagttcaatgtttgtttgacaaaaatgggagcaaattttagctacttcctaacttattgttgtgctttagatagttctatgtgtgtgtttcttttgcggaggttcttgagcacaaatggtaaggttacttagtgatggttgatgtgtgtgtgagctttccggtgagttagatggcttttgtgaaatatggacttagaatcggtggcctaaacattaagtttactaccattcttctgtttaagtatgtaagaataatatttttttccctaaagtctactcgtttaattggtagctgatggaatggtgattcatatttacttttgtaggtaaatatccactggaacattttgatctcatgttgttcctttttctctaacccatgccatttttaaaagccaaatgaagctttgatttagtttagtcaactcttaagcttgttctagttttaatcattaatataccggtactgaatgttgatcctaatgctagatgttttgtaggcatcataggcggtgggttgctgagaaattaggga

SEQ ID NO: 50068 - DNA, 496 bp, Ricinus communis
  Intron number 2 from transcript 29676.m001683 (locus 29676 .t000074) derived from phytozome v7.0 (chr-ID 29676; pos 4 33849 to 434344)
aaaagaagaaggctgttgctggatttgatcctgaggtattttgctttctggtgcatttgtatttattgcttagtgataagaatttcaattgttcgagtagataattttgcgtactattaagttttgtttgtttgttttgtttttctacacaaaatctgaatggttttatatttgaatgattcgctggccaggatcagccctattatagtgtctggaaagtctagaaatggaagaaattaatctaatataattctatttaattagttttcatatttggaatgctcggacgtgatagaattttcagttctttcaacttaataaaacaaggcattttgaaagacatgaaatcacatgatacatggttttgcaaaaatcgacttgaattcttatacatggaaacaaggtctataagacagaatagaacacctctttgatattacatgattgggtaagtttgactaactgaggctttgtgtataccagggtggtgccttgc

SEQ ID NO: 50069 - DNA, 209 bp, Ricinus communis
  Intron number 1 from transcript 27704.m000150 (locus 27704 .t000008) derived from phytozome v7.0 (chr-ID 27704; pos 6 1237 to 61445)
ccaagtatcctctcaaattcattatacccacaaaggtaagacttcgtttgtttgtttgtttttcttttctgttttttttttttaatcaactgtgtatttaaaatctcactagatatgttactagagctacaatctgatctagccgatttatatttttattgtatttgattatgtaatgtgtaaattccaggtgggtccttccaaaactg

SEQ ID NO: 50070 - DNA, 957 bp, Ricinus communis
  Intron number 2 from transcript 29801.m003231 (locus 29801 .t000176) derived from phytozome v7.0 (chr-ID 29801; pos 9 39707 to 940663 reverse strand)
aggtggaacaagttgcttccaccaaacgcgtcagggtaagccacttttccttttcctttatttatttttatatttattttttctacgtttccaatttgcatctgatgattgttcattatgagcctcgcgggcaatggccaggagtcagtatcctatcggttgcctgacatgatcaatagaacttctgtaattctattaacaaatttttatttagcattaagtattgttggctacttttgatcttcactatttgttttgatgtttcttctattttaatagtaagcgccacatacttctgcatttactttttgagcttccattttaatggtgcctcagtgaattttatgtctcccttattcattgattgattctattgatatttctgtttttctcttccttgcatgcatttcaaaatataagatactaatgcagtgagttttgtgcacaatagaatccttcattaggacgtgaatttaaagtacacactttatatggtatttaaacacaaatgattgttcaatttattccttgatttatgtgtgtgtatgtacatatattatgaggcgcattagcaatagaaaacaattgttatttcagagattactgggttccaaaaactgtacactttttgttttatatttatcataagaaaagctaatactgtagctgaccctttagcgaagtctgtcagatgccgatcttgcctatccaattgggttgcgtgtctgccaccattcctggttaatttagttaattctgatatctctggctgtaatgctcttgctattcgatagcataattgtgttagaaaaaaaaaaagagtgataggtgaagtattttccttcgtttgcattcagacttgttgctagaataatgttcatggcacgtggaaatggcacaaacacatacaattgccttgaatctatcttatattatttttctgctctttgagcaggt

SEQ ID NO: 50071 - DNA, 881 bp, Ricinus communis
  Intron number 2 from transcript 29669.m000836 (locus 29669 .t000045) derived from phytozome v7.0 (chr-ID 29669; pos 2 85597 to 286477 reverse strand)
acgacagtaagcgatgatcattattaatttatgatgtttatgatagtggtaagtgagggtcttattctaatttagaaacgctgtcgttcatctgataagatattataatattttttttcttttggttattgtatgtgtttttgttgtatatattctttttgttcttagtaataaataaaaactcaatgaaagttttgtgtaatttatattttgtgaatatcttttgattttttttttttttggtttactctgtttttgttgtatatgttgggctagcttggaaattttttgtaatttctgttcattggtgtgtgttttcattgggtatttatggttatcaatagattaagataggtagatttcagagtaattatgcagatgctcactgattaatttgatcaaattggaataattgatgttcagatgcataaaaaatatttggtttaaataaagatttggggcttactcgaaggattaggattctctcatgttcattgttgaacatgatctttcctgatttataatcttcagcattaaatttcaatcaaatgattgagattttatcaaaaaaattattttaaattttatgtagtaagtggttatttattgaatgataaaatttcaatcattgaatttgagttgaatttaataattaagattgtgctaacatgtagataacatgagagcatgatactgatacatgtagttactgaagaatttgtctcatttccataacaggctaacttgaatcaatatgttcatgatccagctctaagcaactagatttaaaggctgtgtttgattgctgcaaaatctatgagaagatagtggctggtaaaactgcaggtgtaggtattacaagggaaagttgtagtgctagt

SEQ ID NO: 50072 - DNA, 266 bp, Ricinus communis
  Intron number 1 from transcript 29681.m001321 (locus 29681 .t000026) derived from phytozome v7.0 (chr-ID 29681; pos 1 29522 to 129787 reverse strand)
aaaaggaaaaagagcaggaaaattatttaatcgaggtaaagtcggtgctgaatctttactttatcttccattttcttggatctctcagttcctttttatagctggttttcttgagtttcgttttcgtgatcctaattttacggaaaagtaatgattgattggctacaaagagattacaaacattttgtttgttatttttttttgactgtttttgttgattgattttttcaggctgaagtgaaaattatttaatcagaaggctttat

SEQ ID NO: 50073 - DNA, 925 bp, Ricinus communis
  Intron number 2 from transcript 29738.m001036 (locus 29738 .t000038) derived from phytozome v7.0 (chr-ID 29738; pos 2 98993 to 299917)
tagccttttataaggcctccttttctatcctcgctgtaatgcttaaactcaaactctcttatgtttgacctattaataattttatctaattaattaattaattaattaaattagttaataattaaagcaaatagttaaaggatttaacatattaaagaaatgatagaagaagttatgcagtagttatgccaaaattatagtcacttttgtactttaattctccaagtaaatgagataatagagttctacatgcacaaaatacgaaaatatatctttaaataaagtgaaatttggaaatctttataaaaaacaaacatcaaccaaagaacgaggcaacatcaataatcaaacacaacaactacactacaatatttaaatactcaagcacaaattatctgcaaaaattttagtttctagtaaattatatgttttgtttatatctttgcatttattttcaaacacttagttgtttatataaatttctatttctaataatttaaatacaagttgttcaatttaacttttttcctttaaaaaatatttactttataaatatttattgctattcaactttaatttttatggtgtttcttgaatatctaagcaaactattaagagagtttaagacttcactaagtttgattaaaaagtcaatttaagaaacatttaattacaacagttcatatatctacacacgtggcacgttcaaaattttcaccaaacatatttttaacatgcccagtacaattttttctattaaaacatatttttgttgaaacaccttgtttcagctctaatcaattctataacctcttttactttgatctttttatcttgtggtgcttcatagctgagtaatcaaatccttaagctacaatgatggttttattgatcatcaatttgtgtatgcttatgttcatttagg

SEQ ID NO: 50074 - DNA, 815 bp, Ricinus communis
  Intron number 1 from transcript 29611.m000226 (locus 29611 .t000005) derived from phytozome v7.0 (chr-ID 29611; pos 3 1705 to 32519 reverse strand)
ttgagtatctgccagtgtttcgacaaacttatgtgagtcctctttttatattgctgttgacattgcactgaaatgtgctttttgtatgccataaattatgtaatttaaatgatttattaattgatcatggattttttttgttgtgattaattttgcatacacatttgattcttaacttgaatagtttataagcctgcattttaacttggacctatgcatgaaaaacatgagctgtttgcatattggatggaactgcagattcatttcatgctgcacaatcagaatggtatcgatttaagaatctccaactgtaggaatgtgatctttgctcaaacttcttgaaaaactatttctttcttatatgtacaggttataggcataaaacttccagcttggtttccaaactgcatcactcaactaagcatgctttttaacagaaaaaagggtctcaaacaagcacctaattggatcctttctcagtacgtgatacatcagtccattctcaagccactataaatagcaaacttggatgcttaccccttggggaataatgttagaggatggaatcgtgttaaaaatagtattgtgtctgctctggtcttttttaatgcttggatttccattggctaacatatactcttttatccctttagatctgttcactacaacatatttgttaataaggcactgacagcaagtctgttttataagtttttggaggtattgattccttaattagttgcctccttttaaatcaatcttgtatcttcgtcttggcagagtttgcaaggaagaaatttgcctccaccaggaga

SEQ ID NO: 50075 - DNA, 332 bp, Ricinus communis
  Intron number 3 from transcript 29647.m002090 (locus 29647 .t000098) derived from phytozome v7.0 (chr-ID 29647; pos 6 00758 to 601089 reverse strand)
ctcttggcaaaattgaagttgtatgttttctgctcttctatatttaagagatctctcccttctctctgtttatggaacttgattgctattgccgttattttagaaataactaatattaccagaaagcataactgtaattttttgttaactagtttttataactcaagtaaccttttgattttcaattatcaaatctttctaaccttctaactttttaattctaactttgatgttttcttaaatgcatttcaagttttttattttcttgtatgttatcaaagtcctcatataactaggcataataagttgacatgctttgaaccttttgtagt

SEQ ID NO: 50076 - DNA, 733 bp, Ricinus communis
  Intron number 2 from transcript 29673.m000902 (locus 29673 .t000003) derived from phytozome v7.0 (chr-ID 29673; pos 1 3142 to 13874 reverse strand)
aggatttttgagattggaatttcttcatttattttgtaagtatgcgttctgtgtgttgttctttaacatgcatgaattatctattttgatttgttctagtttttttttttctttttcctctttttctgtattatttttggaattgattccaagtttactcttttgataattttgacctttcaaaaaagaaaaagataatcttgagcacctcttttgtttctgaccgtgaattttgtttaggccactttcagagaattattgttctattgttttttatttttttcttttactacttataaatttgggttcatatatatcattaagaaaagaaaatgttgcaatttttttaatagaagttaagaagcttgtattccgttttctcttcttgtcttgtttcgtgttttttccccaaacatccatggaatgtgtttttctaaaaaaataaataagtcctttggcctttattatagaaaactatttgttaatttttgttacgtcttgttattttgtactgtgttttgcttcatcttgtagttaaaagaataatgatttaggtgtttaattgtctgaaattatgttattttgcttgtgattgtaataggaattgctttcaagtaatgttgttattttgtaatatccattgttgtagattaatctccctggttgtttattttctagatttcattttggtactgatttttgttcttgggtattatcctgcaggcaaggctga

SEQ ID NO: 50077 - DNA, 534 bp, Ricinus communis
  Intron number 2 from transcript 29726.m003972 (locus 29726 .t000084) derived from phytozome v7.0 (chr-ID 29726; pos 4 99962 to 500495 reverse strand)
aaaaccatatttccagtgagttgattttctcaacccattcggataaataaaatttagtatgcaatgtttatggattgtttagcatgttttgtgttgtttgattcttgtttttggatgaagcgtgagttctttttttgtttgtatgggtaaattaaactaaatcttcacttatcagtcttgcaatctaaaagataatatcctctatgtattttgggattgaatctttctgctaaaatttcaatagttcaagttaatgaagaactgagtcattgtttctgcctttctcttctttgttatcttgagagtttacgtagaattttgttaccatctttgcaccacttaaagcattatttatgttgtgtgagctttctggcaatctattcttgtcaccttaaaaatgaaggctggaatttacatgcagcaaatttatgcacgatgaagttcatttcttctaataatatgaaacattttttgttctgggtattttctctccctgcagttgctgccccaagatttctttcagtgcgtgcagca

SEQ ID NO: 50078 - DNA, 978 bp, Ricinus communis
  Intron number 2 from transcript 29726.m003904 (locus 29726 .t000016) derived from phytozome v7.0 (chr-ID 29726; pos 1 21561 to 122538)
gaggtaattcgtcaaaacgacactggatttacttttaatttaaatggattattggttttagcaaatatttggatgttgcattcagctttttctttaaattttcttttgattaaaacgatgtaggatggaatggattggaattaaaaaaaaattctaacatctaaagtatgaaacaaaggcaaattattaggcattgtttggaataagtcgtgcaagagtacaattggattgattcttggcaaggtcatgttttcttttttggcatgatttaatttcttctaaaatgcattaaaagaattaaactctagcaactataggctttcttgacacaagaattgagtaaatagaagtccactgaattgaattcttgcatgttttgactttccaagcacactctaagagtaatgcaagtgagaagatatacagtgttaagattactcaaactggatttttttagcttttgaatgtaaggaccatggaacatgtaacaaatattttatctctgaggtgttggataaataacttatcagtattcaacttcgtaatgatttgcttaaatgtgaaggacctttaggaaattagctttaaaaccatgattggactccaactcaaaattgtaatgcttataggatacacagtggtttaaatgaaggaatatggaaccagaaaaatggtgcagcttggtattaaggattatactgcaaatatggatcttatgtgctattacaaaattgttgtttggaattaatgggtggaaacagggttctttataatccctgcttttgaggatgaggctttatagtgagcttggatttatagagaggatgaagaaattttactatcctttggccatctcttttattgcttttcttgaaacgtatgttatacaagcttcacctaagttcttaatcacaatcattgactttaaaattccaatttgcaggctcttcctatataccttgataagcttttcaatca

SEQ ID NO: 50079 - DNA, 999 bp, Ricinus communis
  Intron number 2 from transcript 28176.m000272 (locus 28176 .t000012) derived from phytozome v7.0 (chr-ID 28176; pos 8 1229 to 82227 reverse strand)
gttaatattgacttctgcgcttcttgttcttacaggtatttaattccttttggttttataggtgaggtattgaattggggttttgcatttactgatttaatcactgcttaattttttttatgcaatttgtttgttgcattggattctttgtcaattgagttttaatggaggtatatacatgttttctcaattttagataataatacaccattatgtaagttcatttctgataattggtgactggactagcaatgaggaatagaagaactaaaccatcattccaaatctgttacgatggtgcttgatagtccaagctggcgttcctgtaagatagagaaggtcagaaatggtctgggaggggttttgtcaacatcattccctaaaggtattccttgaatatagagaatagagagaaaagtaaagagaaataaaatgagagaatggaagatagaatataagacattagacggttgagaggttttccttacttagggcttaagttatttggagtgttccattaggatttattgttgagtggacatgtcagcatgtctgctactgggaatgtgttggtcgtgctgagacgttttctaactttgctcaagtattacgctagatctagttctgttcgatatactctctctttagtattgttatcaattacggctatgaatcagtacacaaagtccggatcctgatagatccactatcaacatgagtagtttttccatttttgcttagttccttttgtttttcagtacctttgatttttgagagatcattttcacatttatgatatgggctctcttcacccctctctgcagtagtatcacataatgcataaaagctcttctttttttaggtttcttaaccaaaaatgagaaaagcagtattggcttatcttcttataggttaattatgtgtatatttggttcttactattcatattcacatgaaaattttgggtttccttttttctttttgggcagaggaactgct

SEQ ID NO: 50080 - DNA, 871 bp, Ricinus communis
  Intron number 1 from transcript 29728.m000812 (locus 29728 .t000018) derived from phytozome v7.0 (chr-ID 29728; pos 1 26949 to 127819)
tacagactttggcctttctgttttctataagccaggtttgtttttctgaaggaattgttgtatgcatttatttcttgattgattattaaataatacgggatttatttattttttcgattataattgttttcaagattcagaatttcttgttgttttgattgattagaagaatggcttgtctttggttcagttgttttccttgattgcatttgggtgtggtcgttttgttttgtttttttctcttttgctgattggatattcagatttattatgtgggtcaagatgagcctttcgagttgttgtaattggagccggtttgttggttgtttggagattggagatcttttatccctacaatcaattttggaaggttgtctggtgggatcaaatggtgctctcttttatttctatatccgctgcaagcctggttaatggttgaactctctagttacattgcttggacatcttgctttctattaattgtttggtcggggaaaatggtaaattactaatttgcttcagaacttttttctggttttcttgaatcaggagcctggtttgaacttatactgtttttggtggaatagtcagtgtttttgttggaatgatatgttgaattctgtgtatttctcagaattcaaaggtttttattatcggacttctagtgattctgaggtttttgaacgtcaaaattgccttgtaaaagataaaaatatagggatttctgagcatgtgtaaatcgccactgtcttgtattttgaatgaaatgaaatgttggcattctaggagtgtgccactacaactccctgatttcctgaaatttttcctcactgactggtcctttttctctctctaggacaatatttctctg

SEQ ID NO: 50081 - DNA, 511 bp, Ricinus communis
  Intron number 1 from transcript 29739.m003571 (locus 29739 .t000007) derived from phytozome v7.0 (chr-ID 29739; pos 3 1132 to 31642)
aactggtttgtcttaattcacttgcactctttttggatttttattttcattgactaaacatatgagctatgttttctagtctcaaagactgtcatttgtgcttttctatgatttggattaggtgtttgatatctagaataaaggtagtttctctggataatggggcagttcttataacaatggaatttgctgatctttcttatctatttagtttagttctgaaatgagtgtttgatgtattaatttggctttgttttgttttgctggactgtgttatcgaaacacttgttttgtttaccattttgtgtttcattgaatgagttctgaatagagtgttcatgtattaagctatctatatcatattcattgatatgaaatggagatgtctttatgctttgtttctatgcttaatttggcggtttttcttgaatcttctgcaagttctatgtgttgcataaaacgagtgtggatgacaggtgaaaaggaagatagacctcgtgtacggtggagg

SEQ ID NO: 50082 - DNA, 162 bp, Ricinus communis
  Intron number 2 from transcript 29739.m003571 (locus 29739 .t000007) derived from phytozome v7.0 (chr-ID 29739; pos 3 1699 to 31860)
ttcttgggtaactaagaaactaacattgaagaacacactgtccttcatttttcaaaatttgacttattagtaaatgcaagcaagctgtattttggtcttatttacattacactattgagttaatggttggcatttggatgcagggtcattccaaaagcactt

SEQ ID NO: 50083 - DNA, 320 bp, Ricinus communis
  Intron number 2 from transcript 29813.m001490 (locus 29813 .t000042) derived from phytozome v7.0 (chr-ID 29813; pos 2 67560 to 267879)
aaagataaaagccaattttctaaggtatggtactcgtgcagtttagaaaatacttgcctataccagtaaattaaacatggccaaggaatgtatgacggacatataatagcttaatattcctggggtaagtggcaaatgagtgtaatttattcgaaatatatgccatctcatcacacatatggcatcagcaaatctgtttttcctaattcaaaatcaaatgcatcattaaatctaccgaatgagaaaagaaggatcatctaactttctttcgctatctcattgcaggttttacttgtttgctttatcataagtaccatcac

SEQ ID NO: 50084 - DNA, 350 bp, Ricinus communis
  Intron number 1 from transcript 29747.m001104 (locus 29747 .t000061) derived from phytozome v7.0 (chr-ID 29747; pos 4 66917 to 467266 reverse strand)
gtagaagagtgccaagcaaggtcagttttttttttttttttttctcaatttagatgatctcagtagatctaaaatgggatattaatctttgggaaaaactcccatgccttcttcttcttcaaacaaactaattcaattatgtatatacattatttttttttttcggttgaagacgcttggattttttttcaaactcctaatcttacagttttatggaacaattttattaccatctttgagccaaaagcaaactttctcaagcattaaacacataagagcccttggctaaaaattgaattcaacaagcaattaacttgctgctttcttccttattaaatacagcctgtgga

SEQ ID NO: 50085 - DNA, 828 bp, Ricinus communis
  Intron number 2 from transcript 28623.m000398 (locus 28623 .t000011) derived from phytozome v7.0 (chr-ID 28623; pos 7 3533 to 74360 reverse strand)
ctggcgttaggtaatttccttttttcttttgtcactttcaatttaagtctatttattttagtaaattcttatgtttagaaatataaaaattgctttccttatagccacttggtaatgcaatctttaataggatcgaaattaaatactgttattgcaaattaggaatttgtttggttgttgttgattttgttaaatttaatgacgtagttatttataatgctttcttgtaatgctattaggttccatgacttgtttcttgtcctgaaatttagatatgtgttactagctacgatggtctagtaaggattaagttatatgatttttggctgttctggatacattgaactagaaatagtggtgacactggcgaagaatcatatttttgctccgtcatggggtaaattagactctggctgcctgctgtgtactgcttataatttttgtcatcttgtgatttagataaagagaatttggtcgatgattgtctactagtcattgcttatctgcttgcctatacactcctttgaatcttggaatgagtgaacatgtggagccaaaatgaagttgctttttagggtcatgcacttacgcttgatatcctactaaaatattatttggcaattggcagttcctaattcaacttgtttcattttaaaatcaaagcttcagatttggtaatcataatgcatatttgtgtgctacttttactcaagcatattttggactactgcattacggatatgctaattctaacattccacaagtatacatatactcataccatgaatatgtgtctgactgacttttattgaatcttttgtagagcta

SEQ ID NO: 50086 - DNA, 826 bp, Ricinus communis
  Intron number 1 from transcript 29630.m000803 (locus 29630 .t000028) derived from phytozome v7.0 (chr-ID 29630; pos 1 63512 to 164337)
aggcttacgctgcccatctcaagcgatctggcaaggtacttttttttcctgatgaatatattaattatctgtttctaaatattttcttcgtttggttgattattgatgtgctgtataaagtttgggagtcttgatgtgctgtatagcgtgtccaggatctgtttgtgattggtttaaatttcaatgggtgtatatgatttggagctggatttaaagttaacatcttttaaaaattgtgaacttgatttgttgattttatgactattgctttgagggttattaaggattttaaaagagtagacattgttgtgactatgagaaggcggtagcagagtggaacatgaataaatattgtacattttttatctaccattgaatttttttgaggtttggagcaggaatgaactgatagatagagaagcaaatgagtatctttaagagttcgggagaaaaattgtaattcttgaatgctcctcaaaaagtattttgtaaaatttcatacctatgatggcctttctatagtacaactcaactgctgttgtgggtgggttagtcgtatctctgagcagtatggatgaactttactttcggtcacatttgaatattggtgagccaatgtctagactagtgtttgttcgattgctatttatgttgttggataaatttcgattttggtgattggattttgagttaatgagtagggtgatttgcctttatcagtaataagctgcttaattttacttgttatggttttaatttttattagtcttcttacatctcttggatttcagattgagttgcctccctggactgatattgtgaagac

SEQ ID NO: 50087 - DNA, 490 bp, Ricinus communis
  Intron number 3 from transcript 29759.m000282 (locus 29759 .t000007) derived from phytozome v7.0 (chr-ID 29759; pos 1 53171 to 153660 reverse strand)
gactgctgtatgattcctctttttctgatactttatttgctcttttgttttgattttgattggccatagtcgggccctctttatcttgttttagattagatgctgcagacatagccatattactttgaacctctactttatccaatcacttaacaagttttctaggattactgattctgactgctctttatgcattctcgtccaagctttactcggaactttgttggtaatttatattcccttttggaaattgtgttttgagatttcctttgcaatgtggcctgtttggtattcaatttactagttgaagatcttaagaatgatggagtaatagttaattgactaatcctgcggatgtggtcatctggttgccatgtctgccgtggaatttcttttttgaatattcttttgtgatgtttttctgatttagtttgtgggttgctgctaattgcatatgttgaatttgcagaaaaaggctgtggttcaacac

SEQ ID NO: 50088 - DNA, 617 bp, Ricinus communis
  Intron number 2 from transcript 29729.m002385 (locus 29729 .t000118) derived from phytozome v7.0 (chr-ID 29729; pos 6 51138 to 651754 reverse strand)
accagcacaggatcctttctcttctcgccttcaaggtatgtcataaatttgtaatgctactattaattttgcttgcttaataactggaagaaggacatgcaattgtgaaacatgagttgttagagaacaaataaagatgtccagccctggtcttctgctatgggattgtggcaggtgcagttattgaaataagtttccaacagctcttaatacttcagactatgcattttccatatcttggtctttgtaatacactctagaattctactaccaccaaagtaatactatctctttttcttttttactggcataatttccactggattaagtttaattgatagttaactggctttaggtaacgaatttaatccttaattttcacgcgatggttttgatttcgaaaacataatgattttgatactacactgctcctctgattctctattttccagaatcaaaaacaaaaaacttttatcatgctagtctttctatttgctgttaattttttccgaaacattacttggaagttctggctgtaagtctctttcattttgcaataattccatgctattccactcccagatagtattgaaaacttgcccaaacttgtggaggat

SEQ ID NO: 50089 - DNA, 724 bp, Ricinus communis
  Intron number 1 from transcript 28152.m000889 (locus 28152 .t000018) derived from phytozome v7.0 (chr-ID 28152; pos 9 5614 to 96337 reverse strand)
cacagtaatcactctccttaatcttatttatctttttctttctttccgaaatgtggttggacgatcttgaatcttttatggttttcccctgaatgttattctcgttgtcgttttgtgtgtgagtgtgatcattttttgttataagtaattgttgaacagatgtatctattgtctttttctgttattactggtgtctggcggtttctttttttggtaaaagtaaaaatggaaaattagaactttttctctaaacctgttaaagtgaagtaatttgcatgacctcttattatcatttcgattttgatcattctatgctatggttcagtaattttcgaaaacatgcatctgttgtctttttctgttaaccaatctatctgttttgttcttgttagtatatacctttaatttgtttctttagaaagaaaattgaaactttttctctgtcaaattaatcttctgatatatctgcttagtggaaaaattcgatttttttattttttgtgaatgaaccctcttaaaaggttcaatttttcttatttttgccatctagaaagattaaatattctggcttctaggtatttggactagagagctcctcatagcatgagagatcttactttctgtgtttgtttgtttatctttctcacacttttttttttattttttatttttttggttttcaatgacagaatttgctacagaacaaggtgggttatccgcggat

SEQ ID NO: 50090 - DNA, 669 bp, Ricinus communis
  Intron number 1 from transcript 28644.m000904 (locus 28644 .t000011) derived from phytozome v7.0 (chr-ID 28644; pos 5 1157 to 51825 reverse strand)
ttacggttacgtgaatttcagtaatcctcaaggtaattttttttcttaaaaaaaacatttaattgtttgattgctcatgatttgattaatatgcttttatgatgtgctgaattctttgtatattagtggtaaacgtgataactatggttatatttgttgttgtttgattcttgatttgtgagaagttatgttattgattatttcagtgtcagtgtgttaaaattttcgttggtctgtttttaggactgttttgtatgtgccaatcctttttctttttttttttgtcttaattctgaatatatgagattgcagttgaacttatttatttgattttttaaaatgtttaaatagttaaatgcgtgttttcaatgttagtatttgtgtctttgtttaatatttttgaatgatgtaatgattgctctttctggtattaagatgtttgaaggaactgcagatgttaagaaaattttgttataaggtattctgagtttggatgttattgttcaaatatatctttctttcaaatttttctggatgaatgacagatgtacaccacacacttttatggacttgatcatgttgattaaatttactactggattagtaatcactttctctcttctgtgaattatagtgctgacccatctatattgtaaattacagctgcaa

SEQ ID NO: 50091 - DNA, 793 bp, Ricinus communis
  Intron number 1 from transcript 29799.m000627 (locus 29799 .t000005) derived from phytozome v7.0 (chr-ID 29799; pos 6 0911 to 61703)
acagttttggccaaactgagggccgtccttgtgtaccaaggtattccaagctagaatttccttgaatacagtggacaagatgaccctctaggctggttcaataggtgtgagcatttttttcaccatcagcgcattgttggaggaagataaggtgggtctgcttcctttcatcttgagggtgacgcacaattgtggtttctaaagttggaaagtgaccaacctcatttgagtttggatgattttaaacaacaatgcaatctaaagtttggcccacctattcatagtaataaatttggagaactagcaaaactaaaacaaaatgggacagtgatggaataccaatattgttttgagcaacttacagctcgcgcgagcccttcagacacaaagtggaataattcattagtggtttttaagattatattgcaatagaggtagagattcaatgcctaactagcttgactagttcaacgagtttggcctgtttatacaaaggcagggagggtggcgaatagccttccacctattccacgaaatgccaacaccaccaatccggttgggctacatatggtgaaacgtctcactagggcaaagatggaagagagacacaataaggggctatgtttcaattgccactagcattatgtaaaagggcatcaataaaaaaggttgttctccatggaaatttgggatagaaaacgagctgctcgaggtggaaggaggctatgatgagataacatttgaacccaaaatttctatccatgttattataggcatacgtgctccacaaagt

SEQ ID NO: 50092 - DNA, 508 bp, Ricinus communis
  Intron number 4 from transcript 28324.m000399 (locus 28324 .t000007) derived from phytozome v7.0 (chr-ID 28324; pos 5 7983 to 58490)
caacagctatcgggcatatctctcacacagcaaaggtacttgattttgctaatgctgagttcaaaagtggctgcttgtttgtgctgaaactatcattaaaaagaagaagcatgatatgcattattatctgtaatggtatgttaagagtgaatgcggttgccatgtgtttgatgtcattgttctagctcaatgtttttcaggaatatgaaatttaagttgaattcttgtgtaagtgcttttgtccttttaattgctctttcaaagactcaaaccaaccatttgtttcagagggtgcattgaaagtttcaacatgaaaataaactatttcttttctttgtataccagatttgtgctgttttcttttgctgtatggaaggcatgctttgcaatgcaattactttgtacgtattattttttctttctgttgattagtggctcggatatatttcttacatgaggtttcttcttgttagaactgggagcttggcaaattgttctcgttagaaca

SEQ ID NO: 50093 - DNA, 474 bp, Ricinus communis
  Intron number 2 from transcript 29585.m000593 (locus 29585 .t000021) derived from phytozome v7.0 (chr-ID 29585; pos 1 51523 to 151996)
ctttggttactattttttccttcatttccttactggtgagtcccattagtttttctatatcatttccattcgattgaatggagatttgaacagcaatttgaatgtagttttcatgtcgtatatagttatttgctagataaactctcaatcatcgattgagtggtcgagattgtaaagacactatctttcttctttcttttagaatattggaggatgatttattattcaaaaatatcacctactaacttgttaggtgaaactatcattaattctattttgtttcttttaatattttccttcatattattttgaatttgtttaattatatttatctatagcttccttttcaaattcgcttaacccacaaaaaagaaattatattatgattaacatttgctatgcctacatgcaatcttctgacattcttctgcatatttatgactttataatttacataatttccagggcacgatt

SEQ ID NO: 50094 - DNA, 531 bp, Ricinus communis
  Intron number 1 from transcript 28180.m000376 (locus 28180 .t000001) derived from phytozome v7.0 (chr-ID 28180; pos 2 584 to 3114)
cagaatcgtaaggaattacttatattctatttctgttatgatattatgcacctagaaaattgtaacttccaggagtatattttgacattttctaccgagtgaattttttgattaagctaggatttcgcacatatgtttttggttaagctaggattttgcacatacatcttaaacacaaagccattaggagacactgaaaatgaagaagatacttcatttttaatttcttttggaaattttatcttttgtgcaaacttggtctgtagaacggggtttgaagtgcctcctcttaactcttttatttctctagggattactgttgcctagaagttaagggacgtaagcaatttataggagtaaatgataactgaattgaggcatgaacttttaatattttaaatcataaagactaattgtatatagtacatccaatggtggtacaaacaattttgcattacatgaaattctttaaatttgtgattttctttttgtgcaggggcactgggtatcctgacctgtggccttcctctt

SEQ ID NO: 50095 - DNA, 881 bp, Ricinus communis
  Intron number 2 from transcript 29765.m000743 (locus 29765 .t000025) derived from phytozome v7.0 (chr-ID 29765; pos 2 28453 to 229333 reverse strand)
cccaagaaagagagcctcgcgccaaagaggaaaaggtttatgtttaccgattttatcatgttgcatgtaacaatgtagctttgatattatttactaacttttttgtttgtagatactatattgttatgatgataccaaccctgataagtcttttacttgtatgattaataatccagtagtgaggatttgggaggttcacatgctcttgatgtcttgtcttgacatatattattttgtttgctttgaacttgtatcaaagattgctgttgcataatgaggctgtcttgaattctaaagttattgtctttagtaaagatagtgtctgaaaactgatttactgtttatttaagtttttcttttctttaattttggtaattctgtaattctaataaacccaatacgtgattttgttaagtagtgagagaaatgtttgaagggttaaaccctgttataacaaacaacagactccttttaaatcattttgttagtttcttgttacttcacaaagaatgtacattttttgacctgttattatattatactatccattgaggaaatcttgatttatgttctggacctgcaatccaattttgatttctcaccgactattctcagtgaatgttctttatttgctgaccatctatgctttgctgttgaaattaaaattttttacaccgcaactgttgatatagtattttgatagttcaagattttgatacagcatttttatgctgtatatctatagtttgttgttcacgaggcttgtgttacttttgtacaatttgcatttatatgttctttcatatgtttctttggtgcgacttgacgtattagttctcatacttctgttggtgtttttacagtgaaggcatttcccaaag

SEQ ID NO: 50096 - DNA, 987 bp, Ricinus communis
  Intron number 1 from transcript 29765.m000743 (locus 29765 .t000025) derived from phytozome v7.0 (chr-ID 29765; pos 2 29384 to 230370 reverse strand)
gcatatttgcagcgccactattgtttcctcttgaggtactatcgttcaactttggtacttattcactgcattagctaacttaattaacgcttttcgttttataattgatttaaatagacttgggcataaatctatggtctttgatcgtgtaatttgctgtgtaattatgtgtagaattggaaaattcattttttttccttataaaaattatgctcattgttaatggtaaatatatttgatattgcactttgcctagtggtgaattggaaatgacttcccttattgaaaactggtgagaaatcaaggctggagtctcagaaaaagggctctctttttaaccgaatacctaacatttgggtacttggaaaaggaataccaatgagccctaagagagttggtgttatttatttaatgccataggcctttggttgggaagcatctttcaatttcatttactgcggttctggtgttagacatcgatattctttaccgtggtcaatgggcgaatgtctatttcttttttattttaagtaatgtgaatatgaaacctttttgtaatttttggtttcagcttatatcataaatatttatatgaactgtgaaatttagttttcaaaatgtgtgtgataatttaattttggttttgatgacttctatgtttgtactggttgaactactatccattttaaaatctcttatgagcaatttatatttttagttaacttgaatttctattttgatacttgtcagtattttattattttgatgtcttgtaaaatctgatatattaattcttttaaaacatacttattgttgtgtaattctatttcaaaatgaaactaataaggagtagctaccagatttgtgatcaagccattatctgggaatttgttgttctatgttgttacaagtattattatgttcaactgaaaagaagtttgaagttgtttagtcttgcagttttattaccgagtttgaggtgtaatt

SEQ ID NO: 50097 - DNA, 410 bp, Ricinus communis
  Intron number 1 from transcript 29801.m003236 (locus 29801 .t000181) derived from phytozome v7.0 (chr-ID 29801; pos 9 59992 to 960401)
gcgagttcacttctctaaggtatccccaacttctcatcaccatcgcattgcacagagtcttccaagttttgacttgtcaaaagcaaaaaaatgattcctcttcctgacaagacacccaagccccagtaaaataattgcaacccaaaatataaataagactttcatgcaccgtttgcctcatcatattcttttgcttattaaatataggagaatactttccgctgaactaacagtaacagtaatctgatttgctgacttttaagacataattaaggaaaaacaatctttagcttttggaaaaggcatcaccgaccaaaccaccgttgtttcttttttctcttttgtatatagaaaaaattaaatttttaataccataaccactgatattttatctaatcaatagggaagtt

SEQ ID NO: 50098 - DNA, 665 bp, Ricinus communis
  Intron number 1 from transcript 29700.m000765 (locus 29700 .t000021) derived from phytozome v7.0 (chr-ID 29700; pos 5 08550 to 509214 reverse strand)
tgatcccaatccttcattaaaaaatcataaagaaggtatacatactatcactggttttatatttaatattatggctcttgaaacattttccctccatattgtgaatatgttgctctttgaattttaactgttatgctcataacattcttgacaagcatgccgcttttgtatcttgtggaatcaatctttagcttaagttgcagtcttgttggattcggagattccttatatctaacattttagttgcctattttcactaaattgaaaactcatttccactaaggcatgtagctgtaagaataaaaacaaaatcttgtttagctggattgggtttcttttttcttcattttttcccctgggctctaaaaggtgaacaatctgacaaggaagatttaatttctggtcttttgtctcttttcttttgtcttttgttttctgagctaccacactgtaaattgcatttaggaggtcttcaagcctgccctggtagattttgcatactgcatgactatttttaatgatgttgctttttcataatgaataattttttgccttcttttcctgctgatggtctttcttcatgttatggtttatttacctttttaagtgagcttgaattaaatgttgcaggattaaaagctatctgtaagaaaccagtcagtaaa

SEQ ID NO: 50099 - DNA, 657 bp, Ricinus communis
  Intron number 2 from transcript 28128.m000154 (locus 28128 .t000001) derived from phytozome v7.0 (chr-ID 28128; pos 1 1310 to 11966 reverse strand)
actttccaccagactatccattcaagccacccaaggtaacgttcaagctttttttatctgtgatagcttttcagttcattgattacccttccctttagaaaattgaaaagaagtaaaaccatcatttatcataccatgctgtgtgtgtggattacaataatttattctgtttaaaaacttaagtttgtaaaacttctttcctctgctaacaaggatatttgagtcgtcaccttggcatatttgtggattgtgctattgctgttcatcgaatattatgggattggacaatttgcaattgattgtgatcagtgaaatgcgtgagagtagttgtcttttcttcctatttggatttataaatgtagtttattttatcatgtgtagaagtgtaggctcagaatttatgttttcaatttagtgtttgaacaaactgctttttgccgctggccaatcctccactagatttgattgctcaggactcgagttatcaggttccattttacaaaacatcctcagtttcctgaatgaaaggcaaacatatcatttacttgctaattgcatctatttgtatttgaagttattcatgagttcagtttcctgacaccattaactatgatctggataggtttccttccgtacaaaggttttccatcccaacat

SEQ ID NO: 50100 - DNA, 996 bp, Ricinus communis
  Intron number 1 from transcript 27843.m000160 (locus 27843 .t000004) derived from phytozome v7.0 (chr-ID 27843; pos 2 3359 to 24354 reverse strand)
ttctttcgaaagctcaaatcttgccttcttcttaggtgggttcctattctctccctcatttttaattcagtgtctgtgttttaagtgtaaagttgtgatctttacatattgtgaaatgtcgtttcattggatcacattgctggagggtattagctccatctttattaatttatctacttacattttgtgctaatgtttttttatggttccttgatcttctccactcttacccatttgcaaatgagtgtaatgtatttcttgttctataaggggctgaacccatttcttgttagtcggttctaacaagatctaaacattagctgggtttgatatttgcaatgacattggctatagggacactgttatatacagttatacttaacactcttacttgtttgtttatagatgacaattctgttttcttttttcagcgaatttttgctaaactaatttcaacataaagttttttcccagtaagcttgagctaataatacttctccttttaatgttattcgaaataaatttcagctaatgggcttgaagaaatattgatgccatgattttttttcttttctgtttagtattcatattttttgcttgttttggttaagaattattgactaaatttattatcatctaaattttacttttctgttataataaattctaagggctgtgatctagtgataaaatttgcatttttgactcgtaaacaaactacgataacgttttgcttctgttggtaattttgatgatattgaacgttttactcattatattacgattacgactgccttcgtggtgatgcaatcctgtgtgacaatttttgtttttcgcttttcttttttattttttcttcataacaatttaccaaattatgtgcaacaagttttatccctgtatgaatgtatgttactatgttccttgtgttgatcaattgtacattttgtcaatcttgcaggccattctgaaattttgtaattttaaggttataaa

SEQ ID NO: 50101 - DNA, 436 bp, Ricinus communis
  Intron number 2 from transcript 29609.m000605 (locus 29609 .t000032) derived from phytozome v7.0 (chr-ID 29609; pos 2 42597 to 243032)
gaaaagaaaggcgttcctgatataataggtatttttgttttatttatcgtatataaaatggcataatgataaataaataaaaatacacctctttgaatttttgcaattttttcctgatcgtataattttaaccaattgatcaattctgagataaaatattgggattttttagttttacgaggtgtctgtaaggaaatggaagatagaatgttcatacttttgttctcagttttggtcacttggttaaaattgaaaacaatttctcaaattaggttagaattgctaaaaagtaaaagatttggaaggaatggcaaaaatttaaaaactttggacttttttttttttaaatcattaggcctataacattttggtatgtgtttttatttaaaaaggagaatgtttgattttgttggtaattatgtttggacagtgaata

SEQ ID NO: 50102 - DNA, 955 bp, Ricinus communis
  Intron number 1 from transcript 29801.m003180 (locus 29801 .t000125) derived from phytozome v7.0 (chr-ID 29801; pos 6 90561 to 691515)
cttctgccattaccgtcgatagttttaaggatttggtgaggttttgttttgttttaatatttcttcgtgttgttgttgttgtttattatcaacttaatatctgtttggtttggtttggttttattttattttatttcaatcatcaattaattttaataattaagttcttggttctgtttaggtttgagaaatgttatggaattattggtgctatgattagttacgacgacctttctttttctttttcttcttttctgtattataatagatttatattatatgcttaatcttttgagatttacatgtggttcttttgcatgatggagtgaaattgatgtttatgtaagcagtttggaagataaagatttgttattgtaatttttgatgttaaattagataaatattcttatatgttttatagtctaaagattataagtaatgcaaataatatcttctttttttttttttaagaaagggcgaataatatctttaagtgagtacttttctttagtcaagtagatgctttcagtactttctatagttcgaagtcctagaagaaattggactggagaattgttaagcgttcacgttcttggtttgcattaattcgtttcttttttcgacttgtaaggttttcttcagatatttatgattttccatatgcataaatgtgtcagaaactagggtatgtaacagattacaagggcatagatgatctcagagtgggaagacctttgctactgtctatgttaaagcagtgatgtgtaaatgagagtgcaacttgcaagttcattaatttcacttttgttcctacaactacctctcttttcatcaagttatccagtgcaaaatcatggattctttgattgtcttatgattttctatttattaccctcatgagtccttaacacttttttgatatttttatggcagggtccatctacagtgtggacag

SEQ ID NO: 50103 - DNA, 934 bp, Ricinus communis
  Intron number 1 from transcript 29637.m000760 (locus 29637 .t000038) derived from phytozome v7.0 (chr-ID 29637; pos 2 70230 to 271163)
ttcttcaagatcaacatactattgccggccgtactgtaaggccctcttttcttgtttttcttttaacttgaaagatttatttatttttcgaatttgatgatcttatttctagtttggttaattttatgtatattgattaattttgatttggaggcgttttcttttataggtaattagtgtgtttaattgaaacttttattggatactaactagatcctttaattgtttccttttcttcatttttttttttgttttccttaataacttaatttattgaggaaaaatgtggagcacatgacatggcttatgcttgaattggtgtataatgattgattgaaagggtttttgataatgttgatttgcatcctagctttaatgtatataggggatttggtagtttgcattaagccctaatggggtctgacttgcttagcaatgggattttgtattgtgctttttcttcttcttcttcttcttcttcttctttttcttgcttcctctcttccccttgcaattgctgaaagattctactattgaggtcatgaaatgcccacatttcaatgaatacttgatcgaatgaagtttgttcttcttgaatttggttattaacatctttcagttgtactttgagtttctttgctatatactttttcagaacagtagaaattacgccttgggtatgttgcttgtacttctgcatttgtatatgcattgccagaatattagaagactgcaagcctgatatgcatgaccatggtttgcataattgatttttctttttctatttgcaaagatagaattaattagagtttagcttcatgttacttttagcaagtacatgcgtgtgtgaatgtgttctgcaacttttctatttttatatttccactttggaaacacaggtagaagctaaaagggctttatcaagagaagaaca

SEQ ID NO: 50104 - DNA, 852 bp, Ricinus communis
  Intron number 3 from transcript 27446.m000482 (locus 27446 .t000012) derived from phytozome v7.0 (chr-ID 27446; pos 7 2536 to 73387 reverse strand)
ttgctaatttgaggcctgctactgtgttacctcaggtgatttttaaatgcaatgtttgattaccctactcctatttatttggtttactttgcacttccttttcctctttaccttcgcccagagataatatatgtggaaagaaacaaaatcatttcttcgagtttttggcattcacttataacagataagcatagctaggtatggcataactgaattttcccataaacaaaatccattagaaaaagcaagcaataacaattgtttcagaaattcattgatgaaatttgtattttctgaaatgcatatgattttgcttgctcgtttttcgaattcaaatctttgtacccttttgtaggagtagagaatttcaaattaatatgaactatgctgtgatgatgcagaaatggaagttgtgtgcattattgagtggagtagtcaatgtgtaaagtaactggcttaacttaatttatgctatgcgtacccatggaaggtatcaaacacgctatcaagcttttcttaccctcatgggtattggtagaagaaatacgtttaagagattggttcagttagtgtcttagctacaattatctggattgctttgtgtgccaattggtcttcttagcatgaatgctgaataatatgctatatgaattcaatgctttggcttgataaatatacctctagagaaagctatattgttcccacagtcacattttggtcagtagttataacgtgtatcatctgagtcttttccttttattatatggttctatgctgctctttagtagtatcatttgctttttccctgttaagaatatgtatatgtatcctgttctgtcttttagctagtgg

SEQ ID NO: 50105 - DNA, 510 bp, Ricinus communis
  Intron number 1 from transcript 29806.m000957 (locus 29806 .t000028) derived from phytozome v7.0 (chr-ID 29806; pos 2 23261 to 223770)
ctggtggacttgggtttctcagagctcctgattgggtatttattttccttttcagtcttatttatttgcttattgttattgttatttcagtagttgttgctactacatattcaatatattaaagccaaggcttcctaatctttattgtaattatctttagtttactgtcatgctttgtgttaaatcagtgactgcaactaaaaggttaattctttgtgatcagaattctgatgttccttgttagttttttgaattgtggtgttgaatgtataactaactcattattatcaagatccttaagcatggttatctctggggaaattaaaattgattggatggtgatgcaataaaggagaaaaattgatctgccccagttaggatgagttcagactttgagatagaatctatcacttgaagagaaaaaagaaaagaagagagaatggaaggtgattcttttttcaaaattttgtaacaggagtcacctgattacttgcggggattgataaggaa

SEQ ID NO: 50106 - DNA, 383 bp, Ricinus communis
  Intron number 2 from transcript 29603.m000539 (locus 29603 .t000031) derived from phytozome v7.0 (chr-ID 29603; pos 2 23805 to 224187 reverse strand)
caaacagtcgagatcactcggctgctgttgaggtacacttgatcacacctctttttggctgtatgctagatggtttatggtttatgtcttaaatcttctatatatttaattttaaaagtaattgaaaaacatactacttcaaaaataaattcaaaatcacttaaatttttatgaagtgaaatttctgattcgtcttttcatattaaaatacataatgtgggagcattaaagagtatcaaaccgtccgaaatcatattttcttggagatttatgttgtggatgtgctaatctttatttgactatgtcctgacatgcaaaccaaaaattcaatttaaacttgtaattattaattagcaatatctttatttttttattattctcag

SEQ ID NO: 50107 - DNA, 556 bp, Ricinus communis
  Intron number 2 from transcript 29688.m000269 (locus 29688 .t000016) derived from phytozome v7.0 (chr-ID 29688; pos 1 08793 to 109348 reverse strand)
cgcctgttgacggaggtgaggtcaaattgaagcaaatataaactgcaatttatcttttagtaattcagctttgcatgtcgaatatctcttaagtagttgattattctgtttaaacaccataaccttataaaaggaggttaaaattaaaaactgattttcttaatttggttttagttctgttttattgacaaaacactcaaagcatagctaaaaatatgcagaaaactgggttgatggtacctgtccttttatataactatctttattgggtattctactgcaaccttttggaattgtaataagacaacagggaaaataatgtttcactagttggttttggttttaccttcaataatctaagcttattttatacaatttaattttccttattcctattcaacaacgtgctaataattccttgattttgtttaagtgattggtgaagttcttgtctttgttgctggagtaatgttattggaagaatgctcatgcagttctttctttctatttgttttgtctagcttttaggcacaccaactgaatcagatcttgggtt

SEQ ID NO: 50108 - DNA, 1037 bp, Ricinus communis
  Intron number 1 from transcript 29729.m002351 (locus 29729 .t000084) derived from phytozome v7.0 (chr-ID 29729; pos 4 85516 to 486552 reverse strand)
ttcaaaggttaattaagcatcattttgcaactgaggtgagaaattcccaccctcttttctttgtatgtctttttctgagagcaattgatatgcaatagttcctttttatttatatgcaatagttcctttttcttttctctgatgtaacttcccttcatttattatgataggattaaccctagaaaattttcttttttccgtaaaaggtttttatgtttggatctttcttcttagtttatttctatatgctttgatgaagttttcttacaatgaaagtttgtttttacattttccttatatcaaagcaaatatagtaccttaaaaatgtggattcctcaataaggaggtctcatcttttgaggtgttggtactgtaaggattgaactgctatagttgatctgtggacagttattaatttataggacgactaatggatgggtctgcgtttttctactgaaatttcagttagatcatagatcagtggacctcatacattgctttgtgcatctccttcttttatctagtatatgtgtatttcctgctcctcggggcatggctcattccatcattcatgccttgtatgtggtgggaaactcatcttttcacctagaagaatggacctttttcagtctgaaatggatatttagtaattagcttttctagtttaggggggctgggggataatttacctgcatgtatcatcatgtggcatgctgttataagctgatccagatgctgcccgaaaattttgagctggaagaatttaagacatacagtccttttctcttttaacttattaaattcacactacatggcattttggcgctttttaatgtaaggtcattcagatctgttcacctatgacagtcagttgaacagttatcaggggatctgagtggcccccgtgacttttaactgcatttgtgcatatgctttactgagaaattaattcaattttcacttggtaaactaacatcaagtctttttgtatttcgtgtataggtcttgccatttggttctgtaccactgaaaacgta

SEQ ID NO: 50109 - DNA, 399 bp, Ricinus communis
  Intron number 1 from transcript 29776.m000483 (locus 29776 .t000017) derived from phytozome v7.0 (chr-ID 29776; pos 1 39053 to 139451)
tgagaggcctgatatctacaagaagattcttgaaggtaaacatcatttcttctcttcctggcagtgttgctactaatatttagagaaaagatcatatttaatataactaataggaataatcaacaggggtcgtgccattaggaaatcaaacttttataacgatttttttgtctaattttaagaatatttcttcatttatacactagattaatagatgagcggcacatacagaaactataaaatcctaatacatacgtattcatttgatatatatatctagaatgagcaagaattacctgaatgtttttaggctatactgtatgttatgaacaactgtaactcacataaattaaaatgaaaccagagcaaagggaggtagcctcagctaagaaggaagga

SEQ ID NO: 50110 - DNA, 480 bp, Ricinus communis
  Intron number 4 from transcript 28629.m000555 (locus 28629 .t000010) derived from phytozome v7.0 (chr-ID 28629; pos 6 1054 to 61533 reverse strand)
tacgaggagtgaaacctgatcaacagctggtcaaggtgtgtttctatcaatttaatgcggttgaagaataacaatgttttgtcagattccataaattatgtacttgtaaaaatggaaaaaaaaaaaaggaaaattcttttacatagtatttgaaaaatctaaaaatgctattttagtcaactctcatgcgaacaaatgtcatagcctgctatagttcaattctttgaaattaagaaaaaaatagcattttgaaagaaatgaaatcatgcaaaaaaggacatgtttttgcaagaattgattcttgcaaataaagtgatccaacagggccttagtaaatttgaagtatcaattatgtgatctttgatgcaagtgcctgcccaggtattacttttgttggttgacatgttcaattcttttattggtgctcttttttattagttattttgatagtttttattttcttgttcttctagattgtac

SEQ ID NO: 50111 - DNA, 545 bp, Ricinus communis
  Intron number 3 from transcript 29333.m001075 (locus 29333 .t000038) derived from phytozome v7.0 (chr-ID 29333; pos 2 80343 to 280887)
cgcttagcgatcctcggttaagggcaatttacattgtaaagctaatatcttttttcttttttatgtgttatttagaattgttatttacacttgctatgatttcatttctggctttttgataatttatttgtttttggactgaaatcctaatattttaggtgtataagtatgataaccgagttattcaaatgttgatttttactctgattcatgtttttagttaagtgataagtgtttaatttgaatgattggatgctttcattggctgcatatatacatgtagtaaatggatgaaaggaggtagcaggtctacttgcagaaggtgaagaaatgctataatacccaagtaatgatttacacctaagtcttgaaatttgatgtagttagacattaattcattctgaagaactttcttggctatgcaatctaataataaatgctgttctatgtgtttctctgaagtatttaatgtattagtttcccacgttgaaagtatttatgagattgattcttctgtttgttacagctaaaccttgaaggagtag

SEQ ID NO: 50112 - DNA, 419 bp, Ricinus communis
  Intron number 3 from transcript 29794.m003436 (locus 29794 .t000135) derived from phytozome v7.0 (chr-ID 29794; pos 8 86546 to 886964 reverse strand)
gggaaatgtaatgattttttatcctatttatagttgctaatggtgcttacttattcgggttgatttttcagcatgtagttgcctattataaatgaattcctgcttcatttgattctgtcatcagcggctgcaatattacatatactcttgcaaatctttttgttcttcagaagacccagaaaataaatgtagaaatctgttcgacatattgttgtttctattatgtactttctctatattagcatatttatgctaactgcagatttttttcatggatttatcatgtatggactacggacccttgcttaaattattgttactttgtctagataatttgtggccttttttgtgtactccagatgggatgatcatttgactgttttatttatttcagttcttaataattctaaaatttccag

SEQ ID NO: 50113 - DNA, 457 bp, Ricinus communis
  Intron number 2 from transcript 29585.m000588 (locus 29585 .t000016) derived from phytozome v7.0 (chr-ID 29585; pos 1 25984 to 126440)
tttctagtaaagacatcaaggtacttctccttttttttcttctttaatttcttgataatgggtcaatgtattctttttatcagttaatctaagtgatagctttaaaacactgcattatgtcgtatatgctctcaggattggtagatatttgcttgctgagcagtaatgtatggtttcatgggataggcatggtttgtaagtttataatagaggtcaatatcatatgggttttcattgtttcataaggctcactgcttcatatgtgacctttttaatttagtttcttttttttaacattatacttattaatgatctgcacattctcaattttgaacagctagcacttttgtcctgttttacactggcctactttgaatgaatcatgcaagatgaagattcaaatactcgtgtgtgtgtcattaatgtatgttaggctctctgcagttgcttttctctg

SEQ ID NO: 50114 - DNA, 837 bp, Ricinus communis
  Intron number 1 from transcript 29686.m000894 (locus 29686 .t000041) derived from phytozome v7.0 (chr-ID 29686; pos 3 45256 to 346092 reverse strand)
tgcccaggtaagttattcgttaatcaacttttcttttctttggtttattttgaagctataataaattagttggtttttatggataaaatagtccaagaaatttactggtgctcctctgagttagacaacaactgaaaatcactgtactcttaggatcttctatgtttagtttagtgtagtttggttgttttgttcacatctttgtcttggaagaagcaaacttttgactttgttcctaactgctgaagagtgtatttgtctatggtgaaatgttgggagattggtactaaaataaattgtattatgatttaacattgaggtttgtctatggtgagtgactaatctggaaatcatgggatgcaggacacgttctcttcctaatgtctattaggttatctattgtttctcctttatattgttcctatctgtgcaaagaatcatgctgccatttatctgaattggaaagattgagactttaatagagcttccagtctgtccaaacaccttttattcactctcattattctagcttacatcccttggatactagaaaaactataaagactttatcctgtccattaccataaattagatgcgcaggttgtggacaaatgaacttccatctgtcattagaggcaacaacctgccagatgaaccttttttttacttcttagcttccttgtgtttttttaaatgaattagaacatatgtgtgaagatacatttgttgttttgataattaacttttagctggttgtagttgttaacttcttttacctttttgtccatttttgtgctgatagagagtgaaaggacccaacgagagcgactgcgagac

SEQ ID NO: 50115 - DNA, 503 bp, Ricinus communis
  Intron number 1 from transcript 28117.m000016 (locus 28117 .t000001) derived from phytozome v7.0 (chr-ID 28117; pos 3 132 to 3634 reverse strand)
gaaaacaattgcaacgaaagcaggttaattatatagtctttttctgtttttttgagctcaagaaacatagcccactacttcatatgtatcacaggcttgatgggtttgcttacaattgtacaaaattctttggaattatggtttcaggtttaaacagatgtggaaaaagttgcagactgagatggttgaattatttgagaccaaacatcaagagaggcaacatttcagatgaagaagaagacttaattcttcgacttcacaaactacttggcaacaggtacgtaatttaccagtaaaattcatcatccgaaatgtgacatttttctgacatgtttttcaagttttaatatttttattttctttttggttttagatggtcattgattgcagggagacttccaggacgaacagacaatgaaataaagaactactggaattctcatttgagcaaaaaaataaataaaaaagaggaagccccggagcctgcaagaccgcaagaggcc

SEQ ID NO: 50116 - DNA, 365 bp, Ricinus communis
  Intron number 1 from transcript 29629.m001403 (locus 29629 .t000054) derived from phytozome v7.0 (chr-ID 29629; pos 3 00669 to 301033)
tgctgccgtcgttgtcagccgctgctccgtctcaggtaaggctagccaaaaaccattttgtttatactgtactttcacattaccaatctaatgatattttcctgctgttaatatcttttaatttgtaaattttgatgtttcttcatggaattgctgaaattaaacatttttctatacaatttagttgccttcattttaggagggaaatatgtgcgagatggtgcacgttcatttggaagtaaatttgtaatttagtgttaatgacttttaactagctaaatcctcttttgtgtatattttacttcatttggaagttactatacacttggcttttgcactgcagatacatattgtggttgagagat

SEQ ID NO: 50117 - DNA, 733 bp, Ricinus communis
  Intron number 2 from transcript 29709.m001233 (locus 29709 .t000069) derived from phytozome v7.0 (chr-ID 29709; pos 3 54718 to 355450 reverse strand)
tcattggtggtccatccaccgaaggacttggtgctgtaaggactctgctttcattttttaaacaatatccttttttattcttttttcttaactcaatgcttaatgctctattcaattccatatgggccttgtaattatttatccagaaaacattgctactattcctgcatcagttataatgcaattctttttcttgttgatctagtctatgtttgaaaaaaatttaagtaaggttttataaaacaaatggaggtaaggttttaagtggtaaggtagaatctttaattttgttttgtttgcaaagaatggatggtggtgactaagagttttaagaggtaataaagttttttaaactataatttcttcaatccacccatttggcgtagttgagatttgaagacctccaaaaaccataccttctgattaggaggttccaaaactttataaaaccctcaaaaatcttggaaaacttccatccaaacgggctattaaagtttagttaaacccataacttatcttattcttcttatatctttttttgtttggcacttcaaggggtattaattctccaacttcagtcccctgttttacaagatagattttcttgtttattctttctgcttttatgtttcttgatttcaattgccgagatcttgaacagttcatcatatgattgcttttctctgtctgattcttagattgtatcaaagaatctctctgaaccaatccgttc

SEQ ID NO: 50118 - DNA, 853 bp, Ricinus communis
  Intron number 2 from transcript 29747.m001084 (locus 29747 .t000041) derived from phytozome v7.0 (chr-ID 29747; pos 2 95154 to 296006 reverse strand)
cttagttgggataagctccttccaggtaaaatggtgtgccctttttcttgttcttctcttcattatatatatatatatatatatatatatatatatatttcatttctgctgagggctttacatgttatttaagaaatagagttttcaaggtttggaagcaatttagtttcaaacatatgaatgtggaaagttgccttctttggcaaccatgtcattaaaactgaaataacatatatgtttaggctgttatttgggatataaatatcatataggaaactagttcgctatgaactttgctcctcttttgatttgattgtgaaggagcaacttttctttatgtctgtgttgataaaaatggcaaagtaaagttattatttacatatgcctaggaagttatattgttaggttgttgatgcaggcaattttgctgaagactgtttttgcatgcgaaagcatgattatattctcgtttatgcctcaatatatgctatggcataataactttgctcatctagctggcaaataacatggaagtcattagagtattaattattcaatcatcttgtttaatatttgcctctcatgatgtttgcttattttgtaggtcaacttagtttcttttgctacaactttacttgtcatttttagcatcgcatttgcaatattgttttatcttgtttaagttatatttattcaaattgtgaactttctgtagccagaaattttcctctttaagttcgagagcttttggaatatagttttaaggctcagttttactaactatcttggcactgcagttgcagaattaaaatatagttggcgaaaatgtttgtctaacttgagtagttaacag

SEQ ID NO: 50119 - DNA, 639 bp, Ricinus communis
  Intron number 1 from transcript 29794.m003458 (locus 29794 .t000157) derived from phytozome v7.0 (chr-ID 29794; pos 1 011491 to 1012129)
aagaaaaaagcttgctcttacctctaagaaacctggtttgttaacgacaccactctattttttttaattgtattataacattctttttatgttcagcttagaagatattctttgagatctttaaattttcacttgagtgtcttgacttgagatggttgctcttttaaagctttacttgctaattttttaagcaaaattatactgtctacaagaggacttaaagagaagaaagagaatgtgaggaagtgctggaaaagactcgatctctcatttcattttctgtaactttcttgggctggcatggagtgtgaaagcaagattttaagcaaataattttctaactcgaatatgtttcttataaggaaaattaagatgcaatgagctgctcagtgactcatcaaatttgaagcaaattaatagaaaatgatgatattactggttatgctcaatttgaatttagcattaacattgtgataagtgagaggattctgtaattgaatgtatcatacgctatcttgctggaaagtttttttctttctctaatgtttgtattacggtaaaagtaaatttaattttgattctgcatattacaccacgtaaagactagtaactattttcttcctctacagggaagacgca

SEQ ID NO: 50120 - DNA, 719 bp, Ricinus communis
  Intron number 1 from transcript 28842.m000950 (locus 28842 .t000045) derived from phytozome v7.0 (chr-ID 28842; pos 4 15388 to 416106)
atcgcttgaacaagcctgctcttaagagcattgaggtatactctctctttctctctctaaacttctgtttggttcctgagaaagtcagtggcaaagtgaagaaagagaaagtgcttttttctttctttcttttgacattgtcttttttttattattcttctttaaaaataatgttttggatttttgaaatgggttccaaattctttttgctttcctgcaatttgttattttatttttacctcaggaatcaaatgggttatatggtttatgaatgccaaatgtgtgttatttatatttatgtttagttttgtaataatattcgctaatgtttttctttctctcctttgttcagtgaaattttttagattttaaaagaatcaaatgatgttgtgattattgggcttttctttctcttctctctctgcaattatttcctttttgagaagttaatgaagaaataaagaatagaactcaaagtttcctatgcaactaaacaaaacattaatgctgatgggtactttaagttgagctttctttatttctgtcctcttttctgtttcaaatctctctcttttgtttctatcattctttgcacatttttgaagtaactaaatgtcttgatttgtttgaatgagaaatttctgggtattactgtggatactccattttcttattattattatttatttttggattttttatgtctatgcagagttcag

SEQ ID NO: 50121 - DNA, 869 bp, Ricinus communis
  Intron number 1 from transcript 28629.m000552 (locus 28629 .t000007) derived from phytozome v7.0 (chr-ID 28629; pos 4 7128 to 47996 reverse strand)
agctgatatttggaccaactttggtgactcttttggtaaatatcttttgcttcctccttgattttgtgggcttgtattgctgaaatgtctaatgtgtttatgcaaactaatttttctacatgtgcaacagttaggcagtgtttggaatgaattatgtccaagagtccagttcaattgagttcttacaagatcatgcccattttgatatggttttgttgctcttcgagatgctttgttctagcaactatagactttctaaacatgagaattgactaaatacaattcaactgaattcttgcatttttagtaattccaaacaaggggttgtagaagtctgacagtgttgcgggcaaaaattagcacttaaatttataagtgccaaaatttagctttagcaacaaccaacaacatattttcgctgaagcaacttttttcttaggggaaaaataaaaagaagttgatggttctctttactaattatgtttcttgtaattgcagcatagcctaaatatttcaggttgcactttatagaattggcagttatcatcttatctcacccaaatattactatcagatagcaataatccctttctctctgtttatatttaattttcaatctacaaaaatttgtaatgggagtaactagcacaatatttgtgccacttaaaaagaggggatcttgatatgttgttggtggccgtgtttgtttgtggggttaaagcttcttattacaagttacaaccatgcttctcagtttttgggatatttgcttgtgcatttaggtttacataacccttatatggtttctaatgtgatttctcattatgttggcagatacatattcctacaaccagctttgtcagcttgca

SEQ ID NO: 50122 - DNA, 552 bp, Ricinus communis
  Intron number 1 from transcript 29683.m000482 (locus 29683 .t000020) derived from phytozome v7.0 (chr-ID 29683; pos 2 19799 to 220350)
ctttccctgtggctcgtcaccggtctcacggacccgtaagtttttattttgttcatttgctctctctttgctttcatggtcatcctttttctttctaattggaagccaatattgattttacttgcccttgctttatgatcactcttggaagccatagcttagttgtttttggctttggaagtttagaatttgctattttttcttagtgtttgattctgtgtttgtggttttcatgaaatttaacattttgacttttggttatttgatagagtttagggaaagataaaaattttgggttactaatataatcctttagctttgttgagagaactgcaaatgctttatagacttgcaaatttaactttcattttgaaaaagaattgtagcttgtcttggtcttaattaattagtgacaaaccagtttaaatggttgtgtttcttggtttttgatgaactgatttatggttgtggttagttccagaagtttactagttaatgatcttcttaaatcttacagcattacggctgctgcgtaagcagtaaaagtactgc

SEQ ID NO: 50123 - DNA, 618 bp, Ricinus communis
  Intron number 1 from transcript 28830.m000231 (locus 28830 .t000012) derived from phytozome v7.0 (chr-ID 28830; pos 7 8013 to 78630 reverse strand)
acctgctggtatgaattcttctaattttctcaaaagggtttgtctttctttcttcttcgttgaaatgcttatgggttaaattttgatggtttcttaaacccttgctcttctcaaaccccatgactggtaggccattgcggtccttctttgtatttgacccttattattttgttctttcctttgcgttttcttttactgtcttttcttttcttcctttttccctattaagaaatcaaaaaatgcaatagcagggttttatctttctttctcttgttgcagattaaaatttgagtaatggttctaacataaatgggaatcactaatatgattaattagttatctccaagcaatgattttaaaatctatttttgggacataagcagaaacttcttttgaaaagaatgagaaaatccgtacttaaagtttggatactggattgattttatttatttatttattttttgcttcttgtgccctcattatatgttgtcagagttaatctgttattaagtgtgaggaagcagaatattttgatcggtatcatttttctattatgtattaaggggaatctaatgatggacagagcaaggaagaacagaaccaagccagtatcacatt

SEQ ID NO: 50124 - DNA, 602 bp, Ricinus communis
  Intron number 3 from transcript 29788.m000329 (locus 29788 .t000012) derived from phytozome v7.0 (chr-ID 29788; pos 7 3551 to 74152)
gatattcaggccaagaaagtcaataccttgatcaggtatgtgcttatttcttatcttttcgtttgatagatggcctgaatctttgaacttggattctgaggtttaacatacttgttgagtgcatatattacctaaataattgtgctgaatgatttgttagcatatggatgagtccaaaatgtggttaaataagcaaattgcagcatttgtatttcttgtaggtggaaatagtaggatatgaccatcgttaggacagattgagaatttaactgattgatattaatgaatgtaacaagcattaaactgatgactactcattgatactcattcataatctcacttttgtgtgaaagtgttgccctattcttttctttttttgtgtgtgaaagtgttgccctattcttttttttttttttgtgtgcgcataaacttgggtgaaaggttgactgtgtttaagattagtcatggcggatatgggtgtctgtagtcaacaatgctttaacaatgtgaaagatgctttgtaggtttctatgcttggcatatagttctttcttgatcttcttttctggttgacacatgcttccttttgttttccaggcctg

SEQ ID NO: 50125 - DNA, 749 bp, Ricinus communis
  Intron number 1 from transcript 29747.m001091 (locus 29747 .t000048) derived from phytozome v7.0 (chr-ID 29747; pos 3 63887 to 364635 reverse strand)
ctgccaaagcaaaaaatcaacagaagaagaaaaaggtacttcctttggcttcaagtaacggcgccaacaggcaaaactttttgagatctccttgctcgccactatcaacttcccggcaagttttggaaaatgagattgaaaatagagcaccggaaaatgaagacttcacatccggtgagacccagccagagtctgagaaagagactcctacaaaaagtgaagaatgtggagatgtttcatcaaaggaaggaacccctggctatcgtcgttctagttcagttaatatgaagaaaatgcagaagatgtttcagaatgcagcagaggagaacgtgagaagcataagagcttatgtgacagaattgaaggaacgtgttgccaaactgcaataccaaaagcagctacttgtttgccaggtatagtatttgcagttcatttggttttttctgctactatagtggcctgttattttttcatttgaatttatgtagtaactgaatattaggaaactcatttcatattcttcgtctgtcatcctataggtccttgagctggaagcaaatgaagcagctggatataatcttgaggatgaggagggcactattgaaccagagccacaagtttcctggcagattacttttagagagcaaaggcagcagattattgaactgtgggatctatgctctgtatccatcatccacaggacacagttttatttgttattcaagggagaccctgctgatcaaatatac

SEQ ID NO: 50126 - DNA, 771 bp, Ricinus communis
  Intron number 1 from transcript 29630.m000811 (locus 29630 .t000036) derived from phytozome v7.0 (chr-ID 29630; pos 2 38659 to 239429 reverse strand)
tgtttacgcttgcaatccagaacaacttcctttcagtaaggctcttttttgaaaaaacaaaagtagttcttacactaaatcaattctccctctctcatgcattacctgtttggctagtggtttgatttgtttatttttcgtagtatataataaaccgtcacgaaatcatgcatcgtaatattgatttgtttgcgtttctttttcgatgctattgttctacacgcactcatgcatgatttgtttggttttctttttcaatgtattaactcataatttgttccattcataataatatctggataattgaataaaaatcatatttagaaatcaagttttggaatccattactttttaaatctccgtactgatctttttctatatcgtactagtcgttattctgatatataaatgaatgtttagagatctccagaaatcacgtgccttagccaagtcatgttttggaagcaattctgctgctgtaaactcataaattcgtggcattttatttgatgtttggtgtattatattcgtgtttttggaagaggaatagttgttaggagaaactcattcgtgggcaaaacataatttgaatatagatttacatattattgcttgttgtgtaactcatgttaatttgatgtctttctagtgagaagacaaatctgtgacaaacattaagtattcttttgtgataatcaatcaattttgttgctttaaaaagtaacatagatttgtaaatgcaggactcttcacgcgtggaatttcacatat

SEQ ID NO: 50127 - DNA, 976 bp, Ricinus communis
  Intron number 3 from transcript 29732.m000319 (locus 29732 .t000012) derived from phytozome v7.0 (chr-ID 29732; pos 6 8882 to 69857 reverse strand)
cgagtagaggaattttaagagaggactttgatcctgtaaatatataccccctttattctaacactttttccttcagttgatttttctatcgtattgttggtgtatatatgatatctttagcgttttccagaactcacaagccaaattatttcgttgtgaaagcatgtttagctgttctttaatatggttcattagttgattggcttgtgcccatcttgctatattatctaattgtggcatgaagctattgcttatgatttttcttatctccttcacgcctgctattgtgattttttagatccatttcttttggttgttcagagcagaacacaacaacctaaccctccaaaattcttctgtttcaattttctggaaattggctttccaaaacaattttgtggcttatgatttattggtatgaggctggagttgcctcacttagtgtgtacaaatcttttctcatacaaaattgaatatgtactcaagaaaaggcttaatatacaagggaagttatattgagtatctaatttgaatttcgctcccaccctcccgacccctagccaaaataatagaaaacatagataaaggccttcatatccttaacttccatttgaactccttccttggctctcttaagttcaattcctgagtgctgcagctggcttatggaacagtaaggatgaatatccttaaattaagatttttgtctacaagtttgacatttgcatggttctttaaattttcttaaatttcagggtgtggttagtatgtttattgtaatttttcctcttttcaaataaagcacttctgtcactcaaaaactttgtacagaacctgagctgtttatttgcattggcttggataggtggtaattaatatgtttctctctcaaattggtatgttagtctatcatggatctgaacagtctatcatgaatctgaactgttctcgtgataggttgaaattgcccaagctt

SEQ ID NO: 50128 - DNA, 899 bp, Ricinus communis
  Intron number 1 from transcript 28226.m000855 (locus 28226 .t000025) derived from phytozome v7.0 (chr-ID 28226; pos 1 21866 to 122764)
ttcctctcttccgtttcaaaggcttcgacttttcggtaaagttaccttacaaattctgtaatcacaattgttactgttagattttgttttctaattcttttacaattgaatatgtgtgtgtcaattccataatcgattcctgcagtttcaatttcagttctgctttatatttgatttttgtttcaattcttctttttctctgttgcaaaatacagtgaagaaacagatgggcattttttgctttcttcaaaatcagctgcttctaactgttaatatttagaatccaatgaaatcttcttttatctccttttaactcttgtctcttctgattctgtttttaaccaaacaagaacaccacttttcttttttcatactattacctgggaactccccaaatttttattgagaaattggactaagtaatacaggtgttcgcagcttctcgccgtaactctccaactttctatcagaaaacttggcttccaatctcagttagcattttgttcttgcagagattgtcgattgtaaatcaacatgcgaataagacatagctttctgctttggcctctaacacagtgattgtttaccttctatccgatgctactgtaaaataaaattaataaaatattatgcagcttcccttacattattctgatcatagtcaagaacttaatatttctcatgatatttgtttttagtttgttttccgataactttcttgatttaattataattccttacattaaggatacctgcatcaactattatatccttataatgattatattagtttctttagctcatgcaagcacaatctgattttttcccctctaccgttcctgttttattttcatttaatatctgtaaacacagttgttcttggctcctcttgttatact

SEQ ID NO: 50129 - DNA, 269 bp, Ricinus communis
  Intron number 1 from transcript 28660.m000193 (locus 28660 .t000006) derived from phytozome v7.0 (chr-ID 28660; pos 1 33955 to 134223 reverse strand)
tcttcaattcaatatctagaggtactttcctaaatacccacttgcttatccttcatattttgcattttttaacttctgggttcaaaatggtttgggaatttgctagagtttgtacttctgcttattattcttcggaatgatggtttttgtttttggacttcattttcaagttctgggttttaattcactatataaaattccatttctttgttaatctttttgcttgtgttaatttcagggtctaaacccagcaaacttgaaaaaattgt

SEQ ID NO: 50130 - DNA, 397 bp, Ricinus communis
  Intron number 1 from transcript 29801.m003191 (locus 29801 .t000136) derived from phytozome v7.0 (chr-ID 29801; pos 7 46171 to 746567)
ttgataaaagactacgttgtgatcctgaaattcaagtaaatgttctattcctttactgttattttctttgagaaacgtgtcaggtcaaagtttctcttctttaattattgttttagttcttgagaagtgtaaagttggaaattttgtgtatttgaggttggttttttatttttcttaactgtctatatctggcctgcctttagtactactttatagtgattcaagaattgaaatttgttggtttatctctagttggataaagtgggtgttggtatttgaggctttatcagttgtcagctacataattatgtggtttatctgcagtttgatgaaatgggttttgggtatctaattctaattctaattcttgaattgcaggattgtagggaagtggtct

SEQ ID NO: 50131 - DNA, 486 bp, Ricinus communis
  Intron number 1 from transcript 29739.m003629 (locus 29739 .t000065) derived from phytozome v7.0 (chr-ID 29739; pos 4 12498 to 412983 reverse strand)
aggtaaacatcaatttttcttgctctattttctttctttttattttctaagctatactctttgaaatggaagtgtagaatcaagggatcatgggtttgttttgatttggctagagaagcatgaaaatcttcacatttctggatgtaatgaagctgtagatataacagatcaagaaaatttcctttttgttcataaatggaaaagtagctaaattggaaagacagatgctatgttacttctagtttgatatagccgattattccgttcttgaatttattatttctagatgaaatataagaataattactttaaattcctttgtgcatatgtttttgctatgtgagatctttaattttcttgctaaattagatttttgagccctcagcttttatttgaagtgggtgtttttggaacattttttctagcaaattaatcttgaaacattgaatctggatggttgcagaagaggcatatcaaaattttaca

SEQ ID NO: 50132 - DNA, 592 bp, Ricinus communis
  Intron number 1 from transcript 29589.m001240 (locus 29589 .t000019) derived from phytozome v7.0 (chr-ID 29589; pos 1 54781 to 155372)
actgaattgttgaccaggtgatttttttcttaaatgttgggttatttgtagtttttattctaatgttgtgtctgatcaattatggtttttgtttaatttctttgatcattagtttctgtaattgtctgaaggtattgttaatggagttgctttatcattgatcattttgacaacttgattaacttcgtatttgtcaatttaaggttttgaggttatttatgatcttttgtatctgtgcttattaggtgtttgatgcttaagaggtatgctttgtcgtgtttattatggttttggggtgccactaaataaatgagcttttggtgatttcttgttatgcattgagtttcttgaaagtgcatgcagattctgtttatgtggtctgttttccaatcatttcaaggaggtcgcgggctacttcatttgtcaaattcttcaaattctggtctctgctgtgcttgtgcattttttgcatctccttgtattaatattatttctcgaaaatgtggatgtgctttgtagctcgatttactttttctgggattcatttgaggaatttatagaattggaatgattcttcaatattgtggcaggt

SEQ ID NO: 50133 - DNA, 997 bp, Ricinus communis
  Intron number 2 from transcript 29772.m000320 (locus 29772 .t000013) derived from phytozome v7.0 (chr-ID 29772; pos 1 22802 to 123798)
ggcgctgttcaaggttttcttttctttttattattatatttaatgctgtatctcttaatttctggaaagttaaataatgtgtcttttgattgttggtgattaagtaagaaagtgatgaatgtgtaatgttggctttaggttgagattattcttggttaaattaaagaattataaagatacattttttgaaccacatttgagaattgagatgctgtgacagatgatacctcaacatttttacttatttaccatgtatataggattctctctttttttatggggttgaattatgagttgcaaataatagaaaagtggacaatgcagttcataggttttgatcatagatgcgtttcttttaccctttgacttaaggggtttggaaagtttgaccaaacatcagtttgatggatttggaagctcagggtagtcgttaattttttgttcttctattttttccaataactaaattgttaaatgtgcttgaacattgagaaagattattctttctttttcttttttctggttcttgatggccaaataccttttctctttcctatctcatgttctgcaatgttctgatgttctttttcgtattaaatttttggcatgcatttgttatcagaagttgtgattttcttataaaaatcctacctcttctctgtgatgtagtcaaattctttgaccattaaaaggattttaaccaacttggtgttggcaaatctgccgtcatggctactttggtatataataactcttttcaacatgttctagtttcatgcctctagattcaatatctagttaaatttttattttaattttttcatgcagacaatcaaaatatggttcttgtttaaattttctttttctattttcctcactttagctgctatctcatttttttaactttttgcctatttggaattttaaaatcatatatttatgtgtggtaatgttgtacacagatccagctagtgcagctgctaaccaagccaataag

SEQ ID NO: 50134 - DNA, 1016 bp, Ricinus communis
  Intron number 3 from transcript 29780.m001356 (locus 29780 .t000042) derived from phytozome v7.0 (chr-ID 29780; pos 2 87712 to 288727 reverse strand)
ttttataggtataatatccatgtacattgagaaattgtgatttctattttcatttgtattaaaatcatcaatttatactcgtatgctgttatcgaatacgaagagaaaagtagaattatacatggatcataaatcttgtttcttaaatatttgctaaatttcaaggcattcctatttcctatttttaacagacaagtgcacttgtgtatagtttgatcaggatgctctttttattgcagctgtgttgtgtgattatgtgtgtttgttgtcttaattcagttgtctgacaaagctacaaaacgttgttcgatgagaaatgtttttcagcatcttctccaagttgtgcagtgcaagtatcacttttaaagagtacatgctgcttaataatagttatgtgacgaaaattgcgtgtttgttgtcttaattagttgtctaatgaagctacaaaatgttgttcttcagcatcttctccaagttgggcagtgcgagaatctcttttaaagagtacatgctgcaaaataatagttatgtgaagaactgaaatttttttcttttggattattatttgttcagtgttcttttgagttctgaataccttgtctttcttttccttcagtttgctaattttgagcggtttgggtagaatgaatttttttcgaaatgctatgaacacagaaacttttcctaatccttttgctgtgcataacggttcagttgtcatgtctgcttgttattttcctctaggcttctttttattcgtacatccttagaagtttttgtgccttggtaatttgcaaatctgttgtatgaatgcacctaaagatgcaagactctcttttctttttttccttttcttttgtttttaatttttttcggtagggtaaaagaagagcagaaaaaggtcctttttcttatggttttagtgttttgaaaacttattcttactgtttcttttgtcaagctgatgtcactgtctttttgtttgattagaacatcaaggacaggatatcctcctc

SEQ ID NO: 50135 - DNA, 604 bp, Ricinus communis
  Intron number 1 from transcript 29783.m000315 (locus 29783 .t000012) derived from phytozome v7.0 (chr-ID 29783; pos 2 08400 to 209003)
ttgatttcagtacaagaaaattatcatctgttgaggtagctatttttattccttttcttgttgtttcattttctttttctataaacagatattatatttaatttactcaacatgtagtggaaattgattaaatttctgaattagttatccggcgggggagaatgaaatttcaaatgaaaataattcatgttattacaatctaaatttctaatttaagaaaaacttagagagcgagttaatctaatatgccatctgtagacaaaatcaattgtacagtaacatataaaattatttaatgattgttgtatttatattggttaatggtggtaaataaaaaccagccaatataagtgcaatatttaatatataatctcaaatgttaatatttagtccaatttgtttacaaatgatgtggtatactgaacctatctataatttcaatatgtctaaatctcaccatatgagtttcatatgtacaatatttataaataatggcatgaagaaccgagcttaggtgctataacttataaatgcagattctgaaattcttaatcatctttgttaactaacaatttaaaattcttgtttgttggatgaagtctgg

SEQ ID NO: 50136 - DNA, 843 bp, Ricinus communis
  Intron number 1 from transcript 28670.m000103 (locus 28670 .t000002) derived from phytozome v7.0 (chr-ID 28670; pos 3 1331 to 32173)
catttgatacttcgctcgtagattctaatagcacggtacaaaatttcttttcttttagaaaaataatagaaagaaaactaggcaatttctttacatggcatgttcagattttagctataacaaataagaaaattacacatgtttatagtccggaaatagcaagaaaatcctcagctctatatattcttaattattatttgctttataaatctttatcttaattacattttttccccctcttacttgcataaaatcatcctttaatttttatttttgatatatttttgtttctttgttcaaaataatatatatattttattttttaatgttaatattttcgtcttgaattttataaaatataaatttttagtcatcgttggccgttttagctaatttgtaaattttaaatcaaaattggattacgtgccatatgagtggcatgatataaataagttatattgtcattgaacttatgtagtttttataaaaactgagaattgattaagattataaatgattttattcgagctgtttttatcaaaattaaatgtattgaccaaaattgtccaaaactacataaatttgattttttttttttaacctttaagtcattaaggaatggttttgatcattaagtgagaaaaagttatggttttatattgaagtttccaagtattaactgaatcattattttgattttattcaaaagtaaattttctttttgagaagtgtgttttttaacatatttatgaaattatgcagtagcgcattagtaatttgacaatattttatatgttgaaatgattttacagagattatatgacctgattttcttgcagaaca

SEQ ID NO: 50137 - DNA, 619 bp, Ricinus communis
  Intron number 1 from transcript 29656.m000489 (locus 29656 .t000022) derived from phytozome v7.0 (chr-ID 29656; pos 1 24056 to 124674)
cagtagccaaaatcggagatacacgttgaaatatcgttggcagaagtaggaagaaaattgaactcaagtgcattgtttctgtggcttgattctactaagttcttgtatttatacgtgaaatttatgctacaatggcttcaagtcttttatattttatgtaataaacactgtttcaaacatgaaaactcattttacactgccattccttttcaatttctatctcttgattgatgcaggaaaggaaattacatatgttttttttaatgatctgggtgaaaatgagtcgttgatatattaacaaggaatcggtttttcaatgttgccttcatttgtattcttgcaccatcagtttggatatttctctatcttggatctgttggatatttcctgctgccattcttgcaccatcagtttggttaaggtctctgtgattcaggaattggcaccgtttgatttgtctgcttgcaacctaaatgtagctgctagttttgcccttgttatgcatgtctttataaccctaatttcgcattggctcaacatttacaaggccaaggcatttcccgttttctgatgaccttttcacatctcagctatcagagacccgaaatttcatattgac

SEQ ID NO: 50138 - DNA, 862 bp, Ricinus communis
  Intron number 2 from transcript 29737.m001210 (locus 29737 .t000004) derived from phytozome v7.0 (chr-ID 29737; pos 2 8784 to 29645 reverse strand)
aacaattgaaggtattcgattcaaaacaccatgatatatctcaactctttcaaaatattctccatgctagagatttttacttggcacaattgtatgtgattttctttataacttgattgcctcacaggaaatatttaagttgattgtagcagcatttgataatatatctgatatttcaagcccttcgtacaaaagaagactttccattctcgaaacatttgcaaggataaagttgtgggttatcatgctggatcttcaacttgattccttgatactagagatgtttaaggcctttataagaaacttaaggtgagaaattcatgcttacattatgtggtttgaattattatgaaagacgttcagttacttcaatttaatatggaaacagcaaatggcatgtgtttacagtgccatgattatatagtggaagttttcaagttagttttgtttcctgtcctttctgattctctaaatgcatgatggcattgatggatgcctaagaagtattaaagcattatttgatatccccatcaatatgttttcttttagtttgattgtacaaagactatttatttgaaagaacgctaattcttggaatgggatgaggacaactttcagggaaaaccatcctcaggctgtttttctgtttatggggtacattatgatcatggtcttggaggaagttgaagaggtatcaccagagcttctgtcccctatcttgggcagtttaagaaaagggaaccaggtgatttctattctttttccttttaaagtctttatattgatttgatgatcagataacttactttctttttctccaccaccagagtgttctgcctattacacggaagctgggtgagag

SEQ ID NO: 50139 - DNA, 252 bp, Ricinus communis
  Intron number 1 from transcript 29737.m001210 (locus 29737 .t000004) derived from phytozome v7.0 (chr-ID 29737; pos 2 9804 to 30055 reverse strand)
catcttctgttgatcaacttctacttttgcttgatgtaattgtaaactcaatcccttaattcattattttgtatatattattactcttatcttcatactggagtcaagcgtttgatctttgtttattacccttttgattagagatgtgaatgcaaatttgtctcatttttctttttctttttcctttttttttcttttgtcttttttataaatttagaaacttgagaagtatttattagaaacgaagcagtc

SEQ ID NO: 50140 - DNA, 643 bp, Ricinus communis
  Intron number 1 from transcript 29739.m003670 (locus 29739 .t000106) derived from phytozome v7.0 (chr-ID 29739; pos 6 62163 to 662805)
ggcagcaccaaacacaattctgcaactgttgataagtatttgtacatatacagataatttcaattccatttttgtcttccaaatttttgatacttaattatttaatactacattagttttttctttaatctttggctaattttattttgacagttttattttagcacctccaagaatattagatttgctaaatatatgtttagtattttaaaaaacattttatttcacatccccaatatatcattatctgtattcattgcagcggataatggggatggtttcttggacaaagatataacctttcaaaacagtgctggagcatcaaattaggttcaagctgttgcattgtgattaacactgtctggaaatgcagcagtaatgctccgaaactgtgacttacaatgcccccaagcccaatgaaatatagaaaaatatgattgcagcacaaggtcgtgatgacgttaatgagaatacaggcattgtgttatacaaaaatgcaggatagaagcaacttcagaattggaagctgagaaatacaaattttcaaattatttaggcagaccactgagaaatatttgaggaccattacaatgtcagatcgaaatagttgatattattaatccagttgggtggtacgagtgga

SEQ ID NO: 50141 - DNA, 418 bp, Ricinus communis
  Intron number 1 from transcript 27451.m000252 (locus 27451 .t000014) derived from phytozome v7.0 (chr-ID 27451; pos 1 39428 to 139845 reverse strand)
gcgtttctactgtcaaaggcctagatttttcgcaggtaagaataatactcgtactcttttttgtttcctatagaaaaaagagagtaacaaattgtacttgttatctagtaatcacatgcttagctgttctgttatttgaaaaatcatgaaattatcaatgcaacacaactttaattatgtacattttctttggttgattaatgatatagaagtgaaattgaggccagcaagtatttctctcttcaattctatattttttaagccccaaattgttttgagtttgttttataaggttctaatgttttttctgtcttgtggactgatataatttttaaaaagctctatgatgtaggattgtaattggtagtgtatttagcatttattgttgttgttgtaattccagttgcagcatcagaaa

SEQ ID NO: 50142 - DNA, 1027 bp, Ricinus communis
  Intron number 1 from transcript 29801.m003167 (locus 29801 .t000112) derived from phytozome v7.0 (chr-ID 29801; pos 6 30257 to 631283)
gcagctggttagtggaattaattacttctttccttttttcttctatttaatatatgtatttcatttactttttcatttaaattcctttgagaagttgcagcttgttgatttgttcttgtcattgttctgggcaaaaactaggattctgcaaattctgtaaatgggatttttttgttagattgatttggttgggttaatgtggttatgtcggttcagtatagctatgcttttgattttgttttaattagaatgtgtttttgacttcctggctcttgggatttcttcacttgcttattttcctggttgttgtttgtactgaacaaggaaaagttgaaatgttggctttgaatttgaactctctgctagtccaattgactttgtttacatttatggctttgattttatggttattttgataggaactatctggttaaggaactgcgtagcaaatattgttgcttaacaatgtagtttctgtagtatgcatattttgtttgtatgttggtgaatgggatggaaacaatgacctcattttggtttcgtatggtgttgccttgtttgctgataccaactatcagccatttggaactattctttgttgcacgctatcctgttgttgatcatatgagtatagagttaacctggaagcttattgcctaattggtaaattcgctgaataaaaaggggcttggaaataaaactaataagcaactgaaagaagtggtttaaacaatttcaatttgggtgttggctagtagttaaatttcaatgactccttaactatgtaccccttgcttgcaagattcaagtctactcctcaaacatatagaaactgcatggaggtttgaatgttatgtctatagtcataatgtcatgagacttgttttattagtatgaaatggtgaatatttgagttagcaatgagaagtacattttttctgggagcaatccgaatattggttgcttgataataacttctgctatctttgcagattgccctttggatttgagtggatcaaactttacc

SEQ ID NO: 50143 - DNA, 1003 bp, Ricinus communis
  Intron number 1 from transcript 29815.m000497 (locus 29815 .t000009) derived from phytozome v7.0 (chr-ID 29815; pos 7 5836 to 76838 reverse strand)
ctaccgtctggctcgcttgggacactctgaaacccgtaagttttttttttaattttttttaaagaactattttggaggtcgatcttgtttttttttatgtcgttttggtgattttactatgcattttggcgtttaaaatggtttttcttcttctttttttttctaaaaaaattgcttgagctaatttgtaatttcagtatagggcttactgttaacacacattgtcttttgttgatgtggaattagctagagaagttagataatgatatgatgcctaattattactctccatatttagtttagattactctgaaaaatttagctaagtgagtatttctgttgtatgttggtttgatacattgtttggagatagtgttgattttgtataagtattgttgccttttttttttttttcttttataattacgacccaccagttcctcaagcgtgcttgtctttgtagtgtacaccgtttcatggtagattatatgtcttttgcatcaatttatgtggaaaactcacttgttttgcggtttagcttcgaaagtttggtgttctttttatcatagcggtgactgagtgttccatttttggttttctaaatgcttcttcagctatggccattgaagtttcttaaacatgtgtgaaaaagtagaagttttaaaaggaagttagactgtttaagctttttatttttaatttgaaattcaattagatttggctttatgcttttatgtttgggaaacagaaaaaaactgccaaaaatgaactgagatatatgattttcattgcattttgtgctttgtcccagtaattaggtgagaattcactgagtgcttcacatgctatcgatattttagttattgtatgaaaatgcctgcacttttgatcagctgtttagccaggcagagtcaaatgagcttctatgttatctgatgaaggtgctgtttacttgctgagtaatgcagcaatttgtagctttgaaggtacaaaaaagtgccca

SEQ ID NO: 50144 - DNA, 692 bp, Ricinus communis
  Intron number 1 from transcript 27395.m000080 (locus 27395 .t000002) derived from phytozome v7.0 (chr-ID 27395; pos 7 203 to 7894)
ctttcaggtttcacttcaactcacttttattctaattgattgtatacatcatactttctttgctctctagtttttttttttttttttgttattattcttcttagtaattatttatgtagcggctattatttttgagtttcacgaactgggtgatcgatgattttgtgggttttcagtcaaaaaatcgtatatttggtgtaagctttgtactgggtatttttttgttattgcctatcctggggtatgctcttgaatattatctaatgtgaattatctgaggtattaagatcatgtaaattaaaggatatagttaaaaactcggacaagatatgtctctttaatccttatgttatgcaggtctttttaagtttaagaagtgtccttttagggactctctgtttttgatcttagcatgataagaagaacagctaaattattacttaatgttgaatttgataggttactaaaacaatggcgtaatgtgtattttttttttgttgattttaggacacctagttctctagtttgcatgttgtacttgtggttaagtggacaaagatcatgcatgcttgattttctaattgtgaaggttgatgcatcattggcagtgcacttctaaagtcttacttttcttcttcaaagtttaattttggattacaatgatttaaatgaattgttacagtgagtgtaaa

SEQ ID NO: 50145 - DNA, 598 bp, Ricinus communis
  Intron number 1 from transcript 29785.m000957 (locus 29785 .t000026) derived from phytozome v7.0 (chr-ID 29785; pos 2 89626 to 290223)
gtcaaaagctgttgttcctcgtcagcagcttagaggtatgataaacatacatcttgatgttttaatttttggtgggtttcatttaattttgtttgtttctttgcgggtatttgtttttctctttgtatcaggtttttttaattgtattttcttgggttctgctggtcttatagtgattgtttcttgcttgggctttctgtaattgtttgattaattttgggtacttgttaattcattgattttgtttggatcagatagatgtcttgattcattttgtattcgactctgtagttgggaatctgttctttaagatcaactgagtacagaaaatttgtggagcgctactccttttaattagttttgcgaaatctgccacgggattgatttggtttttgttgtttgtcttgttcttcaagatcatcaattagcagtgcatttattaaaatccttgcttgcttagttttcttggacattttgatggttttttaaaaatctattttggccaaagttttggcagagaattttcatggataaatgatatttgctctgttgtctttttacaattcaggggaagtcaagcagaagaactttgtagcag

SEQ ID NO: 50146 - DNA, 178 bp, Ricinus communis
  Intron number 1 from transcript 29629.m001392 (locus 29629 .t000043) derived from phytozome v7.0 (chr-ID 29629; pos 2 42251 to 242428 reverse strand)
ctataacaaacgacaacataaaaggaattatcctggtgagtgccttttttctttcatatcatgttgctatgtataaaagcattgattttgatcctctttcttcaaaaataaacatttaatgcggactatgattccgacttcaggatactttcgtcgccggtagtgagacgtcatctac

SEQ ID NO: 50147 - DNA, 914 bp, Ricinus communis
  Intron number 5 from transcript 29788.m000339 (locus 29788 .t000022) derived from phytozome v7.0 (chr-ID 29788; pos 1 38931 to 139844 reverse strand)
tttttataacattttttgtgtggagcctatctgaggtcagttaatcaacccttgtattttctttcaggtttgggaatttaattgctacatagattgtctgcagacagcttgaaaattttgattgtgaaaatactgcgtttcttatgagctatagcaagtcttatatttaagataatgtgctaccgctcaactactttctacaaacatatttacatagattctgtttggaattcaagtcttttagttctatgcaagcatggaaataggaaaagcgattgcctgcttacaatatatgctatatatgtgcttataattaaatttcttgttgtgtggcaatatgatgttagctgtccatgaccaaaagactgccagtagataggaaaatatgcagtctaaacagtattagtttgagccgtgaacatgccaaaacaatacagattttgagaattattaggtatgcttcaagttgtttctgacacaatttaattgcgatggacctaacactgattttgttgttgctggaggtaatcgctattacaatacagaacccgcaattcaagtttataggttttcaaaaaaatggaatgaccatcattgttttgtatgatttagtatgccattttctgatgtctttacctggtactactcatgatttcattgatctaatcaacataattgcactcagaaaactaaatgccattcctggcttgattcgtttctctttttactgttatattgctcctttctttatgtttcttattcttccaaactcgacttttcagttgttagaatatggagtatctgtcttttctccttgcatttatttcccattctttgcttacacctttgaaatgaagtccaaaaaatgatataggcatactaatttaaaatgcaggtaattagatatccacatt

SEQ ID NO: 50148 - DNA, 177 bp, Ricinus communis
  Intron number 2 from transcript 29788.m000339 (locus 29788 .t000022) derived from phytozome v7.0 (chr-ID 29788; pos 1 40280 to 140456 reverse strand)
cttctgctggagagcttatctgtcagtcttttctttgactttggtcctgtttctttattgggtgcttctttgattgaacttgttctgtaatgatcaaaatgcaatattcaattgttttgttacccgtttgtttcttttcaaggtctgttgcaaattcttgcattcttggaagtgata

SEQ ID NO: 50149 - DNA, 990 bp, Ricinus communis
  Intron number 1 from transcript 29576.m000228 (locus 29576 .t000006) derived from phytozome v7.0 (chr-ID 29576; pos 5 9169 to 60158 reverse strand)
aagctgaggtatttaataattaagttttatcagttttcttatcaagtttattaatctacgtagatgtttttgcttacttctgttctttttgttcttgttttgttttggtgtaacactgttaattagatagtttatttaacttgaaagaagtgctaattttaagttggctgcaattttaggcatcagaaagctgtgtagcaataaactccgttattaattcaagtgtaatgctacgtaattagctgcagaggtaacatatgacctgattctgcatgaacctgagagttcattttggtttgattgcattatggatggtgatgtattgtgaatagtggtttggagattagtgatttactgaaaattaagtttcataaggttaaaccaatgtaattgaaacctaaaaactttttatgtagtatagaaaaatatgcttagctcttaggattaatttgagttttgaacagctaattaggccggaactttgatgaattcttagtagagtggaatataaggatgtattatgatgaagcattggatcctgcccccatagtaattttatcgaacttgaagactgtcacttgtattctttccatgaagtaaacattatagagaaattctgttctcctagttgatttatgaaaatgtactgagcttgtaggcagtttagagaaattcttgcatcttcaattctcttatgcaacatattcaaactttggttaattttagtttttcttttttcttctctcatcctttttatttttaaagaaaatctgagtgattgaaactttgggtaaatattgatggtctgcaagttatgatatttaagactatttcattatcccaaagtttaatcctcttctgattagaacaatcttgtgtattagtatgcaaacttttattaggaattgctattagttaaattaactatcaatctaccaatgatttaattaaaatgtgctcctctaacagcttgctcgtagggttcgtgaa

SEQ ID NO: 50150 - DNA, 750 bp, Ricinus communis
  Intron number 4 from transcript 29693.m002016 (locus 29693 .t000054) derived from phytozome v7.0 (chr-ID 29693; pos 4 52582 to 453331 reverse strand)
caaggtttgcatccgatttactaattactctcatccagtgatctcattagatatttagttttggtggcttttgtttctggtttttcgtgcctatatagtcaaagactacatgagtgctgttagacagaaagcactctggtttccctcaaggttagcaactagcagtttgtcttaggtctgtttaaaaagtaggcctgtcctggcaattaaagacatttaggctttacagaggtactatgctccagtgttctaggctgggtgcctcactaaaatggtgctttaggtgaccttaatgtatttaactgcctgtttctgtatactacaatattgctctctgtttgagaagatattactgatttctgtagtacttggaatattgtgttccaatttccaactaaagcaagagaatactttcttggccacttctttaatcagacttcaaccatttgtatggtaccttagatgacttttttatccttcttctgtggtcttcactccctccctatcctcaagactcatgacttacttgcctcaattagatacgccactcagtagaccttgttattgattatggccagttgcttctgttctttttttgttccataactggaaagttctttcagatgggaacgcttaacttgtcttcatgtacatattcattttgatgtactttcagatggggaaactcaactgatcaaaatattctttatggcaggaacttggtattactgctctgcatattaagctccg

SEQ ID NO: 50151 - DNA, 519 bp, Ricinus communis
  Intron number 2 from transcript 29333.m001039 (locus 29333 .t000002) derived from phytozome v7.0 (chr-ID 29333; pos 2 121 to 2639)
aggtgtgtggtagtttgtttatataaatatttttgactctgagcttttgttgagtgtgtagaaataaaagagttgccaagattacgagggactttgatttgggtctctatcattagaacagacgcgtcagggaaatcgagtgtccaaaatctcaatcttagttttcttttcatcgactagtatctcctttgtttttaaatggtattctaagtgtcagcttttcttggaatctcattttcattcaaaaagcatatccctttttcttgaattgaaagagctaaaatctggttttcaattttctatttgataagatataaagcttgacgtcaacttttgcattcgtttgatccctttttatcttaaaataagtgaagaaaattgggttaattaattttgacaaggtaacagagggtttccataattgaatgatactaacctttttctttcacaacacagctaatatcattttccttttgatgtgaaggtggagcagaggtacaggcaatatcaccatcagat

SEQ ID NO: 50152 - DNA, 805 bp, Ricinus communis
  Intron number 1 from transcript 29804.m001483 (locus 29804 .t000014) derived from phytozome v7.0 (chr-ID 29804; pos 2 73141 to 273945 reverse strand)
tccagtctctcattcaatcctcccttggatttcaggtcatgcttgtttatttatttattaattgttatctgtacttttaattcaattgtgagttcaattctatttagttaatttaattggaattcaattccttataaaaaaaagtgacatgactttgaaataataatgatagtaaattggtgaaattgttttgaagaaatcaagtgaaagaactccattccattgaattcctgcaaatattacgccgcgctttgcattatgatttcatttcattaaaattacatgagataaatatttaaggaatgagaaaatcaaagctaacctctacattcttggcataaaagaaatcattatgccaaaatgtaaacaatgtttctgaagcaatctaaataagaaataattagtgaaggaatgagaaaatttaagctaattaattgctggagtagaccatctattaatgtgcgagggttaaccaatttcaacagttatctggtctaatttgcgtgcaacaagtgtctatgcattgacgctattgctttttatggttttgaatttggtcccactgccgcaaaccttaaatcagcagatttaattgtctctaatagctggttgaaatatgttataatctgtcatggcctgtgaaaattaattattgtccttaagaattgcatgaattatagtcagatgctgcattcgcgtaggaattttcttagtgatccatcatgttaagtcaagcacaggatctgtctgccctatattacaattgtaattgtttcctttctcccattattacaggtttttccat

SEQ ID NO: 50153 - DNA, 656 bp, Ricinus communis
  Intron number 1 from transcript 29804.m001521 (locus 29804 .t000052) derived from phytozome v7.0 (chr-ID 29804; pos 8 49735 to 850390)
ccctcttgtctgctcctcctcctcttcttttccaggtaactttatgaccaatttccttaaaacccatatcaggttacctattatagttttggatatgtatgcaagattttctttactcatgaatgattgtgtcttttgtttaatctgttgtctgggttttccttaatttccttgtttggtatctgggtttgtttgttttgttgtttttttcttttccctttttacttcttggtgtctgatcctgtctgcttttgtctttaattttactgggaaatgtgtggactttgatttgttagttctgttttagaatgttttattagatttgatgctgtttgatttgtctcatgatagacaaaatgaaagatctatgattataatgagtgtcatcaggccgctggaaattgattcaagtggaaatttgaactgctgtttgagacatgaattcagaggagcttatatcatttaatttcctctctttgttacaaaaggctgtggtgtatggcctttcttttataattttccttgtacaaactagcaatttctgaactttcttgtatttttccttttcttttttctttttgaagctgattcctttaatgatattgcatcccttggctctatgtgaaagctagtttttgttatatccagttgcagat

SEQ ID NO: 50154 - DNA, 623 bp, Ricinus communis
  Intron number 3 from transcript 29706.m001300 (locus 29706 .t000030) derived from phytozome v7.0 (chr-ID 29706; pos 2 40345 to 240967 reverse strand)
aatcacaacttcagggtgtggctttaagaatccaggtaaatttctgcaatgatgttttccattatgtatgtatgtgtgtctcttgcatatatgctcctttttttttttttattgtgaactcttaatattttttaatttttataatcaggatcatgcatttcaatttttaagttggcatttcatgtttggtgtagtacactgatcaaaacattggttgttgttagacatggatagagataaggaacttgtttctttttgttagacattggttgttgttagacctgaagtttgtgttttgctaccttgctgcgctgccgttttatcctaattagtaaacttggatttcagagacaaaagactgattttcttcatgaatcagggaacttatggtttcgaatttgttaactattttgtagaaacataatatgttttcttttccctattatctaccaacttttctatgtctagttattggatgctttaataatatagagagagatgttttcatatttgaaccaatgacctatgtgattattttaacaaacacatgaatgcacagacatgcttttgctgctgtttgatatagggaaatgatttttctttttagacattgaaatcaactc

SEQ ID NO: 50155 - DNA, 334 bp, Ricinus communis
  Intron number 1 from transcript 29661.m000927 (locus 29661 .t000029) derived from phytozome v7.0 (chr-ID 29661; pos 2 95498 to 295831)
tctctggaatcccgcaagagcatctccgccgtagggtacagtctcttaatctccctctctctccttatatatataaaatattggatttttgaagttcacatttttaggatcaggtggatgcatttgttattatttttattttatgtcttcatgaatttgattgattagggtttcggtagttctgaattttgattttggatcaattaagtttttttcctttctgaaaacaataacttatgctttacgcttgctttaattttttttttcttttttattattaatgatgttggtcattacaggtggttatttactcaccagctagaactgcaactca

SEQ ID NO: 50156 - DNA, 858 bp, Ricinus communis
  Intron number 2 from transcript 29661.m000927 (locus 29661 .t000029) derived from phytozome v7.0 (chr-ID 29661; pos 2 95875 to 296732)
tccacgcaaaagtatgttatgtttacttctcagcatttttacctattctatgatattggcattcgtgattttgtcttctattttatcctgtggcggattatgagtgtgttttgaaagtgaaaaattacaaaaactcagttcatttgagttctatttagtcaattttcatgtttggaaaggtcatagttgttaaaattcaatccttttcacttgaattctatttaaacatttgaaagaaatgaaattataacaaatttagcatgatctttgcataaattcaattcagtttaactcttgcacatgatttattccaaattagccctgtgtttgaaaatgttcttgtctgcttcattgtgaactgttttctggtgtgtgaaatacactgaaaattattacttctccattttagactaatacttaaacttattaagattttaaatcttttgaaatattaagtggaaaaaaagagcgcaaatttgaaaattttccagtcaccatttggaggtcagtgatggccttgatatattaatggtgtactcctagtaattatttcataattaattttgttagtcatgagtttttcaggtccgtaaaatgattcccctttcaaaaagaggaagccattttcttgttttcatttgatcaggaaaatattttctattgtcttattttctcggatgcaccgaacattgagaagtgcagaaaatattttcctcaaaacaatcacagctgaactttgtggattatattttattgtcttgtgctcaagtaattaatgtattgggattgctgccctgaaaatgtgattgacagatatttgtatccggctaatgtctgtgtaggtgggaaaatccattg

SEQ ID NO: 50157 - DNA, 915 bp, Ricinus communis
  Intron number 4 from transcript 29707.m000134 (locus 29707 .t000004) derived from phytozome v7.0 (chr-ID 29707; pos 2 1357 to 22271)
ctgaaattatcccagtgaatccaacacctgaaactgtatgcttcactacacaattatatctactatttgcaattttcatcagcatgctatgtgatatttctttatcaaggcattaatttttttgtggatttatttatgagcaatttattttggtttctttattatattctttctggaggttttcatttttgttttccacgtgtcttgattacttactaattcaatgtctagctaactactacattcctgtctttcaactcattacttattttctcatctacatttatcatcattatggatttgaggattattaatgtatggtatagttgcatggatggccaatataaattttcttcaggtaaatgtgcaatattttgtatgcttatgaactcattcagtctcttttatgtttatgccattgatcctatgtttccaagtcttttcacctaaatgctagttgattttgtttccctaagatgtcttatactctcctcatcctgtgctcattggaactctccatcctaccttggaatccctgaatatcaaaatatgacgatgtttaacttgcatctgcattcttagttccacaaaattaaaaataacaatttttctcggaacctgagcatatggacatcagcattggcatatttttgtataagtttcattaatttgctaatttagatgagtgtttgagcactttggtttcaaagctataatatttcttcttgcttagattattttttctttttaatttctgaactataatttttctaatctactgatttaaaaattaatttaagttttgagctaagatagtcgtctgtaatttctataatcctaattttttctccccttttttctagttatcatctattcagctgtattctgattttttattatcttatgataggtttt

SEQ ID NO: 50158 - DNA, 761 bp, Ricinus communis
  Intron number 1 from transcript 29651.m000282 (locus 29651 .t000002) derived from phytozome v7.0 (chr-ID 29651; pos 2 8324 to 29084 reverse strand)
gccaattctagtatgttaccttctttcttttccctgcatatataactcttattctctagtattatcatatgtgtgtgtttgtttttccatttcatgttgtttttatctttgttagcaaaaaaccaaagacaaaattatctataagctatttccatcttccactagaaatagtattatttgcccaatttgttcaaaaaaaggattatttgatattttctatcgcgattataatttatttatcttatatatatataaacaaatagataaatgatacgcaatttaagtattttatttaaaaatattaattaattgatacatatttcaatttatcattatctacgtaggttaaaaatagaagcatttagtcctatggacctttgaaattttaatccatttttctttgatttctcaactttattctcacattaaaaaaatactttatcattcacttaatatatattgaattcacccatgtctcaatattttaatgctaaataaatatcttattggtctataaatatagtatatagatgagcatattattacacattgcaagtatagttattatgttgaagaaaccactagcttttataagaaatatatctctaacaccaacatattttacttaaaaaggcttcataacactaaatgcttttgaaccaatctctaacacttatcttaaaagaagataacaatggcgaacacatatattacttgccagggtgacttaatttactggtgaggcatgtcaaactgcaggg

SEQ ID NO: 50159 - DNA, 829 bp, Ricinus communis
  Intron number 1 from transcript 29706.m001291 (locus 29706 .t000021) derived from phytozome v7.0 (chr-ID 29706; pos 1 81391 to 182219 reverse strand)
ccgccgctgccgcccagttaaatttgttggcctcagtatgttgtcaattttcttctctctatttagtattcattcttaattaatagtgaagtttcctttctcttttttaatggtgttgtgttccaaatttaatcgttttcttagattttaggagtcagacttttgctattggttctgatatgtggttagtacaattaaatttgagttctgggcgctaggttttgctttctgtgctatatttgctgatagaaattacccaaatataatgatcaaagtgcctgtcttttcttgaaaggcaagagtttgtgtcagttttgcttctagaattattaagtatgctaaactaacaatactttttcatagtactaatactttaaagttgttagctgttgtttactgatattgaaagactgttatagattcactagatggttgttaggctaggaatggagaaattcttgcacttggcaactaatgattgaataatgcatcagtgttatcaggtggttcatcttccccttgctttctgatgtgaaatctgtttgctttttactctggataatcaacaaaattttcaattagatatggacaatgtataagttaattgcatgtgaagcatttaactaatcatagttttgctaggtattttatccttgactggatatgattggattggcagaatatgtttgaaagatgtcattttacctttgtgactgatctagtaaaatagttatcttttagtataatagcggagccaaagaggccttctaaaacaagtgaggttttgactgtagccgaggcagaaagctggtttagtccaagggaccca

SEQ ID NO: 50160 - DNA, 492 bp, Ricinus communis
  Intron number 1 from transcript 29630.m000780 (locus 29630 .t000005) derived from phytozome v7.0 (chr-ID 29630; pos 4 8155 to 48646)
ccagcagtaagatatgaaagtatctaatgtctttcacgcttgggtctttctgaggcacatgtccatgataaatatctcacatggatacggaattaggttttacagtttggttgttttttttccgtggtaggtcagaatagtcaaacatttcttagttgtaccctgacttctaatcttgtatcatatgactagctttttttctgttctcatggtctcctaatggcaagtcctgtatttggggtgtaataagaagagtccagttctttgttttagtttataatcataaattgttctgatgcaataaccatttttgacattaatgttgttctttgtgaactctatgttacacttaccttttaaccttatgcaagtgtagatggcatgacagtttgtgatgagcgttgccatttgttttactagtaggctaggagttgaacgatctgactgctagcttgtatgttcttgtttctttttttgccctaggtggagata

SEQ ID NO: 50161 - DNA, 647 bp, Ricinus communis
  Intron number 4 from transcript 29764.m000754 (locus 29764 .t000016) derived from phytozome v7.0 (chr-ID 29764; pos 4 86802 to 487448)
agaggtaaaagctcatccataaaaatgatttggtacttgagatatcctttttctctggattattttagatagcaaccaactcaacaagttgagtgtgactgaccaactgcaaggaaagggaacataggaatttcatctacctgggtgactcaaatgctgtcacatcagctaatgtttggtccctctttggattccaaaaataaaatacgcatattctatgtgcaaccgacaataaataagaataatataatgtccaggggatcttttttctatttatttaacaaacactgcatgccttccctttgtcaaattgataccatactgtaagtgggccattcaaaagacttgatttccaaaaccgtaatctcttattttttttgcttgagttgaagatgaagtggtaaaagtttttgttgttcaaaaataaaaattttgagttcaattcgacttcttatacgtaaaaagaaatatgaaatttatgagaaagaacctcctactttattaaaagaataaatttaaaaaaggaaatttgcacatattggctagtaaatattaaaggtctttttaattaataatgaatttctttttaactattactatatgcataaacaggagtgcaaacagttgtaacagagttgagtacagga

SEQ ID NO: 50162 - DNA, 677 bp, Ricinus communis
  Intron number 1 from transcript 29691.m000284 (locus 29691 .t000007) derived from phytozome v7.0 (chr-ID 29691; pos 1 90834 to 191510)
ctctgattccttgccagaggtctgtgtcttgaactttctttgttatttacgtgggtatgtttatgcttaaaagataaatgtttctcgggcttgcaatttttaaaagataaatgtttattcatagttgaatttgttacaatgttgaaagttgctgaaaatttttctcattgactaggttgagttgctggctttgtatttgggcttgattttatgaatttaacttccgcataaggagtaaaagctgatataattcttttaattggctgagtttcttgttgacaatatagtgcttaaaagaaatatttcttggcttagattttgagaaaatagcattggatgtgtgtagattattgtttcatgcttaactagtgactacgatgatgattttgtctaattcattatgattatgattggtagaatggcttctgctcctactgttttgcaatgtgagatacttcttcagcctggttttaactcctagagctaacccataaggtttctcactttgcagttgagttttttttcttttctttttttccattggagtatttgtttgtacctttttgagtatccagatctatgatttgagcttgtatgtcttatctttttttgaaactctatagttctatgattggtggagttgcttctgcttgaatttaaatcccactgttttgcag

SEQ ID NO: 50163 - DNA, 610 bp, Ricinus communis
  Intron number 1 from transcript 29646.m001117 (locus 29646 .t000065) derived from phytozome v7.0 (chr-ID 29646; pos 3 80211 to 380820)
ctctctgttaagcttggtgttcacttctttttgtatgttttttttttcttcgcatgtgtttatattttggtcttcattgctttttctcttatcggtcactgttaacatcgattgaatgtaatctcggctgtgtatgtttcgtggatgataacttgtttttgaaacatatttccaaggacaatatttttggttgcataagaaatcaaacacgcccaaacacaaagaaaaaggaaatgtcaaatttttcagatgaggggcacctgttaccggtgcggttggaagttaccggaggtaatatccggcagttgatacgctgattggcatatttaaggtcttttgtatgtgatcaaatttcctgatcacaccaaacactaaaaaacacaaaatgtttttcctggaaaaatctttattaggggaaaacactgacgcttaatttgtaatatgctttttggtggctgaatttggtgagaaatgggttaaacaacaagtttttatttaagaatgacttgattttgtagtgttaaaatagaaaaatgttatgcattgagtttttatcatttgttaatggatatcaggggtggtgccatccagttttttggcacaaagcgtc

SEQ ID NO: 50164 - DNA, 708 bp, Ricinus communis
  Intron number 1 from transcript 28644.m000932 (locus 28644 .t000039) derived from phytozome v7.0 (chr-ID 28644; pos 2 07771 to 208478)
tgtgtgataaagagcgttttggtcagcttagaacggtgcgccgtcggattttcgtttctttctttttcttttttcattatgtagtttctagttttttcaactgcacaagataaattggatttcattaaattatttggagtttgatgtttgtttttgcattggcatttaagagtaacttttaattatagttttggattagaggtaataagttttgatttagtggtatggtactagagtcgtcactgtcatgccccagtcaggactgtaaggtctcatgtttctaatccagttgaaatgattaactgagaaaagaagttggctgttacatttgctagttgtcccaattggtcatagttttaacatggccaacctggttgtacttagtgctggttaagatgccatagaagtgagggaagttggtcagggttcatttgagatcatatctgcatttcatcatgccaagggtgatgtcaagcattttccaattggctgtttttgtcctgattaatctcaaggatttttacattcaatttaaattttaactttgattagtttgatggtactattgcatttgagactgaagtttgaaacaatatatgccaattcttgtcttagatgaagaattctcttttgtgtttaagattttggtgttgtagagactgatttggtgcacactacaggtacatagctgctttacatttgctggtg

SEQ ID NO: 50165 - DNA, 505 bp, Ricinus communis
  Intron number 1 from transcript 28076.m000420 (locus 28076 .t000011) derived from phytozome v7.0 (chr-ID 28076; pos 9 2182 to 92686 reverse strand)
agcaagtaagttcttttttgttgctaagagtaccaaaagataaattttgatggttttttatgatttgctagtttgattaatggtggatgtcttacagcaatatagaagtaagactcttgacttggttactaatcattatgagtgtgcttggaaggtcaaatgctagagttctattcgattgtttcaatttagtaatcttcgcgttttggaaagcttatggttgccagaatttaattctttcaacatggacgaactaggcattttgacataaatgaaattatacaaaaaaagatgttaggtgattttgctagaagtcaagtccatccatatctttcatatgatttgctccaaacaagaactattcgttgtttaagtttctacttttgctgcttgttggaggagttcaatctttgtgtatgcaagtttagattcttgagtgagatatatgaaccttttctttattttgtaaagcaaatttatctgcttgtcagggtgttctcttcaa

SEQ ID NO: 50166 - DNA, 445 bp, Ricinus communis
  Intron number 1 from transcript 29761.m000407 (locus 29761 .t000001) derived from phytozome v7.0 (chr-ID 29761; pos 5 131 to 5575)
gtttggtatcttcatttgtgactctgttgcaggtacaaagtcttattgtcctcataatttgaattttcttaaaatccttagcaccattttggagtattagttactagtgactcagtgaccggtagagttgagtatgcactttagctgaagagcatactattatttgatttgttgaagcagatgttgcctactttcttggacaagttccaaaaaaggaaaaagaaatttcagtgggtgaggttactttcatcagtagttgattcttattttaaaggaaaaaaataagtctgatcggttacattattcgagattcattgctctctcttgcttggcattctattttgtggttttttagtgtaagtgcagtactaaaatgttgatttgcaattgttacaacttttgggtttcaggaagaaaatccttcccgagagtccacaattgtgcg

SEQ ID NO: 50167 - DNA, 881 bp, Ricinus communis
  Intron number 1 from transcript 29629.m001409 (locus 29629 .t000060) derived from phytozome v7.0 (chr-ID 29629; pos 3 41140 to 342020 reverse strand)
tacaggttccctttcaaggacaggctctctcataggtatatgattcaacagtcctcttctctttgcaactgtcatacagaccagatcatatgttcttatatgcttccacaactaaagttaaagtgacagaatttcttgcaagaatttgattcaattctacacagttagttttcattttatgaaagttcattcttctaaaaaggcggctggttctcactttatggtattttgattgttacataattcttttttttttttattttaattgtgatgaatttattcaaaaatataaatattttaataattttggccaattagttaagtcaggtaaaataatttgttgacgtgttttatgtaatgggatagaaagcatccattggtgttagtgttaagagtacataggctccacatgacacctcattgatcatatcaacagagccccaactgacacctcattgatattcatacagtaaattgataaacctaaaatcattatttgtaaatagattagaaattaataaattttaagtttattaatgcttggtataaagcaataactttagttgttgggattgacaaatgaaaattatcatggggaattgactaaatcattaaaatttttacatttttagataaatcgatcaaaattaaacttatttctatttttacaaaaataccaaaatcatgttacagaattgataacggtttagattatacggtaaaaatttcttctagcttaatcaaatttcgaattcgaattttagatatacagttgtttagaactttaaaaaaaatattttaccgctaaactctatattaattctagatttacgtataccgaaaagaattaattttatgtaatttgtttctttaaaacagat

SEQ ID NO: 50168 - DNA, 1004 bp, Ricinus communis
  Intron number 3 from transcript 29739.m003607 (locus 29739 .t000043) derived from phytozome v7.0 (chr-ID 29739; pos 2 38829 to 239832)
taaaaccctcgccagatactcctccgcctgtgcaggtttgcaactaatttttcattgttgttatttttctttttctttttttttttttaaatatccctattttcttccttataacatatgcgttttatttatcttagcattgtctagccattgaggattagcttaaaggacacgtgaaagtaaatattaatcggattgaactcaaacataggctactcaagtagattggccgtggagcactacagttttgcatcactcaatttaaaattaacttgaaattaattgaattatgttcaaacatatattaatttataaaaatagatgaaacggtaagtatcgttttctgtttacttaaggtttttaatttaaaagcccaattatatttagactttaaaattattttaaattttctctaaatatatataatgagtacttatacatacataatatttatattatatctttcacatacatatatatttcaaattttctatataatactaattataaaattatttaactaatctgagttttaagaactaaatagttaaaagctatagcaatatatttattttattatttagatttgattaaaaaaaaattctgttacgtttggggtttagtttaaatggcaaaagtgtttgttattagaagtgaaaagtctcgagtttaagttcatggcctgttagcttttcaataaataaaattttagttgagttaaaacgcaactagattttacagtggttattattatattatcaatgtttacagaaacggatacgtgatgcaaagtcacaagaaagggtctcttagaaagaggtccacgtcggcttttactgagaggttcttaaatgaaagaatatatttaatttaactaatcgtttttagcagtaccaagatccatattttggcactcttttaatttctttcctgaagctgttagtttaactgttttttgataacgataaggagaatcctggtggcaggaaccagaagacgtggaa

SEQ ID NO: 50169 - DNA, 490 bp, Ricinus communis
  Intron number 3 from transcript 27732.m000279 (locus 27732 .t000007) derived from phytozome v7.0 (chr-ID 27732; pos 5 2970 to 53459 reverse strand)
aggtattacatgttcaattttgttttttttaaatgttatattcttggcatcagtagtactgtaatcgattgaaatttaaaatatgggatggctttagctttgatttccttttttattgtttgacattttgagatcactttgccaaatatcagttacaattgaagaatatcattgacaagccttaataactttttcaagtaatggtcttacatcagaaatgtacacctttcatgatttctcataaatttgtaatagatcttgggtggctctagtgagtgctaaagtccttggtaccatatgttaactggtactgaattatggattaaaatctacccactgttcttcggctgaaggattcaccgactctgataatgagtcttttgagtaaactatgaatgctaatagatacagtgatttatgcttgtaggattacttgaatgtgatgctggcaatctaacttccccattttgttttcaccttgttatgcaga

SEQ ID NO: 50170 - DNA, 986 bp, Ricinus communis
  Intron number 6 from transcript 29631.m001018 (locus 29631 .t000025) derived from phytozome v7.0 (chr-ID 29631; pos 1 58184 to 159169 reverse strand)
tttcaaaaggtcgttggttgctctataaatattttgtggcttctgtatatcaatttagttatttgattttgtctgggaattgcttttgctgcttagattgttctcattttgcattgctagaagcagaacagaaagtggttgatattaaggctcaatatttcttatgtattgcaatactaggatggagaatgggtttgataacttgattagtttattcatagctcaaaacttatgatttttaatcctagatctgtatatataagcaagtggttgctaaaactctttcaatgcttccattatttactgagttgttttgttgttttttatttttgcagattctcattttaaagatccctgtaagtaaagcttgcaactctaatactcatttatttggacgatttgttttataagcagtgtcaaatcagaaggcaagctcataaacagaggtgaaaggatggggggtcagtggggtgggctaagaaggtttgcctacatttgctcatggaaaccatacaaagaagcaataacaagtgctaaaattctcaagtagctaaaatcttggtcaattcaatcatattactttctcattccctttgtttctaatatccaaagcaagcctcaatttagtgatggtaatattggtgtctcagtgattgttatgctggtaaaaggcataatcagttatgggtttatgcttttaattagtttcataagtatatgttgggcaatcatgaactctgcatatttgagtcataaagcctgcacccatctgagccatcgagttttttaagaaaaacttcatctcacttcatgcagttacataggcttttacagttatttgactagaactattgatcttatttcaaccttagacaaagatggcattgttctaattcttacccacaactttaggcacatggaataatttgttaaactgttatggtaacttaagtactgaaccatcagcttcatttcttttccccaga

SEQ ID NO: 50171 - DNA, 326 bp, Ricinus communis
  Intron number 1 from transcript 29620.m000540 (locus 29620 .t000010) derived from phytozome v7.0 (chr-ID 29620; pos 8 1317 to 81642)
cccatcttgatcacattgtgagtgacattctttgcttttcttgtactttgatgtgacagagagatgggggtggaaatagagatagacacaataagatttcaatattggcttttgttaaagttgttagctttttgtgtttagagtttctgggtataacatttggctttcgaaatgttaaaacagggataaacccaataatatttggggattactttttgttaaagttgttatctttatgtgtttttagtttctgggtattacatttgggttgtaaaattgttaatttgagttcatttcgcattttatctactcagggtggattacct

SEQ ID NO: 50172 - DNA, 858 bp, Ricinus communis
  Intron number 2 from transcript 28543.m000398 (locus 28543 .t000015) derived from phytozome v7.0 (chr-ID 28543; pos 1 12574 to 113431 reverse strand)
ttggttccttgtctaccacttttgaggctatacaggtaacatttgctaattcaactacccctctgttggacatcaaggttgttgtgttggttgggatatatggcaaagttaattaaaaagttgatttgcttttttttttttttccctacagcatccttaatatgctgatagatctattaagtgtaccatcttgcaaattgtgcaaaaacttatatctcagtggcctttaaaattccttggtgtccatgcttgtttcttaactatggctgcaggaattttcaagaaaaaaacatattgatcaatagagccactcctaagtttggtcactgtttttccaataagttcatgctattgttcataccgaaaaatggaaatgagaaaaaaacttgatgatccaaacaacttttattttccttaatcttcaatattaaattttgaagcaggagcctggacctcattcataggtattctacaatttgtatatattgataatccttctgttaaaattaaattcatttatcataatccacttatctgcttcctatttagcataagcatgtcctattttgtattttttctgaacggactatgcatagatatactcactaatggctactatgcaaccaattctttataaactgccaaacttgattttgcacattgctttagtttctgatggatcgttagacatatttggtcttcaccagaaagggcctttctttaagcacggacatcaataatatctatttgcttgatagttggaactcgtttaattctgtgtttgagttgttgcaatgaaatacagcaactaatttgttcttaatataactatttttgatactactataacaggttgtg

SEQ ID NO: 50173 - DNA, 461 bp, Ricinus communis
  Intron number 1 from transcript 29671.m000299 (locus 29671 .t000008) derived from phytozome v7.0 (chr-ID 29671; pos 1 92965 to 193425 reverse strand)
gatcttcgcaaagtcactgccgattctcgcaggaggtacccttttattgttctactgcattttcccactctttttctttgggttaaaatggactcagttggtaattcttcagtcaatttaattaattaattaatttttgtttatttgtttccaaaatacaaaaagaaaaacaaaagactttgtgggtgatttttaaatgggatttttcagggtttaatcagatagggattttgattaattttctttcccaattaaatgctttctttcctttccttgttttttaattttttagttggtttatttattacttttggattccactattttgcaaatttagattaactcaagtcctagcaatcagtttccactcttattcggatataggcatgactggcaaagaacaatgaattttattttctttccataatgcataaatcaagataaaattgttaactacagat

SEQ ID NO: 50174 - DNA, 265 bp, Ricinus communis
  Intron number 2 from transcript 29795.m000031 (locus 29795 .t000001) derived from phytozome v7.0 (chr-ID 29795; pos 6 814 to 7078 reverse strand)
ctttcttgcaattaattgtttttagcctttgtttgatctaatcttggttgtaaaagtaattcatattattggctctacaattgctggcagagaaaaagactctgagcgcccggagaagtcgagaaagaagaagcaagatgattaaaaaaagaatgacaagaagcaagatgatgatgatagaaatgtaatgttaccatgccacttgtgaaaatgttatcagtgtgaaaggcctaaatctgataagttttttctttatttgcagaaa

SEQ ID NO: 50175 - DNA, 848 bp, Ricinus communis
  Intron number 1 from transcript 29765.m000729 (locus 29765 .t000011) derived from phytozome v7.0 (chr-ID 29765; pos 1 05026 to 105873)
ctgtttgggtaagatcgtctctttgatagaatatttgttctaaaagcttatttaaataagcataagagaaggtacacgacaacaagtatttgtttcttggtggttcaacactcttagttttgaagaatttgtttgaaatcagtaatgaggagtttactgacaatcaggatgtttgataggttttgcaagattagtttcagttatttctatgtttagctcttgattggtgctgaggttttttattttctttctgcatgataagataccttatatgatagcaaagacagctagttcttatggttagtcttgtgatgaactcatcattattggtatgacaaattgcatcattgattgatctgtattaccttagagttagacagataatctaatttatggatgggatgttttatctttgttctggaagagaaaagagggcttttctttattgtacttgttctttaagttccccatggagctatttaaggatactatcttggcatttattgttattgttataaaggatattttcttgtcttctattgttatttttatggtcgaagaattttaattgtgtttactggatttaggtcaacttttctgcattgtaaattgaaataacccaatgaaatgaacatgttgatgaactttattatagtttttagtgttaaattaccttttcttttagaattgaagaatttttatggaaccagggagaattatttgttaaggttttgtttttataggttaaagaatgataaagtattggattataatggtctatgaattatttgttgttgtttatttgcggaagagagactggttgtgttgcttattggtggagggggaag

SEQ ID NO: 50176 - DNA, 649 bp, Ricinus communis
  Intron number 1 from transcript 28962.m000434 (locus 28962 .t000003) derived from phytozome v7.0 (chr-ID 28962; pos 1 1204 to 11852)
cttctttccctcagtcccagcaatcggacacaaaggtaaattctttattcttccaattacttctacttcttgaaaattttatatgtaatttcattttgggttgggaggtccagaaattgtaagatatcaattccgttctatttggttacttgttagattcagttctttcaacctataaaataaattctattttggaacaaaccatttgcaaaaattcaattcaaacttcatgtcagttttggcatgatttgatttctttcagaatgccttgaattgaataaatttaactctagcaactataaactttcgaaacatgagaattaactaaatggaactcaattgaactgaattcttgcgtatttagatttttcaactgaatacttgcatatcattttcatcatttcttagtgtctggtaagcctaaatgtgcaagaatagaattcaatttaactctctctcgttatttattccaaacaaggcaccttcttgattcattctaaaattatagaaatttgttatttgttgcgattatgacatttaccagtgtacttttttatttttatatcgttttctttcttagtgttgtgactgttctcattgtggttgagttgtgtatcagtcaaggcaaaggcacaagaatcagaagtga

SEQ ID NO: 50177 - DNA, 552 bp, Ricinus communis
  Intron number 2 from transcript 29668.m000320 (locus 29668 .t000009) derived from phytozome v7.0 (chr-ID 29668; pos 1 59914 to 160465 reverse strand)
tccaacaccttatacacaacctgcttcggccagtatatctctaatcagccttttctgctttgtcgatttctaacctcaaaatcaaactgttagaatctcatttctgtactgttttagcttcaaatcttatatattacatatgaacataggcattgaatgcttcatttagtatttgcagatttaggtaataatgaagatattttgcaaataccgatggagggtaatgttgttttctatagctgtttctcttgttttgcaaaatctactgcagttgctaaaccattttggtttgtcgacaaagattattgctgtgttctgttagaggcattaatgtcattttgtgtcattccattataattagattgtgtaaggtagaaaaattaagacctatcgaaaacattagtccaaatttggtctcagttatcaagcttgagcattcgttagcacaaattttgatattgtttggtgcttgttagttacttcgtactgcaaattcagtagattaatagtgtcttggtactcaggtgcacagagccagcttgtgtgttccgg

SEQ ID NO: 50178 - DNA, 547 bp, Ricinus communis
  Intron number 2 from transcript 29719.m000332 (locus 29719 .t000019) derived from phytozome v7.0 (chr-ID 29719; pos 2 34612 to 235158)
gcatccgaggagttgggttcccattttgatcaccggtatgtatatgtatatatatatatataaagaataaacctaactagaattacagattgtgcttagagctattgctcatgttatgaatcatgtggaaccaccatgcttgtagcctggtggcgagggggcgtttgtgtcctagggtgggtgtcgacccactttttccctctccaaaactatgtaattgttgaaaagaaaatagaacaatgatcatgtgggttgtagggcatgtatgtaacacaaatagaggggtttataagcatttttagatttcagtgaatattaatataactccagtccaatcttttgtataatcaaaactataatctatacttgagtgaaatttataatttaatattttagtgaataatttcattattggaatgttgttgctgttgtgtaaatatcttggagatgcccttgatggtaatgagtaatgaatggttctccaatctcctagtactgctgatgatatgatgtggatgttgtgtcgtatatttccttgtggcaggca

SEQ ID NO: 50179 - DNA, 471 bp, Ricinus communis
  Intron number 1 from transcript 29726.m003986 (locus 29726 .t000098) derived from phytozome v7.0 (chr-ID 29726; pos 5 90578 to 591048 reverse strand)
gtcgtcgtgtctcttcttcaagtcgttccaatttggtaaagtttctatttctctttaatttttttgttcagtttggagatttgggttttctttgtttccttgctgtgccatgaaattttatttctgaatctgcttttttaaaatttttatttcattttgacttttggaaatgggaaaaaggaagaaaaaattaaacaaatttaaagtgttatcgaattttttataattataaagttcattgattacaaaaactaataaacaaagaatcgaacttttatgttctatcctaatgttatttttggtagtttcataaaagttattatctttatttatctgtactttttgaatgatgaaagaaccggttcttctagtttaatttggtcttaatctttataaaaaatttttgggaaattatcgtgtgatgttaatataaatttctcttaataattgataattgacttttgcaggtag

SEQ ID NO: 50180 - DNA, 934 bp, Ricinus communis
  Intron number 2 from transcript 27798.m000588 (locus 27798 .t000009) derived from phytozome v7.0 (chr-ID 27798; pos 7 7884 to 78817)
tttctttgggccaaatctgctgccattctgaaccggtaattttcaaaacatccttaaccagtatttaagtttacggttgccttcttgagttctgaagaatttgaaaatcacaaattttaggaattaaattctattgttaaatgcaaaaatcttttgctattcaccataatcaattgctggtccttcattgatcttaatttagcaatatttatctctctgctttgttaatcttctttctagtttatttataattttaggattggcatctatatatctttcaaaggtggttatttatcagcttacctcgagctaggacataaagatggtatcagtcattgcaaatgccctttttaaggctcacagtggcgaccctagttgtcctagaagacatggatgtgttgtagagagttcaacaatcctaaaaatagataaattttgattatgatcccatttccatacaaaatctaccaactaattaggttgaaagcttatgtggtctagccatatcaaaccagaggcagatagtaatgtctttgagctagtctgtttacttgcaaatgaaacttgaattgaaaacaagttgcctgcatttcgttttctgattgtgagtaccaggtattattttaactgaaaggaactactaatcactagttttctttgaaaagctagtcctaattcgctaagatttaagacaaatgattttgggttgaaatggagtttgtgtttattgcttaatgttatcatttgttagcttttcagtttagtttctgccttccgttggcatactttgaaatgaaatgacaaactttaaacttctgcttgatcacacgtattatttctttattcactttaaaaaacctggagacttcaccgatgctttttcccatctccctgtgcagacctgctccacctttaccagagttgcatctatcag

SEQ ID NO: 50181 - DNA, 689 bp, Ricinus communis
  Intron number 1 from transcript 29644.m000173 (locus 29644 .t000001) derived from phytozome v7.0 (chr-ID 29644; pos 8 517 to 9205)
tactactgttacgcctggaaagccacaggtaacccgcattctattttttctcttattttgttttttttttcttcttctaattttgagcttaattatacatagagatccttttttctttttagttaattatgagagtaggttataataatatctcaatatgttccttctaagattttgataattactctcttgcttgtctattttctttgtttgctctattaaatcttgaataacaaacaaaacaagtgaagtttatgtatgcatattgaaaggtctgaattcttaagttcagtatgcattttagtttgataatggcatttgttgtaatctaattatgctgaacagagtgtgtatatttatatatacagacacatactacaagtatgctttgttttcgaataaatcacatgcaaaagttcaattgaatttaattcttgcaaactcatgtcattttcttgcatgatttcattaattgcaattttctttttgaatttgatataattgagttgtagcgcctgtaagttttccaaacatgagaatcgactaaatagattcaattgaagtgaattcttgtagtttagactttccaaacaagggaagtactgattttgtgcgccatactggaattatttcactggtttgattatggtgcaggtgcaaattggtacacattcttttacatttgatag

SEQ ID NO: 50182 - DNA, 868 bp, Ricinus communis
  Intron number 1 from transcript 29235.m000238 (locus 29235 .t000009) derived from phytozome v7.0 (chr-ID 29235; pos 8 2943 to 83810 reverse strand)
atcaactgattcaggtctctctctcttatttgtttgcatgtgtttcttttacttctttatgtgaattttcttaaaagaaaaatgtttgtttagtttgtttttgaatttattttttggctttgttgtgcttggtttctttgaatttcgatttgagaaacattttaatgccttctttgggataaatcatacgggagttcaattgaagtaaattcttgcaaaatcatgtcactttaagctttttctttcaaagtgcctttttattactagtatttttactttttaagttgaaaaattttccgttatagtaactaggctttccaaacatgagaattgactataattgaactgaatgaatagaaaaggatttcgctttatatattttttttcaatgaaattttataaattgatcatcttgatatcagatttagctgtctagataatcagcaggcttttgcgttaggagcttacaccatattgtttatctgcaaagattaagattgccagtgtcaggtccacatcatttattatttggtgcaactaaaactggggctgcttggtcgatgcttcttggagtcttggtgttgcattagttagttaaaaattgatccattatgatataattacctgcaaacttgtaaatgatgtgcttggttccttcatagttcattagatttaaggttgggagtaagttgtaatggtaataagtgatgtactggaaccaatattattggaccatagggacaaatatccactttgtttggtaaatgtgtgcagtacaggaagaaaatgacttccttctttccatgtgaagaaattttttatgtttatggcagattacaggttccattttggcagtgaaaaaagcact

SEQ ID NO: 50183 - DNA, 842 bp, Ricinus communis
  Intron number 1 from transcript 29646.m001065 (locus 29646 .t000013) derived from phytozome v7.0 (chr-ID 29646; pos 7 6298 to 77139 reverse strand)
accggtactcaaggcggcggccaagaaaccaccgcgtaagtgcattcttgtgtttttatgttattcgcttataatcagaattgaactgcattaggttataaaatttgcagagatggataattaggtacatgaattgcagataataatgctacttgttactagaatattaaaaaactgaacattttttcagttcaacttgtgctgaattagctagttagaagcggaccggttcatattttaacgtgagggctgatatttagaaaattcatggtggctagaatttagctctttcaacatataattgaaacaaggcattttaatagcattttggaagaaatcaaatggcatgattttataagaatacagctgaaatgagttattgcaaatgatttattccaaacaaggccttagtcttaaagatgttccggagaatttgttcttttcccaaataccaactttgtgattggcactaacagattctggtttggattgatgtgtttttgtaattcttttggtgtttgatgggcattttagagttgggagattgaaaaagtaatgaaagcagatatatttaagctgtcataagctaatatgtctctttgtctgtgaggtggtgtgcatgtggtctgttctggcaccggtaataattatattagttgtacttgacagagtttgggaactgaacagctgaaagtacttgtacggggtcattgcattttgcactgttcttctcatagatttcgaaattagaagagattaatagaaaagctctttatgtagaccttatatctaatctaactgtcgcttcccgttccaccgtttcttgtttcattttggggcag

SEQ ID NO: 50184 - DNA, 419 bp, Ricinus communis
  Intron number 1 from transcript 29333.m001105 (locus 29333 .t000068) derived from phytozome v7.0 (chr-ID 29333; pos 4 95089 to 495507)
gacctggtccaactctggtcaacttcacttatcaggtctgcttgctgcttcttgtttcttcttcttcttttttttttttttcttttgatattaatggtagatgtttgtttagttgttgttggaaaagcggcgcctcctgaatagattttgttctttgactttttgagtgttttgtgattctaacgtcttgagacataaaaaggccaacaaagaaaataaaaacaatttgaatagttccaatagtaattcaaaggggatatttgtcagtggtaagcaaaatgactatttacatattttttagtgtttcagcttcagcactagattgagctataactctattcgattattgttttttcttttttcctgacaagtgatttgtttggctttttagggggagaacaaggaagcaacgattcacg

SEQ ID NO: 50185 - DNA, 660 bp, Ricinus communis
  Intron number 1 from transcript 29801.m003148 (locus 29801 .t000093) derived from phytozome v7.0 (chr-ID 29801; pos 5 21647 to 522306)
cgaggtaaatataattaatttgattgaaatttttattgtttattaggggtttattttgccctaattttgtagaagttattaacgataatattgtgttttaggttaaaagttcatgttttagtgatgaaatgattaacgcaacacataaagtgcatgacttttgttattaaaaaaaaagatgaatttggattaacttttaagagtagtagtatatggattagaattgtgaaagctgtggttttatgtgtatgggtttataactttagctttagcttcgtctttgggataaaaaaataaaaagagctgattgctgttataggataatcaatttatttataggctttgtttagataattcatgtgcaggaattgaatttctttgaagttttgcaaattcatgtcttttgtggcataatttcatttcttttaaaatgcctagtctatttttttttttttaaataataataacaataacatattgaagaaaattgaattttagcaactatgaggttttcgaacacaagaattgacagaatataatttaattcaaatgattcttgcaatgttagacttccaaaacactattgaagtggcttgtacagtattttggagattatttgtttaatttttcccttctgtgtgcttttgcaggtctgcaagc

SEQ ID NO: 50186 - DNA, 526 bp, Ricinus communis
  Intron number 1 from transcript 29757.m000745 (locus 29757 .t000040) derived from phytozome v7.0 (chr-ID 29757; pos 3 19477 to 320002)
gtacttctgtaaggtccctttggctgagagtatgtttttagtttgaattattatttcaatttggtagattttaaatggtttggttttgctacgacttgtatcttttatcttgtgtttttgtaagtagaactatggcatataggttctacctagcttattgcaatgattttattttggccttgtttggaatactgaattcatgcaatgtcagttttggcttgatttcatttattttgaaagtgtcttctaactctttgttgaaagaattgaatctagcaactgtaagctttccaaacacaagatttgactaaattgaattccactagaatagatttcaatttagtctttttacactttccaaatacactctttgttgaatttctttttcttctttcctgttttctctattcatatggttagtttttgcaaatttctggatgcaaagaacttcgtttatttatctccatttgtttatgttggtttttctacagagtcatctgcctcagtccctcgttctgagatagtg

SEQ ID NO: 50187 - DNA, 631 bp, Ricinus communis
  Intron number 1 from transcript 29168.m000377 (locus 29168 .t000013) derived from phytozome v7.0 (chr-ID 29168; pos 7 4738 to 75368)
aggtatatttttgtatttttttctttatttatatttaggctcatggtatttcgatagacaataatataattaattttatgtaggatataccttatttgacctattaattgttctaatgagtacatgtattcttttattatattatttgatttgattttttctctactatatgatctgcagcttgaattgaagcaaaaatgtgaaagcaagctgttctatacaactattcttgggcgattaaaaaaacaaaagcaactgggtttcatgagccatatgtaaatgcatctgtcgggcaagcgattgagcaaatgtgaaaccaactgggcttcatgttccatgtgtatatttataaatgagacaaacatattgatggggtcagtatacggacattgtcaatcaaaatgctccacctgttcatgtgcatcggcatttcatatctgttcgaaggaggtacattatgcctttttgtggatgattttttcattcttttagtctttgtgagttgattgatggaaactcaaaagaaatgccaagtatatggtcggagaaaggctctcaacctcatattatattctgtgattcacataaagctaactgttattatcttcaatctgcttcaacttagactcaa

SEQ ID NO: 50188 - DNA, 984 bp, Ricinus communis
  Intron number 1 from transcript 27810.m000641 (locus 27810 .t000012) derived from phytozome v7.0 (chr-ID 27810; pos 1 23578 to 124561)
attttatcaaacgtaatgttaattgtagtcggtgcttaaaggcgctatcattatagtagtgtggttagcctactagatagagagtttagtactagtacctaaaagttggagttcgtacatttcctttcaaataaagttattttattttattttaaatactagtattctttttttttaatttaaattttaccaatcaaaatttatatttatatatgatttgcattttgtgagttttttaatatttttttataaacatgaaaataactaatattttacgaaagatgataatcttttttattcttttacaaattatactaaggtcttttgtaagtgttactacttgaaaaacaataaaagattgacaagtttataaaaatattaaatcttttataatcacaaaatctattggtaaattgtaaaaaatgacaatcttcttcatatttttatttctcataagtattatttttataaaaaataattatgaaaaaaaataatttttttataaattataataatttttcataaattttaaagatgtataatttttaaaactatgttgcaactttagtaaattttaaattatattccattagcaaattttattatagtttgtaatatataattacaaataattaaaattatatttttaattatataaaataaattatttgtcataattttattagttgtttaaaataaagtgtattttttttgcaaagaaagtgtagttaaagtaaatatagaattttctttatataattatgaactaaaaaccattaaaaataatttaatttaaagaagaaaaagaaaaagaaaaacaaacactcacaacagtcaaagtaataggagatttggaacttttttaccgttaacgttcttacttcagaaatacaatcccttaaaaccccaaaaccctagaaacaaagagaaatgggaatttcaaaatttagcagcgaatcatttgctgcaggctgtttgcaactg

SEQ ID NO: 50189 - DNA, 816 bp, Ricinus communis
  Intron number 1 from transcript 28246.m000113 (locus 28246 .t000002) derived from phytozome v7.0 (chr-ID 28246; pos 1 1282 to 12097)
gctagtttaggttagttttcttgttatcaatatctgctactcttttttttcttttgttttttttagtcttgccgattagtttgtttatatgggctttctttttttttttttttacttttatttcctttagagcatggatcgctttttcatgtttcatattccatgttctgtcttcacccagcgtttcgccttccttttaattttctcccatttttttttctctttttgggaatcttagataatgatatatgggtttgggtgggttcgatagttcaatttggacttgtgagacgggtaatcctaatcgggtttgagacagttacatatagtgaataattgggttcagggttgggtagtgcttaatgggtggataacatatctgatgccattcctaggcaggcactgtggtggattgcttttgaaagcgaagtttgaaagctgtaatggacggtctcgcctgtgattctgaatctctgttgcatagtagcctagagcatgatagttggccaaattattgcgtaattgccatcacatgcatgatggccattggttaagtcctgtttaaaagcctgatctatttgtctgagattccaaaacctcaactgaacatcaaaaattgttgaaaatgtttttttttttttttttttccatgtactgcatttattcttgtcctttatgctggccttggctattgcaattattttgatgcatcatatatgggtctagatatattcaataaagtttactgaagagaaatatttggaaacttgctatttgacaggtggatccccggaccaggaatctgtagggtctggg

SEQ ID NO: 50190 - DNA, 695 bp, Ricinus communis
  Intron number 3 from transcript 29635.m000458 (locus 29635 .t000018) derived from phytozome v7.0 (chr-ID 29635; pos 1 00388 to 101082 reverse strand)
catctttgatagctcaggtttgattatcaacctcttcttattttatattttcatatttaatccaatttcagataaaacatggtagattgggtggtaaatgataattgactgttgtttgagggtgcacttcctcgaagatgaactgttagcatctgctttcaggttcactatgattgtgttttttggatagtattttcattagcttaaaagttatttctagttcagaaacggggttgacaatcagacttaatgtactcaatgatggattgtactttaactttttcccccttatgttacagagggatatagaagagagagaaacaaagaaataaaacttaagcttttgttaagccttgctcatctgaccatggtgtttccagcagtcattcctcagtcagaaagaacattagggacacgggaagaaacaattattttgctacaatctaaaaccaccataatgagaaaaattccagttcttgttatgtgtataataccactaaatactcttagattccttttgtgatttaaattaagaactgtatattaggtggatgatagtttgaatgttaaagggcaaatttgcttcagatttattttgtttctcaacgttggaagattttgctagaattttaatttagaattgttttttcacttatacaggttaacagtcttcagcaggagctgcaattgttagc

SEQ ID NO: 50191 - DNA, 932 bp, Ricinus communis
  Intron number 1 from transcript 28067.m000103 (locus 28067 .t000002) derived from phytozome v7.0 (chr-ID 28067; pos 1 7117 to 18048 reverse strand)
aataattctgataaagagaagcaagatcagaggtaagacccatctgggtattctgtttcttgtttcgtttttatgtattcaggttggagtttgatttttcttttttcctcttttaactggctcttgcttattggatttttcttttgtttgcctttgaacttttttaaggttgattgttttactgattggaattagattctattgctgaacccctttctctgaacagaaaattgttggggagaagttaaagataaggaattttattataaagttaatgacaaggacataggctaagatttatatgcctacatatgatttgactgctgagagaactgctgggtagttagcttggaataatagattgtttagatgccgagccttattctgctacttggcttaattgtaataacagtttatactttttctaagactataatgaccaaaaactacatctttctgtatgttctcttccgttgccaattaaagtgagggttaggatatttatataatccatagcaaatcacttgcagatcatcctgcacttgtttttataaaattaaaggatctttcaagcttttgaattcggtggtttgctcttgctaagatcatctcctcctcctcctcctcctccctgttttaattcaggttgctgcctatgctgtcagttcctgaaagactatcttatggaagaatttcatgccctttagttagatgagatgaaataatatctgataaatgaaaattatggagggtcctttgaaacatttactgttgaaataaatgtagcttgatatttgaatggtgtagatagcagaaaaaagtttaggagagtatgggttcaattcaaattgagggcagattgatgttcttttacattgatatttgcagttttctaattgtttggttgaccattttccaggactaactctggc

SEQ ID NO: 50192 - DNA, 283 bp, Ricinus communis
  Intron number 1 from transcript 29726.m004091 (locus 29726 .t000203) derived from phytozome v7.0 (chr-ID 29726; pos 1 152656 to 1152938)
gaaagacagaaaacagcaaagtaaatttcaagatttttcctctgataattgaacttgtagtttccagtttgagtatagaaataacacaaacatgttttaacttcagaatttgcagttacattacaggttttccaaacagaggtcatttttaaaaaggaaaaataaaaagaaaaaaccaagctaacaactcttggtttctcctctcctataggcgaagttaagctagtataattaatgaatggttcttcccttttgagtattctgaataggcattcttagcaac

SEQ ID NO: 50193 - DNA, 732 bp, Ricinus communis
  Intron number 3 from transcript 29726.m004091 (locus 29726 .t000203) derived from phytozome v7.0 (chr-ID 29726; pos 1 153367 to 1154098)
ggactctcaccaacatttccgtaaacagtaaaagcttccatgtgagtttccatgaaagcaatcacattactgtccgaaacatcataattacagctccagggaatagtccaaacacagatggaatccacattggtcgttccaccaacatcagcatcgtttcgtcagcaattggagtcggcgacgattgtatctccattggacctggcagcatcaacatcaccatttttgatgttagatgcggtccaggccatggattgaggtagcaaagcagaattctgattcttgtagttgtcagctttttcgaaacagatttttattagtattttcagaattattgttgtttttcctgaagagattttttaactatatggcagtataggaagccttggcaaatataaaaatgaagaggatgtgatagggattacagttcagaattgcacaatcaacggtactcaaaacggagttcgagtaaaaacatggccaggatcacaagcaagtattgcttccaacatgacttttgaagatattgtcatggtcaatgtctcaaaccctgtaataattgatcaagaatactgtcctgctagtagctgcgacctgtcgaaggtaattagtcattagtacacataaaagcacatcctttaatgtttatacttcgctgtaaaacaatgttttaaagaatggtttggtttttggtcagccatctctggtaaagctgagtaacatctctgtcaa

SEQ ID NO: 50194 - DNA, 770 bp, Ricinus communis
  Intron number 2 from transcript 29729.m002289 (locus 29729 .t000022) derived from phytozome v7.0 (chr-ID 29729; pos 1 21518 to 122287)
tgatcttccaaggttcgttcacattcttttcttgctaacttcatttacaattagcttgtttctctcatgcgggtgttgagttgctgaaccactctaaattaaccattttttatttcattaaaacattgtccgaatcatacgaaatttattaatactgtccattcttttcgtcaatatacattggtttcatttttgcatattataataacaacacttatcattgttgtctgtttatacgtacgcttgaagattttgactatacacaatatacatgtactagtaggagagatcatgaacttgtcttaatgctcagaactatgcatacatagtaattgcagtccatcgttgttgacatgtacatctccatgacaatttgcctcgccggtatgtttttggtttctccacccccaatgccggcaggaatcgccacttcatagtgatgcccgtgtcaacacctcattatgagtcaactgtttattctggacgtgcatgggacactctctctctccctctctctctgtgtctgtctcacactccgattggaaaaggaatcgtgatgattattttagtttatgtttgagcatttgtgaatgctgtcgactctgtgtttggtctacctactgccaatagctaaattaacgatttcatatgcctttgtttatgtcattgtatcggctaacaaatccattgataatatttatttacgctcattaaattcatgagaaattgtgttttattatgcctttcttgtcacaaattttgcagtttca

SEQ ID NO: 50195 - DNA, 986 bp, Ricinus communis
  Intron number 2 from transcript 29428.m000319 (locus 29428 .t000003) derived from phytozome v7.0 (chr-ID 29428; pos 3 1769 to 32754 reverse strand)
aggtttctaggtacatttgtttacctttcatctcaataactaaaattgcattgaactcatttgtgtttttttcccttcctttctctctttcttgttacttgtgtcttgttttttcctttctttcttgttattgcatttgttcatgatgcttgattaagaaccctaattggttttgtttaaataaacatggggtttcttcactacttgtctatttccatctctctctctctctatttttttttccttccataaaaagggttgattttattaataaacatatggagggaaaaccacccataagaaaatttcatatgggtgatgaaagctacaaatctttgtatacttttcttctttttttttattattattattacttatagtaattttcttgaatctagtactttataatgacaaaagcaaactgagttaactgagagactcaggtgtttttcttttttttctttccccctttatttcgtgttcattaattgctttttgttggacatacatgggtagatcccataaatgaatagcttgtaagcagaagcattatacagtttttggaagatgagattgataccatttcagtgtttctcaatctatcacctattttatttcttttttcttgaagcatcaagtaattggatcactgggtttagctaataataaaataaataataggttttatcttcacagttgatgggatcttcaatatgaggaattagtgtttttgaatattttaatcagttgctttaatttattagatttatcattccaagagaagcaagtacatcataatactaataataataatagtactactactactacttatagaacacattagttaatgactgttaaagaatgttttgggaatgttaattattagttgagtaattatttgtttgattattatatacatgtactcatcatcttgtgtttagtaactcctatatatgcatgttctctttgataattacagaatc

SEQ ID NO: 50196 - DNA, 618 bp, Ricinus communis
  Intron number 3 from transcript 29657.m000460 (locus 29657 .t000001) derived from phytozome v7.0 (chr-ID 29657; pos 1 3711 to 14328)
tcagacttgcatttttagctggggctggacttcaggtaagatgagacaaacatgcttacacatcctcattttttccgtatattagtcttgcttgggttgaacaatatgctccataaatgatgctgcaagtaagatatatacaggatatgttccatttggcagagttctggtcatttgttaagtagttatatatgcgtaacaaatccctgatctgaatttttcttgacagcattatggtagcagtttttgttaagattttctatatatcttggctggaaatatttaaacttaaccttatctcaaccctgcccttttccacttgttaaccaaccgagtattgactagttcaatgactgatctttcaatggaagtatttattgataaatttaatgtataatcgagactggccgcatagagtttgtgttgtgtataatcttcatgccatgtttctggcgaaacaattacacggtcttataggttttgttgatagcaatttgattaatatgagagatagatgttacttgtgaatagtaatctacttaacaagtgctgtaatgatgtttgagaattttgttacttgcaggcttttcagcaatttactggcatcaatacagttat

SEQ ID NO: 50197 - DNA, 814 bp, Ricinus communis
  Intron number 1 from transcript 29794.m003305 (locus 29794 .t000004) derived from phytozome v7.0 (chr-ID 29794; pos 2 4517 to 25330)
gcttggaggcgcttaatcacgcaggttaattaacattttgaaatcttctttttatctgattaatcgctgaatcgctagatgtttgatttctaaatttgaggatttatatagaattcgttaaactatagtagttctggagtttgataactgtaggaagctagagtcaacttttgggtatttggatttaatattgaatccaagtgtattttgatttgaaactcgagaaatgtttgtcaaagctccgtctttggtgttattggggaggcaataaagggaaacaaaattagggtatttttctttttcatcctgcaattgtaattgaagcatgccttttgctcataagtatgtaatcatgttctttttgtttaaataatcttctactattagctgaggtgcagtggaaagaagttaattttggctttaggttttcgaggcttttagatgcattgatgtacttaggcttttgggctctttttgtgacaagccttatcgatggaaaagaaaggctaaagagcaaatgattcagtttgaatgcattattgctccctgataagttatgggtgctcgaatgtgtatgtgcttttgtacattcaattttgcgtacttgaatctatcatgccaattttatttgttattttgtttatcttctgtaatttatggcttccctttccttcatcttgtctttctttcccttcttttattttctttttcttaaggttagaaattggtcagaacaaaattgctttctacttttattgaattacctcttcgtcttctcacaacaggtctcaaggcatcaatcagagttaaaaca

SEQ ID NO: 50198 - DNA, 751 bp, Ricinus communis
  Intron number 1 from transcript 28357.m000096 (locus 28357 .t000003) derived from phytozome v7.0 (chr-ID 28357; pos 2 6276 to 27026 reverse strand)
gaagtggaggacagactccagaagctagcaaagtggtatatttatgcgtttttttcctcccaactttatctttctactcataagctgaacttggtacatgcttatttcatgatacatatccatttatacatgtatattgatagatggatagagatttacccttatgttgcattaaatctacttttgatgtaatgaatgagccactataagtagagcaaagcaacttgactctttgatcaaataagagtttctactcgataagctctattaattgtttatcagatttcctataaactttatttgctcagtaccttgggtggatggtctcatgcctaatcaagtaaaaaaagaaaaataattctgtacagcatagatgaatggagttcattttctgtttctttttaatttcttgggagttcaaatattctttgaccatataaatataatatacaaacaaaggactgaaaatatgtaaaactttgttcagttttcaattttcaaagttctaatttatgtacattatgtttttttttttaattttttaatgaagattttggaaatccatcattaatataagtaactagaggtcttagtatagtttaaatcttgtttggttattttggttgcctttgtcatatctatttctgcttgctcttcataatatttatatatcatttccattgtagatttattttgatttgatcttatcatgatttgattgaagttaaagtaatttcttttgatagtttaa

SEQ ID NO: 50199 - DNA, 485 bp, Ricinus communis
  Intron number 2 from transcript 27483.m000031 (locus 27483 .t000001) derived from phytozome v7.0 (chr-ID 27483; pos 5 69 to 1053 reverse strand)
tttactttacgacaacaacttacatacctcaaaaagtatatgtttagcataacatttgagaaaattcaaaagtatatgtaatagtctagcagccataggcaattctatacctgaaaaaacaaaagtttattccttactggcaaaccttggccctaaatatgaatccttcacaacaacaatgcttaaacctccaatgccatcttactcagaagttatctcactcttataaggctttgaacaacgaaattcatggattgaagcatcaaatactccatcatatgtgttctatggagaacgtaatcagcgtcagcagcaacaaaattataataatcaaaatcatcaaaataatcaattcacatcaaaaggaagaggatttcaggctacaaataacagttctcaatattcaaattttacaggtaataacttaaaatcacaataatcatctcaaaggagcaacaatcgtgtctatcgaccaccaccacttg

SEQ ID NO: 50200 - DNA, 732 bp, Ricinus communis
  Intron number 1 from transcript 29641.m000399 (locus 29641 .t000024) derived from phytozome v7.0 (chr-ID 29641; pos 1 47399 to 148130 reverse strand)
gtaattttttttatcatagtattgatttgtttttatactttttattcttttgttgttttatatttcttaataattattttttatttattttgtaattatgtttaaaaaattttattgtttcgagtgaggagaaagaaaaaattgaacttggaaggtcttttcaataaaggaaagaagaagcttgatgaggcgattgatgaatttaatattgttggttcttctttatttatagaaccttctactttaacatactcttttatggttaaagtcttgagacagttagagattttgtcaactgatgacaataaggtggcaagagaattttatactcaccaaattactatggaagcaaagatttcagaaatttgcaatttgttatctgatattaagttaaagttgtaaggtggttgttatgaagctggtacttcaagctttggtggtatttattttcaagtaaatcaactgtctaattagatattttaaatatatttcttctgtatcttcttttatatttctttttaagttattaatatattaaaagtatatttataatataccttttatttatacttttaattttattatatgtgaattctataatcagctagtgaatctatattaaaaatatatctataatataccagtttaattatgtttgaatgtttttaattctaattttaatatatacatttagcattttaattatattttcattaatattttagattggta

SEQ ID NO: 50201 - DNA, 982 bp, Ricinus communis
  Intron number 2 from transcript 29701.m000603 (locus 29701 .t000024) derived from phytozome v7.0 (chr-ID 29701; pos 1 86972 to 187953)
agtgggaagagccacccacttgaattataatttttgtaagactttcaatctcgtttctttcatttcgtttaatcactaagcatttgcattttgaaatatattttagtctatgacctcttctttcaatcatcttttgggttacataggacatgtcttattttatcttttattaaaatagaagggttttctttctttccaaaaagaaaattattattattgaatatgtattgtaggcttttgattgcgttcaaggtgtttgattatttgccaaagtgggcactattatttgcacacaaggtgatacttttgtttctctcttcaaacaagatatctctatttgcttctcttgtttctggaacttttatttctttttttattcattttagtaaattaagcttagagtcacttaccaattttctaattcttccaggatactatagtagtttgaaattccttttaatcacatttatgagcaatgtcaaatgaggtgattgccagagtaaatccttttatttataactttagagcttttgcaataaataaacagttataatgcaattatgcagaggcagtttttatcaaagtacaagattctagtcatattatgcgtaaccaattctaagttgcattaggcgtatgtcttgcatattcctggaaaactagtgttctttcatatgcacaaacctttgtgaaatccatgcagccaaattttccagtaccaatatcttcaactgattgatgccattttctttcttagtcctgagtttctctgattgatgccataatcttaaaattaaagtgcaagttgtagtgtcatgaaccatagaatatacagaagttttctattatgttttccttttggttggattaataatgtttaagaggttttatgtgaatgctgtaataggcctattgggactttagttagttgtttgatcggaaattgcatagcattggtgatgtacatggattcttggtgcag

SEQ ID NO: 50202 - DNA, 516 bp, Ricinus communis
  Intron number 2 from transcript 28833.m000157 (locus 28833 .t000006) derived from phytozome v7.0 (chr-ID 28833; pos 3 4049 to 34564 reverse strand)
ggtatgctttcttaattagctagctgaaaaattactgatttcttatgaaaaaaaagaactgtgcgtatgtatatcaattattgggtttttggattttcttcgtgcctctttttctttctctgaaaaatgtttatatcagcaatttcagtattactgtaagtaataaggttgcacttctccatctaacaagatctagaactttatggtgggtggttggtcttaccgcaaagtactaattcaaagaacaataacatctttatactgggtaaaaaaggtgatttttgttttgcttgtttttaagttaatgtgctgaaattattaagaggataagttcggatattgttactggattgttcttcgtgttctttcaatgtgacctgatattgacttgctagttaagatctgtatacaccatttattacatgaatcattctctcatatgttctacatttgtttacactctttagatctttcttgcaatgttcatgacttcccttactttcaggtcgcattgta

SEQ ID NO: 50203 - DNA, 400 bp, Ricinus communis
  Intron number 1 from transcript 29684.m000314 (locus 29684 .t000006) derived from phytozome v7.0 (chr-ID 29684; pos 8 2658 to 83057 reverse strand)
gccaattctacgtcagaggaggcctatcacatcatgtttgtgttgtcattttgctcattttttttttctggcttagaaaaagaatattttttgggatctcctgtgctgtcgccatttctttgcagttgcctaccgtgaatattggtttatgatcctttggtcttgatgcttttcatgtttgaaaacaaggagggtgtcaggggaatagtttgaggtctggtcatggtacatggatgggaatcatctgggttagataatggctgtaatgataatttttggtaaagagtagcaaaattttttcttttctttttctaaattttgtaacgcgagtatagtccacgaatgggttctggagttttgggtttagtgcagggggcttccaagggtggcttgctgctga

SEQ ID NO: 50204 - DNA, 759 bp, Ricinus communis
  Intron number 1 from transcript 28408.m000196 (locus 28408 .t000002) derived from phytozome v7.0 (chr-ID 28408; pos 2 2939 to 23697 reverse strand)
gagttgtctacaaagccattgatactaaggtaaggcctaagaatcctatttacatgtgcttgcctttgcatctcttataattatatctgtttcgtattataagtttggatatattatcaatgagtgtactttcaggttcttctgttcttttttattttctgaagtaggggagaaaaggaaaaggaaaaaaggtttgctttagaggttttacttagcctttcaaattggttgcggacgctagaatgtattgaatctttggccatcttttcatttttttttctgttagttacaataagttgttataatgcactgttttggtaaattgaaataaaatatttgtatattactatggttatgattccaaattgattaacaatgtctgagagaggtctaatcaagttattagaatttttagctgattttatcaagcagtcagacagtgcagtctgtttctaaagtccatatatcgaacttactttaagttttccttgaagtggcattgtgaaatatgctagtttttttcttctgtttcttaggcatttcagcttactgttcctgcattaggtgtttttatcaatgtttttctcttctaatttcagcacaagagtttcatgtggagtttagatgaatataatgctagtattctgaaattttttgaatagctaaaaatgaaagtgatagtgttttctatttgatctgatggatcagtgtctaacatatgcagactggacaaacagttgcaattaaaaaaattcggct

SEQ ID NO: 50205 - DNA, 535 bp, Ricinus communis
  Intron number 1 from transcript 28863.m000089 (locus 28863 .t000002) derived from phytozome v7.0 (chr-ID 28863; pos 1 1021 to 11555)
gaggtgaagaaggagaagcttgtcaggtaagtttcttttttcttgtcttgttttcttattacttatcgctatttctatttacctaatcttgttttagcttttgattatccttttgattactgggttactaggtctttgtttgtgtttcatatgtgaatgtcagtttcaatttggtgaaattaataattttctgctcagattatgtcagtacgaatttagtttgttatttggagagagaaacaatgtaaattagatgtttctttgaagcacatgtctattgggtacttttgatgctctgttcaatccttaatatgctgaaaaattcgaggaattttttggattttatgcagaaagatgaggtttattttgtatgttaaatgctagattaatcatgcaaattaaacaatttatgcccttgtacgaagtttatgtttgtttttagtgaaacagggtagtgtatccagttactaactagctggctggaatattaatatttgtagattttactctgctgggaaaaaacttagagagacat

SEQ ID NO: 50206 - DNA, 897 bp, Ricinus communis
  Intron number 4 from transcript 29171.m000266 (locus 29171 .t000003) derived from phytozome v7.0 (chr-ID 29171; pos 5 1869 to 52765 reverse strand)
gttaaggtatgttccttgtattatcttttattgctagcttttatcaaaagaaataggactctttaggtttgtgggtcttgaagaattgttttgttaagatttaagacatgtggatgggagcttgatcctggcatataaattgtttacgccttctgtgattatgataatggtatgtaaatatgtttaagcttgcacttgattgttaaacacgataaggactatagagtagataaaaatgctcattaagcattatgtgatatctatgtgcttgtatttggggattttatggtaactaatttgtgtttgatgaagagctatagttttttttttcctgacttattgaacattagctaaactcttgctatcactgccacttcgccaaaatctagcagtatgcctcttctttttttttttttttggtttaattttttttttttttttttacataggaggggagaaaactctaactttggtcttttgcctaagccaagagatgccttaccattgggttaaagcatgtcggtgcagcaaaattcctgtcctcttactttcatttcttttaatgtgcattattatttatgttttccatggttaaatgaaaaacactagttaatcaattcaaagggtattctccatatgtttaaaattatatcgtctgggtctttgaattagttatgcagtccagtataatttctatgagcatgtcctctggcttttccaatgacaaagagaaattaagtagttagatcttgcataatgaatcaagaatatgaaatacttctcccgagtaaatgaggtccaaaaatgattggaatccatattactctttgcagagaatatacatgcatgtactttttgaaacattctcattgtactgttattattacagggagaatt

SEQ ID NO: 50207 - DNA, 669 bp, Ricinus communis
  Intron number 3 from transcript 29782.m000118 (locus 29782 .t000005) derived from phytozome v7.0 (chr-ID 29782; pos 3 6161 to 36829)
gcagaacatccctgtgctcataggtaagcattatttgactgagttgctgtcttcaaaggtctattatgtaatagaatactattaaaatttaaatgcaaaaatggcgatctgaatggacaatgttgccattataagcattcagtcatgctctagctttgtcagcgggcatagagtattaataatcaagtttttaagttaccttcatgtcagcatttattaaaatgataaacatatatggatagacatgcctaaaataactgaatttaaactgggagaaggcctatttttaaatcaaagattgctttaattgacaattttatgaatttaagttggtactagatgttgtcttgtttgagtatacctctgacagattacagtcattaccaaatcatttcatcttagttgctctcttgaattttaactgcattctagtgaatcatgattggaactggtcttggagtcgattattttttaatcgcaaatggtggaaaacatcctaaaatctaaatatgaggcatccgagctgtatgttgtaggcctttagaatagatacttgagttgctacagtgatagtaacttgccagacaggttacccggacctcaaaatcactatttaagacatattctattgcagtgaagaaatcaagaaaaaaataggttctgcactta

SEQ ID NO: 50208 - DNA, 984 bp, Ricinus communis
  Intron number 1 from transcript 27526.m000074 (locus 27526 .t000004) derived from phytozome v7.0 (chr-ID 27526; pos 3 4917 to 35900)
aggagcaaactttgattctaggtaaaatttgagaggtattactcagtatgttagttctctttatgtaattgctgattcttcttttcctgatttcccttttaatttatggtttttttgtactctatgatctgggattcttgttttgtttttagcttgatttaagcgtttcaagattgtaattttgtttattagtgttgaacagtgatggatctacttcgctattactgaaatttggcttttttcccctctttttatatgagctgtcagtgatttttgcagttcattctttttttttttacttggttttatttataaatgagttgtggattggagacatagcagtattggaagatctgaatcgcacttggttgtttgctttgatctgttactttgtttctaaagcttacaacttaattgggtttcttgttttttctttttcttttttggttcagttttgaaacgttagacagatttacttcaagtttccttgatgtattatgtggcaagaatcaaaagcttgaaaagtatatttttctttatttaagaaaaagaaaagaatttctgtgcagtttaaaactgttggagaacttgtacagaggaaccattataatgcttgatccaaaggtatcttaaagagaaatggtgctattgtatattactctacgagagcttttagtgaaggagtggatcaccatcctagattttgtttcctttgggaccatgctagattttgcttactgggatcatatttttgttgaacatatgtatcatattctgttacatggttttattgctgtacttgttgatacatgcttatgcctcttcttctcttctcttcaattcagagtcctacctgttgaatcgttgatatttttttcttaccttcaaacattgttcttttttgtgatttatattaattgttatttagacatataccttgtgaatacagatacattatcactactcagagcctttaagatacaa

SEQ ID NO: 50209 - DNA, 294 bp, Ricinus communis
  Intron number 1 from transcript 29755.m000433 (locus 29755 .t000008) derived from phytozome v7.0 (chr-ID 29755; pos 1 64324 to 164617)
atgtaaggctcttgttttcatgtttgcattattatatctgcaataatgggtgtttgaatttgatttgaagatcaaattctagattttttttttgtttattgttgaccttttatgtggcgttctgcattgtgaatgaattgagttatgattatgagattgtaaataagtttatgggacttttaatcttataatctgcgcatattctacttttatataatcttcttgttaaagataaaatctttcatgatattaaatttagaaagctgagttggttttcttggtataccaatttga

SEQ ID NO: 50210 - DNA, 359 bp, Ricinus communis
  Intron number 3 from transcript 29762.m000484 (locus 29762 .t000012) derived from phytozome v7.0 (chr-ID 29762; pos 7 8022 to 78380)
agaaggtaaactccttattcgatacctgttgtaactataagatgcaatgcaagagcttttcatttgttttttccttcttttacacttcttttgataaaggaaactcagctcatagtttattggctgctaagctgaaaacttgggcagcaccaattcgttattcactgttattaagtgatgctttgggtgttcacgttgtcattaatcagctatgcacctctggtaatcttatgttatccttgaaccagccaaattaagttacacttaatagagttaatacgatgattatattttaatctcttgaagaaaaaaaaatcaaaaaatatgttaacagaattcttttatcctacaggtagcta

SEQ ID NO: 50211 - DNA, 365 bp, Ricinus communis
  Intron number 1 from transcript 29776.m000476 (locus 29776 .t000010) derived from phytozome v7.0 (chr-ID 29776; pos 7 6452 to 76816 reverse strand)
agcggctctggatccaggacttattcttgattccagtaagtcagttgttcaatgagaaatcaatattgagaataactgatatagtttgttctcaaacaaagttacttggtttgctatgcatttaccttggaaatgaagacgtatgaaaataattcaaacttttaggatggatagaagaaagaatctaacatggaatattcaagttaaccaagtcgcgactgctgagtgccatagtagaatgtgctcaaaagaaaagagaaaacatcaacattattgcaaaatttgtctggttttgttccctccattctgcgaactattaactaaattataaagtagatgcgtaatattctagctttttgcaggtt

SEQ ID NO: 50212 - DNA, 903 bp, Ricinus communis
  Intron number 2 from transcript 29680.m001722 (locus 29680 .t000065) derived from phytozome v7.0 (chr-ID 29680; pos 4 33559 to 434461)
tgttgttgtgaagcctttttatatcttggcagaaggtaatagattcttgatgtttacctcaattgttgttatttttttctgatatagtataaactattgctgtggatattatagtattttcttattcatgaaaaatttaatagaagtaatcattttttttaattgctataaaaataaaaattcttatcgtgaaagtaatattataatgattttagtttatttctatatgtaaaaatgagattaagttactatgtttggccttttgataatgaggcaaagcaattttaataaatagagatttgcatatttctcataaagtttttatttaaatttttttttatggtaatttttttttatatatatataattaaaaattaataaattatagtataatagctctaattttctttttggtctagttaagaccattgacttcaagaaactttggagtccagaaatttttattgaaatcttaaggaacagaattaacaaaagaaagaggaaaaagaaaaaagaaaagtcaactgtgaagggagctcttgtagatctgaatgcattgaatcataattttagtgttccagaaccgcgaagaccgatcaaaataacaacggaagagtcagtaacgacgcctattggtctcacttttactattaaaccctcaaaaaaaagtttaaaatcgaaatcgaaatcgaaatcaataaccctttcaaaacatcgaataacgcacaaaggcgcttacgtatttacaagattcgaattttactacttcgggaaaattgcagccattttctcgagaaaatcggttcatcacttttgaacttttttatgatgaatttatcaaaaattggagctttattaatactaatagtaatagtctcggttcaatctggcgattcaaaaaga

SEQ ID NO: 50213 - DNA, 496 bp, Ricinus communis
  Intron number 2 from transcript 29726.m003935 (locus 29726 .t000047) derived from phytozome v7.0 (chr-ID 29726; pos 2 93985 to 294480)
acagttgcattttcttgaagtctttggatttacaggcaaggcttatgaatttctattttaattaatatataatgtttttttttgcctaattgagacgatttatacagaaaaaggttcttggttctttgctttaattgaaataatccaactgccagtattctacttgtcctaatttgatattttaatggcatgcatcagcttatttgtctttattgaagtgtttagttgtatctaggagattgcttttgggttaaactcagataagtgtatccaagtgtaccaaattgcttttggttatcccatctctagttttggaaaccttccagggtatacaagttattgaaatgttcttggcaccattttttcttcttgcttttgatgcttgatatcttgttcacctcagtgaactttagtttgttacattataagcattttttaagtttggaatccttttatctatttctatctgtttttcctccctttccacagggttgct

SEQ ID NO: 50214 - DNA, 754 bp, Ricinus communis
  Intron number 1 from transcript 29634.m002152 (locus 29634 .t000098) derived from phytozome v7.0 (chr-ID 29634; pos 5 92171 to 592924 reverse strand)
tttacaaagatccccttttcttttagcttcatcaggtttgctactgattacctctgttaatctttctgagcttcctttgaaaaagaatgctgggttgttttagatccgctgaattgattctttttgcgggtgttctagtggcgtaatatatgtactgttttgttttggctaagagttatctcagattgttgggttcagagaatgactgttattcttacagacttggggtttaaactttgcctgggtttggttaaccattgtatagtcttaataatgggtgcttcatgctttttttttttttaattattattattattatttaatttgtttctgctggtagatgatgcttgattagatcaagagactattagttactgggaggtttgcacgaggttgacttgattagttttgccaatattagactttttgacggttgaatacagctgacagcctatgattttcatatgggaaagtcaatgtttgatcaagcattcgtataatattaatatcaatattcttactttgattttatttcgtctttgcaaattgtgtacctaaatgttggttgcctttccactgctttttgggtttggtagtgccaattgcatgcttgattagctatgtttgtttcttggccacctaacctcaacctgaaatagaagaatataaagagttagctatataatttatttctaattattttttagtttattttatgaaagttactaactttcagttgaactccacagacgac

SEQ ID NO: 50215 - DNA, 718 bp, Ricinus communis
  Intron number 1 from transcript 29739.m003760 (locus 29739 .t000196) derived from phytozome v7.0 (chr-ID 29739; pos 1 215841 to 1216558)
aatactttggaggaggttttgcctatcaagtaattttctttcttttttcttttagctgtttagctttgatgggtcttataacttttattgaatcttgatgcttctgggttttttttctctgtttcaatggtcttttttttcatgaggttgcatttgatccttggtcctgtttctgttaaaattagaaaatggtgtctctagcatatgttaaagctgttgataaagtaatcgtggagtggtgaaatgatgagggtttggatattttataactggttgatggaggtgggaattaaaaaaagccttatttaacaagttttatgctgtgataggaaggcgtaaaggtcaaaatgagcagaaacgaaattttttatttcgtaaattagaatttggaagttgtgtgtaagagcatcggaatagccatctaagcagtctgttagtactatcgtggaaccagaacccacaaagcaacagcatcataataagacttgtttcatctgcacctgattcatgtgaagatttaatttgtagatagtcttgctgagagtagctcgagtctacttctaataatgactggttactgacacttatagagcgtgttactcgtttcataaattttcggaattaatcgttaacatttttcccttgctgtaacttagttcttaattggcttatattctcttttctgaatgtttcaggagaggcatatcgaagttctata

SEQ ID NO: 50216 - DNA, 556 bp, Ricinus communis
  Intron number 2 from transcript 28582.m000335 (locus 28582 .t000020) derived from phytozome v7.0 (chr-ID 28582; pos 1 83834 to 184389 reverse strand)
cttgtaagtcaaattttgtgtttcttaatttttcttaaaaattttgtatggttcaatgtcaatgtcaaacatgtttttattgaatttgaatttctatcaagcaactcttctgtgaatttcttctgataaacattaagcaatcaccaaaaagaatatatttttttcttttttcttatattatattaactgttgttctcaacgtactgtgttcttttttccatttttaatggccaagcactaatttgcttaccctattgagagcctctgtagccggtcattcttgtgcattatagaaaaggagtttgaattataatgcctagacaaccctgtgttaagttcgtctgtaaatctgagtaatgcaatttagattgttttaattacttcaccattgtggtctattaaaggctgctcttcatgttgattggttgatgcatcatatttgataatagaaggcatattcatgttcatcttttttagttgttaccgtctcaacttagttatttatcctgaattcctactagatcgggtgtttggccctacaactacaacgcgccat

SEQ ID NO: 50217 - DNA, 703 bp, Ricinus communis
  Intron number 1 from transcript 28281.m000367 (locus 28281 .t000006) derived from phytozome v7.0 (chr-ID 28281; pos 4 5513 to 46215)
ctcatcatcctcccactgtaggtctcctctttttccttttcaatttttgtatctttatctgttatgtgtttgtttattgcttttagttttggggtcaaaattttatacttctgttgttggataattgatcaaaatacacatttctagtttgatggtaggtagggagattttagtttctttttgtccattggtattttgatttgtgatgattctaagcaatctgtctcttgtttcttttacgttgtcactaggtttcttgtgggttctattcaattgagggtgaattgacttttctttttatttctcatgtctgattaatccttttcaagaaggcccagttgatcaattatacaatcagctgctaattagagtatttaggatgacttttagcaagattgttcttgccaaagctgagtacattcaccgttagaatgtttgattgtacatctaattactgttcagttaatagaagcttgaagtatcccatacaaatcaaacttttaactgatgttggaggttatgatgaaaatctgctggctgacgacttagtatatgatgctcttgttcgagtatatattggtgtttaacaatttatcctttgttttcagcattttgacttgataacagttagtttaggctgttgagaaattgtccaaaacttaaattataactcttcacttatcatttggataggaagacctga

SEQ ID NO: 50218 - DNA, 321 bp, Ricinus communis
  Intron number 1 from transcript 27798.m000611 (locus 27798 .t000032) derived from phytozome v7.0 (chr-ID 27798; pos 2 58823 to 259143 reverse strand)
ttgctatatagccaataactgtgcttgtgtgctcggtttgtagataggaataataagggcgagctaatggtttcgggtggaagaagaattgtcgaggcattggatgcagaatctgctaaagcaatggcaattctgtttgctttgatgattgcatgggactgtagattttcaatgtgatttttgaatctgatgctactaatggggtgaccttattgaactccctctcaacttcgtactgatgacattattgatagaaaaatctgttttaattcctgtggtttttttttttttttacttcaggaacttgttacaaagttgctc

SEQ ID NO: 50219 - DNA, 971 bp, Ricinus communis
  Intron number 2 from transcript 29576.m000235 (locus 29576 .t000013) derived from phytozome v7.0 (chr-ID 29576; pos 1 01634 to 102604 reverse strand)
aggtaaaagtatctctattaacacatgtctgctagtgcataagtcaacattttgactgtctgattttctttttttccctgtattgttgatatcctataattattgtgcttgaattccatcaatgccttctcgccaatgagacaataatcaattggtttcaaaactctcacatgcttcttcgtacaaccttagtgcaattgtgttgcattataaaagtaataggaaaaatgcatgagttaatggctaaaacctttttttttgtgtggtaaaatattagttattggtcatgaaagtacccatctaactctcctgtctccttagaactctatgcttaaaaattagagcgggattcatatcctggtaaattaatagatttgatgaacatactagcttcatggaattgtatagcacaatgtggttgttgcatgttgaagcaaaagctaaaatattgatttattgtatggaaaataaataggattgctgcatgtttttaagcgaaagctaaatattgattaagggcaatggatttgaacaaattaccagtggcaagtaatacaagaatgatggactcttattgccatcatagttggtctctcattttctttcctttttcattggtatactccacatagctataccatgtattcaagtcatatctctgcacttctccaatgaatgagaaagaggtagacagagtactaagcatgttcaaccaattcctcctaggttaaagatcatgtttgttgatttgatttattaggggcttagacatactattacctgcgggtaccggtctatgggcaatttgtggctatgctgaatttattttgaactgatctggctttgctggatactcatgcctggatatatttcttattggttatctagagcattcagtgagtgggaaatgtttttgctttggcggtaagagttcgagtcactgatagtctatgccactgtttatgacaggc

SEQ ID NO: 50220 - DNA, 619 bp, Ricinus communis
  Intron number 1 from transcript 29728.m000799 (locus 29728 .t000005) derived from phytozome v7.0 (chr-ID 29728; pos 3 9422 to 40040)
atcaggtaattcgcagtaatgatacttattatggttcttctagccttttgtgtgatgaataggtgtgagtcttgcaatgttttattagtttagtttgaattgtgtagaagacatgttgtcagatcgtatcctgtttctttaatgaaatgaatgcattgtactcgtcctgaaatggagggaaaaaactatgtatcatgtatgtaatagccatgataaatttataatttaactggtttgagccaactactgaatctgataaatcaatgatattgtatctctctctctctctctctctctctctctctctctcgctttggtaaaagtatagaccaaacataaaatgttaagcttggttgtaaatgatgaagattgcttggatttcaagttttgagtaaaaccaagttgaattggtcatggtaatttgaagaactaggctcaatgattgactccttttactcttgagagaatgctttgaatatgcttaaaatatttgattcgttcaactgggtgatgttcagaacactttcgataatacattggaatatgtttttctcttctttattgttcttccttcttctatttaggtttttgtacgagattttgtacccagcgccctggc

SEQ ID NO: 50221 - DNA, 772 bp, Ricinus communis
  Intron number 2 from transcript 27553.m000331 (locus 27553 .t000017) derived from phytozome v7.0 (chr-ID 27553; pos 1 30415 to 131186)
ttgttgttgctgaccctccttacctggttagacttttttgagcttaatcttgtgtgtatgtgcttttttttttccttaagaaaagaattaaatttttgagatattaattggttgatttctgtggaaagttttagtttagttatttatttatggtaaaaaatgttaagttattcttgttcttaagttaattgataactaattttgagttttatgtaattttgatatatctacataagtaaattgatatatctagtttgctacgaggcctaatcttcctgattctagtaaattctgtgagagaagtacttgatgttttttgttcagatagatgacttgatttaagagaatttgataacattctctatgcttttctgttctttcaacaattttcattttctaatgatttggtttgcaagtcttccttaatttttttttcattcaggtttgttttatggacatttattttgtattgggtgctaataccatggaaataacatggattatgcatttcttgtttgagtgttgtatggtgcagaaaggttttagatttcttggagtgggttcaaccatccttttgcatatatgtgatgggacctgtttctcgtcaatgtgaaagcatgggaatgtcatgttgatttttgttttccctcagtctcgatattttaaactgcaaattgttttaatatcacacgaggaggtgattatctgatttagctagtctttgtttatggtgacagagtaaggagtgtttggaaaaggtcactcaaacaat

SEQ ID NO: 50222 - DNA, 680 bp, Ricinus communis
  Intron number 1 from transcript 29628.m000784 (locus 29628 .t000038) derived from phytozome v7.0 (chr-ID 29628; pos 1 85931 to 186610)
taaaggttactgttcgtctgtactgattatacatctgtatctttagtagaaatagcattcaagtaactgctaaacattttattcttatgtagatgcttagacatgatttatacatatttaagttacatgctaaaactttttgttgaaggggaaaaatcatttcctaaattcttagaaccagtgatttgggttgcacatgtccttttaatagacgaggactagtcctggtcgttttgactgttgtccgcatgcaatcacgggttgtgcagtttgactttaaatttttttagcgttttatttgtttaggtatctgtttgctatgacagcaaacgccattttgtaactacactgaggccagtattctattttccttgaaattgagcagaactatatcattttatcttctcctgatttagatttctactgactgtccagtcagtatgtcttttatttgtaattctttttaatgtcttttatttgtaagctttctcttctgttcttcgtaaaatgcatgattttgggttttatcaatttgacaacaaaatatctaactttacatactgtcattgtacagatcttttgtttttctttttttgcagaactggcacttctatagctgtcttttgagctaatatattcttttcttgaggcaggtggcgctagtattaattgtcctgcaa

SEQ ID NO: 50223 - DNA, 753 bp, Ricinus communis
  Intron number 2 from transcript 29628.m000784 (locus 29628 .t000038) derived from phytozome v7.0 (chr-ID 29628; pos 1 86758 to 187510)
aagttctggtcccgctgctttggactagagtgcaggtttcccaattcttttcttcctcaaaaattattatatttgcatgaaatgatgaagttcatttatatataagatttttaacatatgaatatgttattttctccatgaatgcatacaatctctcaagtgaagctgcatgcaagatctaactcttagaaatggagcttctcatgtcatcattcctcatatgagtcattgacggcatttgttccttttgatagattctgtaggagtgtaatgggaatttctcatcttgacatcacatgcttgatgagacatttatttgtttgattggtgaagtttagtttagtttgtatcatatactggtgttaccatcttcccttttgaatgtgtagctaggacatgtctctctctctcatcattttatttgggtagagacttttagatgtcttcactgtgaaagaatgtggtaaactaagtgaagtttttctgttggctgggctgataagactttcggatagttattcttctacactttcccaagtatacagttgtttcaactaattttcttcttacatcattttcagcagcttctctcatgaaatctcctcatgcatattcttcgttacttttcttatctgaagtagtgtttttgttctttgctggttaacaaatttcttagcctgaagcataaaacttaaaattcatcttttacaatgtgaaggtcagaggccaaattggcgtatatcgtggaggcag

SEQ ID NO: 50224 - DNA, 603 bp, Ricinus communis
  Intron number 1 from transcript 29686.m000899 (locus 29686 .t000046) derived from phytozome v7.0 (chr-ID 29686; pos 3 98625 to 399227 reverse strand)
ttgtaggtgagtcagaagtttgttactaaaatttaaatacccaaatgggtaattgcttgttttacatcatttcacattgagttaaagaatgttatgcgatggcgttgattattatttgagtgatttgggtaaaaaaaaaataattcatcaccttggatgaggtttaggggaactttggctgatattttgatgcttgttcttggctgtttgaatagagtggagtctaggttggtatggatgtgacatggaccagccagctaatgatggtgcagtctatgcatatgatgttatgctgctttcaacaatgtcagtctcattgtgtggattgaggttttatctgtgttggatttttcgttttgtttagggggaaacttcttttttgtttcaagcaatttggtatcttttttttccttcaatagcatgtgttgcatatcttcttaatttcaactattctatcatgtgcttgatggatcacatcttagcattgtctttctgggcagttctgaccctgtttaaagtagctttataaatggtggatttattgttcataagtttctccttttggatgtctttcaggtgcttgctcagtagctcgaaattctg

SEQ ID NO: 50225 - DNA, 1039 bp, Ricinus communis
  Intron number 2 from transcript 29762.m000496 (locus 29762 .t000024) derived from phytozome v7.0 (chr-ID 29762; pos 1 84780 to 185818 reverse strand)
tcctgctttgttatatctggcagcttgtggtgttggtaagattaagatttactctttatgaactaatctagtactatcattgaatacatgtgctatgctatggtcacaagttacgacacattttcatttaatgaaatgggatatgctattatatagacaaattaaatgttaaagtttgcttttttatttctctgcatgtgtaaagcacaatcaagttttctaaaagtatcgttcaatcaatattctttttttacaatcatagttaagaatatttgacagtaggaaaagcataataatgattgagtgtaaggactaatgcacccatctaccatgactaatgggaagaaactcaagttactgataattgaagaaatcatgtctattgtacagtaaaggttactgatcatagtttcaggggaaaccagttagaattcaaaatgttaactacgaaataagttaggtagatgcttcagaaactgagggatgggtggaatctttattattttggtaaaatgccatagttatcattacttattttagcattttatcaagttaaactgccatgaaaagaccaaaaaagaaaaagaaatggtgataggattggagcgtgttattttgctgataggaggaatgttcaggtgactataacttgttcatggagaaattagcagtttttagctgattagtggaggaatggctaggataattatgttttgagttgcctgaatgacttttatgccctaagcatttatttgtctttgctaaaaacttatgaagatggatatattttctaaactattatctaggataaaatgctaagttaagttgacttagttatacagaggatctcttttagtaaaagaatgctcaatatcattgttcatcattaatattattctatgtaattgattctggtgaaattctaacaattctttatgttattgtaccgaactatttttttattcagatttgaattttccttttttgtttaatttaaaatttggggtttacctcacaggtcggttgggtgttgttgacc

SEQ ID NO: 50226 - DNA, 768 bp, Ricinus communis
  Intron number 1 from transcript 28698.m000048 (locus 28698 .t000001) derived from phytozome v7.0 (chr-ID 28698; pos 2 7567 to 28334 reverse strand)
aaaagcagacgcaagagagtttgccccgctattaagtgcgtttcttcatctattattatgcattatcaaattgacatcgattttgggtagctaagtagttgcatagaatgaatggattttatttgtcttatcatagtatttcgaaagtaaaaaaaaaaaatgcaagaattcgattcaattgaattcagtttagttaattctcatgtttcaaagttttttagtagctggaattcagttctttcaactgacaaataataataacaactgaagaaaggaaatccggaaaagcaaagtattttgaatgtagaaatgaaccaagccacaagcaacatgactttgcaagaactcaattttgtaaactgcaatgtggaggatgtgagctataacagtcttcatagacatgtagtagcatgtagggcagtggaatccttattccttatcttattgccatctgccaataagcattcctttcattagttttcccagaagaaaaaacttttagtaataatgtgcttcttctgtggctgaaaaagaaacttttatatgagggcagaatttcttttctgaagacaaagtcaaaacctaggattggatgatttgcggactcactttcacttaggatggggaagaggaagactatgaactataaacatgatatcgtgaataataaagagttaatgtgttaattattttaggttcaagttgagctataagagagagtgacaattaagcaaacatgcagattaactggcagtggagagcttctgg

SEQ ID NO: 50227 - DNA, 297 bp, Ricinus communis
  Intron number 2 from transcript 29726.m004073 (locus 29726 .t000185) derived from phytozome v7.0 (chr-ID 29726; pos 1 060251 to 1060547)
ttcctggagatattgtaaaggtgagaatttacggtttaaattttcttcagattaagagtcaataatatgactttcacacaaaggtttagtacttcaatgttggcaaaaataaattggtgtcagttctgaaatatttagcaagttccagtatttgtcagagtcaggaaaagacatggaggtatgaagaatttgaaattagtgtgggagggaacagtatcactattctttttgcattttttgtgtttttcttttgaattactgagattaatattgtaggttggagaaactcttttgaaa

SEQ ID NO: 50228 - DNA, 680 bp, Ricinus communis
  Intron number 1 from transcript 28833.m000159 (locus 28833 .t000008) derived from phytozome v7.0 (chr-ID 28833; pos 4 5329 to 46008)
ttaaacgtggggtaaagttctattcttttctcttattcttagtctttattggctcttatgaaatgagtttttattgttagtaggtaaattgagaagttttcttggttggattttgttcgtattgtcatgtgttgttttcgtttggttcctttttgactccttttcgattaagtaactaaataaagagagattgcttggtgttttttctgtattagaaaggaaattcaggaacttaagactgtgtagcattaatgagaacttaaaaaaaataaaattcaagattctgacattattctttttacttctttctttcttttatctttttaaaaaactcaagtgggtagtatccaactgcattgtttgtccgtctgtttgtactacttgcttctgctatttaatagtaagtcatgagtagctttgaacaaacttctgtgttggcttaaacatgttataaacttgttcttgttccatgtttctcaataatggtggattttgctatcattttctagttggtatgcggtactttgacgttgaagtgtttcttaaatgagaaatgagcagtaaagtggaaagataattatcaattattgcttccttatttttccctaatgatgtgttattcttgcataggtagctgtttgtttgattccagttttcttttgttggatttcaggtgcatc

SEQ ID NO: 50229 - DNA, 425 bp, Ricinus communis
  Intron number 2 from transcript 29637.m000739 (locus 29637 .t000017) derived from phytozome v7.0 (chr-ID 29637; pos 1 28154 to 128578 reverse strand)
ctggtactttcttcctttttaatttattggattcgacacatttcttccgtttgtttttgtttttgaattatctctttaatttggtttttgcattcaaattggaatagttagattatatagttactgaatccttcagagtcttagagacttagagtttttatgtttgttaggctaaacactttctgatgttgcctgttaactttttagcatgaattcatccatgcgtatgttttctgttaagatcatgatctagttttccagttcagccattactgcttttcctgtgttatttctgtttcgtgggtcctagaaaattttgatgttagtttaattataaactgttttttttgcttattcttgtgataactaatttattaatttatgcttctctatatgtttctgtccagcaaatccatactcttgtc

SEQ ID NO: 50230 - DNA, 433 bp, Ricinus communis
  Intron number 1 from transcript 29666.m001453 (locus 29666 .t000029) derived from phytozome v7.0 (chr-ID 29666; pos 2 05123 to 205555)
ttcagagctactggcaaggcaagcaggaggtcaaggtatgctaattaagcagttgattacatatctgatgagtacaactaatcgtctaagggtaacaataaggttgctctttttgtgactcgaagatttgatttgaatcacagaaactagtttaggaaacattgcatactatcgattcccaattctcataaagcagggaaagcttgtgcactggaaacatcatttttcatagaaacattcttgtaatacataagtgtgaactttcttctgtttttttcttttttgataaaaactttcttctgttaatcaagactttttttggttagtttaacatgcgctagaaactaggacctcaatacatgatgaattgtttgcccccgatgaagacattttcaattgaagcatcttgaattcttttcaggtattaccctta

SEQ ID NO: 50231 - DNA, 530 bp, Ricinus communis
  Intron number 3 from transcript 29648.m001918 (locus 29648 .t000005) derived from phytozome v7.0 (chr-ID 29648; pos 3 9780 to 40309)
ggtatttattaaggtaaaggacatatttttttcccttgtcttctgctttagttttttatttatacacatcctgattatgtgttttgcaagtgcatatacctgaataatgtgtttctatgaatttaactgtatttgcagttaagaaaatgagtataactgtaatcaggttaggtttgagaccgtttacttttagccatgtggggtcttcagcaatgagttgatacagtagagagagagagagagagagaggagtttgaagaacaacctgtccttatcttttgggtcttaacattttggttttgataagtaaaaatattgttcgtcttaaagctatacagtctggcatcatatacatcattgggcttgagtcttcctaaagttccttgccttcatatgatccgttttgaatgacagtgcatgctagagcttgatagaatagtgttacatccttcttgataagtactatattctgaatttatcactcagctttttgttttttgcagaacaagcctctcattccaaaagtggct

SEQ ID NO: 50232 - DNA, 659 bp, Ricinus communis
  Intron number 3 from transcript 29811.m000529 (locus 29811 .t000008) derived from phytozome v7.0 (chr-ID 29811; pos 1 29106 to 129764 reverse strand)
acgttgcctctcacactactggcgatattcgaaaagtatgtttccattttcatattaattatgtgtaacatatccgaatagaaattagcattcgttataaacaactcaattgatagatgcatagataattgtcaaaacggcaagagtcttaattcatgtgagccctgtcgtataataatacaatttacatatttatctaaatattctattataattataataggtataatatgttctctattaaattaaagacgaaaaaagtgaatcagactatatataaaaacatcaataaactttttactaataatatagttgttaatttttttcaaaatttaccggcttgtctcaggatttacctgtttgatggtcagaatctatcctgcaaagaataatccaactataatagtaataaataaagcactgtgctattagattgtttcttttcaattgtttttcccattcatcaattatcaggtttgcctataataaggtcactggttggtgtattttggagttatagctaaattttgatagttaatgacgaatttttttgttttatttatttatttatttataaatataatgtttatgtggtgaattattttataaaaataatgggattgttatcatgcagcttttagttgcactagttagtgcat

SEQ ID NO: 50233 - DNA, 387 bp, Ricinus communis
  Intron number 1 from transcript 29794.m003323 (locus 29794 .t000022) derived from phytozome v7.0 (chr-ID 29794; pos 1 07642 to 108028)
atcacaaggcaagaacgtacatgtgaatttcatttgttttgattttacatttttgttgttacattaatctgtcgctctttagtgcatgatcatgctatatatggtgtatctttggtagtactgtttaattgcatttaacttcagaaacatcttcagtcttttaatttatgaacccttttcttctttcactaatttaatctgtgctcatagtctctagaactctaattctcgaccttatcatcataattttgctgggctaatatgtatatgtctctgtgcatacacaaaagataatcatattatgatctgcttaagtaacctttcagtgaatttgtttttgtcttaatcataggttgataagtacatagcacccatcagatcgagcga

SEQ ID NO: 50234 - DNA, 901 bp, Ricinus communis
  Intron number 3 from transcript 28842.m000908 (locus 28842 .t000003) derived from phytozome v7.0 (chr-ID 28842; pos 2 4681 to 25581)
aaggtatcatttgttattggtttccgtgtgtgtaatggaattagcaaaagtttattgaattgtttggttttgatcgaactaaagttgttttctcagaaatgtaggttctagtattttttaactaacttcatattgttataattcttttaaaatttggaaaaatagctatggggatgcaggtatctagccactgctaaagctagagatagataaaacccccattttttggttaagtagctcgcataaagagctatatgtagaaacataaatagctttatcaatttgcaatataactatgtgtatatatacaaggtgagaaaataagaacaggttccttagtaagctgcatttaattctggctgcttgttcaaccaacttgctcaagattataagagaaaagatcaaaatggttgtttctgaaaccggtatatattgggagttcatctatagaagcactaagatgctgccaaatggctgctgttcttttccatgtcttctccagctctaccagctgtagttttctggaagtaatacttgtgaatagccttagttcagttctgatgttaatcttcttagtctgtaagaaatgacttagagtgtttgttttgccatctgatgcttacctaacttaagcttagcaagcattggaatgtagtctttatctctcttaacatgcttgtgagaattctaataatgtaagaattgaagtcctatatacattttctatttgggagcaaaatgtctctctttctgtcattacgtattaaactagtcttagagtatgaaaatactctagttgttttttcttgtcattttcttcatatgtatgtcctatgtgatttatactatggctgcaattaatttaggtggagttttcaagctggaactctttcttcctgaa

SEQ ID NO: 50235 - DNA, 326 bp, Ricinus communis
  Intron number 2 from transcript 29677.m000186 (locus 29677 .t000005) derived from phytozome v7.0 (chr-ID 29677; pos 2 13559 to 213884)
tgtcaggttagctaattctaaattatgtcatttttatgtaaatggccactgtaatacaagattgggttgatatttgcttgtagcctgctttcgcctgctttgatttcttcaattgatttccacaattgattaaagtgtatttggagactagaagttcatttttctttgaaatttgcaaaatgaccattgattgaaatcgttgatgagcagttgattgagctgtgacatttctgttaaatctgctaacatcttttgctgtaccttgtttctatagacggtcgtaatattcatttgtgcttttgtagcaactaaggacatttatacaa

SEQ ID NO: 50236 - DNA, 606 bp, Ricinus communis
  Intron number 1 from transcript 29729.m002291 (locus 29729 .t000024) derived from phytozome v7.0 (chr-ID 29729; pos 1 42383 to 142988 reverse strand)
aatctaagcatccatttgaagcatatcgtaagcattactcaattttagtttttgtttatctcttctagttttgtcttttttctttcctgtcatttcttagtatttctttttgaaactgagacccgttatatgtgtaagcttttcttatttgtaaggagtgatggggaacctatgctgcaaggagtgtctggcatcttgctagtcttcacttgaaagattttctaaattagtgtcctttgatcttgatgcaaaccctgtaatatgctgaaacttaattggcatttggaattattttgtctgacaactaaatctagtaaggccctgaattggttgagcaacccattgatgatgaaacattaatctagtcggtcttgaacgtcaaaatgatttatgttgctttgttactacttagaagccgttcttattctttaagtagattggacagactgaattaagttgttgaaagggtcaacaacataatttttgtatagtgttgttaaattcctgaaatagtttatgcacatttttacatcattaacacacatcttatagtatgtcccttttgattctctatctcgcagcttttgaggcctggtacagcggctc

SEQ ID NO: 50237 - DNA, 728 bp, Ricinus communis
  Intron number 1 from transcript 29620.m000545 (locus 29620 .t000015) derived from phytozome v7.0 (chr-ID 29620; pos 1 13595 to 114322 reverse strand)
cacagctaagtttgcaaaaagcttccattattgaggtaagatagctcataagagatactcttactagttttaaactcttatttattggggcatgaaagaaatcttctgtgaatattgtacgtttctctcctttttaagtttaaatatgacaatataaccatcccaaattaatagaaatgtttagtaccatatacgtctggtcttatacaatttgagtatcatggtcgaatttttttctttcttctgtttatattagtgagtgtctgcatatcatatgctaaaaaatcaaactaccacttttggccatttccatcttgttttgactgcaactgcttggtggccagatcactaatggccattgttatatgaacttgaatttttgttacttactagagtttctagctgactttgataatgtgcttggaatattattatagaatagaggcatgcttctgtcatcccaatttgtgtataactactatccctcaaagggatgcttggaatgtgctgaagtagtaaaagctggattaaatatttaaagcggttactcggaactgatttttccccttttgcatgttataataagctattcctcatcaatgctcttttttctgccacttcctaccatgcctaaattatcatcatcgtctatcatgcttaaactatcatcatcttttccaatgccactaatccatattcttcttctatttcagggtaagtctattaga

SEQ ID NO: 50238 - DNA, 550 bp, Ricinus communis
  Intron number 2 from transcript 29784.m000356 (locus 29784 .t000002) derived from phytozome v7.0 (chr-ID 29784; pos 2 1501 to 22050)
agtaccattgcaatctggtctagaggaaatcaaaggtgggttgtctttgttgtttctttcccctcactgctgtgctttcaataatggcttgcaattcatgtctttatatggttcgataagaaaatataaatttgttccatcaatttacaattggccaatgacatgagtctatgggtccattaattgtaactttgttggctgtgttactgattgttaaggaaaactatcacctatttgggacgaagctatttcattgattaacatacaaaatctgaaaatatgtataatgtataatgtataatgtattgctgtcacaaattattcaagaatgttcaccaaagaatgctgtcagttatagtatgatatttgcttattggcttcataacataaaatctttttttttctttcatgttctagcttaaactgttaaaaaaatggaaatccttattgacaattgaaatgaaaatgcacatatttctcaattactttaccagtgtatctttgatgttttgcaatcagagagctcaaataagctcatcagatcaattac

SEQ ID NO: 50239 - DNA, 798 bp, Ricinus communis
  Intron number 2 from transcript 29630.m000778 (locus 29630 .t000003) derived from phytozome v7.0 (chr-ID 29630; pos 2 3501 to 24298)
tactagtgaggcttccgaaggcaggggttttggtatccatagatgaaattagagatgccatcatgtaaatgggttcttacagagctcaaaactggcctggaagcactaccttgaccatcctccatatttttgaaattacccgggaagaatgctagagaaagcaaacaactttaaacaaaaggatgcccttgcaattgtgatccttcatgtagcctgagaaagcaccttacaatagcagttgagcactcgaccgctggaagctataagctctagtaaatgggctataagctttatgcatcacctacatttactttctcgatataaatttagtttctttcagtctcttaaggagccaagttgtaagacctgaatattttgcctagttgcttttcgactatagaaacggaaatatttaagaaggaaatctttggatttctgagttttgtctttgaattggaaacacatgacattttgggtgatttaatttggatagcaaacagctgagtgcttggcatcaatgagatgaatggatatggaagatgtaaaaactcagcctaaattattggcctatgtagagaatatttatttaagtccaacatgattgaaagtgctgttctgtagtaacaaacaaaagagttgtattggagtgaaggagaaaaataagcacagaaaaaggcgtgctttctattttttttattcattatctagattgtagttagaggttgtgttttgttcttttatttcataaatttctcttttattctgttagtgtctttcataggctgtgaaaggtagtat

SEQ ID NO: 50240 - DNA, 641 bp, Ricinus communis
  Intron number 2 from transcript 29585.m000580 (locus 29585 .t000008) derived from phytozome v7.0 (chr-ID 29585; pos 6 4105 to 64745)
tttccagtaaaggtaggcaaatattgctgagaaaagttaatctggacaagataatgatgataatggatttaaatctcttatccatccaagtgttgttggagcatttacttctaaagaaaaagaagttgttatattaaattctaatattaagaagcaggtgaagaacctttttgataggcagaaaaaactctttgatgatttttcttttttcaagctatttttttagcaaaaggttgctctagatttttcatcttttaagaattatgttgaacaaaaatttattaagttgcctaattcattgtgttatgtaaattctatgttgtaaataggtagaactcatagttctacttttgttgataaggattttgagatatagttaatttttttatgcagtttgttttatttatttttacttgttatgatttttggtttttgatttcttcttttttcttaacagccaattgagaagtttagtgaagatagaagtgctgatgctaattaggctattaatgtattgaataatagttaatagtttattattttatggtttatttatagttttttttattatatatttaagttaatttatatatgtgatttatttaggtttctgatattgatactgagaagtttgagaaaga

SEQ ID NO: 50241 - DNA, 974 bp, Ricinus communis
  Intron number 2 from transcript 29629.m001353 (locus 29629 .t000004) derived from phytozome v7.0 (chr-ID 29629; pos 3 1523 to 32496 reverse strand)
cagacaaggtattgttcttctgatatattgaagggaaataaaagattgaacattgtgaagtatatataactgttttacttgggactgctgacgaaaataatatgatgctaatagacctagtataagtgccattcattctctgtggatttgcagtgtagttttttttttttttcgataatcgatttgcagtgtagttgaatgaataaaagtagcaggaatctaagattctagtgtatttctcaatttagtcctggtataagtgaatcaaatgtaactctttcagcttctctgtaatttcatcagtgctgctttttgttcatgggaatgtttcgtctcacacatacattttctgttaaggataggaagtgtcttcttatttaagcctcttctgtactgccgtttgggacttaacttagaaatttatgttcaggtggttctgatagtttgggaaagttttatgtactataacatataggaaaattactttgaataatgagttccttgaagccataatagagtcaatttattttttatacgagtcagattagatcaaatgacccaaaaatgtggagaggaaattcattttaaaagctatcttatacctgaaactctcctactacctaatacttcatttgaaaataagaacaccttttctaatcttagctctagttcctctttttgaggcagcatacttgcccaggtagaggcttcactttgataagccacactgttaggaagaaatataggacttagtagaattcagtctgatgctagactatcattggatgatgtagcatccttacaagagaactgcataatgttataatgaaattaccttcttttctaaataatcatatgagtatcttactgtgtatttggtttctaaaaatatttgagtcaagcacacctttttatttctcttgatgtttctgttcttagctggcaccaaagcaaaaaatcagaattaagcttag

SEQ ID NO: 50242 - DNA, 498 bp, Ricinus communis
  Intron number 1 from transcript 29629.m001353 (locus 29629 .t000004) derived from phytozome v7.0 (chr-ID 29629; pos 3 2514 to 33011 reverse strand)
aacctgactctgatagttttcaggtctgtttccatttcttttctcgcttgttctttctttggttgctgaggaaatgtgagcgaatttcgtatagaaatgttactttctggtttaaatttagataagatttgagtctttcggtttgtaagtttgtggttttttcttttttgtttttttatttaattcctcggttacaatatacaagcagtgatgattgaaaagaaattaactttgaactttgcagaaatgaaataacaaaaaaattcaggaacaaaagcatttagctttatgaagttgagttttgatctcctttaagttgtgtattgtcttttattattggttacagtttttttttttttaattaattttgtgccagtgttccgtttggtttgccagaatttttggggaaagatataaataagcttctgttagttcactatccttttatttttatgtgttgcagattggagattctgagacttccagttctccatcaat

SEQ ID NO: 50243 - DNA, 408 bp, Ricinus communis
  Intron number 1 from transcript 29780.m001316 (locus 29780 .t000002) derived from phytozome v7.0 (chr-ID 29780; pos 1 5320 to 15727)
gatcatagtgtacaggtgagtttatgtttttaggtctgatttgttgcattgtttttttttttttttttgcttaattaggagatagcgttatcaaagagttatagtagagaactgcaaaagtggcattataggtgtcggtttgtaattttaaataatgttttaagtttggtatggcctagtatctagaagaaggtgaattctgaggaatgtttaagaggaatgatggtgcattgactgtagagtttgctggtaatgtttgcaagattcgaattttgcattcagcttggttgctgtaacttttgctttctgttttcccttttcttttctttttgaatggatactttgcaagttatgctgatgatgattgacttaatctaggttcttatacgtgtgcgtcctctcaatagc

SEQ ID NO: 50244 - DNA, 427 bp, Ricinus communis
  Intron number 1 from transcript 27940.m000340 (locus 27940 .t000018) derived from phytozome v7.0 (chr-ID 27940; pos 1 56310 to 156736 reverse strand)
tactaatccaacactgtctccttctcatctccaaggttagtatttcctttttttcttttttacatgacatagaaatgaatcttcgaatcttgtggagatagaaatgtagtggattttactgcttcgtagaattattaagaggtcatgcaatggttttgaattattattttgtttctggtgaagaaaagaaaagaaaataggagttgccattatgtgtgcaaatgacaaaatatgcatctgcctgtattatcatgcgtcttgaaattttaaactaaccatatcctcttataaatattttgactatagctatgaagcctgcatgccttatgagaggttattggttttcttgttcattttcaagctgaagaacaaatttgatcgtttcttggcagacttaccaggtttcacacgcagcgtttacaaaaga

SEQ ID NO: 50245 - DNA, 771 bp, Ricinus communis
  Intron number 1 from transcript 28152.m000907 (locus 28152 .t000036) derived from phytozome v7.0 (chr-ID 28152; pos 1 89124 to 189894 reverse strand)
tcaggtgagatagtttgatgtttacattttatttccttgatagtttgttgtattccagattctttcaaggcaatcccctaattggtgttttctctccctgttttgtactttgaaattttgtctctcttctggaaaataatttactaggcagtccagttttctgggaattcttcagctctcatggatagctgttctttttactaaagtaaaatgatcttttctttaacatgtgttgccagtactgcgagtttctgtgactttcttcaatcatgtagagctggcatttattggtcatttcctggcgttcctctcacaaaatcggtttatggagtcggtcatgctgtatatgggttgatgttgctaaataatgataaggtcatgtcgaattatataagaatttagagtggttgacaactttgttgctcaatcacaataggactaatgaaggatgtgaaaaagttagtttgaattagtgcctgatatatgagaagccagaaccgtccgctgagttcctaaagattgaaggataacttgatagttgatatatcactggttttatatggaaaatggatgtcttggattgattataagttttgactactttaatagcctccctctactattggccgaatgatatacaaaacttgttttaagtttttaacatccttcgatcagatgtaccttttgtgaatgtattctatgaaatttgtagcttgcaaactgttagtaacatcatgaagcttctatctttcacttgcaggtctgtggcta

SEQ ID NO: 50246 - DNA, 991 bp, Ricinus communis
  Intron number 1 from transcript 29491.m000092 (locus 29491 .t000006) derived from phytozome v7.0 (chr-ID 29491; pos 2 1445 to 22435 reverse strand)
ccgttacctttttctcctcgatttccatttccgggtaatgtggagtttgtctttcaatttattttttaattattattataattttttttttattgtttccttttgttagtatttgaatttaactgtcgtcgttggatttgattgttttgattgatttccatgtgaagacataacctgctttgataatctcgaactgtgtatttttttttttttgtgttttgtttccttcattggttttatctatgggttttgttttaaattgttaatgtcgcttgtttttctgattggattgctttggtgattaccgagtcgattgtggaaaaggtttgaaattttaagaacttgctttacgtatgcaagatgggcttgttttgttgccctgttttgttgtcttatattacagttgcttttgttggacattgtgaattctaaaggttgttttggcacaatccaagtttaaatttctcccatataatattgttgcttagatgaaatttgaatatggattttgtttccttctgtcatccttgtctcatattttgattctattgctatctagtacaaatttttttagcataaagttagaaatttcaagtgcttctgtttttcttttttcgaagaaaatctcatgtgcttcttttcttttttaaaccttgtttgctttattggtttctgcatatggtgaaagtgatttcctgctaactaattgatttttgtcattttcaattgctcaaggatagatatggttatatgagtgaatatgggctcactttgttgcagaaattttcatctgatgtttttgcatatatattgttgtcatctgaattattgtgcatatattgcttttatcttctgcatgaacagttccattcgttatgttcttttccttctgtagttcatttaatttatccataaatgtttggtaatatgttatctaataggcactgctgacataaaaaatattgctccattgaagtctttagtttagaaa

SEQ ID NO: 50247 - DNA, 607 bp, Ricinus communis
  Intron number 2 from transcript 29709.m001188 (locus 29709 .t000024) derived from phytozome v7.0 (chr-ID 29709; pos 1 12022 to 112628)
acttgatctgattttggacgttgagtcctcccgtaagcaaccatttttgtagcaactgggatctcttttatcaatttcatgggtttgattgtgcatttagaatttaattctttggtgtcctctactacctagaggctagaatataaaatacgcaagcatgtattatagcattattttcttctagaatctgtgaccttgaagtacaattgcggagctggcctttgcagttcttgctgaaatatcacatcttcaatgctcatgtattaacatggaatctattttctccgtatgcttcactgcttaatataagccgatggtttgaaatcttataatataatggatagttctttatgaattgttcgtttttgcatgatttctttgattttatttgtaaataatcaattttatgactaagaaccttaaggccacatattaattttatcggcattgctcaagtaaaagtatgcgagtttcataaaaaaatttagaaaaaaataataaaatgaaggttagggcagtagaacctaaggctgacattcagggccttgatttcatattcataaattcataaaatactttttgattgatacccaaatttgcaggtgat

SEQ ID NO: 50248 - DNA, 669 bp, Ricinus communis
  Intron number 1 from transcript 28226.m000883 (locus 28226 .t000053) derived from phytozome v7.0 (chr-ID 28226; pos 2 69715 to 270383 reverse strand)
ccactggcggtttcgatttcgttcttgctcctctggttgtcttcttaactacatttcgatttcgttcaagtcattagctacatttctgtttttgtttcaacactttctctcttgaaccatgtttgtttacattttattaataaccattctcaaaaaaaattattaaacaatatcatttccaatttctcgttgcatttcttctatgttttcatggatttggtcttcaaattctctactttttggttatagaatcattagttctgtttcaactttggtggctagttagccattcacatgttagcttatggccattattatgtgaatgatagtaggctcacccacataatatgtggtggcctttcatgattacctttgctgataggctgccaacgacatttttatattgctaattgtgctacagcttctgttttgcgcaatttgtactatagtaatttccttttgtgccactatgttatcaacagccctccagctgtatcttggtgttttctgctaggtttttgtgccataattccttgcataaagtttgattacattatgaaaaacaaatattattttatatgactttccatcatatcaagatttgagcaaggaacattgcagcattcttttatattgaagctgatgcgtatttataacttcatgacacag

SEQ ID NO: 50249 - DNA, 876 bp, Ricinus communis
  Intron number 2 from transcript 29601.m000443 (locus 29601 .t000015) derived from phytozome v7.0 (chr-ID 29601; pos 9 7384 to 98259 reverse strand)
gcaagtcaacgtgaaatacagaaggcttttcacaagtacattctccctttaattctgcttttacattaaaaaagattgaaactattgttctctgaactgtagatttagttcctctacaattctactccagttccttttgaatgcatgagaagcgagaacaactgtattttgttgattactttcttttcttcttttatttttcttagaaaaggttttttttttttttaacttcttgtatgactttagtactggctagatgcatctttagtgaaaatctcataacctagtttggaatagtatcgtcctttgaatattctatgttccatatgactgtataaagagttctatttaggtttatgtttgattgtcttatagggactgttcgcctttgctgttggagctgctattgagaaaaacattatgtcacttatagtgattagcgggccactaaaatttgtttctaagacaaatttgtcttgttaggtcatgatctttcccaaaagaacttaatagcaaattttaaaagcttattttcttctttaaaaagaatgtacatgggtgcaggtttgaattttaatgtcaaacatacttataaaatttttcttgtcgtcataatcttatgccatttattttctgttaattggctctaattggggtttaaactcaagactgcacagtctggagatgaccccagtaacaatacgtcaaagcttatttgtagtgcttatgccattgtatgtattatattcataaatatgcacacagaaaaatatgaaactgccacccatagattttcttgtcatgtattcttattgctaatcctggattaatttttttgtaggctttctcttcaatatcaccctgacaagaataaaa

SEQ ID NO: 50250 - DNA, 513 bp, Ricinus communis
  Intron number 1 from transcript 29601.m000443 (locus 29601 .t000015) derived from phytozome v7.0 (chr-ID 29601; pos 9 8262 to 98774 reverse strand)
taacggacgaagcgaaaactatcgacccttacaaggtaaattcaattaattattatgtttgcttaagttttttttttttttttgaatttgtgatttactcatgtcaaggtagttctataatttaattaattataggcagtgttcttgacatgttaattttagtttcgtgataaaaataatcttgcagatgaatacaccaaattgaattcttatgaagtgaacttttactagggttatgtgattactttctttaatagtaaattgtgcaaacttgatgagttctattgagttattgaagaattagaataatgaacaaaaggattaaacaaaattttaacatgataccctttttctttaagtatttcaacaatgtagcaaagcgatttgttagaaatacaaataaaccattgcgttttttttaataattattatgattgagaacatatttatttattttttcaatttctttatactgatttatttgttcatgtcaggttcttggggttgagaaaa

SEQ ID NO: 50251 - DNA, 974 bp, Ricinus communis
  Intron number 1 from transcript 29642.m000288 (locus 29642 .t000013) derived from phytozome v7.0 (chr-ID 29642; pos 1 00689 to 101662 reverse strand)
gaaagattacagcagctacgaagcaaattgatcacgtgagtgtctgcatttggattcttttatacatcatgctgcactagttgattctgtataatttggatgatcactgatgatccgtggtgttatgttgtgatacaatctatataactttgattggctagttatggcttaaatttgatggtgatacgagcttgatgtatcatatgctagtgcattagtttcaattgcagtgatcatgatccgaaaattgttggtttattctggctcaactttaagatttatagctttattaaggggctatagttcatttaggaagatgggatttgcccgtgtttggatttgttagctattaagttcattctagacgaaattttataagtcctttgcatctatgagagcctatagaatttgatattggcattatttagagattattttgagagtttgtctttctttgtgtttgtgaatagatttagaagtcggttacgtccaaaagttgtttatgataaaggtgaatgcttatgataggatgaaagatcaagcagaattggctgggtgtatgcacctgaatctgcatgtagttaatgaacatccttgaaaaataaaagaataacaagaagtcaaaatttttatatggtgtattcgtcaatgtacctaagatttctgtaattctgaaagaaaacatgctagagaattctggtgatcaactagaattgtaagttcaaggaattgtttgatgtagatttttgtgcatagggtatttagttatttctttatgtattttgatgcactctttatgttttcctgtttctctatgttacctggttctatctataattttatttccctttctttctaattcttaccaggccttccttttatgtttctcgattttgcatcaaattactttgactttgttaatacttactttgtatataattacaggatctgccacggacctttcctggtcaccc

SEQ ID NO: 50252 - DNA, 556 bp, Ricinus communis
  Intron number 2 from transcript 29595.m000290 (locus 29595 .t000014) derived from phytozome v7.0 (chr-ID 29595; pos 1 07049 to 107604)
gttcctgttcctgtaagtataactgcaatacatcatattcatctgaaaataagataaaattccttcagcaaagtacattttaataattcatgatatacaaaaaccagtggggaatgactgatggttagatttaaagagcttaataaatgcaaaaaaaaaaaaaaaaaaaaaaaaattgtaccattttttaatgaattccaagttgctgcagtagtaacttattccaatttttaatgaatgcatcacatccatatgtcaccggcaattagttccatagaatacttactgatattaaccacttcaagtgattacttccgctgggtaggtcgattaccttggctgttttttgatgctttcctatataaacactgtgtacctgggttgcagtacctcttttgggattttatagtagtacttgttattgagctgaaatgaagagtgggagagtctacgcatgggagtttaatatactaatttgttagtcacactatgatactggctgactattaacttttatgaatttctcatatgtttcctttttttctttttttgcagc

SEQ ID NO: 50253 - DNA, 619 bp, Ricinus communis
  Intron number 1 from transcript 29794.m003339 (locus 29794 .t000038) derived from phytozome v7.0 (chr-ID 29794; pos 2 09753 to 210371 reverse strand)
gagactctctctcttgctggaaaggtaacattaacaacctcctggattccacattattattattttcaaagaaaggctgtttggtgtctaagaaaatgcgggaaaaggaaagaaaaggaaagagataagaaggttttataaaaatatgtttaagttgtatttatggatttgtttttgtttgagattaagttgtggtttgtctttcattaaatgtcatcaaatgctaagtttgttacatgccaaatttatgttaattggagtaaaagagaatatgtgcctttccttattggcaaaggtttatgtggctaaatgagcaaaagcttagttaggtttctgaggaaagaataaattcacatgcatacgattcagtttataatacagaatatacttagcttggattggccttttctaaaaacaagtaaatggctattaaaattaatcaaaacttgctttctgataattctaactgggactggataattgggattgaaatatcttttttaacgcgtatagatatgcaggtaagacctataagcttatgccttcgttttttttttttttctttttagtaattccttatgaaaaaactgcctgcaggagtttcttgtcaagacttgcc

SEQ ID NO: 50254 - DNA, 1023 bp, Ricinus communis
  Intron number 1 from transcript 27561.m000301 (locus 27561 .t000013) derived from phytozome v7.0 (chr-ID 27561; pos 8 4627 to 85649)
ggtgtttccttcgagctctgtttctacatcatcatgtaagtttcctcctcacttctgttgttcaaatcgcatattattaaccttagttggtaagttttgttcctggagaataatctgagtgtaaacacactatcaacaaatgacgccaggatggcctttcaagaaagtttattttctttctgtttttctgttcaatggaaacaaaaaaaatttaataagattgtagtgtgttgatggatggataggcaccctattcttatatgcggttttgcatcattatgcacttttattatttataaaagagcttctttttccttttcttcttttatcattttataggataggaaaatgccattgtaatttctccatttgggtacaaagggtcaattcttttccttttttttatgagaaaagaataaatttgctaaagttaaagttgtaaagaaaaaggagaaagataaagatacaagtaaagctaaaagtcgcaaaacaaaaagaaaaatgaaaatacaagtaaagctaaatttgatgtaactcttggttgattattagtcgattgcctgggatttctgcagattagtttataaaacaacaatgagctttacttatttcaatattcttacaatacgtatttgatactcataaacaattagtctaaaaataattttacacttatttatctttgatcggttcctttatttcggtaagtaatttgagttttactaacatataaaacattaggaataagtatggaatcattttctttgttgaaacgtatttagaaatgaatagtatgatattttcttactttctattagctcaaacagtaaaaatatttgcttttggagggagggattttagttcaaaatctctgcatcagatgagttgtgttgttcttcttgtgatctcagtataaattgtagttttattgtcatccaataggaatagatagattagaattaaatattaaaatttaaattcattcctataatatatttatttctcactgtttttgcagggaag

SEQ ID NO: 50255 - DNA, 342 bp, Ricinus communis
  Intron number 1 from transcript 27699.m000210 (locus 27699 .t000006) derived from phytozome v7.0 (chr-ID 27699; pos 6 0642 to 60983)
tggcggtgctcaggtttataccaagtctcatagtgagccatttcttcaactttttctcacttcatttgatatgttaattctctatgtttttcccttattctttttattttgacatgctttgatgaaaaatgttggaaattttaattaagatttcaaaattccaacattaattttcaaaattactcattaattataaattaatattcaggatatatatatataatttaaattatgattccataattttaaaatagtctcattttattttaaaaaattaaatcagtataaatttaatgtaaattagcatctttttaatttttaaaattgcagataaatctacta

SEQ ID NO: 50256 - DNA, 811 bp, Ricinus communis
  Intron number 1 from transcript 29794.m003432 (locus 29794 .t000131) derived from phytozome v7.0 (chr-ID 29794; pos 8 55028 to 855838)
aagctgtaaaccaccacctgcaaatacgatctgtaaatcaggctgttgggtttccaagatttcacaaaatttcaacatattttaccaaatacatgaactttgagctctttttatctgtttttctccttacccatatgcacaaaaaaagaaagatagattctctctctacacggatagttaagatcatctttacaaactaagctagagtttactctaacatatctatatatatgcattttaagccccctcttttgatgtgtaaaaagttaagcataccgtaatcttaaaaaaagaaaaaaaaagaaaaaaaaaagaaaagattattagcatataccatacctaaatattctttccatttttctttcctgggtctgtactgtacgtacattttatcagttgggtggaggagctgtcttttaattatttggtggaatagagattaagaagagagggaaagaaaaggacccttttgaagttgaggaagcaatttgcatctgaaacattattttagtggatgtttatgctggacctatatatatacacacatcattactggtgatagtaagaagagggccctttttacaattttcatatatatataaatataagaatggtgaggtatcatttccctgtcaagtttcaatcaaaatagaccatttgattattatgtgttcatgtacgagttaaaccataattcattcttgtataattaagtttttaacacggatttcaatgaatatatatatatatatatatatatacttgtactgatgcagagctccggtggaaaatacaaagctagctgtaacga

SEQ ID NO: 50257 - DNA, 508 bp, Ricinus communis
  Intron number 1 from transcript 29154.m000210 (locus 29154 .t000004) derived from phytozome v7.0 (chr-ID 29154; pos 2 4878 to 25385)
gctgctgttcttgagtatttagctgctgaagtaagtcaaatacacatttctctttcttgattgtcttggcatctgggtctttgttgatgagtgtttttatctgacgagttgtttattttgtctaaaatgtctgtttggctactgaaaaacgatgaaatgttatttcaattggtcttgagattttgtttagttttctcatatttttagtgtagtttttggtacctagagatttagctgttttgtttatttatcagttggttattaataatcattatgatgctgtgttggatttgggaaatttggttcgaaacggatcttcggttgctgggaaaaatgaagaaaatgtttatatttgttaattgtaacattcagatacgttgaatcaaacgatatggtattaatagagttggaatgggggtgtcattgctagctaagttaaaattctaatttttctgattctgatatgatctttctgttggttgtgcgaaggtattggaattggcaggga

SEQ ID NO: 50258 - DNA, 705 bp, Ricinus communis
  Intron number 1 from transcript 29801.m003134 (locus 29801 .t000079) derived from phytozome v7.0 (chr-ID 29801; pos 4 65535 to 466239)
gctaatttatccggctggcattcaacgagcaccaggttagtttcttccactctgtgctaaattatcacaggtactctagcatctctatatttccaggcccaaattcgttaaaaagaaaaagaaagaaaagaatacaaaatggatcaatccggcaccaaaaatatgctcaaaaatattacatgacgctataattaagcccactgcaaaaatcaaagtaaacaaaaacaaaactgtgggagtataaaccaccgtttcttgttaagaactggaattccttcatattataaaacaacatagtgttatcaccaggttagtttctctcgatctgtgctttaagcagaattctgtgcattttttttgtgaaaatctaaaagaatattgatagtcaaggacactttgtgttacataatgttaacaaaagactagcatcttatctcgaaaatgataaataaaaacttctaaaaagtttacctcttaaattgtactttcttatcaaacaagggttgaagtttctaaaattttataaaatcctagaaagtctttcaagaaacttcctaaatttctaagctgcagtaggtttgaaatgattcaaaatatcaaagatttcgtatatgggtcatcttaattaagaaatattttctataacatatttgttcttcatgtttatcaggccggaagctgaagccgttaaggaaataatagagg

SEQ ID NO: 50259 - DNA, 554 bp, Ricinus communis
  Intron number 1 from transcript 29728.m000820 (locus 29728 .t000026) derived from phytozome v7.0 (chr-ID 29728; pos 1 73285 to 173838 reverse strand)
aggtacatcttcttaattgtttttctctcttctcttttatttattcatattattaataagtacatacaaatgcatgcatttttttttacatataaaatgttctcatagtttcattgttctttgatcatgaagtaatgacatgataaggtcaaagttatatgtgtatatataatggatagttgtaacagtttacaatatctaactctatgttcttgattttactttaaacatgtataaattactaattagaaggtgattactgctgccttttcttttcctaattaccaccttaatcaggcttaagtatgttatttaggtcaacaaagttttgtaggttagaggatggacaatggacaatggaccatccccatgctctacctttatactattatcatgcatattatgtagatttacaataaggacactacacagataactatagtgtttttgtttttgtttctgtttttcatattattctagtatctgatcaaacattttggttttattaacaaatttcagctccagcccattgcagaagcacaagaaataggtaa

SEQ ID NO: 50260 - DNA, 493 bp, Ricinus communis
  Intron number 1 from transcript 27504.m000630 (locus 27504 .t000022) derived from phytozome v7.0 (chr-ID 27504; pos 1 56592 to 157084)
agcctttaaagtgctagataccattttaagatcaggtaagcaaacattaaggcgttgtttggattataaaaataattggaaagaactcagtttgtgttttggaaagtctaaaaacccaagaactgagtttgattgaagtctaatcaactctcacatatggaaaaagtttactggaattcaattctttcaattttttttttttgaatccatttttgaagaaattgaaatcatgtcaaaaggaacatgattgtgcaagaatttagttcaattgagtataagatttctattctttttaaagttgaaagttgaaagttgaaattgaaaaaattgaattcgagcaactataattgaattcttgcatttttagacttttcaagcactgggttctagaatttcctttttgaattttgtctttttctttttccaggtaatcaaaattgattgttttttcctaatgtgcgtgcgtgtgttttagctaggggagagcttaaag

SEQ ID NO: 50261 - DNA, 696 bp, Ricinus communis
  Intron number 1 from transcript 28152.m000875 (locus 28152 .t000004) derived from phytozome v7.0 (chr-ID 28152; pos 2 3709 to 24404 reverse strand)
ggtatcttcattctctggaggtataataagctaatttgtttgtttgattttatgaatttcttgttctatggttttggtttaattttatatggaggaaaacataattatgatagaattttagtgtttatacatatgaaagatgagaatgtttagctttgattgagcagcgaattctttttttcttccttctattagtagtgagtgattaattacgtttttgatgcagttaatgaatgaagacttcatttaatgagaaaattgagtttgttgtttttgactgtttcctttttatgaatttttgttatatggctttgtctggtctgaggataatcgcatgaagttttggtattttcagattagaaattgggatatttcaactttgactgggaagtggatttttcctctttgtagtagagattctatattagtcttctttttctgtgacttgttgcttttgaattccagtgattttatctagtttctaattggacatctaggtctgcctttacacactgacttctattttgaagttatttatgtagttatagatagtggatttaattttgaaaacatgttatgatttttttttttttccttaacatataatctggagcgtttcaatctcaaaagctggaactttcaaatacactagtactgggatatactcatggactgaaatggtgatatgttattcag

SEQ ID NO: 50262 - DNA, 552 bp, Ricinus communis
  Intron number 1 from transcript 29804.m001529 (locus 29804 .t000060) derived from phytozome v7.0 (chr-ID 29804; pos 9 04389 to 904940 reverse strand)
tgtacgtctttaccgtgtaaccctttccttttaaatgtattgatcgcgatttattcggtttccgtttctgggtctttgggaagttgtgattttcaatggaaatgaagtgtttttatttgttgttgtccagggtaaacgacatcgtttagcttctttgtttttttgtgtcgaatttagtatcagtatcagtgatctgacttttgtttgggggttttggcgaggtttatgttaaactcgtttgatctggtaaacttattggatatatatataattcttaatcttccggtatttgatttcatattttttttgtttaatttagccatttagattggttattttgattggaattgaaattgatattaaaaatactttcttctataggtatctgttagctactctaatattgtttgctaaaatacacttgatttattatgcttccttatttagtgctaaaatgtggagcttttactctataaataagttttctgatatttttgtttgacaaagctaataaatgcaagttactctcatgtattatgcagttgactggca

SEQ ID NO: 50263 - DNA, 498 bp, Ricinus communis
  Intron number 1 from transcript 28603.m000173 (locus 28603 .t000009) derived from phytozome v7.0 (chr-ID 28603; pos 6 9079 to 69576)
ttgcaagagcatagtaagaaacacaaacagagcttcgctgagttgatgaataggcaacaagctatcatgattaatgaaatgaaaactatgctatctacctccaacctgggacacaagcacctcttttttcttcctcgacacccacaaatgttcactccaccaacccatcaaatccatttacccatcaaccccaaccaaccattaatccaaacacctttattgatatcaacccgataaactagagccaagcaactcaaaatacccaaaacaccaattaccagctggccactcgattcactaagatcgagtttcccaggttcgacggtgcagatcttgacggatgattttttaaatgtgaccgattttttcaaattgactttacccttgctaatgctaaagtcaagctggctgccattcatgtggaaggaagaacttttcaatggcattaatcctttctaaagaacagtgaaaaactcgaagaacctccttgggaggaat

SEQ ID NO: 50264 - DNA, 856 bp, Ricinus communis
  Intron number 1 from transcript 28543.m000396 (locus 28543 .t000013) derived from phytozome v7.0 (chr-ID 28543; pos 8 3140 to 83995)
agactcctcctcctggttacacctgcactctctagatccaagttaagtacattactacttttttctttttatttgggctcaatatttgttcagttttggagacaacaataatactatagggtttaagaacattgctgaagtattctaccacttcacctaactcacaaaccctaactagtaactttgcttaagttcttcatataggactgcaggttctaattttccaatgagctcagtagtcttattgcacaatttcacatgcatgtgtttccttatttcacgtttgtcttcttcataaaattcttttgcttctttaaagaaatgtagcaaaagaaaaagaatttacaggagaaatataaagtggaatggcaaaagactcacatgtctattttagatgattcatttctggcagttcggccaggattttggaagttcttcttttcctagcattgggaccaaacaacaagtatttgtcacttaaaaaagaaaacatatccctgcaaactagtctggataagttgatacatataatttcaggtgaagacatgccttgaatttatattcaagtcacatgatttcttaaaaaaaaaacatgtatgaaaagaaaggcagcctaatcctaaaattcttgttaaactatgcactaaatgatatttttgacttgagctatttaaaaattaataaagtaaacatatagaccatttagagtaatttcttaaaggcttgctgcttgctgctatatatatatatatatatatatatatatatatatatatatatgtttgggtgatgtatatatatatatatttgatggtgtatgtacatgcaggttgccagaagaatcacagacactcac

SEQ ID NO: 50265 - DNA, 438 bp, Ricinus communis
  Intron number 3 from transcript 28516.m000033 (locus 28516 .t000002) derived from phytozome v7.0 (chr-ID 28516; pos 1 2774 to 13211 reverse strand)
attttagaggttagaattatatgaatctttttgttgatgttaaaatattttgaaaatgttattggtagctttcatacggcagaaatacttgatactattatctatactacactgcatattagttctcttcaactcgtttccgtacatattattgtggaaaaaattattgcttcaacaaaattatatggagacgtgtacatatcacagttttgaattattatttgggaagcttcaagctgttctttccgtatagaaactaagatcttcaactgcacacctgagagttttagtatatgttttgagagtaggattttggatatgaatgttgattacagaacagaatgtgcattaaaattaaccatcacagcttgattttcttttggtatattctcttctgtgaagttatgagtagatgcttgtaataatggcattctacag

SEQ ID NO: 50266 - DNA, 311 bp, Ricinus communis
  Intron number 1 from transcript 29568.m000286 (locus 29568 .t000009) derived from phytozome v7.0 (chr-ID 29568; pos 6 7979 to 68289)
actgcctttcccatccttttctcccgcaaggacctgtaatttcttctttctctctgacagctataagctattcctattctttgtatttcaaatttaattatcatacatttgaaaattttggtacatacaaataaatcttgagcatatgttatttgaatttcgtattcggaatatcaaaatacttttgagagtttttgtttttgtttttttatataaaaaaacaaaatccttatgttgtattattctatttatgatcaattgggtaattaatcacaggtgtcctgagtgtgacggagcgggtttcatcagga

SEQ ID NO: 50267 - DNA, 398 bp, Ricinus communis
  Intron number 1 from transcript 29661.m000909 (locus 29661 .t000011) derived from phytozome v7.0 (chr-ID 29661; pos 1 42195 to 142592)
atagcatcaaaacaaaggtatataaataatggtttaagaatttacagtgtcatactatgatagagacttttctgaagatactagtgagagtttctgaattaatcttaagtgttgaatcaaacagaagccgttttttaaacggattcgggtactgtcttttaatcgtcggatatctttaaatgggcggtacctactcgttgcaatccctatatataaaagtaatataattgtcccagaacgctttctttaacgagcacccactactgttctacagaaaaaaaagaaaaagaaaaaagaaaaaaaacatatatctaatttttctctcattcataattttgttactgaataattttttttccctagaaagtccctgtttctctccaaaaatacgaaaaaga

SEQ ID NO: 50268 - DNA, 696 bp, Ricinus communis
  Intron number 2 from transcript 29751.m001799 (locus 29751 .t000014) derived from phytozome v7.0 (chr-ID 29751; pos 6 4318 to 65013 reverse strand)
ggtaagtaaagtggataatcttttgcatctagtatgatttttcttgcatataataactcgtcttgattgttgtttcctctttcttgtaattaagtgccttcttgattgttcttgacatagtctttgtcagttcaatgaggtttgacatggaacaatcttataaattttaatctgatgctgcagtgtattacttgacattttgattctcatttatgcattgcatgataaagtagtgggatatcacatattactatagcagacaatgtaaaattctttcttcaaggttgcttttatacttgagactcgctttgagtcttcattgtgtttttgaatgtttgttttgtcaaacacatgtaatgaaaatgtgtcttttttactcgatactcccctgaaattttcatttgtgtttgagaacctcaagtcttgtttttcttgtcaaacatgaattgggccagtaatgtattgatatatcattttcttgtgccactgaagtatttcattactcaagcactacagttctagttgagagaattttaatcatgtggactactaacttctaatttgcatgcatacacctgtttgttcaatcacgtgggtgatcagttgggcatcacatgtgattcatgaacctttagatgtgtgaccactatgttcttttctcatttttcttttccttcttaaatatctgcagagtga

SEQ ID NO: 50269 - DNA, 575 bp, Ricinus communis
  Intron number 1 from transcript 29751.m001799 (locus 29751 .t000014) derived from phytozome v7.0 (chr-ID 29751; pos 6 5218 to 65792 reverse strand)
atcgtagggtatgtttacttattctttatatcaatgacatgttgaaattcctaatttaaacattatttaatgctgtccaatttgcatttgatatggagcgattagagaatgcatgttaaatattattttatcccaaaacaactttagtttagtaaccttactgcccacaatattaaaatatgtgcggtattgcacagtaatttcctgatttgaacattatctgatgaatgacatcggtcgtgtatttatataattttgacttggatggactggagagggaatgtagtattcagattattattttcaatagggaaggtggtgcccttaattactttttggtcttattacatctgtagttctttgtattattggtatgtagacttacagtgttgattccttgcttcatgtaaatatgctaagaattcgtagagattcattatctagttgccttagtttgacagagagatttatgttgatgattctagagtttctttcattttacatatcttccgttctgttgtgtatgttattctgacatatgatacaattactgcaggcaagagctggtatagatt

SEQ ID NO: 50270 - DNA, 656 bp, Ricinus communis
  Intron number 2 from transcript 29648.m001978 (locus 29648 .t000065) derived from phytozome v7.0 (chr-ID 29648; pos 4 71637 to 472292 reverse strand)
aggtgggtttgtttctctctctcgctctctctctatccatcccttttgtccattgtttttattttaaagcatctgcaaatctaaaggagaatggtatgactttcttttttgctaaaaatatgataacaaacataaactatgaattctatgaacagatctacaaatgggatccctctctctctctctctctctctctctctctctctttctgcttatttgaatggttatttatgttattatttttaatttttggaaaagaaaactaaaagtggaaggaactgcaacattttttgtgtgatagatctggtaaaattaaaattatttattttatccttttttccttttgaaattttgaaaagaacttcttgtatcagaagcaaatgaaaattgtatctatatatggatcttcgttgaattcttgctcttttgtctacaaacttgaaggagagcgagtcggccttacctagggtttcttaaacatcattcttttctggatcagaagaatatcaatttaccatcatgtaatacaagtcctgatcagaacagatcatctcactaattggttttatttctcttataatattcttgcctggaatatatttaacatttagggtttcttttcttaaaaataaaacaaaatatacagaacctaagca

SEQ ID NO: 50271 - DNA, 282 bp, Ricinus communis
  Intron number 2 from transcript 29600.m000538 (locus 29600 .t000005) derived from phytozome v7.0 (chr-ID 29600; pos 9 9818 to 100099)
aaggtataacgtatttgcacaaccttttattctggactttacaaatatagattttcacatatatgtctgctttctttatattattttcttactatagggacgtacgttacagtatccttctccttccttttgggaagtttttttgttttttgttttttcctgtaatgggtgtttcagtagtcaaattctactttaggattttgcattttgctaattttagttcctttagtattaatttttcacccattttatgttaaatttcttctttctcacagactcagc

SEQ ID NO: 50272 - DNA, 814 bp, Ricinus communis
  Intron number 1 from transcript 29588.m000863 (locus 29588 .t000018) derived from phytozome v7.0 (chr-ID 29588; pos 1 20874 to 121687 reverse strand)
ggcctgagcaatttatcaaggacttcagagacaaggtaaatcatattttcaattgcttgtgttttgtcataaatagtaaattgtaaatgaagattaaagaactatcaagtaacctttttagaaaaacttttgttaagagttagaaataaaaagaaatatgttgtaccatttacgcatgccaatgcttcaattgttttttcgttttttcggtcaaattgatgttttgcgtacgattttgggtttaaatcattaatagctattcatatggagtgttctaaagccatggagctgtgtgtctactgggagtgtgttgtatttatgttaatcctagaattttggaagttcttgcttactgtagttattaaaggcaccagtcatgttacggcactaagatgtcccggagcctaggcataaggctcaaagcccaagcacgcccctgagagacatgaggcgtaaaagagaagaaaatttgataaattaaaattttaattggatttgagtgcatgagatctttgtaagatctcagataatgctggaaatttatagatgaacaaacaattaaagaaaaaggaacgacaacagctgtaaactaaaatgttacaaaggcacacctaggcatgcaccttttgccttagatcttcgaggtgtgcctttaaaaaattcttaagagttttagcttagactgcttaatgttttatgagatgatgccttctcctggtgtacatttttgtatgaattcactggtttgatggttcatttgtttgctaattaatatttatctgctctgcttacgaaggaattggacttcattcga

SEQ ID NO: 50273 - DNA, 992 bp, Ricinus communis
  Intron number 1 from transcript 28644.m000937 (locus 28644 .t000044) derived from phytozome v7.0 (chr-ID 28644; pos 2 49605 to 250596 reverse strand)
attttgttgtaagtttttctttttttccttctatttttttatatgggtagttcttatctaaatttgatgtatacatcacaattaatagaaaagtgacacgtattatggatattttacactttgatattaaatgattaacacatactctttcatttaaaattaataaatatgtatcaattatttattaatttggtatatagatggagacatataccaaatctaagcaataattttcctttttatatatagacatatatacttttctttctatatcaacctttagatttaatttgttatatgcatgtcatatatattaatctttttaatatttgagatataaaattattcttacatttttttttggatgaaatagttatttttttatatagtatcgaacatctatgattaaaaagtctagaattcgaattactcatatatttacactattaattagatatttcaacataaaataaaatagatttgtacttattcacgctttaagttcaatgagcaatcacatgtgttgaatatattaaaagtgtaaaaaactattttaagatttcatctaatagtttgaatttttagataaagtagttctctaaaacttagtgtatctttttggacctttaagttatgagattttagaagtttgtctactaaattatttatagacacattcaatcaagattaagaaattaagaaattattatactaagccacaccagataaaccgcacatataaattaacatatacgattgtcacatttttgctaacaccttctacataatataggacaaaattgaccaacgccaaccctcaaaaaagcacaaaaagaaaactgaaactgcattatgataataatatgatttttactattttctaaagaaaagaagcttagataagtcagtttctctattatataaattgtgggtctaaaattttgattgatggtttaacatttgcagctacaagagacaaaatttacaaggtt

SEQ ID NO: 50274 - DNA, 944 bp, Ricinus communis
  Intron number 2 from transcript 28883.m000744 (locus 28883 .t000034) derived from phytozome v7.0 (chr-ID 28883; pos 1 92318 to 193261)
ctgagatcggcgacaagacctttttcgccgctgcggttagtatttatttattttcgtggtgtaatgcttcggttggtcagtgtttaagttggatataattgcaggcttgcactttgcattctatttatgtatttattttttattttttggatagacatttatgcacgatatacattagctaaactttccatggttagctgataattgtctgagatattgacctttgtggttgagttttagtgttgtttgattgtatataattgtttgaattatttttctttttcttttgtaaattcacggtgagacatagcaaaactttccgagtgtttattataattgaataggaaaagtttgtaccaaaagaaagtgttaattgatatgttaggttacaaaagggcccactagcatattcttattgtgtagtttaaaattgtgtttctgatctcataggatcagttacttttgatttattaggtgttattccctagttgctacctgcctggctgctcttgttggagagtattgtgttaatgcaatgaatttcagacccctgttttcattgctgatagttttggatttcaacctgctctaatttttggtctttaatctgctcccctgaacttttagacaagcatgactagtctctccaaattaaaaaagtcaaccttcagttcaccaaccacttgggaataatttacagttacagctattcttctgataggcaacgattctagattcatccaagatatcctcattagaatcattaatggtcgtgtgctgttggttctgcatttttcagggatcaaaatgtgtaatccttaggtttcaaagcttttgagctaattgaacagttttcctctaattagtactataaaaagttgtctccttttcatatgagctgattgtgcttctctgtttattttattggtgtcaagatcttggca

SEQ ID NO: 50275 - DNA, 963 bp, Ricinus communis
  Intron number 1 from transcript 29647.m002076 (locus 29647 .t000084) derived from phytozome v7.0 (chr-ID 29647; pos 5 16855 to 517817)
catttggtaattgcattttctttagcttgtaaatttctcttattttagtataatttttctttcgttcggtaattgcatttctttcttcttctttcgtagcctaaaaaaaggtttgttcttttatattgtagtttattttcctttcgtctgttactgtacattgcctacttagctgagaaactgagtgttggtgtgtacaatttcgcctttttttttgggctgtagattttcattttgaaatttcttcttaactttatgaagggaaattctagtttgatcagtaaccaaaaagcaagagaaattattttgcatgctaatttaagtgatttagggttaaatgagatgtaatttgtgtaatttgaggacgatttagtgtcgtgatgaagtgcatcatggactctgtgtggaatagttgattatattgtaacattggtgatttgcaaattgtgctgtatagtagatgcttttaggcgctgacattagacggaaaacactttctgagcagattttatgattgcactgctcagttgcagggacccttaacaacacttctctcattctcttgtgttgttttgcctttttgctccattttgcctctgggagaaaaataagcatgttgtttactggatgtagttaggatttaagctttacttgaatcactgcacatatctgcttgatggaactaatgtgcttcgttaattcaatgattatcatagctcaagttattcatgtcccccaaatatatgacaaatataaacatgaatatttatagtaatcttatgatgttcgctctatctatgctttcagtatatgttgtcgttgtagcatatggtagtgatgataatgacaaatctaaacatgaatatgtaatgcgaggtaatccaaacaccatattgtaatttgaatggtgaaaaaatattttcacttatagatcttgacaaagttatgttttcgcaggtgttt

SEQ ID NO: 50276 - DNA, 1007 bp, Ricinus communis
  Intron number 1 from transcript 28725.m000325 (locus 28725 .t000017) derived from phytozome v7.0 (chr-ID 28725; pos 1 75193 to 176199 reverse strand)
aagctaaacttagacacgccgatctccgtagacaggtttttgaattaatttttttttgaaaaaaaattctttattttgagtatgtttgttcgttgttgacaagttcttggaagaagagaaatacgtattaaaaagaaaaagaaaggaaaaattaaattattttttaaacgaaagaaaaatattattcaagactgtaactagttgcttagttaagtgataaatttttattaattattttgggtcctaaaaagagtaaaatttactgattgtttttttctggttgataagctctctctctcttcgtgtttttgtttggtgttagaaatgaaattacagcgttttctttttattttcagttaaaaaccaaaataatttattttaaaaaaaattaacaaaagaaatagtaagttcatcccttaattgttcagttttcttgtaacttttgttttcttgaatttgagggagtggtatcttctttaattagttggtcttttgtgagaactgtagagtgaaagactttataatctgttaaattttacaaaaatttcctttcggggttaatcccaattcaaacatcttttgtttaatccattatttttttgagaggttttttaatcctttgctttaaattaaaaataaatattccttgtggtaggtaagaagttctgctcatgctgtttgaatttcttgtttttttttccccctaacttttctctcttgtgtcacatgaatatgcccccttttaaagaaagaacttacggtttaataattctattaatttatggtcatgtcgtgtgctcttttttcacttttctcttgtttgatcttaattttagaaagatggtatctttatttggcacttctgtttttagtgacgtttctgtttaagtatgttttcttggaagaaacaaaatcaaaattttgctctctgatcaaatatttggtttcttgttatcccatttgagggaagttgcctgaacgtttctgctcaactgtgcagcaattct

SEQ ID NO: 50277 - DNA, 714 bp, Ricinus communis
  Intron number 1 from transcript 29680.m001675 (locus 29680 .t000018) derived from phytozome v7.0 (chr-ID 29680; pos 1 11593 to 112306)
ctctaagccaattgaatctaacccagttcctgaaggtaccctctttaccctttgctttcactaatattatatgttctgtttcttcttcttttttttttaagaaaaagcaattctttttacattgctctaagaatgctttgtttttacgtttttggaagtgaaactttaattgcacttgagtttttttaaataaagaaatattcttccttattgtgaatttggatgatgtatatacccttgtggttttgcaatattgcaatgacttctttctcttctctcaattgcatcattactttgtttgattcacaggttgaggaatgggaaaattaaaaagaaaattagtgtctgttagagtagtggtggaaatattgtaatgtagttagttaaaacaaacttcgcctgattacttgcattagggttttgagctgagattttaatttttaagcttttgaactaaaaagtgattcatatttgtttgtttagtttcttgctcctggaattactttggattctgaagttcttagaatttctatattgtaatattctgcattaacttgcttttggagggatactttatgacatgtttcattgattttcattgagtaatatagttacagagaaaccaatcatctattttcttgttccagacctcaaatttttactttctttcataagttttcttaaaattcaccacaagtctgcaattttcagaaa

SEQ ID NO: 50278 - DNA, 382 bp, Ricinus communis
  Intron number 1 from transcript 29613.m000372 (locus 29613 .t000015) derived from phytozome v7.0 (chr-ID 29613; pos 9 4595 to 94976)
ttgggaagttgctccaggtaatcataaataacatgcaattttttagatgtagccctatattttcttttctctgaggaaaataattttgatctataattgctgactaatatagagaaaaaggaaaattgcattctagaaagccgaagtttgaaactctgaatcaaaattctaaatgcaaattactaatattatccaacttcgattatgtttttcttttttacaaaaaaaaaaaaaaagaataataagaaaggtggtatcatgttcccaatgaatgaaactcttctcttttctatatgcttcagtctatatgttctgatatgattgttcttttccctttgttgatcaagcaactccctgcttatttaagagcttcagcagcaga

SEQ ID NO: 50279 - DNA, 904 bp, Ricinus communis
  Intron number 1 from transcript 27955.m000383 (locus 27955 .t000012) derived from phytozome v7.0 (chr-ID 27955; pos 8 4233 to 85136)
gatcgaagctttttcctgatcacagtgattttctggtaatttttttgaatcccttcgacttgtttgctttctgtcatttttaaatgttgtttgctgctatttgttttatgcaattgggattgagcctgaaatcttctttgtaacaagttaagctgggaagagaactaccaattgagtactatatatgtgatttgctttagtttcatgatagggatcttgggccactgttgggcattttctgaatgacgtttagtactcggttgcctgggtcgtttagcaacatggattttcatttttagaatgttcgaatgcaattgatagcaactggcattaattaagtattggattgaggatgatcgaattctgtaattactctaaaatgtaatatttctagtttattttgtggagactggtagctaattttcttgctttttttataattgatctgtttagtcataaatatgattgaaggcaaatttattctggttgtgaagattaataggttaacagtagcatcaagcaatctagtttgcttgattggtgcttttccgtgttttatctcggcatatccttttgaacaatatatcaaatagttgttaggtttgcgcggtggagatgtttgtagaaggattttctcttcctggttgatcctttcttactgtgtgaaattttgtggaagtatttgaggagattggaaagctcttgctcttgtacattaaggctgtttaggttacactcattatattttatgaatcaagcttttagttctttaggaaaataaaaagtttaaaatggtgggattggaattggaataccctggccagtaaatatatttctgcatccatgttatcttgcactattctgatttcttatttcttcctaattttctgctctctattttcag

SEQ ID NO: 50280 - DNA, 938 bp, Ricinus communis
  Intron number 2 from transcript 29693.m002050 (locus 29693 .t000088) derived from phytozome v7.0 (chr-ID 29693; pos 6 16896 to 617833)
acttggattctgtcgtgatatcacgagctcacagagtaaaattttggtacttactgatggttcagagtatcccatacatatgactgtataaccaataagaaaagtcttttcctagtcccattctttctttttcttgcttggattcatttgacgtttttctttctttgattaataacggtgaagatttgtggggtctatgattgattagcgggtcgactctttctgtttataagagcttctttaaactcgaaacttttcatattagtttctatcagttttctatagtgatggcatttcatactgcaggaaacgctactttacatatgctcgtaatcttttctcttctgattatgattgtatctgcagaaacaagcttaaaatctgaagttgaggccttgaaggccttcaagaatgctgtagtcgaccctttaggagcacttgctaattggactgaagcaaatcatcactgcaattggtctggcgttgtctgtgacccttcttcgaatcgtgtcatttcgatatctttggctcagaagcagcttcaaggccagatatctccttttcttgcaaatctctccgccctccaggttcttgatttaacttcaaattcatttactgggcacattccaccccagctgggactttgttcccagctaattagtatttctctttatgaaaattctctttcaggtccaattccatcagaactaggaaaccttcaaaatctgcagtatgtagatttaggagctaatttcttgaatggaagcattcctgaaaatatttgtaattgcacctttttgcaatcttttggcgttgattctaataatctgactggcagattacccagagacattaggaacttagtcaacttgcaagttttcgtggcaaattttaatgacttagaaggttcaatacctgtttccattggagagttgcaa

SEQ ID NO: 50281 - DNA, 724 bp, Ricinus communis
  Intron number 1 from transcript 27985.m000881 (locus 27985 .t000044) derived from phytozome v7.0 (chr-ID 27985; pos 2 96205 to 296928 reverse strand)
gtctagcacagttggtcaggtcattcgttgcaaaggtaagcactttctagcttccagtcctttcttttgatctgggattttttttatttaaaattcccacatatgtatatgttgatcttggatttatttaattgttgatttggatatggtttttatttgttttttggaaaatggtttagtttcttaatggttctctatgctgataattttgacatatatttatttaagtttttttttttactctacctttatcttgatgatagggtggtggagtgtcatattctatagatggtcctaaaagaactaataaactttgttttgttattaagatgttacaatcttgggtaagtcaattctatgggattcatttagcagaagttgattctttgtttctttttgttttaatacctctttcatgttctccaaataattttaggcacttgtaagtgcaaattggatttctggggttctacttgtaagatcatgactgatcagatcaaaagtttaaaattcaaaacaataatcaaaaagatctgtcaagcagatcaacaatcctaacaagtaaccacaacttccaagacagctttagccagagatgaatttaatgatgatattcgagattaactgataatgtagtttcttccataattatttgcctgttttggtactctgatgactgatttcttaaattgttgaccttaaatgggattgtagctgcggttgc

SEQ ID NO: 50282 - DNA, 562 bp, Ricinus communis
  Intron number 1 from transcript 29666.m001462 (locus 29666 .t000038) derived from phytozome v7.0 (chr-ID 29666; pos 2 97141 to 297702 reverse strand)
gttgccaaaagctctacaagaactcttacagccaggttagttaactctctttctttatctacctctctttcttgagtagggggattagaattcttgagagtcattccgatgtttgaaagatataaaattattagcaagtacttatatgaactaatatacaaatttatatatttcatactttaaatactgaatgatacgaaaaagagaaggctaacggccgggctaaagtaaaaagataaagattttaaaatggctaataccaatgttttttactaaatactttaaactttatagtcaacttttttaattttaaataagatgtttgacttatttgttcaatattaataaatatatgtaaatcatatgtgagcagtgtatatcttgaactatactcaataatagacaatacctttccaaatttaacaaagggaaataaaggccgaccaaattaggctatggcagaaactatatgcttcttctctaagtgattttcatctaaaccattagcctattgttgatttgcaattgtaagcaaacgcaggaagcaacgtctctttttcat

SEQ ID NO: 50283 - DNA, 187 bp, Ricinus communis
  Intron number 1 from transcript 29591.m000137 (locus 29591 .t000004) derived from phytozome v7.0 (chr-ID 29591; pos 5 5037 to 55223 reverse strand)
agttctataagtaagtttcttttctccattttgcatctacttcttcttctttttttatccatttttttattttgagtatttctttaagtcttttctttcattgcttcatagtaccgctgattggtgttagtatttttttgctttaatgaaagattcattaggaagcatcaaaactggtgatttaggt

SEQ ID NO: 50284 - DNA, 776 bp, Ricinus communis
  Intron number 1 from transcript 29631.m001030 (locus 29631 .t000037) derived from phytozome v7.0 (chr-ID 29631; pos 2 24779 to 225554)
catttggcttctacttcttctggtcattactctctctctctctctctctctctctctctctgtgtcaaaagtaactatatttttttctggttcgacatgcatttgcatattaacccaccaggccaggcttaattcgttctttttagggcagattgcaattgaaaactcttgcttaaattttcatgttacttacgtttcctataataatagttttaaatattggaattctgtgccatgagaaattccaatagccattagcattaaacaagaaattatagcgatgcgtgtcctaggagttcgcattctagattcttggctcctatcatcaatttttatgggtttgatggtaaaacaattgtatattcatgtaattcttggtaattttagttaatttttttaaaaaattttaataaaaacaactgaaattataatttcatatactacgtcgttcacccataatcctaattactaaaaattttcaatgatattatttgcttctataaggattatcctatttttatttaagaacactcacttgatgtggtgtagatgtgcattgatggggtcaagaagtgacctactaggggatgccatcctttggcatcacattcatcatccatatgaaccaattaaatgaatcaaaattaattggggaaagatctttcctctttcctgcaaattaaaatcttcaatttaatttgtgattgaatcttgcatcttacccttgatttctctttttatttgataggtaggagaggaagaattgaatagaaacc

SEQ ID NO: 50285 - DNA, 585 bp, Ricinus communis
  Intron number 1 from transcript 29603.m000521 (locus 29603 .t000013) derived from phytozome v7.0 (chr-ID 29603; pos 7 9830 to 80414 reverse strand)
ttctctggaaggtcaatttggaacttgttagtgaggtgactaaacttagctcctaatttcgtgttgtttttcttgttctagttctgtgactttgatctttcctttcagttagttacactatcactctaaatttctacatgtattgagtacattggaaatgatatataagaggtagtagatgtagaaattatgttaaggaatttggctagctatgatttagtatttttatttccttgcttatgtcttcattctaatcgtgctgtcttgaaccttcatgtgaaatgttcagcataagattctgagtcactgtatgcaaaatgtttataaaatggaataccaactatttatctttgcaacttttcgatttatccttacgaattaaatgttcaggataaaaaattctaattgactgtatgcaaaatgtttgatggtgattaagttaatttacaggctaaattttgtatctgcgttagtttattttgtttaatttcttcttaataaacgcgactcgcatttacatatacatgccacatgtttaataatttacaggtcttccaaggctgaaaaatttgctatactatctta

SEQ ID NO: 50286 - DNA, 739 bp, Ricinus communis
  Intron number 3 from transcript 29757.m000754 (locus 29757 .t000049) derived from phytozome v7.0 (chr-ID 29757; pos 3 89445 to 390183)
gaggtggttattctgggtatgtcttattatcttgacccagttcgaactttgtttttctacaagttaaatggtagagaagcctttgagtaatttccaaaagcatgaaattgcaagtttgtgagcaataccttaaagttatttcatgtaatagttcaaagtagaaaggtgataaagttccagttattgatttagaacaataggtactgtctcctatacccgattaatatctcaactcagatttgatcataaactggcaaattgtcttagaaagggtattacgaaaaagcagttggtggttttgattatattgactgccactattatcaacatttttctctcttagttactatctagagctccatttatcctttatatgtagttcccacattatgatgtagtggaagaccagaataggatgattaagttggaacattaggaaacaaagaaaacttctcaatttaattttaaattgaaattaaaatgtacagcctaaacttgtctactagcatccttatttataatagttaagataaatccttatactatacagagaactaatcctaccaattagatttaaacaaaataaataggaaaacttaacaaagttctaaaggaaataaggaaagttaaataaaatcctattctgaattgatgttcctgcatcatcttgtttctttaagtctttttcttatttattttttcaggctttcgtttgcactttccgcaagcaaaataaagg

SEQ ID NO: 50287 - DNA, 456 bp, Ricinus communis
  Intron number 2 from transcript 29637.m000765 (locus 29637 .t000043) derived from phytozome v7.0 (chr-ID 29637; pos 3 16431 to 316886 reverse strand)
cgaaacatctttgctaattattcagcctttattgggtacatttctcgagtcagcgtgctcaatttaaatgtacagtgatacatagtgcatagatggaacagtgttgaagctctgttttgagtgtgtttgccatgcttggaaagtggaaaatggtgctaagtgttcaccatatatataaagggtttcttttattttgagagtgttcaatttttcaatgggcttttcatgcatttttttaggcttatcatatattaataaagatcaacagagttatttaaagacgcaaagaatattcttaactaaattttattcctagatgcagaagggaaagaactttggataggtggtgtgcctaaaattttttattctgggaacttgagcatgcttaatttaggtaatagaaatagtttgactgattgattaatctatgtattcttttgcccacttgcagaatac

SEQ ID NO: 50288 - DNA, 888 bp, Ricinus communis
  Intron number 1 from transcript 27394.m000350 (locus 27394 .t000011) derived from phytozome v7.0 (chr-ID 27394; pos 7 3649 to 74536 reverse strand)
tcatcctttgggtcagttctgcagaggtcacacaggtcatctctctctctctcttcttcttcttcttcttcttctgctgtaagtcttcaaatcatgatgattactgctgtattaacatttgaacaggaacaagcatgtactttgagattgatctatttcagttgcacacacttcttgtcatataagattctttgttaatgtcatgctttttgttgaaaaattattaataagtaaacccttttaagtttttggtcaattagtacactgggattaacaaacctacatgttttgactagctattgttgtacattgtcacttggtaactctaatgagtgaaatcatttttttattgaaatgttaaagattgtttgttgttgtgtttcttttttctgtttttttgtagttctaatattgttagttcacactttaaatatggcttatgttcttaattcttttttttggtggtctaggttggtcagccagatttttaatttttgtttaaagatatgtaatctttttagtaatgttctcatctttatcagcaatctttacatcaatgattcattttgcttgtcttggttgccattggaggtttctttccttctcttttgggaactttctgatgggcatgatgaggtcttcactcttcacccaacagcctaagtatgttttcttgatatgtttagtattgttattatataattatcaataaatggttcagaatctaggccatcttgctctctcttttgctccaagtagaagcactggcaagaattatcatggaatttgtaataaaaacaagcagccaaggttcattttaattttgatttcatgtttcttgattatgcaacagggtgtgttcacagactataagcatccatttgctgt

SEQ ID NO: 50289 - DNA, 805 bp, Ricinus communis
  Intron number 3 from transcript 29775.m000104 (locus 29775 .t000005) derived from phytozome v7.0 (chr-ID 29775; pos 6 3009 to 63813)
aaggtttgattacaccttgtctttgttctgtcgatgaattgtaaaaaaggctctgttcttaatgtatgtatttaggtagatatttgagataatatagtaatctggttttgattgaggagttatactgcgaaatgaggtcattcattcggcataataaaaaaaggggttcttatgggttcactgaagtagtagcttagagggaattaaatgtggctgaacactttcaaggggtagactagctaccatatgaagaagttaaatctaatgaattttatattggtcggattggaggactataaggccttactttaattatgtgcgggtcttttgggatatgcaagagatataagtgtagctttgtcgctaaatacagtgtagtttgtattctggtattggtgattattgactcagtaataataatattattattattagtattattatcattttgttttttttcgaaatgttacattttagtggcaagcatattcattcttttactccttttgcattacatttcttaatttgaaagtgatgctcgtaatacttggtttatggtctcctgttatgctcattaaattgaattatacatttttagcaatgtacttgtcctatcctttgcaattgatttcccttaaaattggtgcaatatattttgttgaatctacatatatatttgatgaattcatttcattttttggaatctaattttcctttatagtttcatgcttgttcatacctcttttctttgctggttcatatatcaaaagcttcttgaacttgtggagttaaaactgaaggaggt

SEQ ID NO: 50290 - DNA, 797 bp, Ricinus communis
  Intron number 1 from transcript 28492.m000485 (locus 28492 .t000023) derived from phytozome v7.0 (chr-ID 28492; pos 1 67280 to 168076)
gtgacaaggtgtacaccaccaaggtatgttgttttggttgctgtgatcatatctatttattattagtttatatgtttctttctgtcaaaaaattcctttttgcatttagtcagttcaagcttgtgttggttctcagataatttctcagatgatgtcaagtctggaggttttgtttgttgtgtagtcaatttgctggctgttgttaattaatgacatttttgtggattggaacttaaaaaattaagttggatacatgttaaaatcttgggaaaggaacttgttccttctgaaaattatgctattttgacgtttgctgttcatgattgtattaagtttcattttgctctgtcttatggctctatgtgacgaagttattactgtttgtaggctaattttttttgcttacgaagcatggttagaggaagctattaaacaatgggccattctattatttgttttcttttgttttgttaacccatagacagggtaccaaaattttgacatcataacagttgatgattattctttcttctctctcaatttttttctgttccgctttcctttcattttagttgctgaattggttatctagtgttgcacagttacatgggatgcattcttgatatattgtacaagtctggatttcaactatcaatctgaacatatgccgtcttctgttatgctgcatatattgtgatattcatttaaattttcagtctttgatttcattctacttatgttgaattacttttctgtacgcagaaggagtcaccattgaaagtgcctactcaatcagc

SEQ ID NO: 50291 - DNA, 731 bp, Ricinus communis
  Intron number 1 from transcript 29647.m002105 (locus 29647 .t000113) derived from phytozome v7.0 (chr-ID 29647; pos 7 12670 to 713400 reverse strand)
tggcgttggcagcccaatcattgcgacttgcccaggtaacttaattcaatctgcctatgggatcctttgttacttctctttctgttttgcgaatctgattttggtagatgagaaagtctcttaatcaagaaaatgaaacattttatggagtcatccttagttgctggatttggttggtagggatgacagtctgctgaattgaatactcgtgctattaggtcgagttaaatggctgcttccatcgtttctcccagctgcaaaatggagaattcgctagttgtaattattcttatacttttgttttttccaaaaaggaaaaatttcctgcatattagtttctaacgagctagttttttgctgttgagtgaagatgctacctttctttttactagtgataatttgagtttatcaatcttcgtttgtcctgttcatgtttgatttttctttatagttggtttttctcttatttaaattggttcaacctgatgtttggcttagttattatactttaaatccaaattacaagaaaagaaaaaaaggaaacatatgctcaaaattaagtttatcattaagctggagaacttcctcttactaagtacaaattttcttttatcaaccaattctttaatttggatttttgatttattgtttatcctgttttagctgtctgcttgttttataactttcattttgacatcctctcccttgagaatagatttgatccaaagctg

SEQ ID NO: 50292 - DNA, 399 bp, Ricinus communis
  Intron number 2 from transcript 29709.m001213 (locus 29709 .t000049) derived from phytozome v7.0 (chr-ID 29709; pos 2 10118 to 210516)
gaaacttctgttgttggtgttgcaagaaaggtaactttaccatgctacttaacccatttgagtcaattcctcttctcaatccttatgctctttataatttacatactgccttcaacttttattatatagttggaggtaaccaaataaatgttagttcaagtcaattgaattttctcttccacactcaccagaagtaataaagcaaataaaagaggataggaaattagttaaagggcctacataatttaacggaaaacattccatattcttcttctctgcaaagcagtaacagatgatggcattttaatggtctgccacattctctgtttattgagctgattattttttttatcattaattagaaaagtgatgagttgtacaattgcttgcaggaggaaa

SEQ ID NO: 50293 - DNA, 426 bp, Ricinus communis
  Intron number 3 from transcript 29726.m003948 (locus 29726 .t000060) derived from phytozome v7.0 (chr-ID 29726; pos 3 67003 to 367428)
tgttgctgcttctattgttttgcatcattttggaggtaattctctaatttactttcacaagttatctatagatggtagtatgagatttatttttgtcttttttgtccaacgccaattcttaatttgactgttttattactgcctttgcaatgggttgtgaactttaatagtaactgttgcgtcttcgtttttttattgtactatggattattatcctgtggctgttttttaacaatgtagcatttagagaaagttattgtcttctgttgtagcagtttctttttgctgtctagtacaagtttgtggcttagtacttgtaaattcatttgttctttctgcatgaatatgctgtatgtaacttgtgaacattgtcacttgtggttttcttcagtttgggcaggcttttctgagagaatccgtgaggga

SEQ ID NO: 50294 - DNA, 745 bp, Ricinus communis
  Intron number 2 from transcript 29742.m001447 (locus 29742 .t000083) derived from phytozome v7.0 (chr-ID 29742; pos 5 52326 to 553070)
tataagctagttggagacaggtaattaactgtaataacaaaagtaaaaaaaaattaaaattaaaattaaaaaaataaaccttttcttccttctttttcttcaagttcaatctctaaataagtgcagcctctgtacaaattggcagtataggctttgcttaattaactatgcatgaattagattatgtcctcagaaaaacaatacggcaatgatgtctccaaacaaaacagaacaaaggtgccggatttttatatttagtttttgtgttttctgcttttaatccaagaatttgttttgtgttttttaatttgtagaaaaaccattgttttatctagtgggctatatcacacccactgaagtggataactggactatcactttcgaacttaatattcatagctactatatattgtagtgtgcaaactatctatttttccaggaattttgggtaaggcaaggttagccactcaaaccaagttgatggagcattaaaatctcagaaatggattatagattttcttctttctaagaaaatataggtgcagtaaaaactgaaacattcttacctcctagtggccgccacagcatgttcttttttatatatggaagtttcatatttataatttataaataatatccatttgtctatagtttttgggtaaatcaaattgttactatgttgtcaaaataataataaaaattaaatgcaggtgggcattgatagctggtagagttccaggtcgca

SEQ ID NO: 50295 - DNA, 830 bp, Ricinus communis
  Intron number 1 from transcript 29736.m002021 (locus 29736 .t000017) derived from phytozome v7.0 (chr-ID 29736; pos 1 57826 to 158655 reverse strand)
acatttcagtaagatttagtatattatcctctttgagttattctagtgattggtttaataggacagtctagtgataaactgaagcttagccattttggcaatgcaataggccttaagttgcagaatccattaatgataaagtatttttttcttactcttctcattatactgttagtaagcttgatagatccttgattagtgctttcttggctgcatgaatttgcccgcaaatgccaattcagtcacaagtattagtttcatatgttaatcatcaagctagaacagaaacaaattatggtttctctgagcatagggacctgaaaatactattgcaggttatccaacatactgttactgttacaaattattagctgtgatctggttatcaaaaaaaggatacagtgaagggtgaataagtttggacagaagtatggatatcaccaatagggttgtagatacccctttgttttggtagggtcatgcaaacttccttcaaaaacattcgcaaatttaactttaacaacttcaactggaagtttattcacaaatgcacatttaacagatctaacagtgccatcttgtctttagttatttaacaatttcatgtgcaaaaagtaaaagaggatttgacattggattcaatatctgctgtatgttctgaattttggtttttgcaaaatagcctgatcctgctgaaatgtggcttaactgaagcttattgtacttttatgctgttgaaattgtatatgagtacaaaatttaaagtcctgactggtatccaattgttgtgttaagaaatctgccagtaaaggagagatattgatttcttc

SEQ ID NO: 50296 - DNA, 870 bp, Ricinus communis
  Intron number 1 from transcript 29692.m000528 (locus 29692 .t000011) derived from phytozome v7.0 (chr-ID 29692; pos 1 33137 to 134006)
gctctacgacttttcgatctgcaacttttggtaagtttttgccttatgcaacttttcatcttatgattcctctgtttgacacaaaaaaaaagagaggatattttgagaaatatgaaaagagggagtgtacaaaaaagttcatatatgatataattctttattttacttactgttacattgatttaaaaagttttgttagacatgtaattaattttggtaaatttagagcagaaagtgtacgtcccaacctacggatggcaaccggaaagggagacaaaaacatctcagtcaatgacaatagcacttaggcaattcaccgcatatattatcacatcattattagaatggtactaagtaaaaagctgtagactattagatatgtccaaaagaatactaactccttttccttctttcacaccaaaattcaaactccagttgtaaaagcatcaaaatctttgtcatttcttcatcagcttattgtccacccaaaatctagcattattgttaaatgctaattgctctcatcagtaaattaatgtcaaacaaccatacaccacatctataaggtaatgaattaaaatattcatttacaaatccaatatctagcgtctataagtttattttcattttaaaaattaaataaagaaccagaagaggaacacatggattaagtttcattaaaattgtagccagaagattttagaaagggaaatatatgttgtaaacacatgatggaaccagaagaggaaaagaaaataatgaattgttaaaaaagaggaggataaattaaattttttatcatattattctcacagctaagttcatgatcatcatgcagctgtttccgggcagggcttcatcgcgaagggc

SEQ ID NO: 50297 - DNA, 792 bp, Ricinus communis
  Intron number 1 from transcript 29676.m001640 (locus 29676 .t000031) derived from phytozome v7.0 (chr-ID 29676; pos 2 27804 to 228595 reverse strand)
atcctaatatcagtacttgtattttctacttatcattatttatcatttcctaattcttcttatttcagtgctcatggatgcattagcttgcattgaagcggttgaatcatagaatgcataattttctgtatatttaatattactaataagatgaaaacagcattatttagctttatcaagttttgtctgtagcagtcctgtgtcaatatctgtgctacatgcccatagtattgatggttattacttatttctttggacctttggtttgttgttgttgttaaacaaattatcctattgaactttacagcatttttattttgctaaacaaattagtcattagggttagaggagcaaatggcgattgctgattttatcctattgaacttgaagcacgcatatgaattttcatcactgcaaaaattgcttacaattagatgacaactatggaagctcaagactttgatacaagatgattaacctttccagttgttagagaatgttttaggcacagtttaccattcatcacattgaaatccttaaaatatgatggcacaagagctaaaccaataatgagggtactttaatttcagaaaatatgctacattcttatcctactcttctgtatgtatgaagactagaatttggagattcatgtataagatttttcactactaatgctttctttatctgatgctatagaatttccagagaaattttcattgactgctttctgatgtggtgttttgattctggacagtcaaatacaagggcaatatcttctttgttactgtc

SEQ ID NO: 50298 - DNA, 626 bp, Ricinus communis
  Intron number 2 from transcript 27973.m000086 (locus 27973 .t000002) derived from phytozome v7.0 (chr-ID 27973; pos 1 0920 to 11545 reverse strand)
tcaaaagccatttacaggtttgggactgaaaatactgatccttttttttattttcctctccttctcatcatcatcatgtatatatttttccacttccacaagaaaccaaaacaatacttatgatagaaacaacccttttagttaggcccttctttttttccctttaaaggtttttcttccttcttttttccctctctcactctcactctgtgtcctggtgaagactttgcccagtggcacaagagccaatgagtgcagtgaatgaatgaacagttgagtctgctctttgtgatacaggacaagttctacttttttgagagatggagagagagagagagagagagaaaaagaaaaaaaagtagccatcatttctcaataatagaagcaattactgaccttaccagacatcaacctcgtggttaataaacaaaccaagaaaaatccagaaagagaagcatctgatttgatatatttttttgactctttatcttttttgtttctctctccataatattttgtaaataatattcgttaattttatatgtattttatttttattataattcattacatatctgatctcccttgttttctattcattttctttgtctcttttggctttgcag

SEQ ID NO: 50299 - DNA, 318 bp, Ricinus communis
  Intron number 1 from transcript 28623.m000400 (locus 28623 .t000013) derived from phytozome v7.0 (chr-ID 28623; pos 9 4366 to 94683)
ggatctacaaggtataccttttcagctcttcttttatacatttttttttcttctttaagcttttcttattagggttatgtacagatcacccagaattaatgcgttcgagcttagatcaatcctattagggtttttaattttggatgtgtatatttatatattactgagcaaacagtggagaagtacaaggttacactatttcactagtgtcctttaggtcatgtttggcatcaaagtttgttatatatcaaacagtagtctatatgccattatgcatatgattgaaatcaaacttttcttaatgtaatggacagatag

SEQ ID NO: 50300 - DNA, 1011 bp, Ricinus communis
  Intron number 2 from transcript 28623.m000400 (locus 28623 .t000013) derived from phytozome v7.0 (chr-ID 28623; pos 9 4941 to 95951)
gtcctcctcaggcaagaattattaatcatcatcctcaataaaatttgctattaattagttaatctctcttaattttctctctcaaatttgatatatatatgtacttaaagttgaaaaataaatgatcatcttcatactgttccaaacacatgttgaggagctttgacctaaacatggggaactttctttttcttttaatctttttctctatatgagaggctataaaagatgtttgttaggaatccattgctatcagttcttgtatgaaaagttctaaaagtaacacctgcctccttctgccttctctttcttgctctctctctagctatttttcactaagggacaacataattaactctccttgataaattcttcatggcatcaaaaacctaacacaacccatattctcaatggattagattctttctttctcttttttacccccgcttttcaaattatgagaaacaaagcaactatatgtataaattgctttccatgcattgacctactatacatattatatatgtagtttcaaattccactatatatatgtttgtttataaaaaatcacttccaccatgcatgtccaagtcaaaagttactagagtcattttaaagaagcacaagcaatagctttcctgttccaattccttttctagtatggggctgtctctttctgttttctctctctttgttcattttgtcaaaagaaatattccaattcttcctctttatttcatcaattatctttgactgcatcccactaaattaacttctccatatctttaaacgaacaaaaagagaaacctacaaaagcccaaaagaaaactacatgcaaaatgaataaagaaatgccacttttctacagtgaaaaactttgagcttgtcaccttcttttatatatataaagaaacaaagggttagaagtaaatcaaaagagtaagaagatatcattattgttacttggctaattatctgtaatcttttgataaaattattgcaggaagaagg

SEQ ID NO: 50301 - DNA, 345 bp, Ricinus communis
  Intron number 1 from transcript 29678.m000498 (locus 29678 .t000006) derived from phytozome v7.0 (chr-ID 29678; pos 7 0292 to 70636)
atcctaacttcgcttctttctctcctggctctgtaatctttcttcctttttatgcttttcttttttcttttaaattaattccttctttgatgttttgggtcctctcatttgtttagagtctcaatgggttgtcaacgaaaaggttttttaatgtttttttttccgtttctttaactgagtgttcggaaatttaatattttaaggttgtgggttgattctgctatcaatgagtagaagaaatacattattctaatctttgcttacatggggcttatattattttatttatctgtttatctatttgttaaagcctataaaatcactgggagtagctaaagtggtgga

SEQ ID NO: 50302 - DNA, 975 bp, Ricinus communis
  Intron number 2 from transcript 29678.m000498 (locus 29678 .t000006) derived from phytozome v7.0 (chr-ID 29678; pos 7 0752 to 71726)
ccactttcctattacactggattgcttggtaaagttatttcttcatttcttcaggtttgatcaattgggattttggtttggtgtaatttcaatttcttttcgtcatttcaatttctttcattttcttagtcaggccttttgattgtgtttactttattgctttcagattatatccctaagcaccaatgtgattagggtgggatttcagacgtatttataaaatgtgtcaaaaagaaaagattgaactaaacatttttaaagtctgagaatcactcactctaaagtgaaagctacaagtgggagagccaaaacatgttgcatgtctttttttctttttgcattttaatctgatgttataccgtgcatttgctaattgccatgatattggttgctcatttgtcatgcaaattgacctcaaccattgaactgtagacttctgttacttttatatatagaactatcgacaaacaaaccttattgcaatgcacaatttcactcttgagcatgtggaatcatggtcaacacgaggtcctgatttcgattcagttactgcacatttgaagtcttagctaatccaccgagtgttagtttcttttcctgtcagcatggcagaagcaagtactttttatggcaaagccaacttgagcactaacttcctggtgccttgcaccaaaggatttctctctggagtgtttagtttagctatttaggtagttttagacaaacaaatttactgattctcatctctcaattgtgctaaaaagccaacgccgtgctttttgttattgcaaactctgaatttaataggtaacaattgtctagaaattgagtgttgactgttgaggcttgagagtacattacaactatttcacttttccttgcagaatcactttgagagaattcagcgatttctttccttatttttctccctccttttcgggttatggttttatatttgcattttgttttgtaggt

SEQ ID NO: 50303 - DNA, 393 bp, Ricinus communis
  Intron number 3 from transcript 29628.m000786 (locus 29628 .t000040) derived from phytozome v7.0 (chr-ID 29628; pos 2 19209 to 219601 reverse strand)
aaaagtcagcaggaagttattcgctggcataacaggttatttttttattttgttttatggtcttttctgttagactgtgtttgggaaagtctgagaatgcaagagttcaattcaaatcaatcaaactctattcagtcaattcttgtgtttggaaagcttgtagcttctaaaattcatctctttcaactttaaaatagaaaaggcatttttttaaaaatgaattattattttgtaacatttcatatcaatttaactcttgcacatgatttgttccaaactaggccttatatgaagatttttctgtttcttattatgattgattatagttcccccccctttttcttgtatatgatatcaggggagtggcagctcgtgcattgcatctatcaagag

SEQ ID NO: 50304 - DNA, 972 bp, Ricinus communis
  Intron number 1 from transcript 29801.m003156 (locus 29801 .t000101) derived from phytozome v7.0 (chr-ID 29801; pos 5 64848 to 565819 reverse strand)
cggtaaatttctcatttacatggttcttttttaatgttattaaattaattttcctatttatggttattatactttaatttggtcaaatgattagcaacttttatttaattttttaattaaaaggaaaatgattttgtgagggggtgcgcatgttaagcacatccttacataatagtatccatacctctcattttaatgtttaagccttccattagctttacccatttagattgtggagtagtcaagttaggtataattaggtgatgaatagcctgtccacatgtttcaatgtctagcactattagatttttgatttttttttaattttaattatatatatttataaattttaaataattaaatatgtattctaaaaatatatataggtgagatgccactattattttttaatttaaaatttttaaatttaattttttgtattttaacttaaaaattttaaatttgatgtttaaacatatagttacgctaaaactcgtaaaataatattttaccaataataatttatgacggatacaaactaaattaactatatatttatatactaaaaaatatatttaaatatgtatctgtcatttaatataaaccattcataataaatggctcctctaattactaataagaaaactgaaaggaagaaatttaaactggttagatgtgggagtaggagcaataatgtcaagaaagagtaggatatagagttggatgtagttctgtggtgacatctgttcttgtcatatctacaattaaatgtgttgttctaatgcattgaaaatgaacttgggaaattgagttcatcgtatgtgctagtgggtattacttacaagtcaggagctttcagtctttgtcactttggcttgatatgagtttgagtgaggtacttgtagatgttgctgaatgatcaaatgatgatgataatgattttctttttcttcacaaatttgtagaccatta

SEQ ID NO: 50305 - DNA, 897 bp, Ricinus communis
  Intron number 1 from transcript 28308.m000064 (locus 28308 .t000001) derived from phytozome v7.0 (chr-ID 28308; pos 1 7323 to 18219)
caccaaaagtggcctgccatcccagcttcctgcaggtacctatatgagcacttgaggttgttaatgtcagttaagaatatctttgactatactgttacagtttcaggtctttttatattcttactgactataaacctataatgtttctttttttttttttatatgtatttacatgatgattaaatatttcactttttcgtttgtccttataagggttaattggcagtgctttgcttttaattgaacttaaagaacagcaggagtaattcgtaactttggcccacaagccaaaaacaattagactcggtcttgaggtttattttcaggatcatgattatatccatacgttgcatggacagttgaaaagataatttgacaatgctatctggatttgcttttaccatttgattaacttcagtttatgtgtgtagtacatactttaccaataaagagattatccaccaagtttaccccaaacaacctgaaagaaagacttcttttggtaattttggccacaattttcaacacttggaaagtattagtagttttaagtgatactattttccattatgattgctagtaggtacgtgaagagttctaaatatcatggccttttttgcacgactacttgacggttcttgcaaagccaatcatgtggatccataaattagtgccatgactccaaattctaagcaatctctgtccttgcttctcaaattagacaaaaaaaaaaaaaaaagttagttgccttagtattattattattaaaaatctcattatcccaaaaccgtactctaatattatgtacttctttaaaagtgatataacacaatttgtagtactgcacaagttgacaggtcattgaaattgaatattgcagggaattggtagctgaat

SEQ ID NO: 50306 - DNA, 696 bp, Ricinus communis
  Intron number 1 from transcript 29813.m001539 (locus 29813 .t000091) derived from phytozome v7.0 (chr-ID 29813; pos 5 60659 to 561354 reverse strand)
gagttagtactgtcaaacaggaggtagaattgcagatttcattcttgtttaaaattgcaatttctccatgcttcttttcctttcattagttgttgagatgtggcgagaaaaaaaataggagttggaggaaaaatgaaaaaggaaaaataattaagtgatttcttgccatgtagttgattaatcattataaaggaatgagttaaaaagactcaatttggtcctccatgaaggctattggtttggaaatttaggacaaaaaaagttttctgtaatggtctttccttgcactttttcttctttgggttacaattatcttagtgatcttcgtggtttcatatttgtgttctatactcttttacgcttccttggagtatcacttaatcaatgtggaaggtgggcactgcattgagttccattatcaatgatgcctagagtgatctaccatgtcatatcaaaatttatcttgtactgtcgtgccaaaagaattaatgataaattgggatgtaaatttaggtcttattgtttatttagtgccatattatgtggaacgtagtgcagaaatgatctattagtaccttatacaaatctaatttttggattaaactgtggaggatgacgaggtttcatatcatacaacttgcatgtgtttgttcttctcgaaatatctaatgccttctttctttgcagattggtggt

SEQ ID NO: 50307 - DNA, 1009 bp, Ricinus communis
  Intron number 1 from transcript 29660.m000755 (locus 29660 .t000008) derived from phytozome v7.0 (chr-ID 29660; pos 4 5124 to 46132 reverse strand)
ctttcaacccgacgcttatcatccatcaggacattgtatgcatcttgaccctttacttcattagttgttcctctttcataatttttagtcagtagctaaaaaattctaacacaaattttgtcttagtagtttgctgaatcatttttgaaagaaagatgaacatcaaactatcttatcaacacaaagatgtcaagaactttttatttctctacaagaaatattaatagaatgtttcaagaaaataagatatttattagactagaaaagctcgaacgtttttgttaggattgtatgattaattatgcttgcactttgtttgataaaatcagattactgatgcttgtgcgttgcttatagtcgacgaaagctaattagagtaagtaaatgcttgcaaccttgcaaagttttctgggcagccaagaaagagcaaatgaggatcaaatgtgtatatatactagccattgcactgtcagcataaagtaattgcttccttgcacagttgaagtagttcattttctttaataaaagactcacttaattataaagatatgaaagtgtaagctgatttcaaaaagaaatagaacaaactgatggcagagtcataaatttaggaccgattgaaggcaacagagagcaagtagtgaaacaataagctgatctggaacaataaaactgataccatagtcctaaatttagaagaagctgacagagggattgcaggagatcattggtagagatagctcttgtttggacatttttacatcttaatctcctgaagcatcattagaaattgataaaactacatccttctccttccatatacctacttctaaaattatcatatgtcattagaggagaaagattgtcttgaccaactaggatgatattggttaattacaatattcatttgaaggttaagaagtggaatacattatctactcggtttgatagaattgtcaggctggtttaactagaatttgttttgtatcagacataggccaagaggggt

SEQ ID NO: 50308 - DNA, 901 bp, Ricinus communis
  Intron number 2 from transcript 28281.m000370 (locus 28281 .t000009) derived from phytozome v7.0 (chr-ID 28281; pos 6 3542 to 64442)
aggacaaaactgtcgtcgtcacggtatttcttttttgttttccctctataaatattattattgtaatttgtggaggtggctaaatttactttgttaacattgtatgtctgacatggataataaaatgctataagtgtgtgcttgtgtgtgtgtgtgtgtatataatatatacatatcaaagtaattgcagttacatatgatcaatttcgttatcatgattcttaaagttgtataattatggataaagctggaattatatgacactgattgccacctcaatgcaataaacatttcccatgatttattagactgttgatttttatatttttcttgatgttgcatcacagggatatggagtattgattttcctctggcacaatctgtatttacaatcttgcatacttgcataaatatatgttcattggtgtgtcaatttttgctctgtgtgtctgtaaagtgctttttaacataaatcctggctagaactttcatgtttttctctttccctaaaaatttgttaatatgtaagactaggattttgttgatgatactacaagtcaaagcataagatattctcctcccaaacaaaccagaaagtgcaaggaaaaagaaaaacttatgaagtaattccttttaacagtcgtaaataccagctaaagagactcctttctaattttccctgaagaagaagcccataagaggctgaaaaattattttatttcttaacaattacaaagaaatttttttagttttaaagtatgtgagattaccttcaagtaattttccaaattacagtaaaaactgttaaatgataaaatcatatggactttatttcaactttgattgacagagcttgacttttccaggtcaacggagaaatttacaaccacaagcaattgcg

SEQ ID NO: 50309 - DNA, 696 bp, Ricinus communis
  Intron number 1 from transcript 29589.m001250 (locus 29589 .t000029) derived from phytozome v7.0 (chr-ID 29589; pos 2 13255 to 213950)
ccacttgctagtactcctgctattacccagaaaaggtttttgtatttcctttctactgcaaaaaagaaagaaagaaagttttctctttttagtatgaacatttgtatgtttgttttacattttctttattatcattcataattctcttgtgggtaaatttttttttcttaaatcttcttgttacttgctacattgaagtgaaatttttgttttgttttgttgttggtttttttctggtagaatttgctttgaagtttctaacttaaatcaagaaatcaaattattacttgttagtgattattgcccaaaattcacatctgggtagttaaagagtttttctttttgggcaattgcttgttttctactcatgtagtattgcttttgttctcttttctttttaacaacttcctcaaaattttgagcatcattcagagttgacggagtacccatgatgaaacatggcctttgtcacctttttttctattgaaagtttttgactttgtttgtatatgaaggattgattaagtgaacctaacctctttcccctttattgatgaagtttgtagtgaatttggttgaatgacttgaattgactttttatttcgagttaatatacctttttctcacttattcatgaatccggtgtcataacacatatgtttaccatttgaagtaggaagaaagttattggcttgg

SEQ ID NO: 50310 - DNA, 404 bp, Ricinus communis
  Intron number 2 from transcript 29676.m001645 (locus 29676 .t000036) derived from phytozome v7.0 (chr-ID 29676; pos 2 48520 to 248923)
atcaacaagctcgaccagcctttcctcttgacgtgcgtttccttctttctgtcattgccagtttttacagtttgtttcttgactttagtatttgtttccttcttcttttcttcctttaatttgatgatctgaatttggagatgtatttggagtctacattgttccttctgtgtgaaaaacaaaaaccaacaacttcaatctttcttcaagatcgaccatgtggattagttagaattatgtttctctgtttggtcagcttgcccaattttttttggtttttttttttttttatatttgactgtttgcttacaggaaaaaatgaaaataaaataaaagaacattaaagttgctttgaatttcaagtaaggatataccgtaacaagaacatattgtatcaactagga

SEQ ID NO: 50311 - DNA, 929 bp, Ricinus communis
  Intron number 1 from transcript 29611.m000234 (locus 29611 .t000013) derived from phytozome v7.0 (chr-ID 29611; pos 1 15869 to 116797)
ctgctggcaggattgggaaaagcttgatttttaaggtctgtcgatgtttgtgattttcaataatatatttagttctttttgttttttttgggacttatctgttagatcggatgttccatggatccttttctttatctagtgatctaatattggctttggattgttgtgtgtttattagaagttaggatttacatatatgcttaagttggatacatcatgctaaattgacttgagaaagtccctgcgtgtattcattgtgtaggcatggatatagtattggtctagcagatgtttgtcgatactataaaaatggagaaagttttgaagatagcaatacctataattgttgataggtaagtgtcattttggaaactttagctatagatagcatatgaatatgattgtcgcgtatatctggtgtgggaggactggaagtcttttatttggatgtacctgcttgatattctagtggtgtcttttcaatcacattttgcttgatgagcaaatgcaacttcatggaagagaaagaaatgaacagattgcaagtatacaaggcattttgttaatctgttgggtattatttggagtaccaattgaggtttactttactggtactctgtcattaatgagaacttaaaatgtagagagcaattttctctacaattattcatggctgatgcacctagaatgcaattttttccgccatgataagttacgattttttcgctgtcctcattccccatagcattctgctgttttttttcaaatcagcattgaagaactacatctctaccatagtggcccttttttacatgctatagtttttcttaaaacaccccaatgttattatgtgcatttgtatgcatgtagcattgagttaatgaaaaatgtgaagttgctgattgatgatatatatatgtaggtaaaag

SEQ ID NO: 50312 - DNA, 479 bp, Ricinus communis
  Intron number 2 from transcript 29711.m000323 (locus 29711 .t000005) derived from phytozome v7.0 (chr-ID 29711; pos 1 11728 to 112206)
gcttgcagttctttgtaggaggcaattggaagtgtgtaagtattaaattcattgttcttgatttgatttatgtattcggcttaccacataaaattattgaaaagttctacgcactgctagtaattcacatgtgttaacttttctccatgttccttattgttgcaattacatgatcttttgtcacaattttttcttttaaacttgtaaatgtactgcgtatctaggttgatttcagcagtttccactgattcttcataattcgttattgactcttaattctagaaacactctttcaacttgttaacaagttctgttgcttttgttttattaataaattccttaaactatagtctgtttttttttcttcttttctttttgttgcatcttgttagtggacactgcaaatgcataacttttataatcgtttgtttggtttcgtttcagtcctctaatccaagtttgtctttattgtttctaga

SEQ ID NO: 50313 - DNA, 276 bp, Ricinus communis
  Intron number 1 from transcript 28345.m000113 (locus 28345 .t000004) derived from phytozome v7.0 (chr-ID 28345; pos 5 0713 to 50988)
gagttcctttaaccgaagagcttggtttccaccaggtttgtctctgctcactttctttttctttttttcataagcaaatttttgaagaacaaagaatgttgaagtttgtgtactctattttatagtattgtatataagtttacaaattctaacaattaatttcctttgaaatgttaaaaaaataagtctttgattattttcattgtgttttttatagaacttttttcccctgaagtgtattgttgattttgcaggttgatattagaggaaaccctt

SEQ ID NO: 50314 - DNA, 938 bp, Ricinus communis
  Intron number 2 from transcript 28677.m000058 (locus 28677 .t000004) derived from phytozome v7.0 (chr-ID 28677; pos 3 9582 to 40519 reverse strand)
aggtgagctcgtatttgtactgtgtttgttattttgtgacaaatatcaaatacaccatcccttttaccctgtaactgaattgggatggagaaactaggaaatgttgggtcttgttgatgaagatatcaaaataacgcgctagtgaaaagacactttcgtacctattaactagaacacaaaattatactgtcttttcctataatatttataagtgaagaagtataagcgcaaaaaagtagcatgttatctgcttagtttttgtgacatgtaagccatacactggaagaaagtgaagaagtcataaaggaagaaacgtatgagagaaaacatatatatacccaactttttgaaatatcctgactttctgatcatccgttgagggctctgaactatatttctttgtttctctcttgttattctctattgactttaaacgggctgatattcatggatgatgaggggaaggtataaatgagcaagggcaaagcactttccctttgtactgactaagcagtgttactaagagatacactttatgtcaagggtggcactgatttagactcttcctttgcgtataaacgaaagaatactaccgtttgcctcaatcactgttagtgtactagcaggcggcaagctgttatcattctttaatgacttcttaattgcatgatgcctgagccctgacgaaattgggaagaaagcattgagtcatcagtccattagatgccagcatctgataatagctgtagtagactttgcacttcgtagtttgtctgtggaagttccaattcattttgtattcgtactttctctttaaaacaagtgaggtctcaccgaggataattaagatatagatacacaactttccagtactgagacttgaattctttaattttttaacagttgaagttactgctagctgattcagaaagagacaa

SEQ ID NO: 50315 - DNA, 348 bp, Ricinus communis
  Intron number 1 from transcript 28677.m000058 (locus 28677 .t000004) derived from phytozome v7.0 (chr-ID 28677; pos 4 0760 to 41107 reverse strand)
gagataggtgccacaaggtaagcatccttaacaaacattttatttatttatttttatacaatacctattcttgaaatggtgtaaaggtctaaaattacctgaaattatgtgtttctccatgatcttttagccaaaaggaaaataaaactattatttccttacaatatactcttccaatttgattgctagtgggaacactgatggattaaacgtactacttagaatgtattaaccaacttaatggtctttctgaaaattaagttaggatttgggactttatttatcaagattatttatgtcatgggtatgataggtgctttataagcagacaagtaccgtggttttcat

SEQ ID NO: 50316 - DNA, 1029 bp, Ricinus communis
  Intron number 2 from transcript 29806.m000965 (locus 29806 .t000036) derived from phytozome v7.0 (chr-ID 29806; pos 2 66030 to 267058)
gatttttcttccaaactggttagtaatcttctttttcttgattgattaacttatcacataacatacataagaagaaaatcttccattttggttatttgtgctgtttaattgagattgtacttgaagtttttgaataggaatttaaactgacttcctatttgttgacaagaatctaatttggttgtctgattgtattgatttcagtgtagtagttgtttcagttcaaaaacaatgtagtagtggttttaactcctttttttttttaaaaaaaaattactattacctccttaagaattactataatttacaaatctaattctatattgttaaaagtgaattaatagccctttaacttttattttcatcaactggtatctccttgtgatagttttttcagtagtcaacttggtaaaaggacttaattgataaaaaaaatttaacttgatccttgaacttattattagtatcaaaattcatccaaaatttaatttttatcaaattaaggtcataatttaaaagatttaatattatagagtactaataaatagtttggctaaaaaagaaaagtttgttttaacccctgaattctctctccttttgactcaacttgtatccatacccatctttgattaactttcgttcacatcactgaatttcaagtaaataatgttcaagaatcaaattaatcttttttttatcaattaagcctttttgacggagttgactaacagaaataatttaatggaatgggtataattgatgaaaacatacgtcaagagattaattaattcacttttaaagacaattgattgagcttgtaaataatggcaaatctaaggagtataattcttttttcttgtaagagttgagcaataatgggttgggccattttagcaggcccaatgtgttttctttttattttgatagtacccatgtggtttttattttcatattattttaatttttttttagatgacgcaataattacttacaggtccactagttcttaatactgctaactatagtggg

SEQ ID NO: 50317 - DNA, 652 bp, Ricinus communis
  Intron number 2 from transcript 29703.m001489 (locus 29703 .t000025) derived from phytozome v7.0 (chr-ID 29703; pos 1 07453 to 108104 reverse strand)
tactataatctttctattgattttgattgttgaaggtaactggcctttttctttgatattgttctcattttatttatttatttttgctgttcccgtttctttttgtttggattccttatttcatgtttggttgttgagataaatgatatgtatatacgtttctttcatgattaatttatgtatgtaatatcataaattttgattctcgaaattaaatggtactgtcctttaatcatttatctttctttttacttgttgaagtttctacttttgcattccaattcctttatgcggctaatctaaacaagaatcatttcagttcgttagatatttgaggattacgtttctgtctctcttcgggattatcttggagagagaaattttaatacttcatcggtgcttataaatataaagggaagaaaaaagtcttgggtttttaactaactaatttattctcttgcttgagttataatcattcacagcgatgtagcatttatttctaggaaagagtaggactttttccttgctctatcttcataacttgcatgctaaaatttggtctcttctcttgagaaaagaattagatatttccacttttgttttttaaatatttaatgaaggaggattagtggaggagcactttgacgagtcc

SEQ ID NO: 50318 - DNA, 758 bp, Ricinus communis
  Intron number 1 from transcript 29739.m003713 (locus 29739 .t000149) derived from phytozome v7.0 (chr-ID 29739; pos 9 78758 to 979515)
gcgaattctgcagaaggtaagtctcagtaattaaagaatttgagcatagacttcatcatcttttaatatattttttctgtaatgaaagagttttctgggtcacttattgctgaactcatgcttcatgatttttgtgaagatttgaggcgatcctgttgattcgggacatttttaaactttttttagcttttgttactgaatcatgatgatagaagctggaatttggattttcagttttggtttttcttttttccttttttctataatattttaaattttttttagttggctccttttggcgagtaacaatctttttaaatcaaagttttctgatgcatgttcaacttataatgaaactgtttgctgaataatctagattttagaatataaataatatgcatttaggattaatgttcattgtcgagaatatattagatgtgcagccaataattgtgtggagtgagatttgtttgctaagcaagctgcttaaatttcagaactggttcagatatctttttgaatcgccaacttcaccagcaccttttaagcttataatatatttcatgaatttttaagcgtgtgttctttaatcctctttatatttacaaattcttgaagtacaaaatcaacttctgttccaacttccaaacaataacttctttttgtttgtttgtcatcggtaaatctaatgtcagttttctgatgatgttctggattggtctgagaacaggagaaaggaagagtattaattcagagct

SEQ ID NO: 50319 - DNA, 509 bp, Ricinus communis
  Intron number 2 from transcript 28498.m000204 (locus 28498 .t000003) derived from phytozome v7.0 (chr-ID 28498; pos 3 1451 to 31959 reverse strand)
cgtcagcttatcaagttttacttgcaatatatcaggtaatctattcatctgatcctatgttaagcttgctggaaaaatgaccttttacgtctcttgtttatgtgctatcatgtattggtagttcacttatcaaaaatcttttacggttgatgccaaagaaagttcactctccctttgtgagatctctcctgaataaatcttaggattgactatcatagtttataatcagattagtagcaaccctcttatcctagagatgggatattcttattgatggtgatagtttgacattgtcatatatatattagagtttcctgaagaagattggatcacaatttggttttggaaattgatgaatagtctattatacttttcctgtacaagtagttcttccaattgtggtatgggaacctgattgacatattagtttcttttaatggatttctatttcttttgtaataatttttgtttaaggttatattccagccttctggttccttacatttagt

SEQ ID NO: 50320 - DNA, 433 bp, Ricinus communis
  Intron number 1 from transcript 28498.m000204 (locus 28498 .t000003) derived from phytozome v7.0 (chr-ID 28498; pos 3 2019 to 32451 reverse strand)
tggtcgttaattctgttactacctctcctcatcaggtctctctcctttccctgctttttgtttctttatctgtttgtttgtttgtttgtctgtttgtttctcatcagggctccctgtcacacaagtgtttttgtttacttgctgacttaatttcagcaattgttttatctttattcttcttcttttttttgtctgtcatgcgatgactttacatgtgccatttatgcatgctttttcatctgcatggtattcatttatttggaaatgttagctgctaatagatgtacagaattaagtccaaagaatgctggtttcccataagactctgtatggatttatcttgtaattttgatcatttaatgtaattacttgatacaccagtccttcatttactgaggttctgagttgctgcttacttctattactttagaaa

SEQ ID NO: 50321 - DNA, 817 bp, Ricinus communis
  Intron number 1 from transcript 29729.m002283 (locus 29729 .t000016) derived from phytozome v7.0 (chr-ID 29729; pos 8 9342 to 90158 reverse strand)
ttcggcgactttcctctcctattaaattgcaccaggttctctctctcctctatttgccaagtaaaacaaacaaacaagaagtaaaagcttcaatttagtttttttaacactttaagtttttttttttttttttggttacttgaagaagttatataaagttgagttgaagttcagtttactatctaagtactcaaatttaattttgtagttgatcagtattgagctttggtttgattatatgtgatcttagacagggaaaagaaaaagaaaaagacaaaatatttcgatttttaattgttttacccctatacatggagtagttattgcactactgtgtgttatataaagtcgagctaaagctgggttcagtatctaattctgtagttgattagcgcagcttggtttggttcctcatattcaattttggaaggttctactactgtcaaatgagtaattttttttttcactattctgagctttgtaaagttgagttaaagttcagtttagtatctaattgtttaatttaatggtatagttgattagtattgagcttttggttcgattccttgtaacttgacactggagaaaaacaaaagaaaagtttcaattttaagcgttttactatgtcagtgtttttcttttaaaaaaaaagaactagtgttagccatatagagtgaattaatgttcagtttagtatcgaattactcaaaacgtaatggtgtagctgattggattttgagcttggtttggttctttgtacttgttattagctttttctctttttgacttttgacaatgattttgtgttattcaggtg

SEQ ID NO: 50322 - DNA, 571 bp, Ricinus communis
  Intron number 1 from transcript 29462.m000378 (locus 29462 .t000006) derived from phytozome v7.0 (chr-ID 29462; pos 1 76754 to 177324)
gagctgtttctaaaatcattggcaagcctgaatcggttaagtccccgcttcccttttccttttcatacggttgcttatttgattattgtaatgggctcttgttgttattatggcctttgactctctagtgtttgatgaaattactttctgaacccaggccctttaattctggtatcctttctgttctttatgttcttttaaatttggaaagtttgttttcttatccctggatggtttttttcaattgccaaatgcaaaaggtctcttcatgtaagtatgaagattagcatttttcgcatgatagattgattttgcagatataatatgctgatggattgttttcagggtacgacttagctcaaagtgcatatactgcaatgaaagtagtcatttatttaatactatctgttatccatttgtcagtttgatgtacatatagagagataatcctggagtaacaagtattttccttctttgttacatgtttaaattgtcacattttcaacataagatgatcgtagaacgaaatttatgacttgaaaattgatgtgttgtttgtatcttgtttagt

SEQ ID NO: 50323 - DNA, 497 bp, Ricinus communis
  Intron number 1 from transcript 28355.m000100 (locus 28355 .t000003) derived from phytozome v7.0 (chr-ID 28355; pos 2 9605 to 30101)
ttatcagtgtggaggttgtggtgccgttcttcgaggtacttttctatttcttttttctttttttcctgctcaatcgtttctttatttcttattctctttgtgatggtcttgtttgcttagtaagaaagttagggaaaagtttggtttttgatagttgattatgtaagcacaagttgaacatttcctttttctttattcatttctcaatttattataatttaatgatgggtcgtgattttctctctcaaataggttttctttcctcccattatttaaacatttaagtttgatttttttttttttaaattaaaaattcttttttaagttcattgcatttgctatcgacttgatgcaataattattggtggagcatcaatcttatatttggtaaaaaattagttttgatcttctttattaattttgtaatttagagactggaattcttatatatatgaattgcagcaaaagataaaaatccggacacagatactgtatca

SEQ ID NO: 50324 - DNA, 821 bp, Ricinus communis
  Intron number 1 from transcript 29745.m000375 (locus 29745 .t000022) derived from phytozome v7.0 (chr-ID 29745; pos 1 86960 to 187780 reverse strand)
tcaaatcgacctgtcaaggaagtaaggtctatcaggtaatctttgctattgttacaattgttattatctttccgtttgattgccgggaaagtgaagtaaaacgaaagcttgagttttgttcatatgcatctttggttgcaaatgaattgtatgcttaactatatgctccaagtttggactttgaagattaattttgcctatgagtgctccatatgaagattttttttctgttggctgatttgtctttttttcttttgtggagaaaacggatggagagtttgtgggtttggtccttatgttgccttttaaagatggaaaaataaaggtcacgtagttcaaagttgtttctttaggagtattctagttacattttaggtgttgctatttgttaaatcaagaaattagctcccaatttcccattagttcaggggcattgtggggtagctatcaagtcgtttactgctgttgctgttgttagtattactatctaaattcttagtttgtcacagttttggtgggatagctgttataggtgttggaagttatcttatatataggaggaagaaactcccttttgttacattcatggaagttttatcgataaaatcctatcttagttctgtcttcaccatcttattttcctttcttcttcttcatccttcctgtttctgtcaaattctcaggttctttaccatacattttagaggtgtcaaataattatttaaaacatgcattgttctttcacacaatcatcacaataaagctaaatgtatatcattgcctcaggccttgagaagaaacgagatagcacaagaattttg

SEQ ID NO: 50325 - DNA, 827 bp, Ricinus communis
  Intron number 1 from transcript 29742.m001434 (locus 29742 .t000070) derived from phytozome v7.0 (chr-ID 29742; pos 4 38666 to 439492 reverse strand)
aagaccttacaggtctgttgtatgtctggttgcacatgcatacatataatgctcctctataggcactttataaaatcttcctttcgcagtttctggtttttcttttttcttggctagtaaaacattgaaatctcaattttggcaggccgaatgcgtttctaccacttcctttcatttctcttccttcccacaacgcctgcatgcctcactcttgacaaatgcccgcattctttttgtttctgtgtgcattttgatttcgaaacttcttcctttcaactctttctctaagcttgcattttaaattgctgcctaattttttttttcccttctatattgctaaattctaatgtttctttatatctgtgagtgccactttgttaacatattaaactccaataattctattaaaccattagcaattttctggtgtccccagcactgcattttttagtgtctgctaccagcagaacatgaggcatcactatggctacccaactcatgaactattttgtgagattttagtaaatcttgtcaccataaactcaacaggtgatatgaacttctcaattttttttttatctgggccttcaacctttttgtttctccatccaaatcaaatgtgtcaagtggtgtaacttcttagaaacaacttgggtttttaagaagtaacatattaacggactttcacttgctattgatattaattctgttgcttcttcagaaatccaaaaagcattacttgaatattttatagctcagtaaattgaacaaagcattgatattggactacagagcacccaggaaatacagtcctcaaaccaagtttc

SEQ ID NO: 50326 - DNA, 976 bp, Ricinus communis
  Intron number 1 from transcript 29686.m000889 (locus 29686 .t000036) derived from phytozome v7.0 (chr-ID 29686; pos 3 12663 to 313638 reverse strand)
ttgttaaggagtctacaaatttcttgggtcaggtaatagattttactctctaatttaatatttgtcgagatgtatattttatccgtctttgcttttcaattgatttttaaagcatttagagtgtatcagaagtctacgaatgcaataatttaattcaattgaattctatttagtcaattctcatgtttggaaatcttttagttgctaatatttcaattcttttggcttaaaaacattatgcattttggaaggaataaaatcataccaaaaatgacatgctcttgcattgcgtatgatttattgcatacaaaatattgctctactttgacaactatggttacagtgctgtatttgcccttcatgtggattcttttgttgcgtgccatgtgtaaaaaaaaaaagatttatttgggattaatttctataaacgtagttggccaactatccctgatgttactctttgatttttagtttctttctggattttgatgtctagttctcatgttgttggtgttaaataatatcttagcttttgcctctatgcctgttactaataatttcttgacctctaaattggtgcactattaagccttaatcttaactattttaacctttagccagcttatcttcaattgttgtagaatattttaaaactaataacattttgtttttcacagtacaatacatgtgattagaaatagcatgtccctcgtaattatgcaatttccatagtttaaaatttcaaatacctcgtcaacttcttggatattagtttggaagcttgttgactcgagacaagaaataaatatggttaggttgaaggccgatatttctaagcttgctatgcattaggtattaatcattgattctgctatttggtggtgcttgattctttcacatacatgtttattataattatattttgttctttatttttctcttttgtttctgattaagcaggcaacatcaaatcatt

SEQ ID NO: 50327 - DNA, 314 bp, Ricinus communis
  Intron number 1 from transcript 29667.m000352 (locus 29667 .t000009) derived from phytozome v7.0 (chr-ID 29667; pos 2 09427 to 209740 reverse strand)
ttagaaagaatgtaaataaagttttagaaaatattggcattgataaagtttttgatataattattttattttttattttttataagattggtatgagttgtgaagtgagctctggttcttttgataaaattgaccttgttattttggaagaaacaattgttaatgctataaagtctgttgagatattgtaattgtttatttatattttcattttgtttgtcttcagttgatttttagttgatatgtggtataatttttattactttcttgtttttggagggtgatagttctggttttgttgttgatattgtaat

SEQ ID NO: 50328 - DNA, 690 bp, Ricinus communis
  Intron number 1 from transcript 29794.m003360 (locus 29794 .t000059) derived from phytozome v7.0 (chr-ID 29794; pos 3 17205 to 317894)
tcatcagacacacattcctctcccttcagactccggtatttcaacatttcttcattctttctattatcgcattgaaaaaacctaactaatttttttttaattctatccgctctcatttcacgattatttggtttttatttttctctctgtcattactgattatctaatagtttctgttccgattactttcaattgtagattataatttcgattaattctatgctttactatttcatgttttctatagattattaaatagaatctgtttccgttataagctcattccatgattttctaccctttcttttaatttttctttgtttctcatgagttacaattattaaatagaatctctttcgattataagcttcaaaacgtattaattttgtaattttcatgcgctcttatttcgtgattttctgatttgtttcctctccaattataaattgttaatacaattgtctcgattattctgtttgattatgtataaatgcaaatgaatgaatattcagaaatgtaaagttaatatctatgtgtttgtgtaattgttgtttcctgttatatatgagctctgtgtacaagcttatatactcatgacctcgaagctttattaaccctttcattctccttcctttgaccaacattatgattgttataatgttctgttaggtggcaataaacccttagatc

SEQ ID NO: 50329 - DNA, 523 bp, Ricinus communis
  Intron number 1 from transcript 27811.m000087 (locus 27811 .t000005) derived from phytozome v7.0 (chr-ID 27811; pos 3 1758 to 32280)
ctgagcgcagagtaatctctctctctctctctctctctctctctctctctctctcttaatttcaatcaatcattcagatcgctatcaagtatttatcattagaattacaattcaatgtgttatttccactttttttagagtaattttttttttattttgtcaattttaaggatatattttgaatttaaaaagaacaattagaaaaaagaagtaaaatcaggggtttagggtttgactaatttgaaatgctaatgattatatttttattactatcagtattatttctacaccatattagattctaaaatttttgggtataaaatgatataaaattttgttaaaatttaggttattcaagttctgttgattgttaaattatgtattttttgtttttaaatagaagtgttctggtgatttttacattttgtttgatgttagttaaacttcttacagtttcttttctatttgtctgttgataatggatgcagattgacttgacttcacagattgttagggttttctt

SEQ ID NO: 50330 - DNA, 664 bp, Ricinus communis
  Intron number 1 from transcript 28320.m001093 (locus 28320 .t000020) derived from phytozome v7.0 (chr-ID 28320; pos 1 15021 to 115684)
gcgaagcgttgctctcgtaatgactccttcttcctacctctctttcttttgattcttggttatttctctttagttttagctttcccttttcttctttttgagcatggcttcctttctagcaattatgactgtgtttcatcgacttgctctttctgggtactttgaattaatcttttactgttaagcatgcattatctttttatatatcatataaatcatccttttccaagttactttcttatgttggatgggtgaaagaagaggcctccttgttgaagggggaccatgatccatacaccaacggagacctttttcttttaaaaaaataaattcttttcctaattttcataactaatgatacaaaacagaaaatttaaaccaagagagtggggctaaaaaactacacaaaagagttatcaaaatggcatcatgaactattgctcatggtcaattttgatggctagcttcatgatgccatgatgtatatagtgatacttattattttcagctactgctcattatttctatgattgagtccaattatttaatcgaatctaaaaatttcttttcatataaagaaaaataagttggacaaaaattaattaaggtatgttttgatggatgaatagaaggcgtagttgctggagctaaagcagctgttgtt

SEQ ID NO: 50331 - DNA, 512 bp, Ricinus communis
  Intron number 1 from transcript 29635.m000442 (locus 29635 .t000002) derived from phytozome v7.0 (chr-ID 29635; pos 1 4597 to 15108)
caacgtggacctgttttctttcagttgtgggtgtttctgtggttatttatgtttattacatttgcataagcttttcatactcatttcttttctttatttgattttgcatgagtgaggagtgctccctgatgttgtatacatagttgtgctattattattttaatataaagaacaaggactatctttagggttttttgctacctctgcgcatgcattcatgttatattgtagctaaataaacagataaaatgttgactgtaatcttgattttttttgcatgttttgtggtcctgctaggtgatggctgatatcactgtggacttgacgattaaacatgggtggtatattagtaaggaaaaaaggctaaaatatatagaaggtgttagtgaaatagtccactatgacctagatgttgacctattatcttaccctaatgtaatgtcatatactagaagtatacagtaatttaaagaatggttaaaagttagagttttatattgagcaaaatataa

SEQ ID NO: 50332 - DNA, 974 bp, Ricinus communis
  Intron number 3 from transcript 28320.m001117 (locus 28320 .t000044) derived from phytozome v7.0 (chr-ID 28320; pos 2 53134 to 254107)
ttcttctccatcttcctttgcttgccgaagataaggtttgtcttctccttgagattcgggtttttgttaattgattcaatttttttttttggattcgtttttgtttgcttcttgaagtggctggttgtgtttgtgctatatatatagtagaaaattgcagctttggtatcttgttagcggctctttattagaattgaagttttgagggatttttgtttgtggctttggatatttgacatgcaaggacaatgagcttttgaggttgtattataatgcaatttgtattttacaatttatgtgagagtagaccacttgacttgaccaggtttgcgtagaggggtctgagtaatcttcttaagttaatatctttaatattcttgtttctctgatttgcgtgtctatatgtatttgttagctgtttgctagctccctgcacatgtactgatattaaatgtataaacttgatatatttcaaattttgtgaacaacaaatctcgagatttgtcgggctcattaaataactacctgttctatgttattctcttggggaggtgcatctaagtcttgcatctctagaaacgtcattggggcatatcaatctatacttgttattgactgattgtattgctgaattacaatgatccgacagctgatgtgctatatctgttgcagtttctaaatatttctgatttatatcaatatattcccatcatacctctaatggaggagttgattttagtaactttttagataaccttactattctttgacttctggtgaaaggcataagtctagatctctaaagcaaaaatgcaatattcataccagaatagactgaattgtaatcatattgttccttttcctgtgtgaaaactactgattttttttagttaattatcttgtagttctctatagctcttgccagacacaatgccttatttaacctttttgcctgaatctgcagaacgtgccct

SEQ ID NO: 50333 - DNA, 614 bp, Ricinus communis
  Intron number 1 from transcript 29630.m000813 (locus 29630 .t000038) derived from phytozome v7.0 (chr-ID 29630; pos 2 40878 to 241491)
tattcagctcaggaagacactcgacaaaaatcttggtaaatctaggattgcttatttgtactatcctgttgttatgttgcaattgctcatttcagtgctcaagattatgatttacagttagatttatgtttttaccgtttactttattgggttacatacatagatcagcatgtgtatatagatcatgcagtaaacaataaatacccagtccatgatctttctcatgggacgggttagcttgccttagtctatgatgggcaagaagcttagaggtggaaacataagagaacagggtaggagttgagtgggttgattattaattgtggtattgtagctcgagtttctaactcttagctgctgttgtttgaagggaagatgggatgtgctgttattcctttgacctgagttttcacttgtcagattcttttattgtgctttgatatcggttcaactacttttcaattttaatactgtttggtgttaatgcatccatgtacaaatagacttctgttttcttcaagaccatttacttctaatcacccctttgtagatgcacttattctacgtgaagattactttttcggttatatttgattaataaagtttattgctgc

SEQ ID NO: 50334 - DNA, 435 bp, Ricinus communis
  Intron number 1 from transcript 29654.m000310 (locus 29654 .t000012) derived from phytozome v7.0 (chr-ID 29654; pos 1 89404 to 189838)
ctttctctaaggttacaattttgatttattctgttaatttctctattgggtatctttttacttcatctgttctgccttaatttttatgtttcttcatttgggttatcataatttggcagttttatgtgcggtattagcttgaggttaatgttcttatgcttcaatttcatgttttgttatatgggtttattacatttatttgttttatgtttaattctatgatagacctacagtattttgctctccaattacttgcaccactttgttaagcttttccttgcaagtatccatatatggttagcttcaatttgtgttcttcgatatagggatttttgtaatattgctttttttagttctttaaattgctgtttgttgatttggttcccgtttggcatcatagggatttttggagaaggcataggaggaaaattatta

SEQ ID NO: 50335 - DNA, 507 bp, Ricinus communis
  Intron number 1 from transcript 29613.m000381 (locus 29613 .t000024) derived from phytozome v7.0 (chr-ID 29613; pos 1 62339 to 162845)
tgatcattaacctcatatcttgcagtatttctttggttcaactctaattcctctatttaatttgtgcagtttaagctatttctcattgttttattaatcttttcttaatgggattctttcattgtatagcccttaattttaaaaaattcgatcttggtgacctaaaatttagggtttatttatcatagtatttttagtatttctcgaggtcttttatgaaattgcgattcttctttatctgggtttctgaaatttttcatgaagtatgttatttagttgggttctttcagcttgtgaaaaagttgagattttgtgacttgggtttaattatttgcattggggaatcgggaatttgatatgggtttcttgaatatttgataaagcaagattttttaaatttttttctcttgttttgttcagtgccttcctgagatagtaaaagttttgatttgagtttctttaattgtgaaaaatgtagggttttgatctgtgattgttcaacttgtg

SEQ ID NO: 50336 - DNA, 457 bp, Ricinus communis
  Intron number 1 from transcript 29814.m000718 (locus 29814 .t000005) derived from phytozome v7.0 (chr-ID 29814; pos 1 6892 to 17348)
ctctcaggtccttatttttctatttttctatgcctagctacagtgcacattaactgtttgatgaatatcctctgacagtaattttttttaattatatcttcactactgaatgaattttatgatatttgaattcagaggtttacgatcatgaaagttaaaacgaaaaaaaaaagaaaagaaaagaaaaactcaatctttatatatcaaatgattgcttcgagctagaaacaatgccatttaatgaagtgttgtttatttggaacatggtgttttataactcggagggagtgttgaaagtaaaaatgaactcctgaactgctatatatatatatatatatccttggcgccttcttttattacttttgtgattaagaaaaatgttagtgggacttgagtttcatattgatctttgttccttaaagggtttactactggagctcacttgcaacccaaattt

SEQ ID NO: 50337 - DNA, 1008 bp, Ricinus communis
  Intron number 2 from transcript 29640.m000416 (locus 29640 .t000014) derived from phytozome v7.0 (chr-ID 29640; pos 7 7884 to 78891 reverse strand)
ttcactctgcattttccttgcactggctctctcaggttggtattcttgatagcctttactccttacttcgctttaaaaagaaaatttagcatatcatgtatattatatatgtatctagctttgtacatatacatatatatatatatatatatatatacttttggtgcaagttaagagtcaaatgaattatctaaattgtgctagactttgccggctttagatggtcaagaagtcaatccaaaaattatggtcgtaaattagggttaaaagaatgaataagttttggatcatcagatagatgaatgttcacgggtttgaaatatttgttgagagagtatctttttttgaagtggtgggttggtgggtgaaagaaggtctttgagagagacagttcaactgggaaagagaaatcggagcgtatgagtatgtttttgttttaagctatagttaatacccatttacgatttaatcaaggacattgctaattaagattattctcattttcaaattcataagattttcaagtgggtctgacttcatagattcattattcttcaaatcatgaactagttttcaaaaggctttttggctaatttcaaatggggaaaaaagaaaaaagcaaagcactaccacttggttttccaaggcaagcggacggctaaggttttgatgatcctttttcttttaaaggtgtttttatgcatgagaaattttaaaagtgaaaagtgggtgccaagtttaaattattaacttcttatattaagagacatataattgattactgaatgtaatcaattacattcttatttagttttattattctttgaattttattagctaactcttatctatactaaaaattcttaataatttaaaaactaatgaataatgtatcagttatatattaatttaaagacatgcatttacagaaaattaaaaattaagaaattatattaatgggcatgatacacaatatattccatggttgtataggtgccagaaagtgtg

SEQ ID NO: 50338 - DNA, 589 bp, Ricinus communis
  Intron number 1 from transcript 28327.m000372 (locus 28327 .t000023) derived from phytozome v7.0 (chr-ID 28327; pos 2 16848 to 217436 reverse strand)
aaacttcttcttgtttagcaaaagttggtttgatttgtaaagagtttctcatgatcttcagttgctgctactgttgtttttgctgtggaggtaattttgaattccctttttctcttttccctcttattttgcttttctttgcgttcttttaaagaatattttattgaatttaatgttcttctgtgtgggtttctgtttttaatatgattatagtttgtttcattatgtgttctcctttcattttgtttggataatgggtgatgcccttttagtttatatgtctttcttttgcaagaaaatagagaactcaaattgctgctatgtctttttttgagtttgtctatgttgactttgtggttttggtttgtgggagaatgtatcgtgattcttttatgtgtcaatttagttgatagacatatatttgaatgtgtgtattcagtggcaataggacctttagattaatgatgtattgtaagaggatttctgctttactaatattaggggatttgaacttaacaatgctattagtgtttttcgatcttttttgggaacagaagacgacgatccttgttggcgtgcaagtttggtg

SEQ ID NO: 50339 - DNA, 812 bp, Ricinus communis
  Intron number 2 from transcript 29737.m001221 (locus 29737 .t000015) derived from phytozome v7.0 (chr-ID 29737; pos 1 16399 to 117210)
atcccgttcgcagttcgttttcccttctcactcaggtaaaatttgccacgtgtcgatgaattagtaaagtttatattttttttctgtatctctttgatattatgaagctgtggtgctattgtttgtggaattttgataattgatactttgatttataaagtaataacttatcttttggaattgaaaactgaatcatcgagtagcttgcttggcaacatatgattttcaagacaagcaatttaaaagaatcaacaagttttggattatgatccctttatgttatttatatggttaatttggatacattagaatgctttccaggattttctggaatttatatatctactcaaatgattagcagcagctggttctatgttttacattctcaaaattttaagggcaattttgtatttttaagatgtcttaggagtcttttttattgtttttctttcttttgttagtttaaaaatcttacttgaattcttgttggcgatggtttaggacagtgaatttctttgatgtttgaattaggacaagtttttggaatcctttgtcgtaaaagcttagaattagtttggggtgtataaatacccatgcttgtattgttgtttgtccattcattgatttagattaaattacagcatttataaaactttctaagcactaaaaatccaatctaattattctttaccgcaagctgtttcacaatggtttgttaatgttccactgtgtgctttaggaaagattatatttagatgggatcttcttggtttcttggtaagttgagaaactgttatatgtgcaggttttag

SEQ ID NO: 50340 - DNA, 932 bp, Ricinus communis
  Intron number 1 from transcript 28320.m001085 (locus 28320 .t000012) derived from phytozome v7.0 (chr-ID 28320; pos 6 8397 to 69328 reverse strand)
aattttttccccaaattcaaattctctatattaaggtaaactcgctttttttccttaacaaaaagggaataattaaacttggatctgattctatactgtctctcttccgatctgactattctattcgattgatttctttctctttgtttttattaagtcgtttatgttactagatgtttttttagctttaatgagtttgaatttatcgaaatggaaagtaaactggagtctttcctcatttaggtgttagctgtttcagcttgaattgcggacacaagtcaaagtttcaatttttttaaaaaatatatcttagggtttggtctggtgctgcttttttaatttgaatatttgcagctgggttcatgtgtattatttaattttagactggtatgtattgttatcagttcaatggagcttctatctccaagttacacgatatttatacaattaatctctatctccttttgtttttctaacttttatatctctgtgaaagggattagtcggtctgtgaatgtttatgtgtatacacttgcaagcagctttagctgtagtctgttgcttagatagaaggttaacccatttgagtttgtatataaattttggtttttatttattttgtatttatcttgtttctctcattaactctatcttcccatttggagaatttctccttttagactatggttaattttgatttcttctttgcttgtttattagtgtctattttataacttttttgcgtgaggtttaaaggacttgttgatgttaaaaactctcaaagctttatgtaaatgccttcaggtgttattgatattgatatgaaatgacaatgagcttaattttgattgttcgtctcatgcataatctttatgtgctttgttagagctcaagtccttgtgttgctgtaccaatagttgtataatctcaaa

SEQ ID NO: 50341 - DNA, 185 bp, Ricinus communis
  Intron number 1 from transcript 27914.m000409 (locus 27914 .t000002) derived from phytozome v7.0 (chr-ID 27914; pos 4 2088 to 42272)
aaagtaatcacaccttcttctacttcttcttcttctctttcacatatatatataatgatctgtttgaatctgttttttgggttgtcgggttttctttactattaatattattatcacctttttctaatgattcttgaatggattggttaaatttaggagctactccaaagtcagttcttgagctt

SEQ ID NO: 50342 - DNA, 791 bp, Ricinus communis
  Intron number 1 from transcript 29728.m000834 (locus 29728 .t000040) derived from phytozome v7.0 (chr-ID 29728; pos 2 52694 to 253484 reverse strand)
tttgaagaaagctgcttcttctggtctcagggctggtaaaggattttttttcctttcctttttgtttttctggatttgtttttgtctgttatatcacgaatttcatttttttatttttcttattttcaattctgaatttctttgatacacgtgtggactggattattgttttggttgctggatcagggcaggtaatgagtatcttcagttgcgtatgtgatgatgagctgccaagaactttatcttttggtctatgatgatgggttctggctcaattctgaatttctttcttcttattttttgttttcctgttctggattaaaaaagaaaaggtggtgtcatcttgcagtcatgtaagcataatgatagccattggttttgtttgaaataagcttgtaacttttggatttgcataaactgctcagttttcttatgccttatgtatatataattagaaatgagatacttccaacagtatgagttctcaaaaatggattgttatgtattctgaatatctcattgcattcatgttctcttgttttacagtttgtgggaaaatcttgtgctctgcgactcaatataattttttttcctgcatcgtgtttgtttcttatattgaatctctttcttcttcctgaggaattgcattatgataactcttttgctgacgaagcaatccttggtgttccatattttttctgtttatgccttgatggtgattttgccggtactcttatagagtatctaaatttattgatttgttgcaggtgctgggggttattcttacctgt

SEQ ID NO: 50343 - DNA, 552 bp, Ricinus communis
  Intron number 1 from transcript 29683.m000472 (locus 29683 .t000010) derived from phytozome v7.0 (chr-ID 29683; pos 1 18384 to 118935 reverse strand)
ctagcaaggcttacaagcctcagatcatcgttaaggtacgtttggggatttgattatatattatttctttcttttcagaatttgtctgctgctctgtttattgcctttgtgttgaatgtgaacatttggtataatattggaccaagtggaattttgaattaggatagtgctgcctcatatagtataaaaagattattatgtgctggtatggtatttagtgatttatttatggattatttttaatactagatatagataattcaagttaaaaagagattaagaatttggattaggtggcgtattaaaaaaagccttgaattaagtttcagttgtctatgtaattatcttttaatttttttgatgaataattatataatatattattaacaatatagttttttttaaagtatttatccctcattggagggcattaaagcaggagcatgttttttttttttttttttttttttataaaaagaaaaggaaagaaaaacaaggaatggtaatattttatgtcattggtaaagcagaatattgtgttcgagaatttta

SEQ ID NO: 50344 - DNA, 337 bp, Ricinus communis
  Intron number 2 from transcript 29005.m000255 (locus 29005 .t000006) derived from phytozome v7.0 (chr-ID 29005; pos 4 6713 to 47049 reverse strand)
caaccattgccacccccttcttcttcttcgcaattgtaagtttttatatgttttcctttcttttcaagattttcctttttcttttcttttcttttctttttttcaaaaaaaaaaaaaacagccaaggttcttggtgctttgcagagttaagctgtaattaaccacgtgtacatgatggatttgagttttaataataattattaagcttttgcttttaacaatgtgcacatgatggagattgtatgcccctttgtttttctttttaaagagataattttgactcttccctactctgtttgtagtgggtcacctctgttttggattggagttggtgttg

SEQ ID NO: 50345 - DNA, 1016 bp, Ricinus communis
  Intron number 1 from transcript 29700.m000763 (locus 29700 .t000019) derived from phytozome v7.0 (chr-ID 29700; pos 4 61826 to 462841)
tctgaggagattgttcaggttttcttgacccacaccttgtcactattactattggctattgctgctgtgctactacccagagacctttactataaaaattatgacttgagtgcatcgaattatactaccagtagacacctcaaacaatgaacaaatgatggcttgaactcgaatgattcatgggatttataacttcattattttggatacctgatttcacctaacagtcagttgcttggaaatttgaagtttagtgagaccaattattgatttgacctgcacatcagaatggtggtggatgttgttttgtgatgggagcttaattacttgattgaagaactatattttacttgccatgaagaattgtttctccattgacagtctcatgtgaacaaaatatatttcattggctactcatttctggctgttggtgatttaattgtctatgtacctctgcaggctactctaatacctattttgctttatacctccctcattcttgcataaagaaaataagtgaacttttaggatcatctgtttgtgcagttctattttgatgtgtttcatgggggatgatgatttgaagtctgtttagaaattcatccagagatgtactgcacacatctattagtgaacataagattgagcttggtttacatatacatttctgttttacttgcaacaatggagaggttaatgtaggagatcaagcattgatgttcttgcgaattattataaaagagaacttgaatcttgcatgtctctagtagtggtttactgtctcattgggatttactaattaattgcatcaagtgatgtccataaattacttttttgtgattagtttggcaatttaggatttcagaagtgtagaacccattgaggtgcctgcttgcaataccttgtgaagacttgattattcattgtggcgagtatatttaaatagagaatgatgttaattgaaattagtgtgttgagagcctcacatattttgtttccaacacaggttgtaggtg

SEQ ID NO: 50346 - DNA, 591 bp, Ricinus communis
  Intron number 1 from transcript 29801.m003182 (locus 29801 .t000127) derived from phytozome v7.0 (chr-ID 29801; pos 7 03671 to 704261)
gtggcttggtctctttcacagaaggaagcaacagtgtaagtttttacttctcttctgttagttcttaattgtttcttttcttgatgaatttattgtgcaatctgcttagatacttttatgtaaatctttgccaattataattaggactagaagtatagtgaaactataaagcataaataggttagtaaagtgaaatctttatatgatctacaaatgacaatattgattggtattttatttttaagaagcagaaccattgggatattcttttgtgaaggttcctgcttagtgaattcatagtcattttcagtcttttgttaggcaaaacaatgaattgaccaattcttcatcaagcaagatcaatgcttgatctaattgctaaccttttaacaatttcagtaaccatcagaactcctgattttaaaattgtcactctttagtctataccccacatttggttcctatgttggcaatcaaaatgagcagagtgaatgtcatggccagaattacttttatgtaaatgaatcaagttctagcagatttacatttgttgtcatcgtaattcactctgtcaaatgtttcttgggttag

SEQ ID NO: 50347 - DNA, 164 bp, Ricinus communis
  Intron number 2 from transcript 29661.m000913 (locus 29661 .t000015) derived from phytozome v7.0 (chr-ID 29661; pos 1 79858 to 180021)
actttgatcggtttctttcaaaaagatctattgatgtaagcaacgaaaagaacactcttgtcaatttttgcataatttggttggattcttagttttttttattgctttgattaatggatgttaatggtggtgtttttttttttttttttttttttttctgaagg

SEQ ID NO: 50348 - DNA, 895 bp, Ricinus communis
  Intron number 4 from transcript 29726.m004066 (locus 29726 .t000178) derived from phytozome v7.0 (chr-ID 29726; pos 1 008593 to 1009487 reverse strand)
gttcgcctttagctgctgtgagtggttagctcaacaaaatcttgttattttcattaatagtcgatttatttacatgatgaaacaatttgtggtttacattttatgtacgtagctaaatcgataaataaacctacttacatgataagaataatatttgatctaaatttaagctgatgggtcaactaaaatattttgttttctaagcttttattatatttataaattcatgtactctcttaatatcttcttccactggctttgactattttagttgaagttggataagcagcaacccaccaaacaaagttgaaaatttaggggacaaaaataagaattcctcccttaattatacgagtgaaacagcttatttgaattttgtgttgctgaaatcaaattatataaaaatatcttcaagagcgggcaagcaaatcattggactcaactaacaaaatctacctttgataccttatcaagggttgctagtaggatctatgagagatggccattcatatattattagatctacagtatatatatattatatcagtagctagggtatgtgcctcctccttttcactagtagtgtgtgtatatctattcacgtttacaaactacacgtccccttaattgaaaattgcagatgacccatatgccaatctacaccagtcatttttcagaagggctgtaagacaggttccattttttgatggaaaacaacttgctgtgcggttgtgattgtttgcagattcatgggtccttataatttgatgtcctatacacaaacgcacatgggaaatattgaattttaatgtatgatggagatttatttcgacatgcttgaatctgatttactatttcagaaaacagtggtgacgaccaagagtgtggagtttat

SEQ ID NO: 50349 - DNA, 197 bp, Ricinus communis
  Intron number 3 from transcript 29726.m004066 (locus 29726 .t000178) derived from phytozome v7.0 (chr-ID 29726; pos 1 009602 to 1009798 reverse strand)
agggtatattttctttttcttttctttctttgtttgtcataattaagttcatattatagaaagtaatacttactaatctactatcagaaaaaccaagtacttctttcgcttcttttttattttattttttctaattaaattcaaagaagtctgcatcaaattccaggccaaaacagccattcttgttgcgctcctgg

SEQ ID NO: 50350 - DNA, 880 bp, Ricinus communis
  Intron number 2 from transcript 29625.m000694 (locus 29625 .t000021) derived from phytozome v7.0 (chr-ID 29625; pos 1 19040 to 119919 reverse strand)
cctagtgatccttatttaagggagcacctacactggtataagaggagataattaacccatgtattctttttgtgtgtcagggcttgttttcgtgctcaatatctataaatataacctaccccgtaccaaatccttttcgcaattattatgtacttgaaaagttttataagctacctggggcatggcctctacatagctggaacttttacacttaactagaataagatgctactcaatatgctcatattcacatgcaaagtttgcaatcttagagacatttccaacgcatatatgtgcactttttgcattatcctgtatatgttgcgcctacaagtaattaatgtggcatgaccctctttcttgtgaaaaatttattcccacccaagagattaaattgctacataagattttaataattttatattcttaattcactcacccatgcatgccttaatttacgttggaatatctgattaataatataggatgtccaaggatagaactcttgctagatttttcaatcaaaaaattaagaacatgaagaaattcaaaaccatcaaaaactttaagttatttggtaaaaccgtaagaatagtttgtatctgtaatattttatcttatatgatttcttttatatatataacaatgaaacttgaactaaaaccttaagtaacagcagattttgaatccatcatagtaaatacttatccgggttggggtttgcatatctaagcagttgaatgctatactatgcttctcatttacctattgaaaaacataaaatatataaaacaaaaccaaattagtatcagaatgtctaacattaaaatttgtattgaattgttttacaggctagtgaccgacattccaggaacaacag

SEQ ID NO: 50351 - DNA, 859 bp, Ricinus communis
  Intron number 1 from transcript 29609.m000587 (locus 29609 .t000014) derived from phytozome v7.0 (chr-ID 29609; pos 1 34952 to 135810)
cccattggacaaccccatacaggtttgagcttattgcagattagtttggtctttgtcatctataattatgttaacttgtggtaaagctagctaaaagtatgctgttagaaggctgaaaacatcctgattcttcatggataatgagatgatggttaacatgggtgtgtgagctttactaaaaatttcatactcaatgatatgagttcctagaataatttcagtatcatgttatgaatttgtggtggctgttgattcagaggttttctaaagtcttgtttctttttgccccagcttctatgagtgaagaaaatttgattacagttttataacagttgcaagattgacacatgattaagtaaaagcttgttaatgttgttgcttgatctttgtgtaggtttctattgtcttcagtggtaggataaggttatggaaagcttgattgctctaaaaaggggaattcaaaaggatattctcaactttttgttttcttgttggtttagaatttctaaattctattagaaatttttatctttttatcaaggtcatatgagcaccagcccatttatctactgaccaataatctaattgtcgcaattatatttgaatccagcgtagtttgcacatatgtcaagatgttattagtggtttcatgtcctacctccattatgttatgcttcattgtcaaatcttgaattttgttatgttattaatggttttatacttttgccccatttcaaatcttgaattttgttactttgttttggattgcatctgatgttgtttaaagatgtttatggtattgaccctctgtttttttctatttgcttacttcttgttattttgtgaaatatttaggggg

SEQ ID NO: 50352 - DNA, 231 bp, Ricinus communis
  Intron number 5 from transcript 29727.m000487 (locus 29727 .t000026) derived from phytozome v7.0 (chr-ID 29727; pos 1 95067 to 195297)
agacttggtagaagagaggcagacattagaaacaagtgaatataatcttttgcattttgttcctacactctatactctaatttgcttttcatagtttgatttgtgccactgttccacataatcagaacatacacgttttggtttctaacactgaaacaaataatcgcactagatacaatagccctatctcattcatctcttccgaaatgttcttgtaataacttgtgcagg

SEQ ID NO: 50353 - DNA, 974 bp, Ricinus communis
  Intron number 1 from transcript 29737.m001240 (locus 29737 .t000034) derived from phytozome v7.0 (chr-ID 29737; pos 2 84184 to 285157 reverse strand)
ctcctccgtcacatcatctgctgactatcgtgctggtacggtggtacctccctttcgcacttaatcctcgctctgttattcatttatttacttttcgtttttctaaaaaagattgtttggttcccgagaaaacgcgggaaaattcaaggaagcgtcggttcggtttacaacttaataaagaatttcgatatttaatttcaagttcttgatggaaaaaagatcaagaaatgcaagaaatatagaaagcaacgaactttgtaactattaaggagcacagtgatttatgacttttctttgttctttcattctgagtagggtaatttgttcatataattattttctgttaattaatagataattttgtaatcgatttacagttaatgattataattgggttgttcttcttgtaatctacgtttgtaaatttggtaatgtagaactgtccattatttgataatttcgtaactgacctttaatattggatgattttcttgataggttatgtgttctattatttttaaatataaatttcattaattatttccttttataaacttatttatcatcataatcatcttaaagtgtattggggctagtgaaattctagtgtattaagaaaatagaaaatctcatggagagttatcaagggcaactcagattattaataaagctacattgcatgcaggactttcttgtgagttgagggtgacaaggagttactatggcatgcaattgtgggtggaaataatggaattgataatgcagctcaattgtctgcatcactataggaattcaagctagattttagttggatttatgagagtggatttgtcttgttaagggtttcgattttcaaacatgtaattcaaaagaaatccccctttttttacctcacactacttggcttatcaccatatggcttgattctttttgtctcaggtaagatcagattaacggggactggacggatagat

SEQ ID NO: 50354 - DNA, 514 bp, Ricinus communis
  Intron number 2 from transcript 29751.m001807 (locus 29751 .t000022) derived from phytozome v7.0 (chr-ID 29751; pos 1 19356 to 119869 reverse strand)
ttactggcatgtatgtatctatggtttcttcaattcaattacctgttttttttatttgttgaatttctgtgtacattaggaacagtaatgaagcatatcttgtgaattctgtttgcacgttcagtaacttattatgtgggccttgttgtgcaaagagttaaagaaaaaatgtgcaagagttgaattcctgcaaaaatcatgtttaattatgtcatgatgtttatttctttcaaaatgcatcatctttttctgagttgttgaaagtattgagttttagcaactacaaggttcagaacgtactaaatatgattatattggattggattcttgtatttttagacttacaaaagcacactcattaaggatctaaaagaaatgaattcatgccaaaagtgatatgattttgaaataattttaatttgatcctattggactctggctaaaggtattaatttaaatagcctagagaaagaaggattatgtgataactttttccttgtttgagttaataggt

SEQ ID NO: 50355 - DNA, 584 bp, Ricinus communis
  Intron number 3 from transcript 29801.m003234 (locus 29801 .t000179) derived from phytozome v7.0 (chr-ID 29801; pos 9 50706 to 951289)
acggtagggtcttctctccttgtaaagatgattttcatgtcttctttcatcatgttgcttcttttgaaatatttgattcttttggcttcctttgttgttcattttcaaatttaaacattttataacttgctgcttttgtctttgcctatctcaaattaccaaaatttcttttggataggatttgaaagttaagaagtgctaagattggtgtttttcattgttaatcttttttctttccccaaaaactgcatcttaagaagaatacatgggagaagaattgttgctggtagatgctttcatcatgtgcttggtttattaatcatctaaatctatacgaataaaagaggtatactagcaagtatgtttctgaactttccacatgatgcttcttaatgtgttggtctatctgatcttcgattatttgcctttttcctcgacaggcattctttttatggtcaaatattatgattggcatgctggatttctttttttaatattccttggatatgtttgtttgagttaaaagatactgatgaatacttttcacagagaaagcgaaggaaagcggacgagtataatttggg

SEQ ID NO: 50356 - DNA, 310 bp, Ricinus communis
  Intron number 1 from transcript 29736.m002105 (locus 29736 .t000101) derived from phytozome v7.0 (chr-ID 29736; pos 7 16090 to 716399 reverse strand)
gctgtgtaagttccattcttcaatcctcagtgatcgtaaaattaatctctgtcggtgcccttcttaatgttctgagtatactcatatgccaattctagaaaagccgttctttgatttttgtttttggtctttagtgattgaaatatagcttaatttggatcaaaatccccacttcttaagagctagagatggatttccactatcaacttcctacttaattttatttttttttatatggcttttgtgatttgatgtttgatgttcccgatactattactacagagttgcttctgctcctggtaaggtgttg

SEQ ID NO: 50357 - DNA, 939 bp, Ricinus communis
  Intron number 1 from transcript 29586.m000607 (locus 29586 .t000012) derived from phytozome v7.0 (chr-ID 29586; pos 9 8894 to 99832)
ctgttggatttagccttcttgtgagtaatttatactcttccttctcttccttttctttcaacattttataaatgtttcttctttttagctggagagatcctttctcttttggacatcctttcattttttagttatttatttctttagttacatggtaaagagacgttagcatctatttttcttttttcctatgtagcttgtaggtaaaatagtaagcatttttttttttaatttaacaaactttttcgaattcaaataatgaatatatattaaaactttaaaatattattttgccacccataaaagatttatccgacacactttcaattaattctaaatattttgtttgaatcttttaataaattttaaaaattaaataaaaagatttgtgaaatataattttgatgaatttaaaccgatacattgttacatatagcttgatgataaaaacaaataaagtctttaaatttaatcaatataatccaaatacttgcgttggaagtgtcattgcaggttgtttcttttttatttgttttgtaaataaaacggctgtgactaaactgtcttggtaatatggcgagcaaatgaattattgagggactcttttttgggtcaatgaatatgatgatgggttgacaatggttccttatgtattaaataggtcgaagccatgtacccattaatatctcagttaaggattgggtatgggtactctttctaacccatcaaacccgaataagtattgcatgtctattttttttttttatcttttaagtcctttcagtttcaatttattaaattctcgatgattaaaaaataatttttgtatatatatgaaatgttttaccattggttaagctcatatggttttttcacagaattatttcttgttaattgaacactgagtttgtagaaatatattgtaccaaacagtcaggg

SEQ ID NO: 50358 - DNA, 971 bp, Ricinus communis
  Intron number 1 from transcript 29738.m001051 (locus 29738 .t000053) derived from phytozome v7.0 (chr-ID 29738; pos 4 64966 to 465936)
gccctgactcttctcaacggcaagtggattcttgcgtaagtttctttctttctttctttccctacttctgctgggaattttattcatttcaactttgaatgatgaaaatagagttttgacatgcataatttgatgggcagatattgcttataccagttgactattatttaggcatctttaaacatacatattccaacttctcctgttgtaatataagtgatttaaagaaaagtttttaagagccatttcttggactgacctaatagaagctttcattagtgaggagttaatggttctgaactttcacatcatgccataactttggatattatattgacaatatattatatgcttcactattttgcatactcatgttatgaaagccaacttttcctttggctaggaatcaagctgcaacacttatattttccagccacgaatcagattgatatgtcttcttgttaatcaaataagagactgtgctctaactctagaatatatatattgaatttactcttgataactgcaataaacttgtaattgctgtcttgttttctagcactctggtttttgtagctagctaactgtgtgcaagttcaatttggtcattaagatgaaatggaaattgcaaccaagtttatttgacaagcaacttaatttgtttcctcaaattagtctgatttacaaggctggcttaatgatttataaggtttgataatgtttcataatggcgtttactcttactaaaaattaacagaactagcggaagatagatgcatattttgagtttgagtttattgcacttccataacgaatcctttcctacattaagatttcttagcagaagggttaacggtaatcaatttcaatatgataggtttagtctttacaatgtctggtgattatgatcatttatgtggtgatttactactgcagatacacttctttctctggtttattcccattgttgt

SEQ ID NO: 50359 - DNA, 447 bp, Ricinus communis
  Intron number 1 from transcript 29678.m000504 (locus 29678 .t000012) derived from phytozome v7.0 (chr-ID 29678; pos 1 25709 to 126155)
ctccttcttttgtttcttcctttgaaccaggaaaggttggtccctcaccttatttactgtttttttcttttttgtgtgtgatcgtctttcttgtttttgtggaggttaatttcttgattttcttggtataatcgtccgactaactacggtcacttgagaatccaatttcatttctttgattgcatgccttataatatattggaataggattggcaagaatatatattaaaataaatggttctttttgttaattactgttccattttattcacaaaatgatggttttgtatgttggtaaggatcatgtgggggtttctatgcaagttcttttcaaaaaacttaatgaattttcagcttttgttgtttttgattgtatgtcaggcttcttctttttcttttcgttttttgtgtgatttaatgttttgcatatgcagcctcttggtggat

SEQ ID NO: 50360 - DNA, 409 bp, Ricinus communis
  Intron number 1 from transcript 29680.m001684 (locus 29680 .t000027) derived from phytozome v7.0 (chr-ID 29680; pos 1 72341 to 172749 reverse strand)
tgcttcgcggcggttctcagctgagcaagcactacgtaagtttttatttcttaaaaagtatttttctttttcaagaaaatattctgctttcaagaatccttgatttttgattccaagagtagttaaatggtttattttttatttcaagaataattatttaaaaaaaaaaatttgaagaatacttattgtttcttttgatgttaagaataaacattttcttgatgtcaagaactgtgaatttcttgatttcaacaaaagtgaatttgttgatgtcaagaacagtgattttatttatttatttcaataattagcttcctgattttgaatgcttgattatgatttcaagagtgtttaatttctttcttcaagaatgcttactctgtgttttcgtttgattaacaggacatcc

SEQ ID NO: 50361 - DNA, 692 bp, Ricinus communis
  Intron number 1 from transcript 29676.m001638 (locus 29676 .t000029) derived from phytozome v7.0 (chr-ID 29676; pos 2 14175 to 214866)
ttgtggcggttaaatatatagagcgaggtgataaggttaggaattttattaatattaatattattattatttttttaaatttataacttggttgtccttatgtatgtaatatttttattaatcgttttgaatgttaattctgtggtctgctagatttagaatgttatgtttgttcatttatagatgtaatcagtttctgaaaatttattttatttagccgttttcttttccttgtctgatgcatttaattggaaatttgattttatgttcaatcaccggcttaataaaatggacataggtaatttctaaaaaaatttcattttacaattgcaaaaaaagttcataaatagacaatagcttggcgttctaattaaatttcattaacttatataggccttgtttggcacaaatcatgtgcaagatttcagttgaatcaatttcttgcaaagtcacgtcaaatttgggatagattcaatttttattttgctgctgctgctgctgttgctgttgctgctgttgttgttgttgttgtttttctttttttttttttttaaagttgaaacgaattgaattgtagcagctatgacctttccaaacatgagaattgactaagttgaattcttgcatttttagacttcaacaagctgtggtaatgcttatagcattttgatgtggttatgtgttgcagattg

SEQ ID NO: 50362 - DNA, 686 bp, Ricinus communis
  Intron number 3 from transcript 27471.m000423 (locus 27471 .t000023) derived from phytozome v7.0 (chr-ID 27471; pos 1 60910 to 161595)
tggtattccctcctaggaaggttgacacaattaatgtataatcaatttactcatccattccaacaccagttagttcttggttggaactaatcttctaaacaatcaatttgatactttagataattagtaatcgttttcaataattattattgttttgtttttgctaatttacttccaattgtcacgttcaagttatgaatgtgctgtacattcccttgtgtcttaatgttgtcctaatcaaagtcaaggaaccgtttgtatatattttagaaacaagaacgtaggaatgtatggtggtgggaaaatgtgatctccttggcaaaagtctttgacgtgggcaaaacatgttctctggatctggacgaccattacttggataatatgttcttgtaacttatttataatactttttgttttgaaagaattacttcaaaaaaataccaaagtgaattttacttcaagaaaataagaacattgtgaaacattaattatatcattaactcgacgctaaatattaaaaaataaaaaatagaaaattaactaaagaaaatcgcatgttttgtagactagcaaaagtctaaaagaaaattttaaaatgaatcgaactgatttgatttgatttagtttgattggtttttaaatgttttgtagactcgggttaagttgtttaagaattgtaattacat

SEQ ID NO: 50363 - DNA, 875 bp, Ricinus communis
  Intron number 1 from transcript 29739.m003734 (locus 29739 .t000170) derived from phytozome v7.0 (chr-ID 29739; pos 1 073928 to 1074802 reverse strand)
tttcctctccacttcacttgctacttatcttgatagtaattctttctatctctctatccctacttcaagatattcttaggtgtatccatgttacttgtctatgtgtttataacaattagattgttatgtgttcctgtatgaaacttcgtaaagttcgaatctttttcatgttttttatttcttgtggattttgagataatgggtttcttcataattctgtgtttttattggttactgtttgatttagatattagagttttttttcatgtatcattatattttgggtcttctatagtctttacaaccagttgtggaatataatcaaaatgctgcctttcactgttcacttttcctgaggttatcttgaatttttttcctttttaaatggtagctttacattggagtgccaatatgacagcatctactaattgtgatgattttcaatgcggatgctatattttggtatgaccacagtgatctttttggaagctatactttgagatatactggaggccatgaaattgtcaaagagaaaacctttcctgggaactagcaatgtccagatgtcctatatgataaactggacagaagaatgcataggggcatctaattttccaagacctgtctagattttaaagctccttgtttcgcctgtggtgttttccatctttatggagatgcaacttgtttttggaatttggatttaaaaagactaaagagtccaggggcctttctaccatatcaatgattttaaatttttctcatccagtgagaattcatgcttaatgagggatggcagttctctctattgccagacattttaacttctcaaagttatatttcttttacagaaaaacttcttgtcttgctgcgag

SEQ ID NO: 50364 - DNA, 574 bp, Ricinus communis
  Intron number 1 from transcript 29701.m000592 (locus 29701 .t000013) derived from phytozome v7.0 (chr-ID 29701; pos 9 3100 to 93673 reverse strand)
ctcggaaggttttcttctttcttcttgctttttccgattttgtattgctcttttttctttttcattttctttttgccctgtaattaatttgatgttaatcgggaataaatgttttcctgaaatgtgtttgtcttgagtagataagttacacgagtttctgtgtagttcatcttcacgtccgtcacatcaccctttcatttcctatgatcaatactgttctatttcgtcctctctttgagtggtgggtgccactttctttccttttttattttttccccttttatctaacaaataaagttgtactgaaacagctcagaaggggaattaattaatagattaaagacatttttgaagagtcagatgatttgaagtccaatctgctgctaattagtgatctcctaacatgaaggaccttacctgtttttaattagtttttgagacatttactcaatttgttggactataaagtataaattcaaaccccaaataagtagacttgctgacttgggtattaaagaaatctaaagtttgttttagaaaattggtgaacaggctgatatattgttgcgaggat

SEQ ID NO: 50365 - DNA, 592 bp, Ricinus communis
  Intron number 2 from transcript 29701.m000597 (locus 29701 .t000018) derived from phytozome v7.0 (chr-ID 29701; pos 1 37385 to 137976)
aagaaagtgctaagaaggcaattggtttcattgaggtagttgagatgatgtaacgattttttttttcgtggtctcaaattcaatgcttgctatgtgatcatttgttgaatttctatgcattgtttggacggaagagtttcaaacaagggacgtggaatgctagttttaaaattatctttaggtcttgtttagaacaaatgttacagatcatgtgcaaaagttcaaattttggcattatttcatttttttttttcaaatgccttttttttttagttgaaagaattgaccagaattccaaacatgagaatttgactcaatagattcaattttatttaattctttcatttttagacttttcttaaacaaggtgtaattgattatattcactaatgaagattagattcatgactgtgggtaaaaaattattggatttggaagttgcaccttttgtaggtattcaaaattcatactcatgaatctaattaatcaaagaaaatccatgtattatcaatatcaagcctttccatcaattgcatgattagtgtttctttaagaaaataatggttcctattcatatattgaactgcaggcc

SEQ ID NO: 50366 - DNA, 750 bp, Ricinus communis
  Intron number 1 from transcript 29092.m000442 (locus 29092 .t000001) derived from phytozome v7.0 (chr-ID 29092; pos 6 099 to 6848)
cgggtctggtaactggcagcttcttgcttctttaggtgagttttcaagaaacccagaagttgaaaagcggaaaagaagacatctttaggtgataaagtggtatcatctatcgtttttaggcttgtctctcttatgtgcttttcaagtattgattggtcgccgtgaaaatggaggaaaagaaaagaatttttttaaaataagagctaagtatgtgtgatgatttatttattataattatccctttcttcgaatgaaataagaggcaaaagattcaaacttaccaactcttctttatttcttttcacctttttaacctactatcatctaattatgaccttgaagaacccaaaggagttgatgaattaatgctcttagaggaaataataaataaattttggggtgtaaatatactgagaaaagaaaattagggtttttattctttttggaaaaaaattgcatttgagattggggatgtcttggattgacaattacatgcacacaagaagatgataatgataataaaattttcttttctgtactttccattttttttcctttcattatggtgtgccaagccctgtagaccagcgacatattcttggctttttctagttcaaagaaaaaaagaaaggaattaaatttatttctgccttattttctttttttctttttttctattagatttatctcacattatggcatttgatctttgaaggagagttatttgcaaacacagcaggaggggacttc

SEQ ID NO: 50367 - DNA, 674 bp, Ricinus communis
  Intron number 2 from transcript 29661.m000936 (locus 29661 .t000038) derived from phytozome v7.0 (chr-ID 29661; pos 3 43267 to 343940)
tttggacgtaagtcttcattttctttttatgtctgtacaagttattttggttataaggtagtataggttctgtgcactgtatttcttactttctttttattaagaaatcgggcataattaggacattttcatgtttgtttgtttgataccataaatgcagtgtcttcatttctaataagtctttgtaataagacaagattatttattaagaagatacatataatcatccaaatggatgttatagttgaagaggaaacaatttcaaatagaattgcagagtcacatagaggtaataagaaagaccagatagggttcaggttgttgatagatcatatgccgaaacaatgtttatgttacagtattaccaagtcaaacaatttgctccatggtgccctgttagaccactcagtctatcagacaattctagggtgagggatggttactaatgtaagcgtttgtcacaacgtcctcccaaagttctatttttctctagagattaagtaatttcgttcatatgtttaaatggtaacaattcagtaccataggtttttgaattgttctttgccgttttcttgattctaatataaacattcttcttttatttgacctattttaccaataaggtactatttattgcaggcatttgattggtttcttcattttcctttccctga

SEQ ID NO: 50368 - DNA, 937 bp, Ricinus communis
  Intron number 1 from transcript 28093.m000120 (locus 28093 .t000004) derived from phytozome v7.0 (chr-ID 28093; pos 4 2944 to 43880 reverse strand)
taagctagaaagaacacttattgttaattccaaaggtatcgtttggattgggggattctaaaatctatagatttaggtaaaatttataaattttttaaattttttatttaaattaatataaaaataataaatttttgttcaaaatcaaagataatttggaataatataaatttatcaaggacaatattataataaaaagtattataataattcatcatttttttttaaaattgtggttttataattttccaccttctaggtgagaattaaaatcctcaaaaattaaaaaaatttaaaagataaatatttttgttgaaacccatggatttacagaattttttttatttgttaaataatgaatttaaattaaataaatagattttataaaattcatcggtccaaacggccttaaaatgttttcttttataatggaactgaattaattgcctacatattacattaatcgtatattacagaaaaattagatttacaatattgattgttggtataacattaaaatgtcctctttataatgggatagtcctattttacaataagctttaaattttattaattaaatataataatttttaaggattgtttcagttttattaattaatttaacattagttagagtaagatttgaaccctagtggggttgagtggtcttttattgaaggcatgatgcttaaattgggtttagtgtgtcatttgtttctttgattatgaggtgtgtcgacagtttcttactccttactaatcaatggttcttcttgtcctactttcttgcctagtaggggtcttcgacaaggtgaccctttgtctttttatttattcctaatttgtgctgaaagtttttcatctgttatttgtcattatgagagaactcatattcttcatggtattaaagttaattctcgtagttgctcacttgctc

SEQ ID NO: 50369 - DNA, 943 bp, Ricinus communis
  Intron number 1 from transcript 29801.m003176 (locus 29801 .t000121) derived from phytozome v7.0 (chr-ID 29801; pos 6 66399 to 667341)
agtataaggttttgatagttgtgattttttaaagcttttggctgatgtacagatgttgcatatatgggttggttttggattagttcttctgttaaaaagtttggatttttatttgagatggggtcgtaaagttgttacaagatgggattgtttttaaattctttttcctgggatctggtttgggagcttgcgtgactagatttagtttgatatgcatcaattcgatggctatgtaggattgactgcctcctttttttttttttttcttttttgattctggaacttcacgttcttgtatcttgcaccatcttagatttgatggaaaaggggtcttatcttttagctctgattctttttcctctccattctttaaatctattggttctttggtttaatatattgtgctattttcttgaaataggatgttgcgtggaacttttgatatccgtgtttttaactctttcagaccgtatagctcatacttttttgttaaacagattcttgaattagtatgatttcttcgaagtcagatttatttatgattctctgaagctataagctttcttcgactctttgaagctttatatctcattgcataactcttttctgtaaatggatgccaagtgatacttcgttagctgttttgagatattgcacagtatgtttctttttttaatgttcttggaagtggtgcatcgcttgaggcttttccattttttatggttttcttttgctctttcaagctgcatctcagcctgttttatatactatggaatttttagttccttttactgcagtttatgtttatgattgttagaacttatttcttaacatactttaattttggattgaaatgcaagcatgctaatttctgctccttgtctacttgttgggatctcaatgtcaagaaacaatctagagacaagataaaagatcaaagcct

SEQ ID NO: 50370 - DNA, 438 bp, Ricinus communis
  Intron number 1 from transcript 29651.m000287 (locus 29651 .t000007) derived from phytozome v7.0 (chr-ID 29651; pos 6 7670 to 68107)
gctctagctttcacttattcacgccaagatgtgagtttttctttttaattctcctattgcgatatccttttttttcataatcttgcaaattgtatatatggttaatactggctgcttagctccttgtgctgaaaccgcacaaaagaacaacttctatgacgaaaacataacttgatagtgtactaatattggcataactgagctaacagattcaattattgatgtcagattatgttaaaaatagatgatttatagttttggttttttttttttttacctcaagtaattaataaaaaatgcggagtcttattttctgttgaatttgtttatttgaaacaagtcatacctccttgtctgaatacagctatactcaaatgttgttttctcttcctgttcttgttgtttgatcagtgggtttatattatgtctgtttttcag

SEQ ID NO: 50371 - DNA, 411 bp, Ricinus communis
  Intron number 1 from transcript 29701.m000583 (locus 29701 .t000004) derived from phytozome v7.0 (chr-ID 29701; pos 1 4786 to 15196)
attccttcaatttcccaaactgaaagcaaaatgtttctcttttaaactaaacaaacccatttctcaatattccttttgcaacctcttgccttttttttttttttttttttctatctttctgttgtaactcttattcgcttgtgccagaaattgatcatttttaatgatgttataataagtgaaacccagaacaaagaaaaattgaagaatcgagtacgactctaatttcccaacaacgtgaagtttgtatttcaatgttagttcaagtatggaaaggaatggtgaattggtttgggtttttattgcgtttgattcttcagagcattagaggcataccttcaatggctcaaatgttactttcttatgttggttttagatattctgcttcttcttcttcttcttcttcttctt

SEQ ID NO: 50372 - DNA, 972 bp, Ricinus communis
  Intron number 1 from transcript 29780.m001397 (locus 29780 .t000083) derived from phytozome v7.0 (chr-ID 29780; pos 6 47900 to 648871 reverse strand)
cgttactcagagaacttcaggtattcgtcttttctctttcttgcttttctttttctttttgtttttttttttcccttgctgctagcaaagtctgatgtttggtgggaaagaaaatacgttgatttcttttttctcttcttggaaatttgctttgacactagtaatgatggaattttgggaaagtttattgttttgctctgttaaagatagagcattgattgtttctttaatatatatcatagtgggtctataagagctatcaactaggtctattttgttctcttttagtattaatagtgatctacaaattaaaacctcatctcttactgttcttaaaaatttaatttgtggaaacaaattactgttttttggggcttaattttaaaaacaagctgctcaaatttctttctttatttatatatttgttgtcaatttccaatttttttctcctattggtttagtgttttgggctggtgtgcatttcctatctcgtttgtggtttagtttgtgtttgagttagtggtttgttgaagtgaattggttatattctaaatctgttgcatataggacaatctgattgtttcagcaatttttatgggttacaaatgaaaacaaaagcattttggagttgtggaagtctggattaattctttcttctttctttatggttttatgtatcgttttatgctccagattttcttacttctttcttttctgaatttttgttattctttgattaagctactgcttaatctatctatatgtcttttaggattcagcattaattggatcaactgattgtcatattgtaataaaatcaaatatttgagataacctttcctgtcagcttcattcaaaaaagtaatagttctctatatttaattagtttccttatttccgtcaatttagagaagacttgtagtttatctttgtaatgggaccttttattattctgagagcagcaaatttgga

SEQ ID NO: 50373 - DNA, 680 bp, Ricinus communis
  Intron number 1 from transcript 28124.m000244 (locus 28124 .t000013) derived from phytozome v7.0 (chr-ID 28124; pos 6 8016 to 68695)
ctttctgttcaagcatctgcttcttctattgggtatgttcttttgcttttcttttttgggttaaaattcttgtaattcagcttctatctattgttgggtatcttctgtttttatgtggtttcagtatttttaagtattgaatgtgttcttctttgtgcaaatggaacttgggttttgtttagttggtttatgatttataacttaaatggaaagtttttatttatttattctttttttttggaatttcaattgtcaaaaatcttgtgttaattgtagttatatgactttttcaatttattaaaacgtgtggacttaggggaatgaggatcgtgcttgatcatgtcttgttattggcaaaattggaatatatttaatttcatttattatgcaggttatgtgattaaagtagattgtcaaactatgtcatgcctattgattatcaaatctgaatatcctacctgcacaatgatatggtggtggtttgttggaaaagttaattcaaagcaaagatttgatgtaccatgtaaacattattagcaaggtttatagcctaatgtcacctgcaactgtgtagatacttggtcatctaagacatttttcttctatcgggtgttatccatgtctccaaatttgtaatattgccttctttctttgtaggttgacaaagaagaaacgggtgg

SEQ ID NO: 50374 - DNA, 808 bp, Ricinus communis
  Intron number 1 from transcript 29794.m003410 (locus 29794 .t000109) derived from phytozome v7.0 (chr-ID 29794; pos 7 24679 to 725486)
aaaggttatcttgccttttcttttcttcttttttcttgcttttcttgcttttggcaggaaatcatcatgatcgttttcttgaagtgttgctttctgtttcttgtaaataaaaacaaactagggataggacatgccttcttatcttgatctttgaaattcaaaggattaaaagagaggaggaaaggaagaaggaaaacatggtagacatgtattttccaaaataaataagacccaagttagtttcagggtggtaaaaattattcctaagatcacctataggttaaactgttttaagtaaatgtaaaataaagattttcaaagattaattgcagtccaggattcaattactcactaattaaccatccatttggacttcaaattttttggattttatatggatgtgaaaccaatcatattcttttctttatcaattagttatcgatattgttcaaactttcttctacccccatatttaattttgtttattagactctatagaagaaattagcataatgtccccagattagcgtggatccttgtctattctctctgtacggccaattggtcccccttttgtcaaaatttttctcctgtactattaaccatgttgcctgtaaatcttctcctgtatataaaatctgcaaattgactctttgatgctatacacaataaaaagaaagaagaaattaaagtttctccaagttcacaaatcttaaatcttaaaatgttgaattctatctttctgattctgcaatttttgctctaaaacaaagcagagttgcaccttcagctgcaccattggttggat

SEQ ID NO: 50375 - DNA, 899 bp, Ricinus communis
  Intron number 1 from transcript 28211.m000131 (locus 28211 .t000005) derived from phytozome v7.0 (chr-ID 28211; pos 5 2249 to 53147)
aaggtattgtttttcttttttttattctttctccatgcactcatgcatgcttctctttttatttcatcttcagttcatttctttattcatgtcgttacctgatttcttgcatctgaatctttgatgttttggatggcctgatagtttgggattttttattttcttgcttctgtatctctttgtttgttctgcttttaattgatgtgttggtgcaatgtgtgtcttggaattaaattggcttattttggttttatgctagtgtttttataagatcacatcagatggggttgaaattagtcttagtatcaagaacccatgtggctaaattgtgtgatgtaattcatctttgtaattcatgtgggagccctaatgccatatctttttagggttctattttccactgtatattaatctcaagaattgtttctgtgaagactttggtcaagtaggagcttagacaagagcttaatccttctaatatgacattttgcttggggggaaaaccaatcacaaggtgacttttgtttcctatacaaattaataactactctctttttttctttttctgttgtacctacggtttaattaattgtgggattttacttctgcagttgcctctccttgtgtgcttttctttaatccctaactagggctgtacttttattgctattttgctaattactttttttctttttcttttgaccctatttatcattttttatggacattctcttacaagtgtgaaacaaggacaagagtggagttctcttagacttttggaagtgatagagtacactttggtttgctctgctgttttaaatttgatcagaattcaatattggactgctttaatgcatattacaggaaaaggttgggctgggttcatctgcagactctgg

SEQ ID NO: 50376 - DNA, 835 bp, Ricinus communis
  Intron number 1 from transcript 29634.m002100 (locus 29634 .t000046) derived from phytozome v7.0 (chr-ID 29634; pos 3 06000 to 306834)
ttgctctcaatagcctggttcgtattctctgtttcttgttgcttactttactgatttatatgaaacattggtgtttactcagaatgcatcgattctcacgctcaaatagtaaaatatatttattaattttaaataattaattttatttttaaaatatataatattcattatatatatataatatattttttaatatgtccgttgtgatgcatatattttatatgaataaaaattatttgatttaatttcttaattaaaatcattaaatatctctttttatcaaaattttatttttttataaatttgaatttttacttttaaagtttaactttttaagctcaatagataaaattgaataacttttacttatattaaatatatgtagaataatttttacttatattaaatatacatatcgtgataaataaataagtaatgtatactctgtatatacctctttgacaataaataattaaaatataattaattatttaaaattaataaatatagatcggaaaagataaaagactttctaataagagtttgacaggctaacttatagaggaaaaagaatattttttttttatattttcaactctcttggtttctttattttttgttttccttatttttactgtcaacaaagatagaaaatagagaaaagggaattaaggtttatcaattttatttcctctcttacttattttctctaatcccaaataaagatgaataaatttatatttaattactaatcaagtgcaaatcttctaatataaaactaataaaatatgtgagtacagagcaagtggcttgtacttgtatcgtttgtagctgt

SEQ ID NO: 50377 - DNA, 806 bp, Ricinus communis
  Intron number 1 from transcript 29739.m003631 (locus 29739 .t000067) derived from phytozome v7.0 (chr-ID 29739; pos 4 22855 to 423660 reverse strand)
gtaaacttgtaaacgtgagtccgctattcattctctacatgtaatatgatcaacactcaccaataatcctaggctaggttgcacgaaaactctaaatgggattatgtttctttgtcggatgcgttctaaataccgaaacttttcgaaaattcttcggacacgtttaaaaaattttagaaaatatttctaatcatttttacaattttattcattttttaaaactttaagaagttttttttttaaagatctttctatttaattggatttcctatttaaaaaagatttttacggttttttaatttattttatctttcctattatataattttcttattatataaatattcttaattcttagttgttttatattgaagaatttctatatacatgtatatttttaatatatatatatttttttgatttatagtaattatataattgtcaatatgactaattatattaagtgtgtttaatttgtatcttttattatgataaaaataataatccagtagaaaatctagaatatatatatatatatatatatatatatatatatattatatatatataatgtttccataaagtctcgtttcctagtattttagaaagtttcgtatcccctgtcgcatcgcgtttctcgtttctgttttagttcctagggcgcaaacgtaatgaaatgcaagtttgaaccctttaaccctttgcagaagaatgaaaagacaaaatatatgaaaaagaaaaggaacaaacatttaaaatacttttaacatttttgcatacacaggtggaccttgtgggaggatatt

SEQ ID NO: 50378 - DNA, 527 bp, Ricinus communis
  Intron number 1 from transcript 29986.m001615 (locus 29986 .t000031) derived from phytozome v7.0 (chr-ID 29986; pos 1 87656 to 188182 reverse strand)
gctcgtgttcaaagtgtgagtaaattcaattattccttttcggttttgtttaagctatataccatcgccatttcccatttgaattttgagtttcctgtttttcttttcttcaaattacagaagagaaatttagagcacatgtccaaaacacacggtttctcgtttttgctctgcatttgatcctaatttacatatagcttagtaattttattcctttaaagttctggttctgtaaagaagataagtaaataggtactgcagcatgaatggttcttagtaaaacaaatcctactgactaattcttcatgtcgatttttttttgtttaattgaaatttaatttcttcaagattttgtctcatctgttaggtttgaattacttattgaaaccttaattttcttggtccaaatgagctgaaactaacagcgaatgttgttaggcttgcaaatatgttcactcgcgcatgattgattgtggttatttttgaatacagaagaagaggaagtttgctgcgaagccaattgtgaa

SEQ ID NO: 50379 - DNA, 1001 bp, Ricinus communis
  Intron number 3 from transcript 29912.m005402 (locus 29912 .t000128) derived from phytozome v7.0 (chr-ID 29912; pos 6 49725 to 650725 reverse strand)
gagcaatcgtaagctattttctctcttttatcctctaattggttgttgttttttatttatttatttatttattttttaagttatagtgtttggaagttctagaaatgcaagttctcaattcaattgaattctcctgtttgagattgcggttggcaaaagcgcttttcaaatatttcttttaaaacttttttgagttctgaaaactcttctggagactcttttagggagaaataggtatattgatttttgtttctttattttctttttcttgaaagcaagtttgataaaagcaatttatattaaaaatttctaacatttaaataaaaaaattttaaaattggtttttatgacatttaacagcaatttcataccaggcttcactgccttaatctattctattctcatatttggaaaaattatggttgctaaaatttaattcttataactacaaaaaaatcatttatcattgcaaatgaaagaaatggaaagaaaagcattttgaaagaaatgaaattatgcggattcaattgaaaggaattcttgcaaatgatttatcctaaacaaggctttaatgcatggcttcttgactaaatgatatcctcttccaaaatcactttgccacttaaattgcagattatgtcattttaccatttttctaaatttctgcatccctaatgtgatggattagttcttgcatttatagagatatacagtttttgacgtgagcatgtttttgatatttaatgagttccaacttcattgcattatcagttgattttaatctgggaaagtgtatgcatgcttatttgatcatcagatttacatagattgactggatgcgttgagctctaaaatttgatttttaaagccataggtcctttaattttatgttgcttcagctttttcattaaccttgctctgtatcaactattgcatacatacttattccacaccatttaatagtttttatgttttattctgtcattttttctccttgaagg

SEQ ID NO: 50380 - DNA, 574 bp, Ricinus communis
  Intron number 1 from transcript 30068.m002552 (locus 30068 .t000042) derived from phytozome v7.0 (chr-ID 30068; pos 2 50097 to 250670)
ggagttttttggtgctttgatcaaagaaattccatgtgagttctattttatttttgttttcccaatactttaccttctttctttttagtatttttttaaaacaaacagactttttcttttggttgcctcttcaaagttttgaagcttttgccacttccagtttcagttctccttataacaaattcgtttttagtttttgctgatttattttttagctcatgctatatgcaaacttatacttgtatactaattctgtatcacgatataatgatctaaattttggatttccatttaattttcttttacttcgagcagtgacaaaaagcttaaaaattggtaaagtataacatttttaagcataacatgttgtttaacagtgtgtaaatagttttagtaaagttctatcctcatatgtacaattttgatattagttgactggctaatgcctacattatctgagatcaggttcttattcgagtaataaaattttcccttttacttctacacgataatggtttttgcttacttttaaaaattgctgtttgagatgttaccaggttgttgactgtggaag

SEQ ID NO: 50381 - DNA, 402 bp, Ricinus communis
  Intron number 1 from transcript 30138.m004042 (locus 30138 .t000216) derived from phytozome v7.0 (chr-ID 30138; pos 1 489468 to 1489869)
gaggtaatataattacccccaaagaaaagattgcacaatttatttatttgctagtatgttttatgctcgtgaattatatattttatatttgcttttggaagactagctggggaacgtttagacacatttattattgattgtaatttgtaatctaggtatttgatttatgtaattcatttcaattatgggaagaagtaaatctccatccaaaaattgctatgttcttcgttagagaatttaaagttactaatgttagcttaggtgttcaaagccagcttcttgtaggccatggtgtatggttggcatatgtgtacttcagttttttggttggtgatgatgttattgtaatgtgttgtttattatgcagagctgaagaagcagaagctttctgaaataaagact

SEQ ID NO: 50382 - DNA, 424 bp, Ricinus communis
  Intron number 2 from transcript 29864.m001437 (locus 29864 .t000013) derived from phytozome v7.0 (chr-ID 29864; pos 1 76056 to 176479 reverse strand)
tgagcaaatctgcgatattggaagattcagcaaaggtaagatttttatgtctcttttcaacttcaattttcggaatatgaatacactaagtacagtagtaactttgtacaaatcgaggcaaaaacttgagaaatgatttggctcaaattacttttttattgtctgcaaaacttgtcttttcttttgcgttgcatgctggatacttcttccaacaacttatttctggagtcagctactactgttccctagatcaaataacattttgctttttgatggatagggaaattgttctatattatttatttgttctgttctaattatatgcaacaaatatgtcatacatcaatcaacaatacttatgttttttttgttacatgtatcgattgaagaaaaagaagctatcataaaagtggaacctaatttg

SEQ ID NO: 50383 - DNA, 948 bp, Ricinus communis
  Intron number 4 from transcript 29838.m001730 (locus 29838 .t000100) derived from phytozome v7.0 (chr-ID 29838; pos 5 30764 to 531711)
aacctgataatatttcctggaacttactaaagcaggtgtgtttcctattaataaagcctggatgggctagctttatatggacgtctgacatacaacctagacagagttttatgctatggatagccctccataatagattcatgactaaatgtagaatgataaaatgggtgatggttcttaatgatcaatgtgttctttgcaatcaccagaatgaatctcataatcatttattcttttgagtgtcaagtcttgcaagtggtttggtcagctgttaaagaggctcgtgcaattaatacaatatcactaaattggagaagattattaagttggatgaccaggaaatttagcaggggattgaagatcagcatttgcagcaactgtttactttctgtggattcaaaggaaacgtgttgtgtttcagaatgaagttccttatgtgcatactgtgattaggcttattaagaatgccattcttttgatatttatttataccctataatatttgacaaattcatcaaactcttttggtgactggccaaaaaacaaagataaagtaagatcaccaacctgatggtgtgaagcttctctatttaacaagcagccatgacaagtggatacagactcatatcaagtagatataactgagaattctaatgaaaccgaaaaggctttggtacattcacattggcaagtgtttggactgccaaacaaatgaactattaatggaacattgtagttttacttagatcttgtaatgaatatcaagatgagaattccaagtgtttgaaccttataggtccgttcttaatgtacttacatcgttcaacaacttcctgcaatttacattctgaagaaatgcttggactccacgttcttgcccactttattagattgttaatggtgttttttaaaactcctggaccttgtccgatgatcagtggctcattg

SEQ ID NO: 50384 - DNA, 349 bp, Ricinus communis
  Intron number 1 from transcript 29917.m001985 (locus 29917 .t000054) derived from phytozome v7.0 (chr-ID 29917; pos 3 26609 to 326957)
gcttggtgaaattgtcactactatccctaccatcggtgagcttttatgctttgttaattcagtatttgaggaattcacaaattaattatctttatttctcctctggaaagtctaaaatctcaagatttctatttgagcctattgtaatttgcgtttgaatttaattcctgcaaatggtttgttccaaacaaggaattcttagttatatcacactctaggatttttccttaaatgcgggcaatctggatttctttatatgcacttcttttatcaaaattgcatccaatatgatcttatttttttcatttgatatttataactaaattgattttcttctttgcaggattta

SEQ ID NO: 50385 - DNA, 860 bp, Ricinus communis
  Intron number 2 from transcript 29917.m001985 (locus 29917 .t000054) derived from phytozome v7.0 (chr-ID 29917; pos 3 27006 to 327865)
ttggtggtcaagacaaggtatgctcgtctacccctaatacataataataaaaagggaaaaagaagaaggcaaaataaaataaaaggacaaaaacctttatgctactagggtactcgtatgttaaaattttgcatatcctcgaaatctatctgaacacgcctttgatttccttccatgattactgaacgtgagtactgcttctgtacttcagtaatgaaatattcaacttgagggattgctttgtcaatatgtgtgtaggttttcaggatatttcttgatcttttctattgtttgtctgatgataaaccttacaattatattggaactggtagtcccttgagaattttgttttagtgttgaaaatggcatcttagttggaagatactgtgtatacctccttgatttggttaagctcttaatttaaagatgattgaaattttctgcctgaaagctttttctttatttcgcctcgagtaaaacaggaagaggcatttttttttcttaacaatactatccagcatgcatcaagagtagagattcttgaaattgccagaagtggtcttgaatttaggttatactgatttaaattattagcatgatattgtttgtttttggagcattgagaaaaattgaaactcggatttagcattttgcaaaaacaaatgagattacactctttggagaactgatggcacgacttgcactggcttatgaaagagcatactccatatgtttttggtatttttgcttcacgttacaatcttctatttacttggtttctattgtatctgaatatgatatatttattttgttttacaagtacagatccgccctttgtggaggcattacttccaaaacac

SEQ ID NO: 50386 - DNA, 923 bp, Ricinus communis
  Intron number 1 from transcript 30138.m004021 (locus 30138 .t000195) derived from phytozome v7.0 (chr-ID 30138; pos 1 344413 to 1345335)
aacctgcagaatcccactacccaccttgtccccatgtatgcactaacaccacctatctactatatacttctcttctgtttctcctttagtgattctttttcttttttcttttctttgcttctatgcagaaagtgtcattctttttctcttcctgttatttttatttttccattaaatttttctagcttaaataactatgaattgcagcagaagaaccacgtatatctttcttgtttaattactttttccaaaaaaatcacttgtgttatgggcatctcttctcttgctgctacactttgggtttcttcatattcttcttatcaggctatttcatcatcccatgagtttctttttcaggtctaaaactaccctttcttttttaagctttcctcaaatttacttccatatcttagcttgtgattcttttcagcagagctctctttgttctctctctctttcttggcttctgttcttcttttattcaccttgaacatgcattcgaattttcttccctttctttgaatttttttccttttccctttctggtttgcttatgcatgtgaacatacaaaaacttattgtaaaagacccatttattagtagaaaattatcattcttttaccatttacaaaaactaaaaaattccctctataacaatccttctttaatatcttctcctctttgcttgtgtttccttatgtatctatctatgtcttctattttatgcgtttttagcttaatgttcttgttagtgaatgctttaagttttctgttcaatcattttcttgcttgtcggcatgaactatctaacaaaaaagatttaatgattttaaagacctttcacctaaagtctatgtaaaaatcttcttgctaattacctctaatactaatcataaaactgtgttgataattcaggccaaatc

SEQ ID NO: 50387 - DNA, 749 bp, Ricinus communis
  Intron number 1 from transcript 29848.m004635 (locus 29848 .t000191) derived from phytozome v7.0 (chr-ID 29848; pos 1 072582 to 1073330)
gaaggtaatatcctttttcttctttttacatatgcattattgttttgaagcgaagcgattttcaaattaatttctcaggattttgatgggttcttgttagtagattagaatataaagagatctaatttgattcctatgtgttcttttagtacaataaacatgttgttttggattttaaaacatcagaaaatttaagcccttgttttgggaagtcaattctgtttagtcaattctcatgtttggatacaattcaattctttcaacttcagaaaaattaattgtgccaaattgacatgattttgcaagaactcaattcttttaaacacgtgcgcctaatttattccaacagaggccttaaagatttccaatttgagaaggaattgcaatgtgattttccaatcagcgaggttcctaatgttgtctgcataataatgctctgtagagggtattagacttaaatgttccatattgttttctcataatatacaccaatggagacagtagctgaagaaacaaagatgggtcgctccctccttctgcatttctgctatccttctacatgcttgattacttaaatcaaatcttatatgtatgaaattcgagctgtgtggaatgctactatttatcttcagaaagaaaattatcaaataatttatcacacgtgattattaatttaaattaaaatttaatttgtgctttggttgtaatgcgcaggagctacaagacagggtgaaaaaggccaaggattc

SEQ ID NO: 50388 - DNA, 725 bp, Ricinus communis
  Intron number 1 from transcript 29929.m004576 (locus 29929 .t000079) derived from phytozome v7.0 (chr-ID 29929; pos 4 84989 to 485713 reverse strand)
cagcaatcattcgatccagtaagtccccaaacttttttcttttcctcctctcctgctgtgtataaagcaaacgtatatttatacttcaagtttcttagtctcggttgtagaggatctgcctttgaccgcatcaggaagtggattgaagtcgcaaatgcggtcactgatcttcaagcaattatactaattgcagcaaaatcaaaagagtgatgatcatgatatacatgttggtaggacctattatgggaggtcccaccaacaaatatcattacccaaatcaaaatctaatggctaaccatattatcctcttcgatgtgtgcctgcagaacatgtttttaagattaaagatttggttgtcaacattattgcttgctgcctgctgcttcacaagttctgttgcttccattttagaagtgtgtttatgtttggctcccttggaataggtaaaagtttatcccctttatttcatggttactccttgaattactagttctaaactctgccttcttaatttgtgtttttgctttttctctttttcaatctttagcatatagcactagagaatctttttccctctaggggggatactcgtttattcattcagtatcggaccatccatagcagtcatagcaaagtctcttcttgtcaaactcatcaatactttctctaaaataaaactatgtgaaccaaattacaacagatcttttacctttcctttagatttc

SEQ ID NO: 50389 - DNA, 295 bp, Ricinus communis
  Intron number 1 from transcript 30008.m000786 (locus 30008 .t000002) derived from phytozome v7.0 (chr-ID 30008; pos 5 722 to 6016 reverse strand)
caaccctggaaactgataaaaagagtatgtcaatggatttaaaaatgtaatatagttgttatatattattaattgaagttttctgcaggtgccaccaaataactttgagcataaagttctttacttttgttttgttttttactgttttatgtattgtgttatatgtagtttgaaatgtattcttccattcaactcgctataaatgagcagcaaaaatttcatggtctggaattcatttctcagagtagttgaatctttctgcatttgcaggtgaaggaaattgaacaagaagcat

SEQ ID NO: 50390 - DNA, 578 bp, Ricinus communis
  Intron number 3 from transcript 29889.m003402 (locus 29889 .t000168) derived from phytozome v7.0 (chr-ID 29889; pos 8 89806 to 890383)
ctcaccttgattcgggtaattctcaagattctgccaaactgaattgtattgctgtagttgttgtattggcataatcttcccccataagttattgaacttttttcttatttctgtacattgttttacaatgttaaaacacaactgatttacaactctttgagtttctgtaactgttttccccttcgcttactgtccttttcgtgccaagttgcatctgcatttcttgctgaatttggctatatagtctgcctcacttcttttatttgtattgctttatctacccatctttcctgtttagccaccctgcaaatgcattacttcttatgagttgtctttctcattacccatccgtccttttaacagggtctgctgatatattacctgcaaaacatgttccattaaatggggattatgagaatgatttttaagcatcaattgagtttatttctttaggtgcaaaccttaagttacttttgtggttgtgtgccttgtgttttgccaagggacttcacccgatttcaatttctctggtcatgaattggtagcatggtgacatgatatatgtactgcaggaacaa

SEQ ID NO: 50391 - DNA, 515 bp, Ricinus communis
  Intron number 1 from transcript 29842.m003569 (locus 29842 .t000066) derived from phytozome v7.0 (chr-ID 29842; pos 3 22045 to 322559 reverse strand)
aagaaggtaaaaaccttttagaaagaaaaaaaaaaatcagatttggaagatattgttttctgtgttaaatcaatttatgattgaactgttgattgagctgtttctcggggcgtttggttcagctgatgtgaggagctgatagcttattttgtgtcaatcagctctattttaagtgtttggtgaactcttttaatcagcatctgattgccgaaatggagcctgaacagctgctgttcaatcatctcctttattttatccattttgattttgaagcctaaattgctctataacataaaaattcagggactaactaaaatataattaaatttaacattttatacttttatcagcaaggactgaagtttctagatgttaacagaccttaggtgttaagagtttattttgttcatgtagctaattgtatttatttcttagagaaggggttttattcattgtttattgtttctcttcattatttaggtactggctcaattaattaggtttcatccaaaagt

SEQ ID NO: 50392 - DNA, 808 bp, Ricinus communis
  Intron number 2 from transcript 30028.m000245 (locus 30028 .t000003) derived from phytozome v7.0 (chr-ID 30028; pos 4 4390 to 45197)
ggtttactttccacaagattcctcgtgtggattctgtgagtcccttgtgatcttttagtctcataactgctaattatttcccagattacaggaatgcagtgggcattttgattttcctaattatttgtgatttcagttggagtaggctggctttaaatgattgcttagccccctccccgccctatgtcatcatgttctcatatctccttaaggcttctggcagttactaatttccgtaatggttactagaagcacaaattaatactaacctgaaccattgggggtggggggagggaggggaaacactatgtgaaatcaatttgtgaggggaacaagattgaccccttcatgctttgagggtaacctcaaaaacatatgtatgtagaaaagcacaccagaactggttgattgctctagcaggctgagcagacaagaaagttgaaatattacataagcttaattgagatttcaactggttccacaaaatataatgcaatatcctatatcagctgctgatccttcatcatgtttgataaaaaatatgtaatatgcatgtgtggctgtttgttagtaactagccttctaggattttagagaaattgtaacatgcttgaactgacaatatcttgtaattatctcactcgtgaactcctacaattttaagaacacttgatttctgcatttatgttgcatgcttctgctttacattaatgttatctataccttacttcatagagaccctcttttttttttttttgtctgggagtactaggactaatttggtacaaactgcagattattttgactc

SEQ ID NO: 50393 - DNA, 581 bp, Ricinus communis
  Intron number 2 from transcript 29864.m001449 (locus 29864 .t000025) derived from phytozome v7.0 (chr-ID 29864; pos 4 13017 to 413597)
ataaagcggtaagcaaattatttgattaatgcatgagaagtgaatctccatgagataatccttaacgtatttttggcaatttaatggctttgtctagtatcctataatatgaaataattcatgatctttctggcttttgtgtttcaattggatttttgaaaagaaaagaaaaaaaattaatggctttgttaattagaatattcttttctttgttaattattatttttggataataatagttatttgcatttaatttcattttaattataattttttatttatttcatttcaatcattcaattttattttaaattacaatttattcactttgtccatacaaacttgacttttttttttaattactcttttcttattagctaataaaagttgaatgattgaaacgaaataaaataaatttttatgattaaaatgaaattaagtgcaaaatttagtgaccattttaatcatattatctcatttaacttagctcatagcttccatctgtttgttctttctaaataattaatgtttctataaatctgttcctttagtggttttacactgccattattgtgtttcag

SEQ ID NO: 50394 - DNA, 628 bp, Ricinus communis
  Intron number 2 from transcript 29841.m002833 (locus 29841 .t000097) derived from phytozome v7.0 (chr-ID 29841; pos 5 94790 to 595417)
gtggcttcaaggacatctttcaggtattaaatttttcgtgtttttcctattaattgcttcttttgttgttaattgaaatatcagagagctgataatttgaaaatggatatttctgtgttttgttttgcaagtacagattgttgaagttgctgttacagtgttactttctgtttagttgggtctgaagcagtccatttgagctacattagtggcatgtttagataacaatattcttgttccacgtttattcttgaaataattaaattagattaaagtgataatcataagagttaagcttatttcaacacgaattcaagttttttaaacataagataagaacgtcagaaaaatattgaaccttttttcttttcttttttgcttttccttttccttgtcctgttgtgcagtactttgagtagttcaaggttcggagtattttggaattttcggaaattattgagttaaatataagataagatctagactgtattttttgctaaaaagaggacttgggttgggctagaggacatacttttgttttattctgagtcaattttaattggttttcattgcagacaattccattggtttttttgttgaaatcatgcagctctaccagcagaaagta

SEQ ID NO: 50395 - DNA, 524 bp, Ricinus communis
  Intron number 1 from transcript 29908.m006164 (locus 29908 .t000215) derived from phytozome v7.0 (chr-ID 29908; pos 3 04901 to 305424 reverse strand)
gaaaggatcagcttcttgctcgattgaaggtttttctctttaacattctctgtttttctttgtttctaaagcgagttgacccggtttattcttcctaaatatttcatatcgactgaattgatccaggtttaattcgttctttcgctataatgtgctttcattttattttattttatagttctaatgatagtaattgttaatgggtattggtttggtttactgaaattgtaatcctcactttggactagttatattaatcgttacttgatcagttctttagtgtattttttctagtgattatatttggttacctccattgaaatcatattaattggaacgttaactctgttgaagaagctcaaattggaccagaggatgcaatattactgtacctcattgatcttgtgctacaattacttgctttgattgagaatggctcacttcggtgtttgtcttgctgagcgctttcaactaatctagattttggtttattgtttaggagcttcaaattgactttgtccaat

SEQ ID NO: 50396 - DNA, 422 bp, Ricinus communis
  Intron number 4 from transcript 29848.m004506 (locus 29848 .t000062) derived from phytozome v7.0 (chr-ID 29848; pos 3 47809 to 348230)
tgacgagtggacagctcaggtcagatcaagaacaggtaagaattaattagtggtgggagggcttttctctttactgcatattcaaggtggaggacctggaggttcattattagtgccggaaagcgtgtagatgcttcctgcgagatgactttataagtttcgaatttgatgttattatcttatcaaaggttctgattatgttgtgtagctgatgaaagtaagtatagtgtgcgtcgggtctctgtatgattggtggatatggaaatagttgtggtacggaattgaagcagatggatattggcaggaagaagaaaaaaaaaaagaagttacaaactaatagtgttttctggaatgctcataggataagtgtgtatgttgcgcatatgtgaattataaggaatcttgttttactgatgcagggg

SEQ ID NO: 50397 - DNA, 827 bp, Ricinus communis
  Intron number 1 from transcript 30068.m002517 (locus 30068 .t000007) derived from phytozome v7.0 (chr-ID 30068; pos 4 5220 to 46046)
aaacttgtttttcatcagagatagagaagcttaaggtgagattaatttctgttcaattcaaacttaatttcttttctaatgcgttgatacaaaattaagttttcttcttttgtatatttcttgaattgccattgatattattttacaaggaaagtcattttgtcattttgtcatactcatgattatgattatggagaaaataaaagatcagtgttacctacctattttcttcagaactattgaatatttaatttctttaaaaatgttaagcaaaaacaaataacatatgatttgattcaatgtgtataaatcaatgggatcctaatgcaagactggaatatgctagggtgtattcacgtgttaagataagattactggtggtgtactgattggctggacaataatgcaacaagttgttcttacccttagtcgtcactacttttatcttttttccttggattctgcctgcttattacaaagattgtttggtctggtccggaatggtcattctttagtatacttgtatataactttactaacatagtgggggcagtagtctggttattgataagttactgctttgttatattattattgtagaaattctttttgtacatatatatgttaaacactgaacatttataaatattatgtcatgattggccgaattggtatgttaccaaaggaggacgcaaattcaatttgcagcattaaaagattagatacttatcatataacttatgagatttaaaattcaacattaaccagaattgaatgttgatatatattagagaagtaatgagtttggaaatcatttttcacagata

SEQ ID NO: 50398 - DNA, 781 bp, Ricinus communis
  Intron number 2 from transcript 30015.m000224 (locus 30015 .t000012) derived from phytozome v7.0 (chr-ID 30015; pos 1 44274 to 145054)
gaagcggagactaagattgctggttgtgacttcttgtgagtttttcaatgctttaattaccataattttctttacaagtgcatttattaacatctacttactggaactttaaattaatgcaactgttcttcagtacccggaatatgtggatttgattgggtgttttgcttgcagaattctagtaaatgctatagatgtagcatattaatggtaagttgtaagcctggtcttcacaatctaggttgaatatcatgtttgtgtgattatgccaattacgggttctttgttgtaaaattgttcaaattatctcaaaataattattaattagttcatctctaagatgatcatacaatggtgtactgtttgtgtcagatgggtgattgtcatgttcttaaagtcaaatatagctattttgttgttaagagagatcataggtcagtgcccaagtagtatgattctttcgcaagctgtccatagatatactgatatcataccatgctgacagtaatgcagcattgaaattccattagtttgaggtctgagcagttgttggtcaatttatttggcagtatgcataagctcgttgaatagacttaaataacttatcaagttccaatttggaacattctaaccaaatttgtaattactgctttggctcaaataatttccttcaaaacaagtcactgtttggatatgccctgcgctatcaattatgttaatacttataccttgaccaatattggcagggagtctatttcatctgcagtgagttcgaaattgg

SEQ ID NO: 50399 - DNA, 652 bp, Ricinus communis
  Intron number 1 from transcript 30131.m007258 (locus 30131 .t000409) derived from phytozome v7.0 (chr-ID 30131; pos 2 508767 to 2509418 reverse strand)
caaacatcccattccaattggattctcctcctcaggtcagttttctcttctcctctcttcttctactcttttcccattaataaatattctttggttttcatttcaaaaaccaaaatccaaaatcatcgccgccggggactcccgagttcaccttttcaggtgtaaaacggcataatagtacttttagctcctgtgcttttttttttttttttttctttttcaattactgctcgtaattttagcggctccagttgtctgcctcgtgtccggtactttcggtaatcgtatttgttatttccccttttacaattataccccttatctctgcttctagaacaagtcataaaaaaaaaaaaaaaaggtacttgcagcttttcttttctaatttactcgcgtttatacgtaaatgtttaaagctgcagtaaccttttccatttctttagttttgaatagcagtaagttttttttttcaattagctacaaaacgtttggcgaacccaattaattatgaatttagctatcaattaatcacaatcaaacgcatttttgttgctatttaaataccctcaaagcctgccccttttaagtacaattaacacatgttgttttatttgcagaggcgcgtttggtaggggaagaaaaggaaaaatcc

SEQ ID NO: 50400 - DNA, 607 bp, Ricinus communis
  Intron number 1 from transcript 29908.m006131 (locus 29908 .t000182) derived from phytozome v7.0 (chr-ID 29908; pos 8 0947 to 81553)
gacaatacaaccccaactggttagcactataagattttgtggcatctatggtttgttatcaaatttgaactgaactaggtatgtatgtatgttcagacaaatccaagtattgaactatcaactatcacatttttagcactgccaataaggcaagaacttgcattcaattcataaattacatgcaacaaactataaaagcacctatttatgttcttatttttattcatttcttttcttatttttgaatctcaagtgctccaatgaatgtaggggagacaacattaacaatagagtcaacatatctttacatatgaatagtttacacacagagctctagtgaacttccttaagaaattgctcttgctgcagccctgaatactctatcaataatcttctttctcttacttcttgaacttaaaatccgtgcatgactgcattatggaaattaatttttactattatgattttcccttttactttccttttgatattagtttatttcattttttccacacctatgtttacttcattaccttaaaacaacttaaattattttttttaggttgctccaactccacaggtgcctggttctgtgcagccacctgga

SEQ ID NO: 50401 - DNA, 427 bp, Ricinus communis
  Intron number 1 from transcript 29900.m001606 (locus 29900 .t000068) derived from phytozome v7.0 (chr-ID 29900; pos 4 22962 to 423388 reverse strand)
tggcagcagcaggtagtcttttaatttgatgaaaaatgtcttgtcatttacatgtttctgcccagttgttgaatatttgagcttggtttatatttttgacttactggccaattttttgactgaattctttcttgaggaattaaatgtttttgatccatgaagtggaaattaaatcctagtatgtgtaaaataatttgtgcaaactagcaacaatgactcaatgaagacaacatacttatcctgcaaccctgcatgattttgttgagacagtgaatcttcaaattctcaatctattttcttgtgcgactgtgctaatgttgcgtgtttaatagttgttgcttcagtagtagcatatgtttattcctgctactactgatttctatctcataaaagtttgattgctttattggacaggacggatttgaat

SEQ ID NO: 50402 - DNA, 517 bp, Ricinus communis
  Intron number 1 from transcript 30075.m001148 (locus 30075 .t000015) derived from phytozome v7.0 (chr-ID 30075; pos 1 46123 to 146639)
taacgaaacaaaccacgtatgtataaatattttatattttgacattaaaatttatttaattatctacatttaataaatatagtaatttaatgtatgaatatatctagactaaaaaaaattctttcagtcctaacaaaaagaattattagtttaataaaacactcgaaatgtttcatggtcaggtttatctaagtcattttgtttaaaaaagaaattcaaaaagaaaaggacattgttttttgtgaattccctcttctctcacaaagtgttgaattagaactattaacctaacctttcacacaatattaaaaaaattggaccaaagacaacctacactatgagttgaattatcaaaacttccaaactcatatagatgtccttttatctaataaatatggttcttccctgacactatacatggtgaggtccttgagaggcaaaacttatcaacctctaagttaatactgtgttttaaatggcagagaggcaaactttattagctccctgcctcaagtgc

SEQ ID NO: 50403 - DNA, 620 bp, Ricinus communis
  Intron number 1 from transcript 30130.m000282 (locus 30130 .t000015) derived from phytozome v7.0 (chr-ID 30130; pos 1 27792 to 128411 reverse strand)
tccacaccgtttctggcaaagaatacatcactcctgtttgtatcttctcctttctctctctctaaatacactcacactttacttgctccctattttaattctccgtttggttctcgataaattgatcaactacaaaaacacaaattaagtgaattttgatagtcaaagtcaactcagctaaataacttaagctttagctcgtgtgatttcaaatacaatgaagctgttaaccaaacgcagttttaacacttcattttagtacttctttattatttaattcctcgttcgcaagtaattctcatttttcttgcaatgctgtattaaattttctcggtaaccaagaatagacatttggaactttccttttgatgaataaagtgactctttattgttctatttgtttatttattcctgtggtctataagctgaatgcgtatatctttttcggtaagaaaacacactattagcacttggattttcttatttctttctgaaggtttaaatcctatttcgtatattataatcattttgttacactgctctgttgctccgttatatatttgttttctggtatatgagatgaatgtgaagatttttgacactgtaggagcaattaagga

SEQ ID NO: 50404 - DNA, 1038 bp, Ricinus communis
  Intron number 2 from transcript 30128.m008925 (locus 30128 .t000386) derived from phytozome v7.0 (chr-ID 30128; pos 1 745032 to 1746069 reverse strand)
taaagctcaagaagattggcattccttgccaacatgtaattttctcatttctgtgaactcttttgttgttttcttgtggcctcattttgtttgtctactgtatgttagttttagatcagtgtcaaaatctcttcttcattaactatagcctataatatgaaagatgagatagttattttttctaataatttatcttgataagatactaatcatacgattgatatagctaatctttcctttgcctgattacattattcgctggttgagcaacataggatccataaatctaagggattttctatctcatttgtgaaagagtttactttagtcagactctaactgagaaattcatacttttattggcggttacatatgagccgaagatcaagtctttttgcctctactttcttttgtttgttgcaaatggaaagagtatgcatgaaatcattgtgtagttattttgttacttctatcctcatataccatgcaggttgtacttgtacccaaataaaatctgttcatgaaataccgtggttagtcctggtcaagttgtaaagtcccttataagggacatggcattgaaacatctggaataatgtaatattgtacatactgcagagcttaaattctctgtttggaggtgttagcatgtttgcagttgatttggatttgctgagaacaaaatggggttgaagtttctgaatcatcagctaaaatttgatcccagcacatgtgcattttcctattttcttgttgcaactgatatttttcttagttttgctggaaacctagtgtcagaagtttgggtagcctggtccaatttcagaattgcaactgaaaagggaattttagaactctgtcactgttgatgctttgatcaaattttgttcagaccattctaaattatgttcattttgaattggaactcaccataggactgtaggatgcatgtcatgttcattgattgcaatcaaaacatggagaattacagttactaacatgtgattttggttttgcagaggaagctgatattgaact

SEQ ID NO: 50405 - DNA, 748 bp, Ricinus communis
  Intron number 1 from transcript 30128.m008925 (locus 30128 .t000386) derived from phytozome v7.0 (chr-ID 30128; pos 1 746157 to 1746904 reverse strand)
cgtcagatttttctccaaatccccaccttacataggtattagtttcttggctcacatttcactcttgagttttatttcttattctgataggatatggaaatagattattgggttttgaagatttgggttattattaaagtcggaagctttcataagctggaataatcgctgtaaatagctagctagctgtttggtgatttggtttgtttttgttttattgtgtctgtgttgttcttgagatattggagataatgattcatacatacacatacggggggctgagtcactgtttggaacttaattcttgtctatggttatgtgctctatattaatgctggtttattttgactagttgtttttagaaaggatgttttctgctcttaagcaagatagcctacagagttaggcaatcaaccattgtgttttaaatttcatgtcccaaataatggattatatttgtctcaagtgggtttttagcaagcaaatggagaaaagaactttattttgttaaaaatagtactgaatctcaatttctagttttttatatgtttctgaagttttggaagatgtatgctcaagtggatgttttgctttatcatgtctggaaaagtaggatttagttttttctttttctgatgttttgccctcaagcagaacatttgttgtttttagtcaattagaacctggaaatgtgttttagagggtgtgattattattgcagtgaaagttggaattccagagtttctaa

SEQ ID NO: 50406 - DNA, 391 bp, Ricinus communis
  Intron number 1 from transcript 30076.m004685 (locus 30076 .t000249) derived from phytozome v7.0 (chr-ID 30076; pos 1 602667 to 1603057 reverse strand)
acaatctccattctcacaagcgttacctgagtgaggtcatttttaattttttatttcattgctcaattctctttcgctgatgggtcataatggttactgggttttcttcaaatgttttctttctttctgtttatagaacatttttcttaatttgaccgttggtaaagtttgtttcttgatagacacagaagattgttgttttgtctttttttttttttaatttcctttgtcatctaaggaccaaaaaaaggagtttctttaatcaaataattaaatttatggggatggttatcagtataatattttatttacctattctgtcttctttatatacttgcattttggtccttaatttctacaaacttcccttttctttttctttgggcagata

SEQ ID NO: 50407 - DNA, 940 bp, Ricinus communis
  Intron number 2 from transcript 30128.m008848 (locus 30128 .t000309) derived from phytozome v7.0 (chr-ID 30128; pos 1 323816 to 1324755)
tgccggctctactcctccggtatcgcccttttccggtaagcttttttctgttcttagcaattgacaattaagtccctcatttttcttgtcctaaaaaactggaggttgaggtcatctagaaagaaatatcgatgagtggaattattaggggtaactttgtcatcttgtagtgtttgtccgcttgccaataaggataattgtgaattattagtattattttattaattattatattattatttattattattatagtggtatttggataatgacattttaatatgtcgttgttgacgtgcatttttgtgcatggtttttggccagcccttaagataaccatttattcttttacctacctcttgaccaactgtggttactccagttcttaactcatgtttgcctttgccttctgcccatttcctggtctaaaaagccacttccatttttatgactatttagtcgatttgccacctcacagttaagtgccagtggaaaccagactctaaaattaaagaaaaattaagagagacggagggggtcagtatatattatttaaggtgtcaaatcatatatttttgttttcgtttagtatagtactgttatgaacatttccacaaagacgaggggccgagtaaaccctcttgtgttgaacatggcttccccccctgatagtgtggaggtaattacatgtgtgtatactttgagcttgcttaagtgcctttgagcatctcattaaaatcagtctgtgccgcgtgtaaagataaaatcaaccgcattatttacgtgttgtgcttacatggtaatttatatatagtgctgtatgtattcgctatctagcttgtttgtttcggacgatcatttgtatatatatgtgcttatggagtttgtttatgggtgttaaaaaggaggcagagagtcctttcgctttcgaagaagatcg

SEQ ID NO: 50408 - DNA, 887 bp, Ricinus communis
  Intron number 1 from transcript 29900.m001602 (locus 29900 .t000064) derived from phytozome v7.0 (chr-ID 29900; pos 4 04457 to 405343)
tacctcttctctttcactctcttcttccttctcaggtaactaattaattcttttattaattcttttttttttttttttttgtgattttggtttcggggtatctttgtttcttgatatttggtgctcgaattaccatgacttaatgattgttctttggatttacattgtgtgttctatttatcatattgttgggttttggagtttaaatagagatatggatttggcaattgggggatgttcaaagattttgattgaaattgctagttgaataatgtggcattcaatggtattaaaaggggtctattgatgtttgacgtggaaggaaatcaagtaaattttggttcttctaacaataaatttactacttaaatgctaagactaagaatgcaatccttagataggtagatgctggaaaagtttctatttctttggtacttgcagtatatcctaataaactaaacatacaaatctttgtttttagtatgagtacgtttatttttttatttttatattttattttcctttgtaatagcacattggtagattgctacttctatcaggtaagcttacttatagttagtactaacattcccttttatgagggaacacttgaacctagtaacaggatttcatttgcaatcaattatgctgctaagctactacacttgtcctcttcttgtttgagaagaaggtggtcaaacatgtgcaacggttgtagcatgattatgtgcttttctttttccctttccttttagagtttgtattactatacttgataccgttgacagcactgaagtggaaaaagtggagttaagagttccatatgcttgtaatttatgccctcctctgcaggtttatctttgggattggatctgaattccagcact

SEQ ID NO: 50409 - DNA, 822 bp, Ricinus communis
  Intron number 1 from transcript 30068.m002633 (locus 30068 .t000123) derived from phytozome v7.0 (chr-ID 30068; pos 7 52899 to 753720)
aagggctggtcttagctcagagtcaccttcttcaggtacgccacttttcttttttctttttttactttttccttcttaacagcaaaaaaagaaaaaagaagtttgtttatgcttgaacacatgttaaatttgctagtactcgttcgctagattcatatttcctcaggagccggaaagtaatttgtttttgtctggggtttctattccgttgtctaaatgacaaaaataactctgtttatgtgaagcaatgttttaaaaaaagttacttcttctctccttctttactttagtttctgctatcttctgttttgtgtttgatttaactttccagctagtgcagcttgttcttgagcattctatctgagtttggtcatgtgcaaattctaattaaatctttttttcctttttgtttatttacacttgttcaatttcttatctttcagtcgaaatttggatagactttaattattgtactgtactgtctctgcttcctttcctatatttggtaagacaagtaaaattgcttcataaagaagggaatcactaatttggaatgtgttcttcataatgtctgttggtaattgagatcatgcatcggttagtctctcaacgactttgtgggcatccttctctgtcagattgacagcaatttctttccctttttgacaaagaatgaatggtagtatagaagttgtaacctttgggtttgatgcttgttttgagcacgttgacagctagcttttagaaaatgatgaatatgttctcttatatgactatttcttttgtgttcatatatttgcagaagttcagtcacagacgaga

SEQ ID NO: 50410 - DNA, 770 bp, Ricinus communis
  Intron number 1 from transcript 29841.m002764 (locus 29841 .t000028) derived from phytozome v7.0 (chr-ID 29841; pos 2 30496 to 231265 reverse strand)
ccttttggcctcaagggaaaccaagttttaggttcgtttacttgccaatactatatgcatttcatttctcattcatcattataattactgcatctacagatactaaagtttcttttgatgggtttattgcacaatttgatggcaacaagaactcaatgtctaaaattctccatgaacgaatagaccaagtgaaatatgcatgattggccttccttttattctaaaaagaagaattatatagttgattgatgtttctctttttttaataataagtgttttagtgctataattataactaacaattttattaaccaaaaacaattatggttgacatgaatatttcaaaattaaacagattagtgaaccagttaattgattgaacattattttaattaagttaatgattttaaatattaataaaagaatttaaaaagtcaatacattgaagattttcaaagtaaacttgataataatattcacactgacgatcagtcataagttcaatctcgatctagttaatatgatagaagatttttttttataccattaatttgtttttagtattttgaaaatccataaataagagtgtggataccatagagttttaaaaaagaaatccttaattcctatgttacacaataggcatttgattatgagctgatatttcaacttctcctccttcagcagcaaaacttaatttagtgttcattcatttgtttggttttgttatacaaagtgtatctaatatcatatgtaatggcagcaaaagt

SEQ ID NO: 50411 - DNA, 710 bp, Ricinus communis
  Intron number 1 from transcript 29915.m000476 (locus 29915 .t000012) derived from phytozome v7.0 (chr-ID 29915; pos 1 20593 to 121302 reverse strand)
aggtttacccacttttcttctcgctgatcgaggaggtgatcttcttcctttattgtcttttaatgctttatgcccaaaagtttgaacttttgtgtatttgcatgtctattggtatgtctgaattcttgtggatactcatgacttgtcaggaatgaatgaagttgtaagttttagtatttagctaatttcctacaattgatttggtttcatatatgctaattattttatatatggaatatttttatgggttaggtaattttttctatttttattgttctgatattactttcaattagctgatagaggatcctagctcttctaagaaagcttctggaaaaccaaagtttcaatatttttatgggttaggtaagaggctgtttaactatgtatatttctaactttaaattagagttgggtatgggtatgggtattccacattcatgaaatttgatgccacaagtgttctttttctagtggaatttgtagctcgactggagtctgaaatacctccaagtacatgtttgctatgctgtaattgaagttataatgtgattttgatggcattatggttgtagtaaatgattaccagatgttaaacccattccaccagtagctgtaaatagtgattgaggctatggtggtttgatgatgcaacactaattatgttaaaaatctctttgtagattgttacttcacattgaaggcttgga

SEQ ID NO: 50412 - DNA, 608 bp, Ricinus communis
  Intron number 2 from transcript 29908.m006002 (locus 29908 .t000053) derived from phytozome v7.0 (chr-ID 29908; pos 9 77758 to 978365 reverse strand)
ctcgtgtaagttttagccctgatcaccccttcctagatcatgttcttgttgctttccttttgattttgtgcctgtttgtgactgagttcaaagatgctccgctgtggagttattatatttcacctgagttattggattggtgaatatcaatttcgatttatgtttattcgactttatatggatactgcttaggttaatgaagcattggcggtaaaaaagagaagaagaaaatcctaatttgaaacatatagaaaggttatgcatatggtcgtaaatcctgcattaatttttaagtgaagatgactttgaattgaaaatcgattctttattaatgctggtcaagtcactttaagaatttctagtttattggttcttataatatgggatgataatcaggcgtccatgtgtatgtgtaaacagtgttaatcgtccagatcaagcttgcaacatatttgtactgtagtgtagtattggattagcatgcggtcaaacaactatctttgtgtcacaacttcaacttgagcaaaatatactttgctaaaaacaaaattgtagtagaatttctcttcatcatacctgcttatttatttacttttgattaggtgact

SEQ ID NO: 50413 - DNA, 516 bp, Ricinus communis
  Intron number 2 from transcript 30089.m001015 (locus 30089 .t000029) derived from phytozome v7.0 (chr-ID 30089; pos 1 267645 to 1268160 reverse strand)
gtcttaggaggcgccaaacttgtttagaaagcattgtaaggttgaaatcatgaagtgaacaaaagcccatatcgtaaatttttttgaaaaagttacaaaaatattcatgcgttttgattttttataaagatatggtataaatttttgttttttcaatgttactttgtgaaaatattaaaaatacgaatttttaatttttcttataaaagaataaccacactattttttttttttttaaaaagttaaaaaaagcagtatttaattttagaatgtttctaaaaagtttccaatttttcagaacacaaagtttggaccatgaaagccaacgagtgcatccactttgcctattaatatgattccaccaaaaaccattcattaatctttaatctcttcacacaacatgatgggcaaaaggaaaactgacatagtgtaagtggggggtgtattaccgcctttaatagtacctcttttcctaaagtagttgatcacccccaactatcaaggcttagccaaaca

SEQ ID NO: 50414 - DNA, 528 bp, Ricinus communis
  Intron number 1 from transcript 29844.m003162 (locus 29844 .t000008) derived from phytozome v7.0 (chr-ID 29844; pos 4 9418 to 49945)
gaggtggtggtggtgaatctgttaggtaagcgtgtttcggtatttagtttttattttttattttttcttttatattttaccattttgtggcactgagatatttatttttgcttcaactaatggaagattttatttcataatggatgtttcatttgattttagttgtcggtatacatattattgtatgtattgaaggatttcatgcattttggatcttcaattcgttgacttttttttaagaactttatttgtttgatggcttatttcaccttacattgtctttttaacaatgtttggaaagtgaatagaaatgcaataattctattaacgcaattctcatgcttcgaaagattatagttgctagaattcaattctttcaccttgagaaaagtaatgccataattgacttgattgtgcaagaatttcaattaaatccttatacatgatttatcccgaacaaggcagataaactgagttgtgctaccttattttcttgcagctcttgtggggaacctcaggagggggagg

SEQ ID NO: 50415 - DNA, 771 bp, Ricinus communis
  Intron number 1 from transcript 29816.m000689 (locus 29816 .t000026) derived from phytozome v7.0 (chr-ID 29816; pos 3 03229 to 303999)
cggtgcgtttttgaattgaatgatcttctttactatttgatttctgagtttaaatttagatttggagattgagatctaaaacttaaactaggtctttttttattaccatttacttaagaatttatcttttggtgctgaaaaataacaataggttattatattgacttttagttcttgtctagaaatggaagtggaatgcaatttttgaaataggattcgaattttcttgtttattacataatgtatctaaaattttcatgatattcttactagaatttaagtggaaatgacatctatttaataattgagaattgatgtcacctaaattaagattaggactcatcagatttaatcatttccaattttttttttttccaagagaagcaaatacgcatttagtgcactggagcttctacttcttaactttgaaccataccaaactagcagtcctactataccattttctaagcaatttctttaggcctggcagcttgcattctcttgccaatttgtaaatatactattagtggaactgataaatatggtttttgtattccctccatgtcaagattgactttggagacttatttttggttaaagatgttttctttttgccatattcataggtcttcattttgtctaaagctgcatcgacttttatgtttgcaatctttctctatttgtgttttctctttcaagttcttctgtctgacataagtaatcaaatatgttgtagttatcaaccatttggaaaaattcatataaaggcgg

SEQ ID NO: 50416 - DNA, 633 bp, Ricinus communis
  Intron number 2 from transcript 30073.m002303 (locus 30073 .t000113) derived from phytozome v7.0 (chr-ID 30073; pos 7 67757 to 768389)
tttacccccgacttctagggcatcgaaggagttgggtaagtatgattttttccccattttttttgtctaatgtgtctctctcttctgatcttcatttgagtccagcacatcaattgtgttcatgtgtctaggtgcttaatatttttcaggaaaagtataatatttatgtcactatatgtatgatattgtcaatttatttaccctaacacttttgatacttgaaagcaatgttaaacctagtttaatgtaataggatctttgaaattttattttattcatataatatatccggataataaacactaactatcctatattttgtggttgttaaatgaattcctaagttgtttccatatatttataaattatttaataactatgactcactcaattccgataaaaaaatttaattttttttttatagaacagtattatttttaatatttactcataaattaaatttaagtttattaaatttttaaacacagcatcacatgacaatttaactattatataatgaaaagtacatcatcattctttttctatagtttgtgcacaatgatgaacaaaatgatgaaaagctcttaagttattgcagagttgtggagagcattgggggataaagtaaaagat

SEQ ID NO: 50417 - DNA, 969 bp, Ricinus communis
  Intron number 1 from transcript 29888.m000312 (locus 29888 .t000001) derived from phytozome v7.0 (chr-ID 29888; pos 1 9033 to 20001)
gagcattacggcctctcaagaggttttatcaaaaggtatacatagggttattagaatggtcatgatgtgtatgttgaaaagacaaaaagggtttctagccaaccgaatttctgagttcattctcctcgaaatgactcttctttgaggctaaaattttcccaattgatgacaacagatggtagagcttaggatagaggtaaggtacggaccctccttattgcatctgaggttgaacatgtcttaaatattcctttttttcgcactccaaagaaggactttatggcttggcatcatacaaaggatggcatatatactctatgaaatcaggttataagatagtaaaaaaaaattaaagaaggattgtccttttaggcttcttcatcgaacctgtctcaaagctactggaactggttttggcgtctgaatattcctatgaaaatccaattatttatttggacatgtttcaggtgtgtgtcctagtgagactagctttgttgcgacgtggggtttaacaagatatcatttgtaacaggtgtggtattggggaggaaagccttgagcatgctttgcgtgattgtgattgtgattgggtgaggaaatcttggcaccttaatcctttgaaattgcaaattactgagtctgatttgcttgtccctttagtaggttggctattgaagattacattaatttatagtttggagtttgttgaaacttttggtttttttgatatgatccatttatttttcacgaaatcaattggtgtttcataataaattcctaaattcttaagattatttcagaacggccaccaaatgcaaagctgattttcaaaaagcaaatgctatcccaacagattgcagacttgtcatcgtgattgtacatggaaagcacctcctattggtagtttcaaaatcaaaacagatgcatttatcatccctgatacaggtaccgacttaggaatcatcattt

SEQ ID NO: 50418 - DNA, 536 bp, Ricinus communis
  Intron number 3 from transcript 29822.m003437 (locus 29822 .t000112) derived from phytozome v7.0 (chr-ID 29822; pos 5 98714 to 599249)
gagagaagggcattctactccaaccttctgtgagtttttgcgtttctttctttattattttctagctgttttgcttgtatgccagttgtctgtttgtttaagattaatcaaatttacttcacctgctattggtatatgaaatgaggctgtctttttgccattataatttacttataatttgacctttttggtgcgccccttgttattgaagggaaggaattaaaactttagctacaatactgatttattttttttggtccagtcttacatgcatggattgtagtgtcttctctgtttctagagtgccagaaaaccaaaaagcttaagataaaaagagttgattttctgtgtggtaatagttagcaaagtaatagattgttatcatcactttttttgacactatgtagccatccttcttggtaatttatgacactagttggtaaattgatatccataagttggtaactgacatctcatgggcatgttttgttgctcttccagtttcacccaaggcacttttgcaaagacccattgct

SEQ ID NO: 50419 - DNA, 744 bp, Ricinus communis
  Intron number 1 from transcript 29912.m005415 (locus 29912 .t000141) derived from phytozome v7.0 (chr-ID 29912; pos 7 18298 to 719041)
gctggtatttgctcttcctcccgttcttttttcttttttttttttttaatttgtgtggtgatttctgtttttgcttttattaagttgtttgatttagagatggattggtctattttagttatttgggcttaggtattcaactggaaatgttaattataatgtaattgatgtatccattggtgttcggtcttttatttgttagtgaataaggtattgtaaatattatgctcaagttaacacatttctctatcggaggaaataagggtgggctttgtcttgtttatgaataaggtatgacattaagggagatctgatttgtttagcagtcctgattttgagatatgatttatcttatgtcttgcttcgcatgtgctcttgattggatgcacaatttgtctcgattaagcttcacgatttgggttactactagctcgtgtcttgaataagttttggagatgtaattggcttttttattttttgttgctttaagaagtctgtttatgtggctgtactctagtgttgagtgtaggtgttaatttttctggtactcgttattcatgattttgttatgatattactttccccttgatggtatgtgctttcgttatcaaatgcaatggggaattgcatatgtacaaatgtttgagatttacattacatcatatgctcattcacaacttgttattgtgtaaaattattttggaaacagcaccttcaagaagaaggctcccaaggccataaagg

SEQ ID NO: 50420 - DNA, 997 bp, Ricinus communis
  Intron number 1 from transcript 30024.m001724 (locus 30024 .t000041) derived from phytozome v7.0 (chr-ID 30024; pos 7 90701 to 791697)
taaaactcccgccatcagccgtttctctattcctggtaattatttttgggctgttataaattggaaccgatttctttttattttgattttattgcattttgtttgttttctttactttttacgttcgttcagtgggtgttacctagctactgatgttttattgatgtttgaatctaggattttagcccttttggtattgttgaggattatcttctgagttctaattatttcttgtatttggagtgatgtttatttttattttttgttaatttaatatttttttatgctcgataaataaaattgtttgctggtgaatcaatttcttgtttgattactttgtcaataaacttttggttgcagtagttaatttgtttaattaaatataattcattcttaatacttgtttgagctttaagttgcacaaagttgtgcagttaagatatcatcagtaaacaagtgatgcaatagcggaaattgattttatagtaatccttggagtctgtgggtctgggaagaatttatctaagctattgcgtttaggtgatataaattccttctcacggatactgtttttctgtttcatggctttgttattatagtagaagattatgtattcataattgggcgagaccatgagaacttaatgagagttgaaagaaattagtcctctgctttatttattaaaatatgggatagctagcagcatgattattgaggaaaagtgattctggatgctcttgatcattgtagacggtttgatgccactggcacaacatgcacacagacacatatatatatattgaaagttgcatgtttgaattgtgattagttcttatcattggcagcttatttgggaagataagtcttttgcactttgaactcgtaaatggaaagactgattctgatctcacacttgcttttccatccctcatgcacacattaaatgttataacatttttcgctcaaaatttattggcagtgttgccagtcatacgga

SEQ ID NO: 50421 - DNA, 843 bp, Ricinus communis
  Intron number 2 from transcript 30143.m001178 (locus 30143 .t000017) derived from phytozome v7.0 (chr-ID 30143; pos 1 35963 to 136805)
gcagtctcaatattcttgtaagtaatattggtctcaactccttctactggttaacatcactacctatccatctcacggttttgttactgttcttatgagcgacttcgttggattgcttattggtttctgcaaacttggttgcaaaatgattttagaaagtgctagttattcagatttagtgttccctattccagtgcataatcaagattttatcttaaatttttctgatcaagatcgtcaaaaatctagattttacctagaagaattggtactgaagcttcgattttgaatcataaaattgttgtaaattatgaaatggtcaaaagattctgcagccagtaaatcaatatcaaaactgagattcatcaagtacatttgcacttattctttgtttttgtatattcaaggtctcacttcccttcttaagaggccatactagttgaaaagattggaacgattctttattttatatatatatatatatacctccaggatcatcatctctagtcactatgcttgcttgaataattagcgtacagttgacaatgacctataaaagcagaatattcttctcaagataatgaggaagtagaaagttatacttgattgctcatgatcattttgcgtggcttcaaaaaccggttcttgtttttgacaaatggatgctgccttaagccaacatttgcattgcaatacaacagttttctgagtgtttattgtgtcaatatggtgcaattttggctctccaatattaaagacaattagctaaacattattcctgtgttgttctttctatcactttttgggatttaatgtgcttgatctattacatttaggtaaata

SEQ ID NO: 50422 - DNA, 353 bp, Ricinus communis
  Intron number 2 from transcript 30068.m002524 (locus 30068 .t000014) derived from phytozome v7.0 (chr-ID 30068; pos 8 8146 to 88498 reverse strand)
aagaaagtttcgaagtccttcaatttcttcttctggtaatgtgcgacaaataatgccttttgattccgcttggtttcactgaacttctttgatttggccaaattctattatttttctttttaatcttgttaaaagataagaatgatgcgctggtgaataatctaagtccgtcgaagaaaattattagaggttagttctacttatctgtttattttggcctgacatttgtatgtactatcgggattatagttaaaaagggcataagttagagaacagtttgtgtaagagcttgattgtgttattgtaataaacaatttacatttcagagttcaagaaaagtgaactgcaaagat

SEQ ID NO: 50423 - DNA, 736 bp, Ricinus communis
  Intron number 2 from transcript 29950.m001156 (locus 29950 .t000040) derived from phytozome v7.0 (chr-ID 29950; pos 2 23824 to 224559 reverse strand)
ctgctgttgctgctgtagccagtgctatccctactgtatgttgttaatctttttattattgtaaaaagctagagggtctgtgttgtgagtatcgtaaaggatttttttttatactgcccaatctcaggaggatttttacaagtataacaaatttgtttttttaaggcaaaagggtgctttatcttatgcagctggaagtaaatatttacttgaaagggatcatttttcaaggagtgattacccaatttgctgtgcgcaagcgtaacagagtggagaaagattttggtgaagatggtacattgccaagttggttgacaaccatttggataataggctttaatggagttttggcctcttaatttataataaaatctctttttttttcagttttcttccttttatatatcgaaatattaatgagttttccaaattggagattgttgattgtatagatagaggccaaatttagttttattggaggtcctgcatctattattatatcgacttcagtctctctagtcctccatattactttagtagtctggtaatcttagaagctgttctttttatttcactttgagatttgattaattaatagttggtagtgatatgttatagtgatctcaataattactatattctttgtgcaacttggagatttgaataaatggcttatgtctttcaatttgattctttctttttaatgttttcagttagttgctgttcgtgtgattcc

SEQ ID NO: 50424 - DNA, 444 bp, Ricinus communis
  Intron number 1 from transcript 29983.m003150 (locus 29983 .t000049) derived from phytozome v7.0 (chr-ID 29983; pos 2 79842 to 280285)
ccttgaaaggtttctctctcctctctctttgggaataacatttttttctttgtaattaaatgctattggataggctgatggtctttgcagagtgttagcgataccattcattattagctccataaagatattgcaaaaaagtgtacctttaaagcctttgctaccaaccattttgttctctcagcctccattttcagaactttcttaacaaaagtatggttttctaatttgaattgtgaacatgaattttctcttttttaaggtcttgaaattatgcagtctatgaagcattcattataaaagatatctgagatgtttatgcccattttttgcacatgtttctttcttcttcctttcttatgccggtagtgttttcaaaatgtagatgcttaaaattttcctgtaattgattcttccctaattacacagatactcggctgcaca

SEQ ID NO: 50425 - DNA, 840 bp, Ricinus communis
  Intron number 1 from transcript 29904.m003044 (locus 29904 .t000158) derived from phytozome v7.0 (chr-ID 29904; pos 1 047942 to 1048781 reverse strand)
ctggttttgcttttgaagcttatacaactccacctgtaattacttctcttaattactcttttttaattctttttctcttgtttctcatcaaattcagcaacctcatttgtactgcttttaagtggtgaagtagaaaattttcttaacaattatattagtaaataaataattgaaattattaagaaataacaagcgaagttcagctccataaaaatcttgctttcgactgcatagttcgattcaaaacttaatgtaaccttgtttttggaggtttctaggagtggatttaacgggaattaagaattgaaatgttccaaggagtagaattttaatttttttgtttgttacttggattctgttgttcaggaaaagattggtaggcacgaagttgatgccgcaggttgtaagactgtgtacctttcagagtatgtgatcactttgcttttaaaagttaggcttaattgttacttttcctctttgctgttgtagaatagatgcttgatacttcttcggtgaattctgatttctatggaattatgagaactgtatttttacagcaactgataatgcacggttctactctttaaatataaatgatttgtctgtttgcagggcattcgtgcgagagatatacgatggtcagttgtttataaaactgaaaaagggtttggatttgcctgcaatggatccatgggtgcgtcattattcgtttctgctcaatttttcagtattaaatgcttgcctccaatatttatttggcagaagtcgaactcagatttttgctccttgtttaatcaaattctgatgtgcttccagggaacaagtgatccttacgtgatc

SEQ ID NO: 50426 - DNA, 1020 bp, Ricinus communis
  Intron number 2 from transcript 29986.m001651 (locus 29986 .t000067) derived from phytozome v7.0 (chr-ID 29986; pos 4 32583 to 433602)
ctgcacgaaattgtagaaggaatcatttcaaatctgtaagtttcttagtttgcttaaaatgtcatttatcctaagttaattgtaaatgctcaattagaaggttgaacggtcgaatcgggagatgtagattaactatttaattttattgtgaagttggttttagagtgtaatggaaagttaatgaaggttaaacatttacatctgttaatctctaaggtgaattaactttttgttctttactttcatcaccctaagtatacttatttgtaagtattttgatagacttcttcatagtttcgttttgggagttaaagaaaaggataggaaggatgtcttagattgagaacaaagggttcttttggtttcttattttgagatttaggaaatcttggaagtgattatattatttatctagtcgtcacatgaaaatgttagaaaaggaaattgagtaaaatcatcaaactatacaaggataatttgactcagctcattattatgtcgaaaaccaaaacagtcacaacaggtgaaatcaaccttctctttcttatagcatccaattttggaaggcatataaattttgctcaatagtctcaagaagtgagtaatctgttgtatcttattttgtccgcaaacaggttttgttggtaaatatggaccatgattttctttttctctttgatccttatactcttgtcctagcaagtgttgtaaaaaatagatcagaatgcttctgtatcccaattgctgtaatccttaaaagaaataaattgcgccacttaatttgagatattagagtgccaaaattctctcaaacaggttgtatgtgcatattttaaacttattttgtaccatacgacaaaaaagcaaccatactgatgcaattctgccttagctttagttatcctatcctatcctatcctattcatcttacatttctaatgtctcattctcgaactttttataaattttatcctgggcctttttaatcgccttaccaatgttatgatgctcttttcagaa

SEQ ID NO: 50427 - DNA, 916 bp, Ricinus communis
  Intron number 1 from transcript 29908.m006179 (locus 29908 .t000230) derived from phytozome v7.0 (chr-ID 29908; pos 4 00791 to 401706 reverse strand)
ggccatctacggcgacgcgccctcatctccaagcggtactactgtatttctctcttgttattttgcttttaggttcttagttttagctcgagtgtggtgcttttagtgctttatgctgctgcctaaagttgtcgattctttaactactttgctgtatatgatgtttaactttagatttttcagacatttcctaccatcttgcaatgaaagagagagtggtttgaaagtaattagggtctgttcatacttattcaaggaagagactcttaattatttaaccttggcaatttaacagctatataattatattgatcccaatcatacatgtaatctctttttgcggaggttcagaactcgcccatccaggtggaaattttcttgcatgagcacgagctggggttacgaaagaaattctttagtaaatccgtatacaaagaagtttctaacgaaatataaaacaatggctttcggctagctcattttgcattaccatatgaattgaaaatcatttaccttgtaggatagtggccgatggtgtttaaactggtcttttctgtgtgtggattgcaacaatgaaaataccgtcttccttatatactgaagcaaatcaaatgttgctgttagggagattttaactttataatgtcaagtttcaggccaagggagtttgcaactgagaccattgcctctaagaatagtatgcgatggatagattttaataccagccaaagcatctgtgtcaatctcatgcagtttgttacatttatactagtattgatagtattaataagattaattggtttgctatcaaactcagttggcaggaaatgaaaattttctacttttatattttactttgttggagaatttcctcctttgtgattgctcttttacttctccatggttttggcaggaa

SEQ ID NO: 50428 - DNA, 547 bp, Ricinus communis
  Intron number 2 from transcript 29912.m005290 (locus 29912 .t000016) derived from phytozome v7.0 (chr-ID 29912; pos 1 23162 to 123708)
tggaagagttttatcaacagtgtgatcctggttagggttcttctgtttctacttttgtttaatcacttttatagcagttgtttttatgctgttttcttcaaaattatgaagtttcaagttgggacttgggagcttaagatttatacttaaaagtttctttcttgttatgtgggttagttttaatttgctttttcaaaagtagcaactattactttatttttagttataattattgttaactgagtaactcaaacaatgtatagcagttttcacttgacaattatgttttaccagttattttgctctactttacccatctcattgcagtttgaaccttatctgagacatttatagactttaatggagctacttcgctggcttagttgtgctatcttttttattgttttcagcacgcgtacaaaatggataatgaagtcccaaacttacacccaaatggattctttaggacagtaaactatgtttaaagttaatgtatatacaattattaacttgtgtacctgcacagagaaggagaatctttgcctat

SEQ ID NO: 50429 - DNA, 418 bp, Ricinus communis
  Intron number 2 from transcript 29913.m000156 (locus 29913 .t000007) derived from phytozome v7.0 (chr-ID 29913; pos 5 2160 to 52577 reverse strand)
aaggagatcagtgaactccaaaggaaggtcagtttctggactgcattatacctttacatgaattccttgggcacttactgggatgtatcttgcatgtttgcgtacatcatatccgtataacttaccagacatctgattaagccggataaaaaattgctgtctgcagaaactaaatgcttaaatggtgttttgataatatatctcgttgcttgagcaattttgcaagaggttgtgaattattgtaggaaaggttgaacatattatgttgtgcagattcctagcttactggaacggttttagttgttagttaaagcatgatttgtttttcccttttcttctttttgaaatggctattttgaggttctcccttttggtctttctttaacatcgttttattttcttatgaaacaagtaggga

SEQ ID NO: 50430 - DNA, 546 bp, Ricinus communis
  Intron number 2 from transcript 29844.m003359 (locus 29844 .t000205) derived from phytozome v7.0 (chr-ID 29844; pos 1 177447 to 1177992 reverse strand)
gaagtgccttcgcgcttggattacttgctgttaaggtcctttttgttagaactattttttttaataagtttccgtttcaatatttggcttttagataattgatgatctattatgggttgaagttaggtatattaatttgttcagggagtaaaagttctcatagaacttcaaatgttaggattagatatgttctttgaattattttccgtgtggaaagaaaatctgacttagtggaagatacagtttgcagttttggactatttgcttcatttcatgaaaattttagttgcagacgatatgcatttgtttcctgtttgtggcacttgtggcttttagctaatgatacatttatctacattgtgtaatataattcaatgattaaacatggcatgtaaaatttcttttgtatttgtacaatattttgatgagaaattctatgaacatagcccaattaataacctactttttatttattttccatgccattttcttacacaattgctgtcaacagccagagcatcagcagcttatagttgacataggggc

SEQ ID NO: 50431 - DNA, 378 bp, Ricinus communis
  Intron number 1 from transcript 29822.m003521 (locus 29822 .t000196) derived from phytozome v7.0 (chr-ID 29822; pos 1 210516 to 1210893 reverse strand)
tataggtaagttaattatttttgaaattactttactgttcatgtcttatatgaacatggtattgtggtcctagatgttgaacttttttgttacatatgtttttagaatttaaattctttaatctgaactaaagaaaataagaacctctgatgggaaaaattgaaagcaatgtttttatctttttatatttgttcgagagttttctataattggaaaaacaaccaagtagtgaacaattggacttcttttcagtagtttgtatgttttatggttgttgtaattttgagtgtttttagattgctggatttcttatgggaaattttgaattgtgaaataaatgcagaggggatactccattctgcagtgaagagtgcagac

SEQ ID NO: 50432 - DNA, 847 bp, Ricinus communis
  Intron number 1 from transcript 30074.m001358 (locus 30074 .t000025) derived from phytozome v7.0 (chr-ID 30074; pos 1 75864 to 176710)
gctaatctttctggttgggattcatctgttgtcaggtaaatgttgcttctgatcttgtgctttttttttggggagggaatttatggatgtggagaagtaccaaaccaatttgttaatgtagtattaatttagaaatatgaagagtgattaatgttccatttctcaattggcatatcactcttattgctttatgtacataactaagctatgattatgtgtaataactttagcttatgtggagttcctttgttttgaccaaaaaggaaaacaaaaatgatttttcctggaatatttattctatcagtgtaaccattgaattgatttagttaagtataattctttacatatagcattgatcttgtaataagatgaaagatatgttttgaattaaccataaagctgtctttatattcagagaactataatttttgcagctatatcactattattataacaagctcaaggaatacagaaaacaacaacaccaacaatgatattgataacaaaaatgtcaaatccatttgttttgtctgctaatatctcttactgcttgaaggcagccctttctcagcttcaaatctgcatttgagagttgaaatgttatcaaaatctattccaatatatgcagaagaaaatagagctcaccatctctgaaactaaatattttaacagttgtctaaaaaccgacggttatgccatcagtcctagtatcaatatgattcttttgtgcttgaatgaagaagttattttatacaaaatcttctctgtttgtccattccaacttacaactattttttcattatatatggcaggcctgactccaaacttatcactgaaattgttaatc

SEQ ID NO: 50433 - DNA, 481 bp, Ricinus communis
  Intron number 1 from transcript 29864.m001490 (locus 29864 .t000066) derived from phytozome v7.0 (chr-ID 29864; pos 9 89332 to 989812 reverse strand)
ctctttctcaacctcgcatagcttctgatattgttgtaagtgctctttcttcttttcttttattctgtttctgatactgttcttttttatcttgattctgtgcagatagggttaacgaatgcaacttttcttttattacaagaatgttgtttctgtcatttgaacattaaaattgctgcaccaagactcatcctttatgtcaaaggaacatatcagaatgaaatcccaaaaaaaaaaaagagagaagtctgcataatctaccaagttaagaaagccagaaactaatgtagtaattcttttttatttttttgatacttcagaaacttctcaagggatagaatgtcaggaaattggcatatttagaacatatggaaatgattatttatcttttttctcaaatgtatcttaaaacttattgaggtgatactgttctgtttaatcttgattctgtgcagataggactgctaattggaaacatacc

SEQ ID NO: 50434 - DNA, 1032 bp, Ricinus communis
  Intron number 1 from transcript 29851.m002387 (locus 29851 .t000029) derived from phytozome v7.0 (chr-ID 29851; pos 1 66684 to 167715)
agcgtccctgagctttgccgcaatttcaggtattacttttttaggtttatttcgagtcaatcattttacctgaaatttatgttcttgtgttttcttgtttgtgctctaattgcgggtttagataaaattagtttaaaaatgttagagctttttccattttcgtggaaattcagttgtatgtatgtattgaagaaggcgtgtgcataattgaattcagttgtatgtatgtggtcttaagcagaatataagaagaatcaagttgtattgaaatggagttgtgtgctaacagtgctgaagaagaatagccttaaatatgcaacttgtttctttaaatttctgttatcttcagcttctatacaacttgttttttgagttttcataaagtggttatggtgacagtaaacatgtttcctttgctacttcaaataaatgctatatcttacaagaaagaagtattgtagcgttagtataagtggatactactgatttaacttttgcacatatccttgtgttcttgcttttagaagttgtaagttgtatttgtctcgcatcgctaagctactggcctgttataatgtatatatgttgattgagcatcctcttccttcgagctagcttttggaacaagttctacccaagctcatttatcacttgctgccaaacatccctctgattaatttaccagtctcttatatgttctgaactttgaagtttgaatccaatgttattattaacttactaaattcttcaaattccttgttatgacatcattccactagtaaatccagcgattacttgcacccattatatactttgattatgatacgtgtaattccctatgtttgtttactattgctattatataatgatttcttggaatttgagattgggtgcatactgcatagcattgctcatgttaagctgagtgatatcatttcattttctttattctacctcttatatgattttggtaacctttttcttattctaatgattgccatttcagtgctgttgcttggtgcgggaagttga

SEQ ID NO: 50435 - DNA, 835 bp, Ricinus communis
  Intron number 1 from transcript 30068.m002617 (locus 30068 .t000107) derived from phytozome v7.0 (chr-ID 30068; pos 6 71099 to 671933 reverse strand)
ccaagagggcgaccactttctttgcaggtttcgctttcaacccttgtttttcttttctttctttctttctttccccctcttttatgcatctgcttttgattgagactttcacccttaaggttttgttccagcttgccaagggaaaaatagcaggggtttcccttctttaaggagttcatgctcatgcagacttttctttgacttgtaaaatacagtcaagaatggatcaatctctcctccttaatcatgtttgtgtccctggttgaaggaacatgcaatagtttaattagtacatacatatatttatacttaggttgcgtggttttacacaaaaataacgatgcaaagatatggaaatataataattattgtttatttctaaaagtcaataaatcggtattattaatgaaatcattaacaaaaaaatcaatccaattcaaattcttattagagcgaggtcagaaaattttcagttagtatatatatatatatttgttttttgttttttgttttttgaatcatgtctattgtgtgtatttttctttaattcctgaaaaagaaacagaaaaagataggtttcctagccttagtgaagataaggatatcctgaatcacgagttggattaatgcaaagcaacatgtcttttgttaatccctttggtttccctagcataaccgtcttaaccacataggaaaggcaaaaagaaggaacaaaacaagtgatccaaggaataaacaaaaagttaaaatttggaaacttttctgaaatcagaatctctcctgattaaaccacatacatatgctgtctttacagactgtggagctcaaagtgagg

SEQ ID NO: 50436 - DNA, 345 bp, Ricinus communis
  Intron number 1 from transcript 29932.m000613 (locus 29932 .t000024) derived from phytozome v7.0 (chr-ID 29932; pos 2 38971 to 239315 reverse strand)
attctttgcctctcaggtttgttctttaattacagtttgtactcgttattttaaattctgggttttctttggtttttgtatagaagagtaaagatttttcaacgtcatattactgcatatattggaaatgttagctcatcttcgttatttctgtttctttgttggtttatttaataaaggaaaccaaactccttgaatgtggaatatgtatgaattaacacatctcttgctgctgtgcaggggtgatttttgtccatatatttaaagctgctttctttttgttgatttgctttgattttgttagtaatttgtatttcttttaatgtttttggtatttgggcagtt

SEQ ID NO: 50437 - DNA, 977 bp, Ricinus communis
  Intron number 1 from transcript 29828.m000387 (locus 29828 .t000012) derived from phytozome v7.0 (chr-ID 29828; pos 3 00593 to 301569 reverse strand)
gaggtttgattcctttttcctctctctctctatgtagatctagctttctttttcttttgtgtgtttaattgcatcatttcattgatgatggtgttctatattctcatagcttgtgctggctgctttctcttcagtttgtttggatcctatgtgattttaaaaagaaaaacaattagcagataatgtgttacaattatttttatccattttgttcagattttattattattcgtactatttcttgctatcagaagttatgatttgtatcatctgaatttgacaattttgtatgtcacagatagatagaacgaaaggcagttcaaaccaaaaaaaaattaagaaatttattctattttatttgttttcaaaatttctcttatgcagtaggcccaagtggggcctttgaatggagaaaatttcttggtactccaggtgaatttttctgattagtgggctgtgttagtgcagtttttgtatatatatatgaaagcttattctttgtatacacagatgactaatccatataagatgatgtgatgcctattgttcttgtatgcctttttgatgcaatctatttgctttagttctttaataaaagtaatcataacctttttgaatcaataataataataataatgtgctttttattgcaattttaaggcctgctaggtagtgaatgcccccactaccatattaattaatttggagatgaatattttcacaaggttgaagcaaaatggtatttgcatccatattttgttttacttgaatatatatatatatatatatatatatatatatatatatatatatgtatgtatagtgtgtgcttgtgttgattttagatgatgtctgctggagagattgttactgtgaatgatgtttcgtatggctatttaagttaatccttttttttttctaattaaaacgaatttttgatggcaggttgcatcaccacaaaggagcttggaactgtg

SEQ ID NO: 50438 - DNA, 660 bp, Ricinus communis
  Intron number 4 from transcript 29908.m005964 (locus 29908 .t000015) derived from phytozome v7.0 (chr-ID 29908; pos 7 46422 to 747081 reverse strand)
ataacccaactgtgcaaagtgagactgatttctcaccttttttatgatgttttaattgatttctcatttgtgcaaatattatttggaaaatgggctgcatcatgatgattggaaattttggagtataatcaatgcattcatttcaaagttttcactcattacaccaaatcatatatgcttctgtgtgtgtcaatgccagatctataaatgtagaaattgagttagaaaataaacagctttcctttcttattgaagataatacagtaacatttgtagctaagctcaatctgttactgaagataacagattgtacgttgcattaatatagaaagtttgattcccattctttgcactgaattcaaactacatatgtcttctttaaaaacaaaaagatatcatataggctttgaaaagctgttcattttatgtagtcgaacctgtaatgctcatcagttaatgtacttttggtaaatttgttttgatacaatattatattaatatacttaaacgctactatgaaggatttgtatgaatcctttatctttccggatatcgtcatttctagaaaaacattgcactagaattccaatttttgatgtttgtgtatgaaattgataatgtctcttatttgtgtttgataagccttggcaaagcttggaa

SEQ ID NO: 50439 - DNA, 656 bp, Ricinus communis
  Intron number 2 from transcript 30138.m003921 (locus 30138 .t000095) derived from phytozome v7.0 (chr-ID 30138; pos 6 67548 to 668203)
cgaagacgccttctagagattctttatacaaaaaggttttttttcttttttctttttaattctttttttgaattttctgctttaagtatgtttagatattttttgcgcgttttatatggaaattttgtttgtactttttgttgctctacttgaagcctattgaggaaagaagtattaaaaaaaaaaaaatcaaaataggcttcttgaccctgtaattgcatgttgtgtaagttgagttgagtggaagtgtttgaagtttctatgacttgggtttgtcggaaacatgcagtaagcttttcaagtgataagttgatgcaagagtaacagcacaggcataatgtgaccgttactgtggcattttgaataaatttactacagatgtattttgacaaatggggatttgaaactgaaaagatttttgaatctgacattagagttgctcttcaccatttgtactcgatgtttatgataaacaaacttaaatatccaatttcactttaccatggtattaatgatcatcaatgcattttattatctaatgtaccttatcaatcttcatttggtattgccgatcgtgcatttttggtcttggtcgatcaattttctatagatggatattctaatagattctgattttgcttttcttattattgaag

SEQ ID NO: 50440 - DNA, 805 bp, Ricinus communis
  Intron number 1 from transcript 29841.m002757 (locus 29841 .t000021) derived from phytozome v7.0 (chr-ID 29841; pos 1 79619 to 180423)
gcgccattgctcaaatcaacaagtaatttcctttctttctatttgcattaataaattttgagctatttattgcactgaaagatttattaatttagtgttggatttattattattatttttaatctaaatttacatataggagggagcttaattttgtacttgtactataatttaagtgtttgtgttctgtacagtgtggctccatgtgtgatttcctccactcattatcgctagagatttggttagtttatagttggcatctattgtgtatgtctgttcattaggtttttgtcgatttctttttctttgcaatttgttggtttcaaatgcatgaataggccacatttggtaccctttgtaattgggaatggaggtttccaaatttttatttttggtacagaaagaatccaacttgcttttaaatgatacttttatacttaaatgattgaggtttagtgtaattaacatatatttttatgtataatttccttgaatatggccaaatttcacttagttatctcaaaaaagaaacttcggcatatggttccttggacttagatatccatttgcatctccatttccatttccatttccaaggaagtcacagtagttcttgataattatttttgacaatgacataatgaaagagatgatattttaatgacattggagttatggttcttagatgctttcatggtatcttataataaattcgagcatgagtttcttactcactagtttctttaatccatcttgataaaggttgccattattatatcattttttaggcacctaaacacacttg

SEQ ID NO: 50441 - DNA, 359 bp, Ricinus communis
  Intron number 1 from transcript 29904.m002975 (locus 29904 .t000089) derived from phytozome v7.0 (chr-ID 29904; pos 5 92908 to 593266)
caaactttgagaatagccaaggtattcttactgcctttatgactgcattagaaattaataatttgcatgatttatggattgttgattctggtaccactgattatatgacaaacaaagtaactacaatttctaatttttgcccaatgtcttcgcttgtttctgttgctaatgggaaaggagttcctattaagggtaagagaaaaatcaaacttgtctcatatgtcatagaagctgatgttctttatgtcccttcctttctatttcaatttctttttgttccaaagttgatatcctcccttaattgtgaagttatatttatatatgacaaggttatctttcaagacctcgtcaacaagaaa

SEQ ID NO: 50442 - DNA, 1059 bp, Ricinus communis
  Intron number 1 from transcript 30128.m009042 (locus 30128 .t000503) derived from phytozome v7.0 (chr-ID 30128; pos 2 324966 to 2326024 reverse strand)
gttttctgtggtaattctggtcttactctcgttaggtaatttttattgtttttatgctttctctatttaaattagggttttgcccattgtcatgacttttgcttattttcttataatatattaaattaagttaaatcaaatgttaagttcgtgttttgcttgcattagtttataattgggcaaagaacattagggaatataggatttgtgtatattttagcataggtaagaaacttgatcttcttattatcacttgataacttgatttatgtctgctttaaagctattgcttagtcaattttaattcttggttaaatttatgttacttcatgcattgggactgccaaatttttggtttttaacgaagcaaaatgcaaaatttatttttatttttcgatttggcactattatttgttgttgccattgccaagttggaaagttgtagaagttgcaattgcaagtctggagagattgttatactcttttctttcgtcttcatttggttgagcaaggttttcaagttgtaagctttgaattctggtggcagtgatcttgggtgtgcaattttggtgttctgttgttgatcttactttattatatgggtagacaagaaggatttcttgtttcacctccattactttagataaggaaaaaaaactgtacatggccagattttgtaattattcacagcttttactgaaccagcaagcactgttggtatggctttatggaacagttagaaaactacacataatatattgtggaattgattggatggatgaaacttttagttactcactgttgatgtagatgctgtcctcccaccccccaaaaaaagataacaatgagttgaattttatcacgagtttcactcgccgaatttttgcttcaagaggagtatgactgtaaataaaaaatggggctggtgatcgtctaagtgctaccgtaatttttttaacttcatgagatcatctctagatgtttgttgacctatattctctcccttttattatgcggagtacagatcaaagcctagtctggcagctgttgttggttgca

SEQ ID NO: 50443 - DNA, 706 bp, Ricinus communis
  Intron number 1 from transcript 29844.m003262 (locus 29844 .t000108) derived from phytozome v7.0 (chr-ID 29844; pos 6 90676 to 691381 reverse strand)
gacaatctagagatctagtgatgcatagctttctttctagtgatcgtatagtttgattgtttcatggaattgttagtcatttcttttctttcatttgtttgttccaaattggtttcttttgtacaatgatcctttgaatcttgtgtgtgcaaaatttgtctctttgaccctactcaacaataatgtgtaattggtttcagaattcgcaaattaaataaaaagaaaaagaaaatgtttgtttgtgttggatgtacatgtactctgttattttccaaacagaaactaagaatgttgctcaagaggcctaaccaccttcgcggatcctgtaatcttgttttttataggaattgtacaaaatggatctaggttctcttaaagctacagaatttgaatttgaagacatttttaatgaattttccgacatttactatccaatgtatatatttgatattgatgagttgttggtttggcttctgattgatatatttgtacatactgtaaagctatacatatattcaagtaaatggatgaaatgctgagcttttacaaagtttttcatttgtgtcgggaccaaacaaaagtacagtcaagatatgtagaaaggcagtgaaacaaaaatgcaaattcagagattgattgcttcatatatagtgcatatgtttttccttttgtattgatcatcaaatttaatttttagcagaaagaa

SEQ ID NO: 50444 - DNA, 583 bp, Ricinus communis
  Intron number 1 from transcript 30128.m008736 (locus 30128 .t000197) derived from phytozome v7.0 (chr-ID 30128; pos 7 54386 to 754968)
ctcaggtttgtaggaacatatccatttgaaagtcaattcctgctattttttatttttagaagaaaattaaaaaatttatgtacttcaaaaattatcaaaaatcttggttagcagaactggactggagggtataggtgaagatgtgtagggattcatatttgacgaatgtttcttgtttaaattctcaatgatgctagtcataactcagtcatttagaaaagccataccttgaaatatacatccacagtaatcttgtctggtggtcctaccataacaattacctccctttctgccttctatctaacaaatttctttacttgtctgtcatccctacctgttgaagctttattgattggagatgttttgaagttttatatatataaatatatataagaaaaaataaatatatatatataaaatagagcaagattttgtgtgatagtaagattttgatgttttgcttttgtattttgtacaaaataacaaatattcattggattcatggaatatatatatatatatatatatatatatatggctaaaccacattgtggttatgactacttattcaacacaatgtcag

SEQ ID NO: 50445 - DNA, 960 bp, Ricinus communis
  Intron number 1 from transcript 30128.m009008 (locus 30128 .t000469) derived from phytozome v7.0 (chr-ID 30128; pos 2 141969 to 2142928 reverse strand)
catcagtgagtttattaaactttgaaagttgcttataatcagtcaatatgatattgtttggtggtaaaggattgcagattgtaagatgttttgcttctattgcattttcaaaagatgttattttattgattacattctttacctatgtaagctaactgtattcttcacctagtatctttttttttttttaccatagtattcttcacctagtacagttaccatgtagcattttaaatgacatgctttctgtctattcttggttgcttttttgtgtaaaggtggaaagaaatgagcagttatattaggtgtgtgaaagtaaaaggagttgggtaatctctacttttacttaaaaccaagaaaataaaattctggacttacataagggtgtcaatatagagcttataacatgattggatccgattaacgtatttaaggagaattacattagccagacatagaatagagacaggataaaaggtctgtagtgtctttgaaagactattcatgctcacacaacatctatgtgaatgacactctttctactatttagttggtgattttgatattagaatgctaccaatcaaatgaagcaagcaactttcaaacttaaaaaaataaagtttttcattgtctcgttgctttttcttgttattgttaataaattatatttatctatacacacaaaaaataaaaaataaaaaacttgagttggtctttcactgaggtcctattttgttggctttactgcttcttgagtttcttgtcaaaatggacttgaaataattggtcaacatttaaatattactattcttatagatttcaggttcttgatttctgtaaagatgtgtgtcaatttttttatttttgacaaatgtaaatacgtgcctttgtctttctcaagtactattttataggcatttctccaaacagtttatcaacattcatgcagatatttcctgg

SEQ ID NO: 50446 - DNA, 967 bp, Ricinus communis
  Intron number 3 from transcript 29841.m002907 (locus 29841 .t000171) derived from phytozome v7.0 (chr-ID 29841; pos 1 091012 to 1091978)
tagtgctaaagcaagtgtggaacagaaaataggacgtaagtattggccatcttgaaaatatggcgtatctactacttatgcttgttttactagttctagcaagggaagcaatgagtacttataaaaaatacatggaaactcatcttatgggttttgactaggatgatagtgatactaaatcacatttaaatggagatccctattgtagttcctttatttcaaatgtgttctggcaaaatgattgtttgaatatggtatttgaacttatttgtatcttttgatctttaatcatcttgataaagcccagaagatgagttttataaagttaaaagggaggtacatggaacaaaggaaaccaagataagcactaagcagaatataaagacgttatatgttgctgttataagaccattgagacctaaaaactattgcaacatgggtgacacataagatcatggtatttttaagtctttagattttttaactatatgaacttgaaatgaagttactaattgttgggacgttttgaaatgtttaatattttattttatttgacatctcaggggatagcactgtttagcagattaaggagaagaatgaattacttaatttgcattatacatgtaataattaagagcttggtgatggaaaactgaatgatgagctgacaatggataaaattatctgcttaagtataatgtattgagacctgcattacacatcttttatttcttgtctttccatttgaattgccattcttgtggtcgacatttttaatgaatgctttatgaattataaaagctggtaatattcttatcttccttgcttttcactattggtaattgagtgtaattatagtctatggaactaaaatttagttacatgtaaaaacttctgatattttttgttctatattaatgttattcttatttttttccctcagttatatttaaggtatacgactcag

SEQ ID NO: 50447 - DNA, 793 bp, Ricinus communis
  Intron number 1 from transcript 29929.m004532 (locus 29929 .t000035) derived from phytozome v7.0 (chr-ID 29929; pos 2 16479 to 217271 reverse strand)
cccttctcttgttctcatcactggtgatcttacaggtatgatttatcttcctttctatttttatctgtgaaaattttctggtattaggtgatatgattgttaaagtggaaataattctcctttttttttttttttttgtattaaagaattattggaactgtatatcatggaagtggctgccatgttacttttacatttatcttctggatttgtgctacttacctgaaattcttttcatacaagcatcgatgaagttttgtttaggataattttagcctactaccgagggaccacttcaatgagaagtccagccaggttgctgaaaagtctgagtctttggccgtgagctctatgttcgctagagagatctcattgcctaaaagaagtcaaactagctacatgctataattcatttctaaacatgcatctgattttgccattctttggttcctttgaattacaatcccatattaacaataaaaataaagaacagctgccaactgtgatgataggagatcaccataactaatctccttttcccatttaacgtcatttatatatgccattatacatgccaatgaggcaagcatctatattttatatattctttttcctgtttctattgattaatatcttgccagataatataccattaaatttcaggcttgattaatcaggaaaaagcttatctttatattttagtaatatgcttctttactcactgtaaactgcctttactgctcatagtgatgactggatcgatttcaaaatatactattcttctctttatcag

SEQ ID NO: 50448 - DNA, 407 bp, Ricinus communis
  Intron number 2 from transcript 29948.m000708 (locus 29948 .t000022) derived from phytozome v7.0 (chr-ID 29948; pos 2 72710 to 273116)
ggtggcactgatgtaagtatgctacccctgttctggtttgttttgagcttgcatttgtctttatatattcactcttggagtttagtgtcattgcatttttggatttttcttgaaatgctgagtgttctgccatgactgtaactggagcctatgaattaaacccgcttgctcttcttttcccagttatgccactgccaagcttataacgtgaacttgaattatcttgaatgtgcacattgcacaataattgcatctaattggggtttggccttcagaatttatgtttcacttgcactatgcaataagggccttttgtattttcatttttatttgaagttctatatttgacaatattactgttcatgcaaccagggggataaagcacgggtgatacagactcttctttt

SEQ ID NO: 50449 - DNA, 942 bp, Ricinus communis
  Intron number 2 from transcript 29976.m000508 (locus 29976 .t000023) derived from phytozome v7.0 (chr-ID 29976; pos 4 66282 to 467223 reverse strand)
taaaaattcaaagtggcttgcagaaaatcttgagggtaagaactagtttgcacttttacccaaacccttcttttttttttttttttttttttgctttcaaattggtaaatgaacgtctcatgcattgatatgaaagcacaaaatggatcttaacacattttgagtcatcacaccacatttccaagtcagctttatgttaaattgcttcttaaggaaaaagacagatgtttagtctaaataaggacctaagatgtcatgctataaataaaacctgtagaggctaatggtcatcctggattttacatttctaagattctgatttcaataaaggagagagagcaaatcaaaatgtaggcagttcgtggaccatcctgcaattggatattcaaagaaaatatgaagcagctctttggagcttgggaagaaatcgtagcatcctccctcatctttccccataaactcccattctctcagttaaagaaacattggacttattatgaatcaattaggttcatattgctctgtgttttacactctttatttactgattcattaattaacaagaatcagtttctttgcattattggcctaattatggtcttaaccaaagtttctgtttcctatattttgggatctcccttcaatttttttggtatcctaaaagagtcatttttatggtcacaacagtaatggttaaaacaagtaaagttggtaaccgtttgataaatttagccatttcctctacaactaaccacagtatgaatcctaacgtggggaaatctttgagtgattgccatttcttatcccaacagcgtttttttattgaagaggagagactaatcttaagttttcattctaaattacaataaactttgatgctagtgatcatattgtttcaaaatgccaagtaagaaaatgacaaagcgatctttgacatcagaa

SEQ ID NO: 50450 - DNA, 540 bp, Ricinus communis
  Intron number 1 from transcript 29976.m000508 (locus 29976 .t000023) derived from phytozome v7.0 (chr-ID 29976; pos 4 67283 to 467822 reverse strand)
gcttctcctgtaagagatgaatcttcaacaaaacaccttagttcacttatattgtaatttggaaatatctccaaccattacacctttttctctgatggtcccactcacatttggaagtatgaagcacagtgatccatgtttttaagggcttcttagtttgcttgctagatgttctgcttttgtcttttcatgctgcataacttctctttattctctttccaatatttaatgagattatcaatagtaaaaccgccatgtaataactctgctgttttcaattatgtcaaaattgtttttggaaatcatagtatttctacttggaaaaggggatgttgagttaggacagtggttcagatttctcaacaagaagttagagctaatacaacataacaaatccctgtggttgctctagccaccatttgtattgcagagatcattctctatttcattgcaggtcactcatatgctttgtttttgtctcctcaatcaaaacaattaaatactgtgagctccttatttcaggtgaagtcaaataggaac

SEQ ID NO: 50451 - DNA, 705 bp, Ricinus communis
  Intron number 3 from transcript 29838.m001637 (locus 29838 .t000007) derived from phytozome v7.0 (chr-ID 29838; pos 3 0607 to 31311 reverse strand)
atagaaggtatattgttttattatgtcaactgtgaacatgataacaataaactgaatacgtaattcttaaacattaaataaatatgaaaaatgatttaattatattacttgaataatgacaatattatgttagcttttccatcaattgaaaaacaaaatgcaaaaacaagaaaacaaagaaaaaaattttactttttccaagaacaagttagtcatttgagttatggttatacaactttagtccaatatatgtaactataatgtgatcaaattagaaatcatggcaatgcatactttgatcttggtgaaatatggatttatttttgttcaagtgacatgaatagaaatccttcacatcttataaccagcatatttccagtggaaatatatgttgattgtacagttgaaaaaattatgcatttactcaacagttgaagaggcaattagtagggactccaatggaggggaaaaaaagaaaagctaaacatttaaatcacatttttgcatttttgactttgggactaaaattgcagaaagttataatacttgcctcggacactaatttaaaggccttaggcatcaattttctgagaatgataattaggccatagagtagacataaatgttattgaatttgattatcattttttggaaaactgggcaagtttaggacaggcagaaattgtgttagaagaggttgaaact

SEQ ID NO: 50452 - DNA, 740 bp, Ricinus communis
  Intron number 1 from transcript 29827.m002594 (locus 29827 .t000067) derived from phytozome v7.0 (chr-ID 29827; pos 3 58445 to 359184 reverse strand)
ggtttgaaggtatcactcataattcttgctgattcagtctctgttataaaattaacaatgtgaagttttttctttttccctgttttggtgattgcatacttaattagctcttggttagatctgagatgaaattcattggattgtaatcaattctatttgtgttagttgtttttgttttcaggatttagtattttatacggttattattatgatcatgattactgaaagataaaaatttcttcgttttcttttttaatttggtcatctggatctaattaatctggattctttcactccttttttttttcttaaagaaattaagtaattgtttatagcgaatttatttgaaaaatggttttttcttttgaaaacaaaaatcatcttgttgataagttatcagtttcagaatgttatagctgtaacatttataatctatatcttgctttttgatttaattgataattgggtaattctgctgttttagtaatcacatgatttccaagcttagtcctgtatatgtgttgtgttagatgatacttggtttccaatagctacttcttttcttatatttgctgtcttctcatgggtttagtttggggactagaaatcaagacccatgttgaaaatagtgtttttcaatgagatagtttcactgtaaccctccccatctcggtcttaatctgggaaaatcattgcattatgcaggaggattttgaggagcacgcagagaaagctaagac

SEQ ID NO: 50453 - DNA, 604 bp, Ricinus communis
  Intron number 1 from transcript 30122.m000355 (locus 30122 .t000015) derived from phytozome v7.0 (chr-ID 30122; pos 3 22285 to 322888 reverse strand)
ccctcaatagttcaactgaagtacaagtgtaagataaaaaatccaccattactattatgcaatttttctttcctgcggtgttttgaaaatctgtaattgctaggttttaactcaattgaatttgattttgtcaattctcatgtttggaaaagctgtatttgctagaattcaattcttttagtttaagaaagaggcatattagaaggcatgtttaatagatatgaattcttgtagctatggcgtgatgttgcaataattcaattgaattgatttctgacacataagtcatgtcaagcaatattcatgcacaggacaattcattcttgtggttgataatgattgccatataatcaaagaaaaggtttgtgatccatgcaatttcaccaaacaaaatgcttgttagttaaaaatgcagttcttttgaaaatataaataagcaactaacagagaactggacttcctgttgtgtatgtatttatgttcctttatgtttgtttagaagaattggctccttcctaataatgtccttatggttttcttttttttttctttcttgattttgtttgcagggagtcatctagagtaacaattaaccaaccagagt

SEQ ID NO: 50454 - DNA, 779 bp, Ricinus communis
  Intron number 1 from transcript 29917.m001938 (locus 29917 .t000007) derived from phytozome v7.0 (chr-ID 29917; pos 4 0220 to 40998)
tgagcaatccaaccatcaacgttgattcttcagtgaacagactaaaacaatgaaaaatgaaaaaaacaaaaaagaactgtataaatgatatgctttgtaacataaacttaaaagaaaatactgggtaaacgatattttttcaaatatagtgtaattttccattggattaattgatttttcagttcagttctgataggtttttgggtgggttggatttggtcaaatttcttggtccatcactaggttttcgtgctgaacgtgcaaaacacacaacaatgaaactaattgaagcccaaaacaaaatggcgtccaaaaatacccaataagcattcaaataaataataccaatgggccaaataaacccacaccaatgtattactgattgccggatccaaatccgaacccaacccggaaacaataaacgaaaaccagagacaaacagaaagagagaagccaagcatcaaatagatagcgcgacgccgatttaacgacagtaaacagaatcgtgattctataaaatacacaatataattcctatcatctccctagataattttcaccgaaaatcatagcactgtcttttttcacttcgtcacttcgcatcctagggttttctttttctattttactggtaagtgtcagtgagaagtatataagatcttaattaatgtgattttcttaaagagattcttctggtttttctgtattgctgcctctataattgtgtggtttgtttggatacagaggttagcggtatccgaattttggggggatatcaa

SEQ ID NO: 50455 - DNA, 512 bp, Ricinus communis
  Intron number 2 from transcript 29904.m002969 (locus 29904 .t000083) derived from phytozome v7.0 (chr-ID 29904; pos 5 59744 to 560255 reverse strand)
tagttaacaaaactgttaaggtaattttcttttttaatttgttaggttagctagacttcactatgaggtttttgattggcattgtaaaacagcagtaatttgattatttttgtgcttcgtaattcttcttggagaccatagagggatttcttctgtttgttttatgattgttatgcacttatggatgcttagttatttgttgcatgtagcttgtattcacctattgccccctgtttggctataaagagactacaagttaactgtatttagctcgctttagtttgaggttttatgctctttgggtgttaaagaatggaggaaactttaaagataagaaaatgataacactcttcttcttcgtcttaacaaaaaatttacaatgggacatgcattgattttaatttgtttggatagaagtatttgatttgttgcaatttacaatgtgcattatgaagataagggattaattcttgacaggggaagtcaaggccttttaagtcacctctgggttc

SEQ ID NO: 50456 - DNA, 771 bp, Ricinus communis
  Intron number 2 from transcript 29940.m000404 (locus 29940 .t000009) derived from phytozome v7.0 (chr-ID 29940; pos 3 35797 to 336567)
attgataagttccataaggagctccaactcttgtttctttctttcttctctctctctaaagaaattgtataattgaggttactttaagcatgttttgttattttttttttccagtttactttattcaagtttggagatgctgaaatcttttttttttttccttacttctttgacctgaatttatgtaagcttccgtacaaatgcatttgttgttttgaacttaacagagcacatatatcatctttcaactaatatttaatgtgtatgcacacattggacattatgtgtatatatatatgtattgtaaacttatgctacattttaagaaatttatttcgattgcaaatgaattttcatgtttggtatgttaaattataactatagaattcatttcaaatgaaataaatattgtgtttgaaataatgacagtaaagataattatagagagaagacatgagagtgaaattaaaatgaaatgttaatgttaaaagggtattttggtcttatgaaatgtgttgacttactagtttggtatttatttggaaattctatcaattgtcttagaatttagtttagtttatttccataaattttataatatggaattctaaattaacttttgtttcaatcaaacacataaacctatgatattcatttcaactgaacacaaatgttagtgaggataatgatagcattatttctctttcctttttctttttctgatgtaacaatgaagcacactagaccatccaggaatagctaggctggctg

SEQ ID NO: 50457 - DNA, 856 bp, Ricinus communis
  Intron number 1 from transcript 30131.m007162 (locus 30131 .t000313) derived from phytozome v7.0 (chr-ID 30131; pos 1 952438 to 1953293)
tctccaatcccaaggtacctctcattctctctttgtttcttgacaattgattcaattctcttctgatgctattctcatccctaaaaattatggcttcttatttttatttttatttttatttttatttttaagtaaagagatgtttgagcagcaattctcgttagagaatgtggtttaggtaaacttttagttaggttttgacccttttctaatttgaacctctgataagtgagataaaacaaagaattataatgtaaacttagtaccagttgaatccttataatctataactacttggcaaattgatatgattggagagccaatccctctgctgcgggttcttttagactttattaggagaacatcaagcagtattttcatttcaattgttaggttttttatgaaatctatgaaaattccagctttcttagttaaatgtacaggaaagattaattaaggcgatttcagaacattgtagaaaatcaatcagcaacttacttatcttgggttattttaattacacctcttgttctcctcaacttctccagcaaagcaaagcagcatctcctgtagctttcttttgttttattatatattctgcaatcacatgtaggggatttcagttcatggctactaaattaccttcattttcctttccataagcccaaaaactgctactactttatggcttcactagagataggaggagcaactatcgtgttgaatttccactttgttggagcaaattaaattcttagtttccccatgtggatggagcaaaccatatgcttcctagattgctgcacttcatattttgactagtatagaggctctgctaaatctgcaggtgattgat

SEQ ID NO: 50458 - DNA, 737 bp, Ricinus communis
  Intron number 1 from transcript 30146.m003537 (locus 30146 .t000114) derived from phytozome v7.0 (chr-ID 30146; pos 8 63374 to 864110)
agcgcaggttcaatatctctcttttcatatatacttatataaaagttacaatattttctcgattcacgcacttttgtagggttgaattagttggtctatcagaattatcagttaagtcattgaacaacatctaaatcagaaactttaatcttcactgtgttttatcctgtacttgtttgcaacccccagagagacatgctctgatgttgtttctatcacatgggtgtttgattgggcaatttttttttttttttttttttgtattttggctatgttataattgttgttgggtgtgttgctgaaataagaacgaggattcttgaaagtaatcatacacaacatattatggttcttagatggttgggtaatttgagaatgttagaactgtgctttgatgaatttggacaaagttctcgtcaagtttatattttgatgcaattttaatggaaaccatgtgattaaggacgggaagtgtaacaaaagatacatatttgccttaactggaaaacccaaatccagaaattgcaaactgaaattcttggagtcaaatgaaaacttcaaaaatttattcattcattttggatttgcctaacccacctttagtattatgatgatatgctctcttttgtattgatccagttggtcgcatgctatttttcttgggtctctctttgctattatgaaattagaaatttttggcaggtggtgcattcggtggaaatagaggactaagacct

SEQ ID NO: 50459 - DNA, 980 bp, Ricinus communis
  Intron number 1 from transcript 30128.m008723 (locus 30128 .t000184) derived from phytozome v7.0 (chr-ID 30128; pos 6 82262 to 683241)
tttttgatcgtgtttcaagtatgattctttttgctttttttttttttgccttgttcttacgatgtttgtttcattcttttttcgtttatgattattttattatgtttattagattggagttttaataatgataattggaaaagaaaaaaaaaaaagtacacggagtctttaattggggagaaaaaaaaaatcatatgcttttcttttcttgaagtattagtttatagatacttctgctgagttgggttgttggaattttcatagttttgtttgtttgtttttccctctctcttttaaacttaaatgatgtattggcgtttttgtcttgatttgattttctaagcaaaaacaccaaaatgtggtttggttgtttccatgatcaggttcatactttgtgttttgctgtatttgtattaagcattgtattctgcacacctgaatcgattaccgtttgccaattggttttgaggggaaatcaaaggataagcagaaagaaaatagtctgagggttaaagctcaagtattttgttcttaatctgtttcctctaatattgaaacacaacttaatatagtattggcgtttgtgatgctgagttattgtttagtataaaatgcagaattaattagcattgttagtcagaagtgcttgggctaatttcctaacaagttttttcgtgccaaagattgtgtctctgtaaatgctcaactaacctggtgcttttaggctctgatacttgacactcatagaaaaaggtgttttaaaaatgttaaagtagagtaattgaaatggattgagaattacatgggattaaattgcataatatatggccattatgggtgttgtttatatgcagagatgcgagctaaaacaacagggaaacttttcccacaatttatatctattaggagaagatgcgtgatatgatatgataaatgatgcacattaaatcttgtcttctggcaggttttcttgaatctct

SEQ ID NO: 50460 - DNA, 775 bp, Ricinus communis
  Intron number 1 from transcript 29844.m003320 (locus 29844 .t000166) derived from phytozome v7.0 (chr-ID 29844; pos 9 64910 to 965684 reverse strand)
gttgtacttaactttttcaaatttacattataatatggtctgatctaactattctgatttaagagtttgattgcctatattcaatttgtaattaaaatatataatcatcctactattatttttggaatagacaggaaagaaataacatttctaaccttatctaaataatctggtcagcccaatatgactttttaatatttttatgatttattgaataaaaagcataaaattttaaattaatttatattaaaaaaatttacataaaaactatttatataattgtatataaaaattacatatttaaatattttatgtacatttgatttaaattttataattttttataaacatataaaatgaaactcactgtaattatgatactctaattcattgatatcctaaatttcacttgaatatgcgaatcataaagaagtctacttccatcacatttcctcatttttttatttaatatttttttttcttgttttttattttcaattaaatacatactgtaatttatttagttaagaaagtatattattaccttaattcttatgaaataaatactcttttgcgaaacgcccaattctttttaggttgattagagatttaactttccctatttttttgtaggaatttctttaataagaaagagaagagtggttcttctattccacttttaattaaaagttttaattaccaaataaaaaattgtacgtttttttaacaacaataaattgtagtttatctcagtaataaattgcacttatcccac

SEQ ID NO: 50461 - DNA, 913 bp, Ricinus communis
  Intron number 1 from transcript 30079.m000443 (locus 30079 .t000001) derived from phytozome v7.0 (chr-ID 30079; pos 2 45523 to 246435)
aagctcgcgtgttggaggacacttttgttgatacggtaggttaacagttattattttatttattcatttatttcaatcttaggctgttgtttgtttcttataccttttgcttttaacagaactgtgttgtttcagtgtactcatctcctagacatactaccaaccagcttaccctacatgtatccattatctttgtccctttttatctaccagcattgatgtcttgatttatcggtttatggatagtaggcaatagctttacttcaaagatgtgatggaaatgcttgattattccgtgaaaatatgatcgggttattggttgtgtttctgatattcagtcaaattcctataatttgagtttctgatgagctaagatgtaggttggctttgtagtgagtcaattcctctctcttgctctatttattgtgattacctgtttgtaatcgacagaggttataacacagtgctcttctgcaataatttggattatataggaagaaatgttaaaacatgcaaaaaaaattattctttttcatttgtttcatttttggtgctattcttttactttcgatatttcataagctttatgaaagtttgtttagtagctcaatatcttcgcacagattggtttatattgctaatttgaaactaaaatctatagaggaaagaaaagaaatggggttcgctactcatcaggcaaaataatcagaatattgtattctgaataaaaggacttagtccaggatgttccttctatgcttccttgccaagggtttatagtttctagttctcaaattgttgctgattaatgaaatttgtgttcctttaatactgacttggtatatcttaagttgcataactctgaattgatttcttattgcagcctgggggcaaggaaatctctgcaaagttc

SEQ ID NO: 50462 - DNA, 669 bp, Ricinus communis
  Intron number 1 from transcript 29983.m003224 (locus 29983 .t000123) derived from phytozome v7.0 (chr-ID 29983; pos 6 67947 to 668615 reverse strand)
ttttgcctccctaaattctgttcttcttggctgtaaaagttccccttctttcattaaaaaaaggttttcctttcaagaagtaattatggttattgcattgctattgttgctagtgtcttaatactttgttgttagtttttttttttttttggtttggaattcacaaaagtttttatctttggtattgtaggtttagaatgttttcccagtagccaaaatgtctgacttaacaatttaacattaaaaatttgaacaatgtaatgttgtttctgagttctattaaggtatctggattaatagcctgcgccacttaatctttcattatgaaaatgtaaaactaaattggttggatctgttttttggcaagaggacgttaatgcttgtctctttatggccatggtggttgggagccttctgattcttctcacctccaaacttagaggaaagagagagggaggaaacatgggagggagcgtatctgattctttttatctacgataattacatcagtcttttctttcagctatgtttttgttttactttaaagctatcttgaaagttgcaacaagcttcaagggcaattaaattagtttgattttggtttcttgtcttttcccgcttgagacacttgttgtatttattaacagaaaaagaaaattgtaatcgcag

SEQ ID NO: 50463 - DNA, 1027 bp, Ricinus communis
  Intron number 1 from transcript 29832.m000313 (locus 29832 .t000005) derived from phytozome v7.0 (chr-ID 29832; pos 5 7792 to 58818)
tgattttcttgatttctttgcgtttttctcccgaggtatgtattctgtgtgttagttagtatagatttgcccttctgtgtctttcttgaaaattttgttggtatttattttcttattgctttcttgattggagatcagaggaactagaatctttaacaatttgttagttcattttatgattttctttgtctatgcatgatcttgttgtgatgagtttgagaggtttcggatcagattcttgtataattgtttggttctgtcttttcatttctttgacttgattgcttttagttttaccatttttttttataattttcatactaaccctgtacggtactgtctcaaagctgaaaatttagttaaatgctaagatttagttgacgatcagcttgtcactctgttctagtttatcattttgagcgaatttcgtgtaggaattcagtactaagaagaagaaaggtgtttgaattattgctttagcaaataacttttcagattcataaatttttcttatggttttcctttcacactcatctgtgcactgtaaaaagaatgcatcataattaattgtattagaaaaggaaaggattaaaagagtataatcttgatggtatgtgaaatccagggagccatttctgtttgggacggaggccagatgtggaatgcaaattatcagtttttttaattttttttttttcttgatggtatgtgaaaatccagaaatattgatcaacaaagtttttttaattttttttttgcttatcgttggctcttatataactacgggtgatgcattgtagaaattttgttctgaattctgtttgattattgtggtttttattactgaatctggtaactatcctgtatgattctggtttttcttatatcgtgtgttatttcagaaaacacaaaatcaggacagtcgatagctttgtccaaataatttttccatttaggtccttgattcacttgtcaattagtttctttgaagttaatctaattagagttatactgggcagggaaaaat

SEQ ID NO: 50464 - DNA, 657 bp, Ricinus communis
  Intron number 1 from transcript 29830.m001447 (locus 29830 .t000064) derived from phytozome v7.0 (chr-ID 29830; pos 4 74810 to 475466 reverse strand)
tacggatcaagagggtatgtataactaacttcgcttcatgtgtgcctttcattatatgattttgctgccgtcactgccgtttgatttgctatattctgtaaaccaaagatccatttttttttttggttggtgtctgtgaaatttgatttctttctttttgtttatctcgttcttgtagttagggttttcaaaatattgtgcatattctgggttaatgaacatgtggaagacagaaacaaaactaattttgcaaataggttcagggctataattttgttggtgttatgattctgtgatgttgttgggtttgtgattttttgtatgcaaagagtgtatatatgatgtaccatgggtctaaaatatgtgcgagctaatggcatatggaaaatatactatttgccaaatcttctctagttgcatacttgagtacttgttgctgccattggtgattatatgctatgctttttgtcatgctttgcttttggagtgtatctgtagttttattttaggagggctgttaagtatgatgcctgcttgttttttagaagaaaactgtaggaatgttaggtgtcagggaagtgtgggttgggtttggttttattaacaggttgagtggggatttttctttcttttttgggtatggataattgaagggca

SEQ ID NO: 50465 - DNA, 855 bp, Ricinus communis
  Intron number 2 from transcript 30146.m003607 (locus 30146 .t000184) derived from phytozome v7.0 (chr-ID 30146; pos 1 263255 to 1264109 reverse strand)
agcaaccaaaggctggcaagaaggaatacgacgaggtattgaaattttagttcgaatttgaatattttgattttcttttatatgtttgcgtgaagtatttttattgctgttaacaaatagggtttatctttctgttaaatttaaggcttttgtctttttccttaaaaaataaaattagaattgcttataatacgatcaggatttaagttctgcagaaagttattacttttccaatccctaaattccggaattcatgttaacaattttgacttggctattgttatttgacaacccagcaattagttggctgcattaaccctttgaaatctgtttttttctttttcgtgttctcagttggtgtgtgctgagtgttggatttctgtttctaatggcttctggttaggattacatgaattcatgtttgaagtagggctgcatgttatttgaactgaatttttttgtatgcttttgattacctagatcttcttttgtttcaagcatgtgatgatttatgttgagtagtgctatacattatgacttgtttacatgatgtaagtagctaatgaattggtaggtttatgaagatagtaattgaagtcaaattcttttataacattggattcatgtggtttctatttaaataagtgttttttatgttagcaaaggatacttttgcattaagtgggtgttaatgcttctataactttgcttggatcttaccagagcacgatacttcacagtcttctttacaatccttttgttgaaaatttataatttattacttgatatctttaatttctatttacttggttctatgcagactgatttggccaacattcagaaaaagaaggacga

SEQ ID NO: 50466 - DNA, 601 bp, Ricinus communis
  Intron number 3 from transcript 29929.m004667 (locus 29929 .t000170) derived from phytozome v7.0 (chr-ID 29929; pos 1 033563 to 1034163)
attcttgcctcaacaggtctgtcttccatacaagcatataatcttccgtctatagttgtgtctgtctatatcgtctacctgccaggttttactaagtagataaacttttccttgttataatctcacgtatatcatggtctatattttgatatttggctagcttgggggctggaggccggggagagagtctagttcattgttctgtgtttggataacaaagaagtattatttctgtcgtgaatctttctggccattttgaaaaatctatgaactaatctctttatgggtcaactctgatttggtggttttactgaaaaattttccttccaacttatcagctgcattagaaataactttagattaccagtttattaaatgatcaagaatgaagtaacctcctctatgtttgttcatctcttttggaactaatgttagatccaaaaattgtcattgttaagatctggagttgctcttgggtatgatttgatctactttattatttgatcggcatacattgagtgctcctttggatttattcatgattctcactagttaatcacccaattacctttgtgattgcagctggagcaaattgtcaagc

SEQ ID NO: 50467 - DNA, 445 bp, Ricinus communis
  Intron number 1 from transcript 29841.m002865 (locus 29841 .t000129) derived from phytozome v7.0 (chr-ID 29841; pos 8 16181 to 816625 reverse strand)
cggcgctcaacactttgttggcttttcttaatacggtatgttcaagatttcatttttagtcaatacccggttgccattttctatatatataaatgggttaattttatttgcatggtgttgatgattcttagatctgattttaaaaaaataaatttcaaagttatcttcatttcttgtaaaagattttaactttttcagaagatattatagaagtcaaggtggcatggctttgtggtattgagttttcttgaaaagatagtgtttaattgaatttttgattttaaatcatagatggcaggcggaatttattaattttctttcatgtggactttttgtttttcggattaaacttttgatatctacttagatctgatattttatttttcttaaaacagaaaaagatcttatatttttgctaaactcctatggttaggtgtttgttttg

SEQ ID NO: 50468 - DNA, 365 bp, Ricinus communis
  Intron number 1 from transcript 29848.m004611 (locus 29848 .t000167) derived from phytozome v7.0 (chr-ID 29848; pos 9 60086 to 960450)
cagtttctgttcgctcctctcttcctctttataaggtttgtaattatatcttcttctttatttgatttgttaatattcgattattaatttccaaatttaacatcataaccgaagaattataatttcttccttttggattacgtgagaattataaatttggttcccggccaggcaaaagaaagagaaaggaatgtttctagcttagtcgcagtgtttgggaagtctcaaaatgcaagatttctattcagctgaatcctgtttagtctgtttttattatgtttggaaaggttataattgctagaattcaaagcaagatatgtttttctgcagttgttctcgccgaggctcaactcgagacagaatcg

SEQ ID NO: 50469 - DNA, 549 bp, Ricinus communis
  Intron number 1 from transcript 30128.m008562 (locus 30128 .t000023) derived from phytozome v7.0 (chr-ID 30128; pos 2 519707 to 2520255 reverse strand)
tcgaacgagaagacccctctgcaaaggttcctcctttcttttgttttctgcagtacagttactgggttcaacggtttttttcccaaggacttacttttcttagctatcatccttcatccgtttatgtttctaaatttacttgtttagctcgtttcaagaatttctcttcattttgttatcgtatcttcttttctcatttagtgcccgactctttagattaatgagtagtatatgctgcatgtttgaattgaaacttactagattattcaacttttacctaaaattcttttaattcctagtgaaggagttggaaaagtcttgcctcgatcataatcaggtccagattttgcaattgcacctatcagaatttcacttccatgagagaaaatgttttggatgcctaaactgtatgctgccattatatttgccacactgataaattgaacgagaagggtctcctctttcggttttctttgattacccacgtcgtctatgccgtctgagtgtatagtcctgtttgttttttggttgcaatttttcaggaagtag

SEQ ID NO: 50470 - DNA, 817 bp, Ricinus communis
  Intron number 1 from transcript 30138.m003855 (locus 30138 .t000029) derived from phytozome v7.0 (chr-ID 30138; pos 2 31445 to 232261 reverse strand)
tgattctagcagaattgtagacggcaactttgacggtgatttatctttgaacttgttggcctttgcatttacaaatagtattcttttgagcagttctgagtaaatatcacatataaaagacctgtctttaccaattttttagacaggtccacgagatgtttgtttaatctgtttgataactctgctgatatgtgtattaagttgagggcagtgtatgggttctcactctcaattgacaattggctgggtaggagaaagcattgccccgagtatgattgagggttaattgttatacagtgctttttgtattcttgggaattactagtcagttggtttgctggttaatgaggttgttggagcacagagatctcagagggactagacttgatctatagaaactttgagactggggagacttttgtttaattcttaatataaatatggttttaactgttatctgcattggataagtgatgtatctcttatcctaacaatgagaaagaaatgaagctttatccttgtttctttccttttaagcatcatctcatggactggaagaattgctgctgcctcattgaaattttcatcttggttagaattttatgaaacttctacaaaagcttgcagtctagtagttttcagtccatatcaaaagatgattttatctaattatggttatagttcttaaatactgttgtaggttttagaattttgagccattcttcttttcagaataatgagatggtttaaaattgagataaaacattttttatgcgattggtttatggttcttaaacagatccacgcttgactgact

SEQ ID NO: 50471 - DNA, 467 bp, Ricinus communis
  Intron number 2 from transcript 29839.m000434 (locus 29839 .t000008) derived from phytozome v7.0 (chr-ID 29839; pos 2 35108 to 235574 reverse strand)
tgctaaattggagaagcttgctgagggtgaatcaggtcaattatttttgtgttactgttttacgtttatttctgttcacacctttattcattaatgtaattttcttttttgaaaagagctgtttggaataaatctgggcaaaaatcatgtcaattgtggcatgatttcatttcttccataatgtctttgtttctctttgaaagaaataaattctagcaattacaacctttcccaacatgaaaattgactaaatataatttagctgaaatgaataattattgcaccttagaatttttaaacaccatgttactttttgattttattttgtgattttattttttcattttgccatttcattgattagtacaatgaactggtaggaaatagtttggtaattcaagtgctcacttttgttttatttacttaatttgtctttagcagacattaaagggaaaccaaccgaagca

SEQ ID NO: 50472 - DNA, 767 bp, Ricinus communis
  Intron number 1 from transcript 29851.m002414 (locus 29851 .t000056) derived from phytozome v7.0 (chr-ID 29851; pos 3 23277 to 324043)
ccttcagcaactggtgagtttttcgtttctctgtttttcttttaactattaaattaagattcctcttgttaatgcatagaccaacttatctgtaagtgctttgtaaactttaattttgagttggtttggattaccagtgagaacccatttgatgttctttccatgaaagagagttatttgatggtttttggcgttttgaataaagaatttcagcgctgaatagaaaaaagggttgtgatttcaaagaatttgtgaaaaattagaactgagtggtctaaaaatgttcaaaggtcatttaagaaagttgttacctgcttgtgaattgtgatgatgcatgcgggtatagaggctcttcctttactggatgactctgttctacttgcaacgcccttagcatatctagaaattggataaaagtttcagcagtattctaactaagcttctagattttcaatgatatgcagctgatggaaatacagtaaggcaagacgcatacttgttaaagaagaaactccgtaaaatgtagcatgtcctagttgaaaatgtttgagaaaggaatgcaaagtgtcatattttgtctaaatgacaatggaatataaattttttagtacatagtataacatcaacctccatctgtgcgaggaaggttatttaattatatgatttattgtccctaatcatcaagttctcttgcaaaatgctgtgaaatgtttaagatatgcctgtaccaacttgaatttagttttggttgtggatttatggcagag

SEQ ID NO: 50473 - DNA, 675 bp, Ricinus communis
  Intron number 2 from transcript 30131.m006982 (locus 30131 .t000133) derived from phytozome v7.0 (chr-ID 30131; pos 7 77335 to 778009)
tcgaacaggtatgtctttttctttcccatttctgatatttctaactttagtgtttgtttattgagacaatggtgggggcaaaaaagaaaaaaaaaatggataatctatattgagagataaattatttgggggttatttttgctgatcttcaaaagctccaagtgttatccatgcattatctggaatcaaatggagaatgaggcttttatactctggaggaggtgttggatttcaagagaagcagacatactgtaggcatagaacaataagtgaataggtagttgaattgaaaatacaaagaaaacccaccagtctgttatattaaattgcatgcatgatccttgtatcattgctgttttaagttgttagcactgttatcaacttctacaacatctcggaattgctagaattgttcaattgaagcatttttcttattgttgcggaaaagcctcaaagcataagcgtttgcacttttggtgctggcactatcttgtagtgccatttcagtcctgctgcataaggactgtagaagcccatcatataagcaattattgcatagattaccaactagacactaattttttggaccttttttgttcaattattgtaatttgtaaaattttttgtaatctatgactatatttcttcttttgctacgtaggcatttttccaacg

SEQ ID NO: 50474 - DNA, 659 bp, Ricinus communis
  Intron number 3 from transcript 29820.m000987 (locus 29820 .t000008) derived from phytozome v7.0 (chr-ID 29820; pos 5 0812 to 51470 reverse strand)
ctcaattgactaaagaacagctttctgactttcaggtatatgttcccttcattcgaagatgctgaattcctgatgcattgttctaagctaatatataaatttgattagttttagaagcaaattacctatttagtgttattctcttggctagttccattcatgctttaagactgtatgacagtacgaattgtcacttgtttgcttgttttcaaaatgatgttcaccatgtgtttttaatgttgtatatgacacggttgttatcataagatgttcttgttgtaggtgggaatatgggcacggttgttatcataagatgttcttgttgttatcatctttagcagtgtggcatgcttctcccagattaatgcaagttgtttgctgtttggtcatctgggacacagtgatggtgttctttaatgttggttacttttttgtcaactgaaagtttgttgcattctagaatttggtttccattggcatgcttcaatgttctattactcttttgccattttggagaaaaaaataatcatacatcctgttaagcattcacactgctattaatatactttgttaaggtttatattattgaatataaatgactttggcatgcatttctgttatcaggctgtagtatttactgacatcagcttagagaaagc

SEQ ID NO: 50475 - DNA, 625 bp, Ricinus communis
  Intron number 1 from transcript 30059.m000461 (locus 30059 .t000007) derived from phytozome v7.0 (chr-ID 30059; pos 7 1144 to 71768 reverse strand)
ctctgttctactgtcggactgtttatcgcatccaggtaacccatctctctttacttatacacgattgggtttaatccatcgaattgaatgaatctggagctatttatgctaatgcttttgctgttgctatttttcttcttcctttccccctttaatttgaagctcaatgatttgagctcggtaaaaagcaatatccgagatttctttcttttgttattctacacattttaaattcatgggttaataagttttcatttgattgtagagatttttatattagctttgtaaagtatgcatctttatgcttcatcagttaggaaaagggggatgactatattaaagacgttgcccaactgtataggaccttcctactgtataacgctcgagtaatgaaaatgttaggttacttattttgaatattttgtctcatttatctgtgtgtattctttttgtttgagtgcatacgtataccttttgctagttttcatctagttagtagctattttctgttgcaaaatgatgtgttttgagaactagagtatccgcttcttgattttctgagtaatctgtctctaaacgagggtttgtgtaatttcttttgtatgtttttttcctttagtgattg

SEQ ID NO: 50476 - DNA, 581 bp, Ricinus communis
  Intron number 2 from transcript 29841.m002784 (locus 29841 .t000048) derived from phytozome v7.0 (chr-ID 29841; pos 3 43044 to 343624 reverse strand)
atataggtaatggcgggtttttattatcttcagtgttcttaattaaagaaaaacgatttatataagtttattttattttcttgctttaagcctgatattcatttgttgtgaatagtgactgacctgagatatatctttctcttgttgaaattttatgctgtgcttacccatctttttgtcatgtttgctgatcatcctataaatttgactgattttccagataaacgcttgtgataattattgcatattatcgaagttctataagatagtacttgaaatatcaataaatggtagcaattatttgagataacatgtatcttaatttggtttagtcaaggctaatgcctggtcttagaattggggttagaacttagaatctgttatgttctcgtactttgacaggattaatattcaatttaaacattggtagcatgatctatgcaaatgagatttaatcattattgattctgatatatgtaagggagaagggtaaatgagtaatagaagttccaacagttgctagataatcatgcatgttcctttgaatattttgtttccaggacattatagaactgtggtga

SEQ ID NO: 50477 - DNA, 458 bp, Ricinus communis
  Intron number 1 from transcript 30128.m008771 (locus 30128 .t000232) derived from phytozome v7.0 (chr-ID 30128; pos 9 26908 to 927365)
atcttgattctggtgaactcttggctgtgaaacaggtttcctcatttcctttttactgtttgctttatgattctatctgggttttctttagttttaggtttctactttgattttctttttcttttttttttccttaaaagaatgggttttggtttatttgatttaggtaattctgggttttggtttctggtttttttcttcttttttgagttttcaacattgtgcttttggggtttagtttcaatttgagtttgtataaatttcgggaatttgatttttgtattttggattattattattaatattattttttttgttgttgttgttgttattttacctatggttttcgggttctgttatatttcacttctggaattttttttgacttactttggtttggctttgattttaacattgcatttgtatctttgtttccttctaggtgttgattgcagcta

SEQ ID NO: 50478 - DNA, 613 bp, Ricinus communis
  Intron number 3 from transcript 30012.m000040 (locus 30012 .t000001) derived from phytozome v7.0 (chr-ID 30012; pos 1 1995 to 12607 reverse strand)
ggaaaaagtttcgggtacgttgctcttattagctatcagttttgttttaaatattcgtagtggcagaatataatgcttagtacaatatgctcaaattatgtgtgactttgtaggatagtgcatttgaccaagtatatgagcatctgctgttattatatcttagttgagaaaaagaaatttcagaatgccgccatccagttttcaaatttatcagaaaggttgtagtacgaataccttcattgatactgccaattgcaacttgactctccattgtggtttatgacactgtgtttctgtggtagttaataacttatttggttacaaccaatttgatttcacaatttttaaaatcactggcaatatcttataaaaaatgcaagagcgatgagatcattagagcaatagtataagaagaaaggattctattgtttcagttgaagcatttgatgcaagagagataatgcattaatgccacacacaagaagttaagggcctgcatttaatttgatacatttagtcttcagtgcacatatgtttgtccagcatttaatcttgcagattctcttatgaattgaaattgctcatcaatttctttgtctaatgtcgttacagt

SEQ ID NO: 50479 - DNA, 807 bp, Ricinus communis
  Intron number 1 from transcript 30064.m000489 (locus 30064 .t000011) derived from phytozome v7.0 (chr-ID 30064; pos 7 6239 to 77045)
ctgcggattttcttggtaagttgaaacattattcttttttctactttcttgtttaagatattctataagaaagttaaatatagttttcgtgtatctaaaggagttcaaaccctgacacaactcttccattgaagaaatttgatgtggaataacattttgttttttttttcttttgtttatatacaaagagttaatttaaaatctacgagtaagacctttacggatgccaaaacactattacaatagtcgtattatcaaaagctagaactcgaaatatgagataaacaataaaacaatagtctttattattatatttttcattggaacttctaagcctgattgttaaaatcttggagtagaatggttgatgatgtaattgattatccaaaacctaactcaactaacgtcaggagaagcattaagttcacatcatcatcgcatgttactgttattacctgctacctgttttcttcttttattacctatggctatacatatagtacagaatatacaggcttcttttttatggaacttaggaaagatttcgctattgaaattgtaaccgtcacatgcattcacctttcaaatctaatattaaaatatagaacatttttattctttatcatacacttatttgttgcattgtatatatctagaataaacaataattaatctgacatatctattcgtgtaagaaatgtttaagcgtctcattgtggcatatttatatttattcatatgtttatcttcattcttgctacgaattgagcagctgagaaattgggtgtgcctacatctccaccatat

SEQ ID NO: 50480 - DNA, 788 bp, Ricinus communis
  Intron number 1 from transcript 30146.m003502 (locus 30146 .t000079) derived from phytozome v7.0 (chr-ID 30146; pos 5 25970 to 526757 reverse strand)
gcaaatacagctgtgcccaacatctctcagaaaaggtgctccagctttttacctcttcttttttttttctcctgtgttttcttttttctttaaaaaacttttgacacaggatattcattcacatgttcacctcgtttagatgatctgttgtgttgttgtggtccatcattgtgttgtttgtatcttgtttttatgtttacgttgtgctttctgctttagtgttacttgttacatatgttccatttagtgtttgtgtggacacctttaccaacataaattttaaaataaactttaatttattacctggttttgtgactgctgattgttgataattctttgcttagtttggccattaagagtttaaacccttatccttccatttctatgtaagtttttgcttttctagtaaaccttacttttcatgtctgctttcctaagtgatttggatattatctccttcagcctgtttattgttttgtgctagttctttgatttcttgaaatatgaactctttctatttttgtctttcctattcttgagacatggaatttgcttttgggacttctgtacctgctattttcatgctatatatctacatgctttttaaaaaaataaataaatctgttagccttgtactgcatgtatatcatatctagcatatatcaccttaataatcatttagttgtgcatttctcttgtgtaattcattatctattggccgatttactgatcttttagtggtctttcaaacagaactgctcctggtccagttgttggttggccaccaa

SEQ ID NO: 50481 - DNA, 295 bp, Ricinus communis
  Intron number 1 from transcript 29851.m002516 (locus 29851 .t000158) derived from phytozome v7.0 (chr-ID 29851; pos 1 007917 to 1008211)
ttgtccttcttgttccctccaaaagaaacccaagtgtatgttctaatccctttctcttttcttcttctttaatcagttcatatgtgctttttagatttctgggtttttgttctttctttcttttcttttattatttgggtagcaatttgattagttgtagataattgattatgatatgaaatagattatgggtcttctgttatctgggtagtgattttgtatagtttagtcattggtttctatttgctgatatggtgcagccttcccccttgttcaaaccaaaatcattgatttt

SEQ ID NO: 50482 - DNA, 629 bp, Ricinus communis
  Intron number 1 from transcript 29872.m000543 (locus 29872 .t000021) derived from phytozome v7.0 (chr-ID 29872; pos 1 69097 to 169725)
ctggtctcaccattgccagtcttgcaattcctcaggttagtaccataaattatgcatatatgtaagatatgtgtcgtttgtatataatatatatatatatatatatatatatatatatatatatatatatatatatatatatatatatacatgcatgtacatatacatattgatttatgagttttgtggacaaagaattctgagttggtgctgccatatattcctttgagcttttgttttttggatcattagtctggaagttaactttttaattcagtgttgtagtggctagtgtgaaatgggtttatttttattggtgaatttttgttctcattatattctgttcttgttttatctaggagcatgattcttgtattagcaactcatgtgaactttatttgttcttttatcttttctatttttataaaaagagaacattgatatgacatggttattttcagtggcattcacttgatgaagataatttttaatggccttttattttattaatattgttattaaaaaattttaagaaaagactttacctgggttaactgtaaattgaatgtgaatgcttctttctttccagtgatctgatatagttctttctatattgcagggaatcagtt

SEQ ID NO: 50483 - DNA, 627 bp, Ricinus communis
  Intron number 2 from transcript 29923.m000839 (locus 29923 .t000054) derived from phytozome v7.0 (chr-ID 29923; pos 5 24646 to 525272)
cttctccttcaggtttttgctacttcattttcagccttttcttttttcagaagttgagaaatgctgaattttctttttctcttatgggaattactcaattaattattataagctgcaatactctctagtatcgctgtgttattgagagcttacataaggtctggaaagagagttgcttggtgtactttgaatgattggagggggccaagtaaacatttttttcctggtagagcaaagtttacatttttaaattgctctacagtaggactgcaacagattaatttcagtagcttcatgggtgggtatgcttatagaagttaaacctgaaatggtagtgttgctgtgttggcccttattttggattgatgctgatgtttatacacctgtatgtcatagattaggaactacaaacttattttgcattcatctatagaagcaccttaaatatctatagcttatgtcatttgaagattttgtaattcatattaaatgcatacaatttctttttgtctggtgtaacacaaaatttatgtgcattgtgtttgattacaaagtttatgttcattgtgtcaaacattgtgtttgatttttcttaccaaatgcagggaggttactaactgcactcat

SEQ ID NO: 50484 - DNA, 830 bp, Ricinus communis
  Intron number 1 from transcript 30024.m001747 (locus 30024 .t000064) derived from phytozome v7.0 (chr-ID 30024; pos 1 169329 to 1170158 reverse strand)
cataggtttgaatgtcaaacttgtactttcagaattgcaattagattgatctcgactatgtgttatatgtttatcttgcgtctttgagtaggggtgagcaaatgatcggttaggttcaaaatcgaaccaaactgaaaaagaaaaggaaaactgaaattactgaaagatgaaagtgaaccgaactgaaaaattcattttttattttttattttttcagattaaattataattatttatatagtcttaaaagtatttctttcaaaactgtactcatattttttatacgtaactatattttaagtgacataaatatctttcaaaatattaaaatttaatgatatatttaaaatttttaataataaatattaaatcttcaggtgattcgctttactgattattattattttttttttcaaaaaacgaacagaacctaagcgaagtttgctcggttttcagattctttcaaacctgaaccgaaaccgatttacactaataatggctttggttcagttttactcacccctatctttgagttcataagaatccacaaaaagacttgcctacttgtctaaagtcaagcattagagattatctaaatcaatgtcatataggaattagagctcaacattgtgatatctgtataataaagttatattatagcttcaaatttcaatgtgagaactttggcaggaagcttaccttgatcattgtggggttggatgttcccttgatcattgtgtttccctgcaattatggaagatttgaagttttttatctgtctctctctgtcatattgttgcctaacattgttgtgtgaattaggcttaagc

SEQ ID NO: 50485 - DNA, 798 bp, Ricinus communis
  Intron number 1 from transcript 29830.m001455 (locus 29830 .t000072) derived from phytozome v7.0 (chr-ID 29830; pos 5 60780 to 561577 reverse strand)
atactctttcttctgtacgtcgtcgttttcctttaagatctcttcctgtttttgtttttttctatcctatttaattggatcatgatcaataactgtaatgataataattgctgcacttcattatctttccttgttttggtaaattctgaattattgttactattcggtgagatcaatgcttgagtgttaaatgtcatttttgactctgcaccaaaaagatcaatcaatcttgttgagaacccaatggtatttttattgaattacacgtgtcatgctagggagctatgttatttaattgatcgattcaatgaataaaagcatattataagattttgatctttataatttttgaattactattcaattaggatttattatgtcatcattttttttttaatatgaatctatatctatttttttatgattttaatagtatgatgtctaatttaatgatgtttaactggattaatgtagtaatatctcacatttgcaaggaaacttaaataaaatgtgaaactgaatgataatcaccttgtttggaaaagtttagaatgaaagaattcaattcaaccgatttatatttagtaaattcgttcaactttagtataaaaataaaataaattgtgccaaaagttacatgattttgcaggaatttaatttatcgaattttagccattgaaaatacttttaactttctattgttttactcttccttcaaggttgattaatttgttttgctgtgcttttgcttctatactttcaggattttgttgcgcttaagatccagaaaagcgcaac

SEQ ID NO: 50486 - DNA, 341 bp, Ricinus communis
  Intron number 5 from transcript 29842.m003539 (locus 29842 .t000036) derived from phytozome v7.0 (chr-ID 29842; pos 1 96791 to 197131)
tccattattcgagctgacattgtctctcttctcgcgtaaggttattgtctatgtttgtttttgaattatttcattttcttttccttctgtgtgattgttttctattatttatgtcactcaaaacaattattcttgaaaaggttaaagaaagaaaaagcatattttctgtttatccgttaggtggctatacttataacatagaaaactgtaagtacttgtactaaggtgcaccagttgcatagaaggaaatagtttattatatgaagtctatcacttgatgaacatagtgatggaattaaaattttcattactcgattcattataactttacagagaagaga

SEQ ID NO: 50487 - DNA, 204 bp, Ricinus communis
  Intron number 2 from transcript 29912.m005281 (locus 29912 .t000007) derived from phytozome v7.0 (chr-ID 29912; pos 7 9344 to 79547)
tgggggctaatacttccattgttgctcgtagtccggtaattaatttttttcttttcataatcatataatatgacagaaaataagaatagcgtcgtctataataattatatgtttgattttgagtttgtatatgaggagtgtgatgtataattgaaaaattaagtttaattatttaacatagttaaaaaatttatatgcaggtgc

SEQ ID NO: 50488 - DNA, 184 bp, Ricinus communis
  Intron number 1 from transcript 30128.m008922 (locus 30128 .t000383) derived from phytozome v7.0 (chr-ID 30128; pos 1 714602 to 1714785)
ggaacaggtaaaattggtgtccaagttggtttttttttttttttttcgtgtgtgtattaaatatagtaaattggtatttgatgtcgtaaaatattgaatttgatagaaagttattgtatttgctaatttcttttctttttgattaatgtattaggtgaagcaaacttcttaggaggtgtagcta

SEQ ID NO: 50489 - DNA, 938 bp, Ricinus communis
  Intron number 1 from transcript 29842.m003586 (locus 29842 .t000083) derived from phytozome v7.0 (chr-ID 29842; pos 4 10644 to 411581 reverse strand)
agtagcttttttgctggaacgttcttcactaacaggtagtttgataattgggtttctgttgttttctttaagttctcgaactgtagtggctgcacacagattatatgttgaatttaagtcaaatgggtaccaaccgatcttcagaaatggaagatctttttggttctgtgttcttatctattttttgatgggaaagcatgtgagttaggtgaaaggcatttggtattgcctcatggattttcattaattttaatgtgaaataaattgtcagtcagtttgatctcaaatgccatgaactaccataattgtaatgttttaggattatattgaatctttttctattctgtttttgaatttggatattttggaattaagtggttgcaatttgagtctttttcttgactgctgtagaccaccgacactgtccaaactttgggaaaagaagcatattctactgtttgcaatctagaacatagtctggatagttcaaattgttgtctttggtgaaaatgaagtccatattgtcagatgagtactttcttttaatgatagtcttcattcttttttctttttggttttggttgcacaataattaatggtgagaaaaggaaatacttcacctatgcaatcatcaaatttcttgttctctcctatctatctatagtttctttgctccaatactatattatgtgtcatgagggctggtataatttctcatttacttccctgttacatttaagctatttcattctatattccatcagtatttgtcccaattccgagcaaggtttctttttctgagaatttaatcttctatgatatattattttatactactgcacttttatcagcttggaatttttctttttttgatgcatgtcaaagtaattgccttaccattttacatgtcatattaatgaaaaatttattgtatcagg

SEQ ID NO: 50490 - DNA, 937 bp, Ricinus communis
  Intron number 1 from transcript 29851.m002370 (locus 29851 .t000012) derived from phytozome v7.0 (chr-ID 29851; pos 6 9416 to 70352)
gtcttgctgttgccgctgagcagagaaggaacaccgtgagttccccccttttttctttttgtcttatttctttttctctttctctttctctctttttttctttgaatttttatgtaggaagaagtgcagatttagtgttttgctatgttttctagtgcaaagtaggaagttattacttaagtctgtattctcaattaaatttgtaaagaattctttattagttgatgctaatctgaacttatgctatctgtgcatcttctttgccgtggcttatttaaatgttcactaactttttagggttttgagtccttgctttttttttaattcttaatttcaattttaatttttacatgcttgcttattctttctattaattgattttcagttcaaggttattctttactagcagggagcagcttaaataaaggaagagtctgatagttttttgaaaagtattaactagagtgaaaatggtacttctttttatagtggaaaagtaagtgtctttcacagtttgcttatggacatacaatgagacgattatctatgttttgctaagaaccccacgggggcatatagtaagactaactgaattagaagatactaatatttactccatttattttaagtcttgcaaccctattgaagtgttttttctccttcttcttcttattattatgaacgtgaccaacaaaacccctgtttctggggtagtcattttgttgtgcactagtctctctccatctgaggggaaaaaggggctgttggctcttaaaaggcttgattattgtgatcatctttacttcgtttccctgaggtcacgagcaattgtatatcacatgtcagtcttgtattgtagaaaggccagttccaatgtatcctttccttgtcttcttctacaggccacagtccaaaaacaaggagattataactactg

SEQ ID NO: 50491 - DNA, 599 bp, Ricinus communis
  Intron number 1 from transcript 29842.m003627 (locus 29842 .t000124) derived from phytozome v7.0 (chr-ID 29842; pos 6 17681 to 618279)
ggtatttcgaatttcaatgcctattaagatatgtattttgcagctgtttttggttattttaattgactttgaacacggtgttttacaatgttaatatttttgtatcactcaaactttatatttaagttttgaatatttacttttcttatggttttatttggttgttggaagagttcagttttcagaatgcaaatgtttttagagcttgacatccattactgttctttatttaggcctttgataaggtagtagttatattcatcagctatggtgctgcttagttgaagatttttttttttccttcttgttggtcaatcttaattagtatttgaagacagaatgagtatgtggtgatggaaagacacattattccaaactcacagattattttcctagtttaggaagtacgggatattgaataatgaaagatgactccagccacagaattataaatttgtttcgatgcctcaatatatttgagctagtcgttctctttcttcaatgcgaaatttattagttgtttcatcaacaaattttattttttcatctcctctggttttcaaatattgagagttagtcttttatcagctattcaggct

SEQ ID NO: 50492 - DNA, 850 bp, Ricinus communis
  Intron number 1 from transcript 30068.m002659 (locus 30068 .t000149) derived from phytozome v7.0 (chr-ID 30068; pos 9 51046 to 951895 reverse strand)
gggtttgtgttttttctttcttttcttttgtattatattgcttttatttttttattttgaaaaattggctttcttttcttctattagtttggtaaatgctgtactcacatctcttgaccagcatttgtcctttacggcttttgggttttgttgggtttagatctgtgattactgattagggttttcaaagattcagtcttaatggttaatgacctaccctcaagcttgtaaggttttttttttaaaaatttttattctctactttttttgctttttattttttggtaaatttttaaaaaacaagggtaaatagttcttgttttttaaatttttccaaaatagttattatttttaataccagtctttttcttacttttttttcttctttattgtcaactcttgtaatttactgtcataaaagtaagttgaatgtattggataacattggtaaaattactcagtttttttttttttctcttagacttttgtgccttttggctctgttggatgagtgtttttattttgatctgcttttttacttgtcttttcatgtacagtcattcattctatatttcagatctttaaaacagaattcaacaatataatttctgtgaatcaacaaatatttcactcaatcgcatatcacaaacaaatgggattgactggtttctcagatttgtgtgtttcattggttttttctagatgggttttaattgtctgtctgaactgcacttgcctaattctgctcttttcttttaataagttgtttctagtttaatctttgctattcctgcattttcttattcgggttgtattttgatttttgcatatgaatgccgtgactgcagat

SEQ ID NO: 50493 - DNA, 749 bp, Ricinus communis
  Intron number 2 from transcript 29938.m000598 (locus 29938 .t000015) derived from phytozome v7.0 (chr-ID 29938; pos 6 5754 to 66502 reverse strand)
atttgctgctgcaacaaggtgaaattaaccatctttttataattgcttgtttgtttttgttgtacgcagatattaatcaccttctaataaagggtgcatacaaagtataaatgcaattttgagttgatattaaaattgttagcattcatggacatggtccaatactatgatatgtgttcacattattgaaggattatgtgttgtatacctttggagaggtaatggtttgtggctctggtcattaaccgaaaactatttgtggtccaattccttctctcccatatgctgatattttatgaaacctttgcccagctaccctggagataatttttttctcccccattgatgagatcaactgtcctttaaaaggaaccattgaggataagtccttggctatctttctttatttgttttgcctttgcgatttgattttgaatatcttttgtcttttcactttctttactttgtaaaattttcatgcacataattgtttacaatcaaaatgaatttcattaccgagcttaatgtgtgttaattttccttgcattcctcctgctgtttatatttctagcccaaggtcttgagatactcaatataaattgaattcttctgatagacagccaggaattttttagtttattaacatgtgaagtccttattttccctggtttatgctttttcttgttggctttgcgatccttggaatgaagttgatgttagtctaatttgtgttttttcaacttctatag

SEQ ID NO: 50494 - DNA, 599 bp, Ricinus communis
  Intron number 1 from transcript 29938.m000598 (locus 29938 .t000015) derived from phytozome v7.0 (chr-ID 29938; pos 6 6947 to 67545 reverse strand)
cttttgttagagtttctctacttcaatttcttaaggtaagctaattaatctcttatatttctcttaatcacagttcatagatgtttcaatctaattgatatgtatggtctatatttgttttctttgccttctcgtttgatcaaaatcttttatgatatttgtttttattatggttattttgattttgcttaatcaagttagtttttatttgatttactgttatgtattccagttattgtaataaatagtatatgcagtttacttattgtgtaattagcttgtctattcatctaaatcttagcagattcaactgtaattcatcatgtagcttgtgaatcgttattaatttgattcaattgctattatttgtatttgtcacttactaattaccagtattacatgattattgaattgatcagaaattgcgtcttaaagatgatttctttataatttcctgtttatcaaattttctttctaattgccatgtgatgtgatttttttttatgtttttgggttttggtccgtttgatatatggatgctgttaccatctgtagtactaactcttgtgttgatattacttcagttttaggcatcaata

SEQ ID NO: 50495 - DNA, 795 bp, Ricinus communis
  Intron number 3 from transcript 29842.m003629 (locus 29842 .t000126) derived from phytozome v7.0 (chr-ID 29842; pos 6 29295 to 630089 reverse strand)
gagacatctctgcggatcattatcaccgatatctggtgctcattttacacgtttcgccttctttttcttttgtttcaatttaagtttctcggagtacaggaagctgcttagcagtttgttgagttttcattccatttaatctggaaaatataaataaatatatatttataaatatgaacataattcctaaattcttctggtaaatgatacgtgtttgtctttttggggtgtgcgttagtgattgaacttgtttggaaatctgatatccacagcattagtttgatttcttctcctcaattgttcttgcagaagtttaatcataaaatatcttttaggttcggttaagttaaagacatcaaaaaaattattttctagttttcatgttttgttagccttaatctgaaaaccaggtctctaataagatttgatctatgagaagaagaagagtgcagcaaatatgaaagtgagaacatggaaggggtaatctagagatactattagcacttatggaatgggcctgagatatgcatttacactttttgacaatttgtttgcacttaacatgcggtcatttatatctggtggccaacatgtcaaaatttagtttaaagtattggatgcagacatcatatagtggaagttttcttcacaccagtgttctttttggttttttcccttggtactttttagctttaaagtgctgggacaccttaatacctcatacagttagctaattttaagtagaaagggaacttatcaatttgggttcgttatgacatgaaaaaacaggaagat

SEQ ID NO: 50496 - DNA, 823 bp, Ricinus communis
  Intron number 1 from transcript 29908.m006070 (locus 29908 .t000121) derived from phytozome v7.0 (chr-ID 29908; pos 1 454801 to 1455623)
cggacacaaccgcaggaactccttccttatccgaggtacttttcactatcaagttttgcttcgattgactttttaatttatagatctaggcgaggttgctgattttcttgtttatatcattttggatctttgatattttgttcaacgggatcgattttgtggctgtagaaaattattggtgaaacgagaccgtgtaatggtgtctttcgaagattaaattgcgttgacgatgctttgactgttttcaaaagtgtttttgagtttaatgactgattctatgtgaattatgatgcagcatcaattgagctacatgtctatgcatcggatgctatatcaaactgcttaactataaatgtagagataggcttttaacaaacaaagatgggttaggcttagcctcttctttcttttttcagtgatgctcattcagcttgagcttggagatacaaaattaacccaaaaaatgaaaaaagaaaaagaaagaaaactttgacagcctgggatatttgggtgaattgcaatcaatttataaagactgaattcagaaacatctcttttgttttctgtgcctataatgcatatagattcacattttttagcacttggattgtgctgtgtatatagttttgccttttaaccatacatatatatagcacttttggatttctgtgagagtttagggcttgaggccattaccatttagcacatatttgtttctttccttgcttgatattaacatcacttaaaactaattctgatggaaagttttttctaatgttggtatgcagcaatatttattgaaggacaaagaggagaagccaga

SEQ ID NO: 50497 - DNA, 649 bp, Ricinus communis
  Intron number 1 from transcript 30055.m001618 (locus 30055 .t000088) derived from phytozome v7.0 (chr-ID 30055; pos 4 38470 to 439118)
gtctagaagccggtctttggcaggtacccttttgcttcatcccgtgaattttaacttccatcgaactcctttcttcttgttttcttttttgaagttttaaacttaattatcttgcagctgcgtttctaaattcatttatcagttgattatatgagcttgagattatattcctacacctgaatttggtttgccaatatgatatttactcaattcgctgcaaattgttcttcaatatactgttgatgatcaattagcttttgcacaaaactcaacgcagtttcattttgttgctctcaaatagtagcattttagatgcatttccaatctcgttattacaagtggcagaataattcaaagaccaaggagtagttactattagtgactcataagatgagaggaggaagttcgttcatttgcgataatggttttcttgaattgtattcagtgtcaaagtatatgactgcccacaacaaatagttttagctcaatctcaattataatttgaaagagaagaaaacccccaactctaagtggtgcttccagaactaccagtaccaattttattgtattactaattgggatggcctcttgtttccaaaatgctatttcttaagatattcagcacaaaagaggagaggaaggaaggtga

SEQ ID NO: 50498 - DNA, 991 bp, Ricinus communis
  Intron number 2 from transcript 29889.m003270 (locus 29889 .t000036) derived from phytozome v7.0 (chr-ID 29889; pos 1 49279 to 150269 reverse strand)
ctaaggttgttgcaatttcctcagatttactaattactattatctattgtctgctttaatgacttagaatattcttttttatttgttttatggctcgattcatgaggaaagattctctttttaacagtagattagtgcatggttatttgctgaaattagtatctttctaaatcaaaggacagtctgttgattgaagaactttattaatgttttaagtttcaatcattcgatttgtttatttcatggatttagttagtttctaattgtattatgctctcatgccaagttgctaaaccacttgatcccatgattactcacagcacctcctgttttgatcggatcagaggagcttggcatatgtggctgcctttcattcttcagtcctgtgcaatattgataataagatagatctggattattgccaaatttcgttttcttttttgccaagtgtagttattcttttaaatcacagagacagataaaaactggggttctgcatttggcaaactatttcctttcagctttaatcatattccaaaatatgattttcaggtggttgacttcctttagaacaaaagacatgcctgatctccttttcttagtgaacgttgtgcccccagatagaatttccttgtgcttgtctgattcatgggaggccaacatggatgatggaagtttcgctgatagtacctttttggttttctggaaggtgttttaacagtagctctccgtacaaagtttatgttgtggcctccatgaatattgatttcagaaatatatatctcattaatactgcttgactggcagaatttgtaagatctgaaaattttgatgatcaaattgatatatcctatctaaatcataagtcactcctaagttcttatgttgtgtgtttggttatctagttttattggatatgacatagttttaaagtaatatgcaatttggagagtagaacccaagcaatacatttttctctatgagcaggtgg

SEQ ID NO: 50499 - DNA, 572 bp, Ricinus communis
  Intron number 1 from transcript 29854.m001121 (locus 29854 .t000032) derived from phytozome v7.0 (chr-ID 29854; pos 8 33547 to 834118)
agaaccatcctgataagggaggtgatcctgagaaggtaaattaatttttttcttggctaaaataggagccctttactaatatggtattatttttattttttgctcgttggagagtattcctgtggcttggtttttggaagttaatttaaatgcttagtttctacgcttgagtgatttatatgaggaaattgattgagaagagaaaattatctgataagaatttggaatttgaatttaattcaattaactgcttaggattggtggcgactgaatgttttgttgatttctaaagagagattttttttttctttctgtgtatttgatgatagtttggttattgagaattcgtaaataggcttgatcttgtgcttgttactggggcttcctgtccatctgtttgatggtttagtataaagggttgctgtaactatgggtgatgtgaaacttagtttcaccattttgtttgtcttgtttgatatgatgttattgaagtcatgtgtttaaggggttgaggactgagagttgatgttgttggattatgctattgcagttcaaagagctagctcaggctt

SEQ ID NO: 50500 - DNA, 1027 bp, Ricinus communis
  Intron number 1 from transcript 30115.m001209 (locus 30115 .t000035) derived from phytozome v7.0 (chr-ID 30115; pos 2 46248 to 247274 reverse strand)
gtgtttctggtacttggtatgtttttcttaaattttatctaaaaattctttcctttcttgacaattaatacaattatctattttttgaatttaaaaattatctttgtacagtcaatgaatagtgactgaaacgtttacgattgtcttgatggataagagacatgtttattactaaaaatatttgagatcttgatggtgtctatggcgacaaatttcaactaaagatgatcctggtacggtggggattattttattagttttatttgaagctaagtgcattaactgggtacatatgtatgttagtattagccgcttcaaagactggaatcgtccggtgtagcttataatcttgaataacataatttcagctgtcaagtggcatcttatagctgtgagggtgcgaggtaataatcaagatacaaatatgtttcataaattgtagcaaaggttgttcaattctatgaataaagaaagaagaagcaatttaggagtatcatatcatgagttgattaagatattatcagaagtttatcatacaacttggtttcaggtagcaccctttatgcactatggtacaaaagatgaaaatcaatgctgtttatgtttgcgaattttagcatatagcagaatgattcttaagtgtcggccagatccccaaacagcaaaagccatgataagtcttacaagttaaatcaaatgataacaattgactaatcagttggctattacccaattcttttattttgttgtttgtgctactaaaatcaaattgttgtagcatacagaattcaattttctctgttgattctgaatatctaagaaactaatgctagccaggttgatcatcattcccagggtaattagacattcagaaaactatccagtctaattatcaaaactaaatgaagaagtaaaactctttgcttttggctgtcctactgaactaattgtttgactcccaatcacatgcaatggtaataactggttatcaggtactgcaagtttgataccttcactcctgcagcag

SEQ ID NO: 50501 - DNA, 959 bp, Ricinus communis
  Intron number 2 from transcript 30138.m003905 (locus 30138 .t000079) derived from phytozome v7.0 (chr-ID 30138; pos 5 61805 to 562763)
ccacacttgacccattttcagtaagttcttaatctttttattctatgtaattaatttgtgagtattttcttagtagaatcaatagtttgagaggtctttagagtaatcaactgttgacattctttatttgtttttttcatatactagtttgttctaatacttcacatggttcttgaaacttttctctgattatgttgacatcttcacatgtttctctatttgcaacagttagagtactcttcttgaggttaacgagaatacatattctaagtatgaactatttggacaagtttaagaaatgggatacttgaaacttgtttctccaatattattcccattttggtgctcatgagtgtcaattttatgtgtctgattattgtgcatacctggacaatagagcatttgaggagacaaagcataggttcaagttggtgttctccaagagttcattattcctgggcttttcatatttcctgctttaacttatttattttctagattgtgagattttccatatttaaatcttaggcttagtttttctctcatgaaatgtgcatgcgcctctgatacccatatggtggtggtgtcttctatactgttccttggagttcttttaattactttttaattatttatttctgcagttctcctttcctttgatcatgtccttctatggatgaccactttgagtttgccaaggagcatggcatcgaagatcatagtctcaagatatttttaggaaaaaatttgcggtgctagtattctggagattaactgaacaagtttaagaaaaacccatcttttacagttgtatatcatcaattttagtcttgaaacgagtaaagttgaaacaagcattatgtttatcagtttcaagatctataatctacatgaagatataagatccttttatgacagtcttttttcactgtattaggattcttgacagtgaagaaaac

SEQ ID NO: 50502 - DNA, 444 bp, Ricinus communis
  Intron number 1 from transcript 30055.m001580 (locus 30055 .t000050) derived from phytozome v7.0 (chr-ID 30055; pos 3 00025 to 300468)
atcctctgcgaattggtgagttttacaattttttttttaatttcaggtcaatctcaagcttactacttgattggatcgcatactttcttcttatacatctgaaaatttatattcttgacactggaaatttttctttgtgaaaaggaaaaaaaattgttatttctttgcttggatttcaaagaattaattctccagttcggattctatatcttggaatatgcttgtgtttcttcatgtatttcgatgattttgacttccaaatgcattttgcttttagctaggtacaaaaagtaaaacataaaagctatgagctttacctttgagttacattgatatattcaaatttgctaactttcactttcatgtttttggtatgaaataattaaataataatgatgtcggctgtactttttataatgcagggcccaaagagtttactgcttt

SEQ ID NO: 50503 - DNA, 575 bp, Ricinus communis
  Intron number 2 from transcript 30055.m001580 (locus 30055 .t000050) derived from phytozome v7.0 (chr-ID 30055; pos 3 00490 to 301064)
gcgggtcagtagtctctgatttttcctatatagttaccccttctttttgaatgtgaaagatgaaactatcattctgtttctccaattctatgtagaaattcagttatcagtattttcattctcttcattgctttaaccaccaggagcttgaagggcactaatttatgttagggaaatttattagaaattcatttgcagaatctgcctgccctgtttagcttcaataatcaataatttggtattgtcatagaatttgcttagctctactgatatgggcagaaaaattatgtacctgttaactagcataatccctttttgtaattctggacaatataagttctgcttacccccgccccccgtcttttgaatctagaacagaaattgtctgtaattgcaacataattatcacataattgttagtcattatatagctatgagaactagtgcttattattgtaacttttctttgatgtacctcaaacatgctatttccttgtgctaattataaaccatgcttcttttagttgttaaaagatgagttcttcaatttatctttcaggggatatttgagagat

SEQ ID NO: 50504 - DNA, 694 bp, Ricinus communis
  Intron number 1 from transcript 29869.m001174 (locus 29869 .t000039) derived from phytozome v7.0 (chr-ID 29869; pos 4 22605 to 423298 reverse strand)
acctttctgtcaagaacaagtcaaattattacaaggtaagctttgaagttgttaagttttagttgaattttgttactgattacttttgtaggtttcaggtttttcaatgtaaatgaaaatgttagaccttctggattgtcctaatggctgacccaactgccttcctttcttggctgtgaaaacgtgtgctttgactattccttttttgtattccaagagtccttttttctttctgttgatttttttttcaagattattaggggctgtgctggttacggattttctacaatgatggattttttattactggccttgattccttctattttgtgcattcataactgaaaccaactgaaaaagacggttttttttgcagtttttaattgatctactcaatttgaatggtataaatatgaatttttcggaacttttcttaaaatttgtgataatactcaaatggtttgcttagaagtggaggagtatacatcacaattgggttttcgggtctttggcgtttttgctgtatactcactgtcatctgatttatgcttgttatgttgagtattgaacttctatgagatttgcgtatttacatgtttttaggtcgtgcttgtgctgttgctaactgtatgcttgctttgtggctgatgatgttgtagtgtatacttactgtgttataaagtagaagaggata

SEQ ID NO: 50505 - DNA, 543 bp, Ricinus communis
  Intron number 1 from transcript 29889.m003399 (locus 29889 .t000165) derived from phytozome v7.0 (chr-ID 29889; pos 8 74907 to 875449)
ccttgtctgttgctcttcttctcgcccatcttcaggtacctcctctccaattactctactatttctatgtctatctcttcctctatgatctgtttctaccttctcattgcttcaatttcaatcaacatatcagctcttttcactttccatcaccaacttattttccttttaaaatctacttcaacactctgattacctgcttgggaaagttcaaaccttcttcttcttcttcttcttcttcctttcctttttttgggcgtttctgttcttctccgttgctgctcttttgaattatttaattaagcttctatgttttacatcatttctacaaatctataactggagcatatgcccatagccaaatcaaacgattgggtgactcctgtagtcacaaatgaattttccttagttttctttcttcttagcttacttgccgaatcattttagcttttccttctatttctccttttcttgatctactttacttctttgttagctgctataattaggactgttagaataaacaaaatttcaatgttgcag

SEQ ID NO: 50506 - DNA, 875 bp, Ricinus communis
  Intron number 1 from transcript 30128.m008991 (locus 30128 .t000452) derived from phytozome v7.0 (chr-ID 30128; pos 2 046091 to 2046965 reverse strand)
tactctcattcgaagtgctggtgctagaggagctggtacgtagttctacctctcattgttataattatgttaaatcttcatttgtttgtttttggtacctgtacttttttcttttgctgtggatttgattcaatgtttatagaataacggattacatcgtcacatcctttgaataaatttgctgcttgtttctgggttcttattttttagattgttttttttttttaaaatatttttgttattttcactaaaacaaaagcagaaatagagggccctatttgcagagaattattacttttttttttccaaacgaaattgatttttaaatctgggtagatatttattacagtattgcagcaaagtttctttgttattcctttctgtccaatcgttttgccctaagttggctcattggtaagagtgagacattttgttctattgatgtattctttgttgttttttctttcacttatttctttctttttcttttggtagtattttgtgttatttactaagtatagcagttaatccgaatttttgcattagtgtttgttctatttgatgatgctatgcttataccttccccatcttctttacttcatcgtccttctccgtctctcagttagaaagatgtgaacatgatgatttttaaattatgataagcagtccccagtgttcgtctttgtcaatagggacgtgagatgtttgattttttattttttttgcaattagattggcttagttaatgttattgtaagtttctagcaacagtgacatgagatatttgatattgtgtatacaatgaagtttgtcttatgtgatatattgtcataatcagctatatatgtggttttcaatctctacagtttgtttgg

SEQ ID NO: 50507 - DNA, 547 bp, Ricinus communis
  Intron number 1 from transcript 30111.m000716 (locus 30111 .t000019) derived from phytozome v7.0 (chr-ID 30111; pos 1 33109 to 133655)
tcttgattccaacttgatcattttcatcagtaggggtacgcttgtagtttttatatataatctcttttctgtttaatagttgcatgtcggtcattctgtcaaaattgcagtgatttttagggacttcaggaacaaggcagtctttcatatttaaatagttaatgggtgtaaatagtgtaggaagtatgcaagtttgaattattagtatcaaatgatcacttggaagactcaaaagttaatataggcatttagtttagttgtgattcttttaagcagtaaacactagtgattgaataggcagataggataccactaagacactattaaccaaacataataaagactgtatctgtgattttagataaaagaaacttggataaactcatgatccatactagtggagtcagagaaggttggtcattatgacagaatataagaacttacatttttatgatacttccgtctaatgctagaattataatgggtttggaacatgattgattgggctgcaggagaagcaaagattggactgatatacaaaagtgag

SEQ ID NO: 50508 - DNA, 863 bp, Ricinus communis
  Intron number 1 from transcript 29844.m003353 (locus 29844 .t000199) derived from phytozome v7.0 (chr-ID 29844; pos 1 138253 to 1139115)
tctttttctcctcttccccttctcgccctcttaaggttcttaataatcattcctttccatttccttttattatattttgttttatatcgtgtcattgcttagaatgtaatgttagctgatttgtttgcttgagttttagaaaagctaatttttcaagtgattgtatcgaggcattgattttactgctaacttcttcttcttctttttaatgaatttgttttttgattgttaatgattggttaatcttcattgtttgagtgatcttgaggtcaagaattggtgtgggttttttttggtaatgatcgattgacactggaaaagtgattaatttaaggaggattgattgattgattgatgatttgatggtgatcaatccatattttcatgcatttaattacttgatcgggtctaagctgcaatgagggtctaaaagactgcttaaaggagtgcgattttgtacatgcttcatttaattcatcataattcattccattcctaacattcacatttctgtccattaagttgagtttagcaccattagatatatgctatggtttttttttttaaatatcttaactcttatcctgcttatctagagtttgataatacacctcttatagtgtcaaaaggcaatataattgtgtatcaagatgaattaagtagtttatcacctatatactttgctcgctgtgactgctagagttagatttttattctttaattacagctattgacatgataactgatatatgcttgtgtttctttgtattacttgaatgaatttcatcaaggattctacttttcatgcctcctaacatttttcttttttaaggttggtgaattagagagaccccttatttcag

SEQ ID NO: 50509 - DNA, 904 bp, Ricinus communis
  Intron number 2 from transcript 29912.m005411 (locus 29912 .t000137) derived from phytozome v7.0 (chr-ID 29912; pos 6 94348 to 695251)
gctaaggctgttagtaatcaggtgcaatcaatgaaacatgtcgtaggcgttgtgtttttaaaattgatttttacttattatggcacttgactttgcttggatataattgatgtcaaagtagataatgttaatgtgttactgtctatgtgcttgtttctgtatgagccataagttttgatgaatttagctaaatcaaggaatgttttagttcttcatgtcagtccgtttactaccaagcctagctatcttaagatgtttcactttttgtcttcttttggcagaaatgatctgcaactgatttgaatttgttaagcaatgatgaaaagctaacacgtaagaagacctatcatctgttgatggttcttcagtgagatatacttgttacgcttggcttctgagctttgaattgttgtaattatatgtgctttgattcaacgtcatatctttgtttctatttggctttatgctttatgcattcgttgtctatcttaagatgtctcactggctttttaccacacctgctattggttttatcttcttttagtggaaatgacctgcaactgatttgattttgttaagcaatgatgaaaagctaacatgtaagaagagctgtcatctgttgatggttcttcagtgagatatacttgttacgcttggcttctgagctttgaatttcgatgaaatttcattgtgtggttatgcattttttagaatttctaatgtttgttgtaattttatgtgcttgattcagcgtcagtttatgcattcattgtcagctctaccctcttttattaacactttgctgcatgtttgtgcctagctagcttggcaaaattctgacttgtcaggtgcttggttcttattttcaggttggagataattactacaggccagatttgaagaa

SEQ ID NO: 50510 - DNA, 754 bp, Ricinus communis
  Intron number 1 from transcript 29851.m002467 (locus 29851 .t000109) derived from phytozome v7.0 (chr-ID 29851; pos 6 72577 to 673330 reverse strand)
attggtgtccagttctacagctacactgccttctggtaatctttttcttttcctctatcatatttgttgatctagtggaattcaattctactggtgctgtttttcatattgcaattaacatatgacttatttttcggaagagattggacatagatttttttttgctcctaaattaaatgcagtttcatgttaagttctggctactaattgctggaagaagttgccaagattttctttttaatttaatctcataacttgtaagtgctactcaattttgacaacttttttcaaattaagaactttcaaagtcaggtaactatagccttatgctgcttaattctacacatcattatttcactgaagataatgatcaagaatgtattaaatcacttggattttacctattttctcaccctagatatgaagagatcaaattggatttgttctttcctgattttccatttattttgcgtgctaccctttgaaaacaaattctggttttgttagataattcttcatgtgaggtgttgtgtgctgctgtgttgctttctattgatgcaaagcatctacttgtttcttctacttggggaaaactaatatgaagacccaaaagctgcaagttgaaccaactttagaattgatgaatgttcttttggattctgtacataagcagcattttgagaattgcatgattaagtaaatgtatccaactttctttcaacatgtattttgtctcagctacttggtcacaatc

SEQ ID NO: 50511 - DNA, 547 bp, Ricinus communis
  Intron number 1 from transcript 30147.m013848 (locus 30147 .t000119) derived from phytozome v7.0 (chr-ID 30147; pos 2 917153 to 2917699 reverse strand)
atcttgatcgagagagtatcaaggctctcattttggtatgaactgaatgcccttctctctttctttatgtgctcatgtgtggaaaggatcaatcattaacaaacatttctttgttttgatgtcttctaatctattactatgattcaacttgtccaaacttcaatcgactaaaacttgttagttagactttcaccttcaaggttgggacttatccctttctttaaataacaatgttgtacgcattaagatctgtattaggcgaagacttttcagcatcattctgaatatatatatatatatatatatatatatatatgttcatatgaaagagatattctgaataggctgttttaatgttggactatcgtaagtggacttttatgtgtaaccatttgttctttgttgtctaatcaacagtagtatcatctatattatcaaaagatctaatgatttcataataagttggtttaagttttatttcctaatttctcactcttatgattttacaaaaggatatttttgctggcgggtctgataccacatacac

SEQ ID NO: 50512 - DNA, 307 bp, Ricinus communis
  Intron number 1 from transcript 29986.m001594 (locus 29986 .t000010) derived from phytozome v7.0 (chr-ID 29986; pos 7 0132 to 70438)
ttttgagaattaaaggtacacctgtgtagtttctttttcctagtcccaggttgcatgtgattagcccagctctaattctttttggactggctgacgccaattttaattgctgttatgatggttatttattagatcttccagaaattatcattactgttttggtgggtcttttctattcatgttcagaatttgtcacctcatagtactaaacaaagtcatgaaccttgcaaatctagttttgatgttaattctttttcttttttctttgccagagagctagagcaattaaggagattgataggaatcc

SEQ ID NO: 50513 - DNA, 619 bp, Ricinus communis
  Intron number 1 from transcript 29957.m001407 (locus 29957 .t000016) derived from phytozome v7.0 (chr-ID 29957; pos 3 15182 to 315800 reverse strand)
atagaagccatctccgatatttttttttaaaaaaggtaatatctttttttatttttccccttttgaaagagtagagttttgcagaatttttgcagaattgcatagttcttttcagttgtgatatttctgatcttatgtgtaggcatgtttacttttcaattggggagttgttgttttggctttttgatttagtttcaaaaaaagaaactgaaatatctgaaaattaagactgtttgtattagaaattgattattattgagtataaggttgttgttggtataggatgagagatgtttgcttttatacatacatgtgctttaattagtttgtattggcatctcagttcttatgcatcttctgtattttttttgtttttgtgttttaatttttagctgatttttgtagtctagagtatcagctacttcttgaaagattagtatgccatgataatttcttgggttctttcctgcaaaactatgtgtattttttggatccaggcagaagtgggttttgtttaggtatagcaatatactagtatgttaacgtaatttctttggttccctttctttgttctttgttttcaggttataaatcaagtttgtaatattttgcggcttct

SEQ ID NO: 50514 - DNA, 522 bp, Ricinus communis
  Intron number 1 from transcript 29818.m000398 (locus 29818 .t000010) derived from phytozome v7.0 (chr-ID 29818; pos 5 4363 to 54884 reverse strand)
ctcctaatcgtcgctgcatcaactgcaatagcttggtattctcttcctttctctctattttaagttttgggtttgattagctgcaagtaaatgcataactctgtgcatgtacagggtaaaatgcaaattgcaacttttctttccgattcttgtttttttcttaaatatttattatataagattttgtagcaaataatttgtaatagaattgtttatctagtaataatttcagtgggtagtttcgagctgaagcttttgttaggaacaagctacatggagaaagggtgatgatgattagtcacatggatgttttggtcccagttcaaattagcttaagatagttcttttttttttctttttcttttaaggttttcatttatcttttagagagttgagagttgaggcttttgaatttcctttttttttttttttctttttcgcttgctgggatggtcatgatttggaactaattttgtagtttgtgcagggtccacagtttgtttgcactaatttctggacttt

SEQ ID NO: 50515 - DNA, 714 bp, Ricinus communis
  Intron number 1 from transcript 30131.m007229 (locus 30131 .t000380) derived from phytozome v7.0 (chr-ID 30131; pos 2 381402 to 2382115)
accagctccgttggttcaactctctattgccaaaggtttaatcttactggttcactaattaatagctaaatattgcctttcttcgttcatttattttggtttcttgagttggtttagattctgcttgtaactaaggaattcggactgttggctgaaaaatagtcaagatttgtttattttataacctccttacttgatcttgatcttggcgctattaggtgaaattctttaactagaatgttaatcttggtgaaagaattggatacttatttggtcttagtagcaagtaatctcaggcagctttttcattcattgaggaaggagattttcatggttcataaactctgctaaattttaagctattggttattttgaatccctaactacttgaaatatagatctccgtggtatgaatcttgtgtttttcgctttcataattccatttgctgagtaaggaccataccaaaaagttaggtctgtttgatatgatgctaagttgtgcttgattgtttgatccataacttttcgtatgttttagaatctatgtaccaacttaagatgacttttcgtaatgaaatagaaaaaggaaagcttctccaaaggtggatactgctaaggaagacatctctttgtctatgaagtctatacatattaaagttcatgctctttcatagtgcaggttattggggaaagtagctttggtaacaggcggat

SEQ ID NO: 50516 - DNA, 647 bp, Ricinus communis
  Intron number 2 from transcript 29838.m001663 (locus 29838 .t000033) derived from phytozome v7.0 (chr-ID 29838; pos 2 44354 to 245000 reverse strand)
aggtaattttcattgtctctttcttctttcttctttcttatactgtttaccatcttatgttgcataattgaaaagaaaaatgctctatgtgcatgcataaacatctttctagaaattgcaatcaatcaaagatggtataattaagttgaattgaagatctacaggtgtaggcccacaggtagaggagaaagaactgtgttgtcactggtttttaattgtgtcctaagttgcaaactggacaagttttacctttatgatacgactaattttaccattttatttgagttctacataatgcatggatccttgttggaagttacgttactggtatagtgtttcctaagttaagttaatgacgttgatcaatttatgttaacattagaaaatactatctttatgttttgagtctaaagaagtttaagttttcagcttcacatagagtgatttggttttatacgctataaagattcaagctttgctgaaacttgttggtttcattttctgcctttgtgtgtgcttatacttatgtcccctagctggtttttcattctaattttttgttgggtgcttgtggaatgagcatcctttatgatagatatgttcctgtttgtgattttgactttgatggtaaaatgcttatcttcagg

SEQ ID NO: 50517 - DNA, 702 bp, Ricinus communis
  Intron number 2 from transcript 30146.m003568 (locus 30146 .t000145) derived from phytozome v7.0 (chr-ID 30146; pos 1 070613 to 1071314)
gaagcgtaagtcctctctctttgtctctcaatttccaaatcgttttctttaatttcgtgtatcaatgtatataacaatgaaattactgttcataacaattaatgatggcacacaaaagatttgctccagtaactttgaatactctttaggtctaacgtgcatggggtttgctaattatctaaattaacctgcttaaacaaaaattcatatgttataaataatgaacaagaatgtttacatataatcatctttgatgttaggaatatgttaaatacttgatattactattctttactgtccatctgactatacgtatgtactctcataataagaaaagttaatgacagtgattaaaagactaaagaagatcatatactactataataaagtgtttaaaaatgagtcagagttacgtggtaaagttacttttcctatgtttttacatgtcaatgaagaatcaaataacgcagaatatctaaacaaaacaaaacaaaaacaaaaaaagaacccagaaacggaatacagaaaagatgaaaagcaacattctttaaatttcatatagtctaaagttcattaaatagttatctttactatgttcatgttcgttaatttgatcaacatttttattgtatgtgacgtacgtatctatttgtgatgaatgaactatgacttgcaggctatttaaagaatctccacatccag

SEQ ID NO: 50518 - DNA, 332 bp, Ricinus communis
  Intron number 3 from transcript 29883.m001957 (locus 29883 .t000012) derived from phytozome v7.0 (chr-ID 29883; pos 9 2915 to 93246 reverse strand)
agagggtaattccatctttcaagtgcttcctctctttgatgacattaacttcagcttatatttgatttcttggcacaaaaacacgtgcaagaaatcaattccattgaattcttccaaaatcatgtcatctgtgtctggattttcatgttttccaaagtaccttataaaatgcatttttttttttgaagctaagaaaaactgaattatatgagaattgactgaatagagttcaattgatttgaattcttgcatttagactttccaaacacactcatcatgttttccttcctgttataggttccatttccgttctccacgtttattgatttttg

SEQ ID NO: 50519 - DNA, 480 bp, Ricinus communis
  Intron number 3 from transcript 30128.m008912 (locus 30128 .t000373) derived from phytozome v7.0 (chr-ID 30128; pos 1 679904 to 1680383 reverse strand)
ctggaatatctaccgctcaaaaggataagattaaggttgtaatgataatggaaggatccatgttattgctgctagctagactttctgttaggatgatgcttatgagtaaagatgaaagtcatgcattttctaaaaattatgatttgggtgatattacaagacgcaagtttgctttctttcagatacacacacggacataagtcacacaaccttgaaaatcttcaaaaatcatatttaattgcaaatttgagtgtgtatgctgtgtcatgttgattgttgacattttgcttggaatgcaatatatcacgtgaattgtgacacagagcagtgattgcagtttcatgtacaccaacttaaaaagttaaattctttctttttgcagattatttgtatttttctctcttgtttctaaggttcacgattaattatgaccttgttgtttaccgcagtttaactttgatttctattggcaggggagtg

SEQ ID NO: 50520 - DNA, 470 bp, Ricinus communis
  Intron number 4 from transcript 29851.m002399 (locus 29851 .t000041) derived from phytozome v7.0 (chr-ID 29851; pos 2 44198 to 244667)
aggatttccttcaggaactaaagcagctgctgctggtatgtccaagaattcaattgtggcacggtttcattcattaagaatgtgttgtttttgtaagttcaagtaattgaattatagcaactgtgaccttttcaaacatgcgaattggctaaacagaattcaaattgaattaatttcttgcattttgttacacttttttggcaaaatgcccaaattttctgttatgcctgcttcttagaaatctccaatatggaagttaaaattatgttatatgctctaacatggatgtctattcttcgtttttttttttcagtcttccaatcagcttctctttcagcagcattaaaaacttgtatagtgctagactaggatcatgtttgcgtcactaattatgtttgctctgctgcattttggtgactgaacattttgaataatatgcatctacaggaggcattacaacgttgattgac

SEQ ID NO: 50521 - DNA, 558 bp, Ricinus communis
  Intron number 1 from transcript 29883.m001952 (locus 29883 .t000007) derived from phytozome v7.0 (chr-ID 29883; pos 4 7345 to 47902 reverse strand)
cgctctcgatattcgcattccttttcctggtctctccttgttctcatatttaaactttataggcgtgtttatgtaaatttgcatatggatcggtctgtccatggaaagaggtttcgacttagggttagggttgtgaatcctaaaattttgtcaacaattttactgttttgattgatgtgagacccgctgtagactacatatcaaggatagtcatatctttgtactaaggtgaaaactcatctagtgtggagaagacctctcacttttatgagctttaataccgccaaattcattattgttatgtatcagataaaggaaatcaaaggcattatttgacaaattgctttgtttttttgttaaaggaagtccatgcggtgaaccaatgaaaatactggcaaaacgattacagtaattaaaattcgataatgatatacttagaccatatatcctctttaacacaaagacagtattacaatggcacttttaggattaaataggatgattctactcacagatacttttaattttggagcagataaaacagggcttaaggaagtt

SEQ ID NO: 50522 - DNA, 615 bp, Ricinus communis
  Intron number 1 from transcript 29929.m004522 (locus 29929 .t000025) derived from phytozome v7.0 (chr-ID 29929; pos 1 73037 to 173651 reverse strand)
gtccatcagcgtaggggcagagtgtcaatttacatgtaatacttgtatttatcaatcgaataatataaaatgtaagaatatacttcttctatttgcttgtgaatttgtatgtaactaattaagcaccaatttttgaaagtctgtacttgtttgttttggtttcctctatgttatgccattttcaataaattattcaaattaatgaatgtcttccttcactagaaagtaaggaaaaacgaaaagtaatctgagatataagaaatttgtgaagggggttaataatttaaacatatatcgccttggagagtttggaatcatatgcatcagattaagaagctaatgtccacttgatcttttatttcagtgtcacatcttcaaagcaacaaactcagttgctgacagtctggtaaagaagggaacctcaaaagaaattgattgaattgtttgactataacattgctcgtgaattttttttcaagctttatgtattttaatattgcttcatagtgtatcttgtacctaaacttaatcttgaattgttagttctgctattatttttgttattctttctaatgttgagattgcaattgggagataggaactctatctgggttg

SEQ ID NO: 50523 - DNA, 805 bp, Ricinus communis
  Intron number 3 from transcript 30128.m008667 (locus 30128 .t000128) derived from phytozome v7.0 (chr-ID 30128; pos 4 30954 to 431758)
tggcacattaatatcctgttgtgtcatatctataggtatgcaacaacctcactcttgcaattaactcaaaggcactagaaattaactttaaaaaaaaatgcaccccaagttctgattgttgttaaacactgtgaatctttctgggcgtcataattttacactttgttatttgttggcttatgcttttatatgtaacaggtacaagtaatatatagatggtcagtgatagatagttgttcttatctaaggggttgggtatgaccttcatggatactaattcttttttttttttattggcttgttcgataccgattccgttaaatattaagatttgaatgaaagtatagtgtgacaaaacttttacatagacacagaagtttacttttgattttggaatttcaataccttttcaattctcaatgtgtaaacacctaaaaatagaacttctaatgaccactttttcaatcaccttcaagccatctgcttgctttttgcatccttctataaggttttcttgcatattaaattatattgaagaccccgtggtacttatcaacctcttaaattccagtaaagaatttttatagtaatcaggttttggctttgcgttccttgtttacttttattgtatgaagtaaagcagaatgactagcatcctttgaagcaaactcctgtcatgcttagcctttaccttagtgaccaccatgttggagttggcttacaatggcaaagaataaactcagtactgattgtaacatttgctctgacaggtgctgtacaattctttaagaagcttgatattgga

SEQ ID NO: 50524 - DNA, 725 bp, Ricinus communis
  Intron number 3 from transcript 29842.m003603 (locus 29842 .t000100) derived from phytozome v7.0 (chr-ID 29842; pos 5 08653 to 509377)
ggaatcctaatcttccaagtggttgtcaaggtacactactttatattatataatagtttttaacttcacgtgcgcattctgattatgaattaattattctggtcttagtcattctgttttaatttgtttatttatttaattttttgcaagttttgtggttgtattggtactatttgagtttgtatgtctcttcacttttggattgtataataccttgctgctgttttttctgtcctgttctctctttatatgaaatctgtggcttaccaagagggagaaggaaaaaagaaaggctgtcttcaacattctgatgtttgattgttctttcagttttggcatgctggttcagattctgctgttaacatactgatacgcgagtacgctgctttttgttgctaatacttaaaactgcttctttcttggttggcatttgtattttggccctcctttagtattcttagtggctgcgtttttcttgtatctggtctgctctttgttcttttggctttctttgagtgtagcatgtgttagtttcatgctcttcttcctcttgcttagtgtaagcgcattcattttagtatgaaatgtttgatgagtttatgacacattattagcagagtaatggtacttgattgcccatctcaatcaatttattgcacattgtacttttaactagcaaccccttattgcctttgacccttggttttgttggtgtccagatatca

SEQ ID NO: 50525 - DNA, 436 bp, Ricinus communis
  Intron number 2 from transcript 30128.m008819 (locus 30128 .t000280) derived from phytozome v7.0 (chr-ID 30128; pos 1 193226 to 1193661)
aaggaaagtgaagaaaatcttaacaaacattggtatacttacctaaacctttcttcgtttgattgtttcttgatttgtcttcagttatgttattgccagttgccacaattcatttctggtttctgtctctccctctctcaaagaaaaaaaaaaaaaaaaacttgcatgcttacttgaaaaggaacactaattctctgttgactgttttagctcaagaaacggttctcatgcttgtttctcagcttggttttattcattttctttaatctcacgctccctctgccatttgcggttctttaattttcaggcaaaaaattctttatttgcctctgttaatgcatttcttgattttacaatacttttatttattattctaagttatttttccattgtgatttcaggtgtttacgctacagaaattgatttaagacaacaa

SEQ ID NO: 50526 - DNA, 395 bp, Ricinus communis
  Intron number 1 from transcript 30076.m004639 (locus 30076 .t000203) derived from phytozome v7.0 (chr-ID 30076; pos 1 342173 to 1342567 reverse strand)
aggagaaaccctccatttcaggtatcctcttctaagtttgttttataattgatttgattttgttcttgttatttctgcttttacttttaattattcgtttaaaataaatgtgtttctttaggccttcctaggaatatattatttgcaattcatttcttatcatgtaagttttggcatggtttcattcctttcaaaattacttgtttttctgagttgaaagagttgaattctagcaactatgagctttccaaacatgagaatggactaaatacacttcaatcaaattgaattcttacatattttttgattctccaaacatttaccgtgttctgttcagggatttcattttttagcatgtctaacactgtaaattttgtgctctaattgattcaggg

SEQ ID NO: 50527 - DNA, 518 bp, Ricinus communis
  Intron number 2 from transcript 29827.m002563 (locus 29827 .t000036) derived from phytozome v7.0 (chr-ID 29827; pos 2 16247 to 216764 reverse strand)
cttgatactaaggtatgctcatttcttatttcttttttctaattaaataattatcatttaattgatctccttatatcaaatatctaatttgtcacaattgtatgtgagattaaaatttgcgcacattttttgaagttacggtagggtccgaattttgtgtttctaatttgaaatttggaaagttgtgatttacaaatgtttagactcttaggtttctttttactgtggtgtggtgaaagttaaaacatttctactttagattattagcgttttcatttgtcatttatcatttggtatttgcatgcctgattgctatcagcttgtccgaaagacaattaacagaagtgaaggtatgaggtgcgtaccagaaaaagtaatacatttgatatctatcacctttacttaaatggattcacctgctattcttactgaattaactatgttcttcgactgactttccatttcatggttttctttttccttttaattaatgcagggtcctgaggttagaagtggcg

SEQ ID NO: 50528 - DNA, 749 bp, Ricinus communis
  Intron number 1 from transcript 30128.m008716 (locus 30128 .t000177) derived from phytozome v7.0 (chr-ID 30128; pos 2 702473 to 2703221 reverse strand)
ctcaagagtaggagacagatagtgcctagaaagtattgttagttctacttttaagcagatgctccgtttatcagattctcgtcatttaattttggcattgtatctgtttgtttgttcagaaaatatttcgttcaaggataaaaacatttgatccgttttagattcgatgtaattcagagttgcggtttattaacctgttatttacttctttttgaatgctttggtcgcagttatattttggcttgcaaatttttatggtatatattatttattttgttcgttacatagcttgtttataattgtgttgctaaatacttatttagcaaaagcttctacggcgccttatctgcccatgtgaatgtttgtttctcacatgtttcatgtgtatttttttttaatttaggatagatgactatgcaattgtagccaatgaagtccatccctagcattatctcttccagggacttttgtatttcttaataatgtaggaacatactttcagcatattttgttggactcaatctaacaaacgctgcacatttaatttatttgataacgacatcatatttcctttcactccacgttctatttgttgcttttctagttgtgctgcttgtgtggtgctgctgcttaaggcatactatgtataatttacaagaaatcacaatttgttttttcttgtttgctgtgctaatcctttcatgtgtactataggcaagaggattgaagaaacacttgaagaggctcaa

SEQ ID NO: 50529 - DNA, 816 bp, Ricinus communis
  Intron number 1 from transcript 30068.m002654 (locus 30068 .t000144) derived from phytozome v7.0 (chr-ID 30068; pos 9 23136 to 923951 reverse strand)
gccacgaccagcctaagctccttttctcataatcggtactctctttaaaccacaattttaatttttttttgcttctgattagtgactatctatttatcctttcgttttcttttataatttatattatgaacaggtaactttataaggaatttaagcttcagcttattcgtttattgttacttgattcagtttgccttgaattggctggccgttttcaagaccaagttatagctataaactaagccgttaatccgataaacaactcacagcacctagtatataaaataggtttcttctaatctctaaaggagacccaaggaaggccaatcagggagttgcttgattgtttttctgacttgtgaggattgggttggtcttgagttctagtctctcactctaccatccaccaatattggtgggagtttaagagatagccattaccaaaagaaaagcaaaacaatgcccttatatttggattctctgctttacatatttttgctccataagttgctcttttgatgtgtataaccttatagtgtcagcaattgctagatcatgttgtattaaggatgtattattactccaaaagtttcatgtaaattaccaatatttggattctgtcatattaagggtatattattactccaaaagtttcatgtaaatctgcaatggttttgccttggacttaacacaactggcaggttatattcgtgagtttctgctggtatttgtcaggtgattgagattaatactaatagagtgatgttcttgttcaatcggctttcagctcgcataagtttcgtatcacgtgcaact

SEQ ID NO: 50530 - DNA, 528 bp, Ricinus communis
  Intron number 2 from transcript 29848.m004591 (locus 29848 .t000147) derived from phytozome v7.0 (chr-ID 29848; pos 8 62850 to 863377 reverse strand)
ataaggtgagtctctctctttcttgtttacgaaaaaaaaaaagtacaaatttggatatgtataattctagcttcagtatctacttaaaattcacctaaagactagaaaaatctacacttttgcgtgaatcctaatcataggcaatgttgtactgttatcttttatgtatgctagcaatgaaaacatcaattttactcaattctcgactctagataaaattgtaacgagacttaactagaaaatttggctaaaaatcgcctatttttaagaacccaggataaaattgtaattttgtcaaaggtttggattttttagtcataagcctctagaattggagattttgagtgtttcttttctctgattgttaggattatgcttgtatgtgtattttagtttaatatgattaggaattgatggttttgtgctttaagtattggttgccaactatttctttttttttcctttaacactgatatggcaggagtgctgagttacacttttcaaatctgtagataattgctcgagcaa

SEQ ID NO: 50531 - DNA, 553 bp, Ricinus communis
  Intron number 1 from transcript 30041.m000242 (locus 30041 .t000012) derived from phytozome v7.0 (chr-ID 30041; pos 1 65316 to 165868)
attatcatcagcataaatttggggtgagaattaatgggtctcctttttttctttttcttttgtaattgaaagttttagataagaaaagttttatgcatttcctatgggatttggaaagaagtaatgtttatttggtccatttttttggaataattggattaatgggtcgctcttatttttcttaaacacgatcaattatgctccattttgcataaattatagtaaactatgtgattgtaaatgttttgtgttcttcctgcaggttaattacacttcatttaattataagatgttgtagcagtttttgaattgtgtttttctccatttaataaaaaaagcacaacataattttagattctatggtttgataattgctacattctatagaagaaaggcactcttatcatttccaggatttctactcatgggattgtatatgcttcggatggcaaccttcttttctacattataatgtattctggtatttgattggatgtaatttgttaatttctattaatttaaagattttattttgtgggtatgatttaggcac

SEQ ID NO: 50532 - DNA, 907 bp, Ricinus communis
  Intron number 2 from transcript 30041.m000242 (locus 30041 .t000012) derived from phytozome v7.0 (chr-ID 30041; pos 1 66037 to 166943)
caggtactttttctctctcaatcttgtcttatacggagcaaattgttataattataataagttaaggtgaatttgaggtttggcattgttggacacttattcatgtttatcattaagattgtaattttttcagttcacattcgtgatttagtacttagtttttagatgcctcagtgtgttgaattgtcactcttgggattttaatgatatgagaaagaaaagtatttaaagtatgggaactttgtaggaagtctggaaacatgcttttagcaagtttttcttcaatctaatcatattttattaaaaacattttcaagaattgagacctaaagttgattgtttcgccccacaattgagatttaatcctttgtataaacaatttggattatgcctcagcagagtctggagagttaataactccataacattactcctgtgcccttgaacattacaattaccactaccattgcatgcagttgtattgccaaaatgcttaaactgatcaatgtgttactccactggcaactgctgaattactgcaggcatctttctgctgcattggtttctaaatcagttattgcattacaatcccaaggaattggtacttgaaatttgtgggctggttttaaagaaagagagatggaagtaattaataacttgtattgtagctttgctgtctctaacatagagaatgtcgaatgaagggcgttataatatatgttcataggtgattgtttatacctattttgttttatgtttgctgtttggcctcatgccttacgacctaatttgactttttctttttccgtttactagtacgcatggttcttctcataaatgtcaatatctgatcatcttaatctaccctttaggcaaccctgtgaaaggctcgaaggtgtcagctccg

SEQ ID NO: 50533 - DNA, 526 bp, Ricinus communis
  Intron number 1 from transcript 29953.m000445 (locus 29953 .t000022) derived from phytozome v7.0 (chr-ID 29953; pos 2 53348 to 253873 reverse strand)
tggaaccctcttcgaggtattgaaacttgtgctttgttttgtttttggatttatgctctatcaattagttttagagtttgtttgaatcttattttggttctccattttcagtttaatttctttatgggagtttccaagttattatctgtcttcttccccttcaaagacaaggtttctgttttatgcttgtttgaactttgggtaattttgcttttttcctttttaccccttgtaaattaatttcttaagcaaaggctatgcttgtttgattccatctcaaactcacaagttatgtcttattatttcaatctgaaatttgtttcacaaaacctgaaaattttggtgtaaaaaatgttttgcagttttcatcctaattttcataaaatagaattaacttgacacttgtcttcagtactatcatgaatctaagtttttgttctgccaattttatcaagaatcactcatcaacatctctgttttcaaattttcagcttagtggaagcaattgatctgattcttcaaggag

SEQ ID NO: 50534 - DNA, 783 bp, Ricinus communis
  Intron number 2 from transcript 29851.m002500 (locus 29851 .t000142) derived from phytozome v7.0 (chr-ID 29851; pos 8 32046 to 832828 reverse strand)
ccaccagtgcaggtgatcagcctttttgttttgttcttgctcatttgatctaatcttgcagattatggctggttcgtcttttcttactgcttgattcggttctcttgtttgttcttaggtaaagatatgctaagaaagtccaattgtttccgttgtttttatccaagatcgaacggaattggactttttaatttgaacatcattgtaaacataggccataatcagtgaataatattaataaaaatctccatttaacttttgtgaaatgtggcccccagcaccaccataaatttactttaccccaagtaagcgtcggtgtcaatgtcatccaccctttggattctaatgcgctttcatttgctgggagtcatgaccatttttgttttggcttgtttttccccattttatggttttgtattttgtattaatacttaagttttattggcattgcatccattatgcactcctttctttgatatactggcatgccgttgcatccagagaaagctccttttgtttttgcttctcaaaaccttccacggactcgtggtttttcattaaaaaaattgttcacgagatgaaattatgaacctataacatactgagcatttaccattattctacgcttttgagtgtttaaactcggtggcttttctagtgtgattggtcatctggatatcttatataatgccttttttacttaattttccctgcttcatcaaagcatactcagcatcctctcttgcaggcaaaaatcacttgggcgtcatacccattgcagca

SEQ ID NO: 50535 - DNA, 563 bp, Ricinus communis
  Intron number 3 from transcript 30128.m008627 (locus 30128 .t000088) derived from phytozome v7.0 (chr-ID 30128; pos 1 69102 to 169664)
gagaaggtaaacattttctctggaaactttggggtttttggttgatgtcaattagttagatattagcataaactccaatactagatatgcacccaaaagcaggtgctcagcttgagccactccttgagagctagattcatattttgccgtccaatcaaggtaaagtaaatcttcatctcggatctttcttaaatggcatgggaaaattgatgtggagaatgaacattgacttcatacaactggatctttttccaagagtattgcctaataaatagaatattgagaagtactgagtctggaattgagtaatttttaagaaagatgagctcacgaggcactctgtggatcaaacgttaagatctataacatgtagaagcaccttcaatattgttaaatgtttgtttttacacttaatagatgctttgaactaattgggtttaggacaactttgctgatctggaataagaaatgatattttcttattaattaattctcattcttcttgtgctaaggattctttacatgcagggtgtcaataccgagtctaatttcttgctggcgac

SEQ ID NO: 50536 - DNA, 532 bp, Ricinus communis
  Intron number 1 from transcript 30128.m008670 (locus 30128 .t000131) derived from phytozome v7.0 (chr-ID 30128; pos 4 45678 to 446209)
cactctccttctagcttggtaagtttccttaatccagttttatgtttttgctgattctgcattagatctgttaatttcttctccgatacattgttatccaatacttatttgcctgtgattgttgttaatttctagttcttttttaagattaattggatccgtgatttatttttcttatccacttagctttgcatgagatcagatagatgtctatgagcaaattacagttcttttcttttctttttctttgggtctcattcctataagatgttaatgggttgaattcgtaactgagtgaaatgttaatttattttgaaaagatcgaatcttttgttattttcatgggcttggcatttaagagaaaacactaaaattggttgctttatataagctgatattccttaaagtttaaacactcgttcttgttgcaatttaaattatgcttttgttgatattgatagtgcactgacgctgcaatttttgaatgttttcaacaggctgcaaccaaaatctctagtctgaagtcatttgc

SEQ ID NO: 50537 - DNA, 366 bp, Ricinus communis
  Intron number 3 from transcript 30128.m008670 (locus 30128 .t000131) derived from phytozome v7.0 (chr-ID 30128; pos 4 46590 to 446955)
aattcgcagaacttggagcagattcacttgatacagtatgcatcacttataatttgttcttttgaagatctaatgatgttttctctcctggctatttatggtcgatgcacctccttaacacatttctttgtgtttcgcacatccaataatctataattcaaagtcatggctttatgtggatgttttcttacagtcactatttcaatggaatagtaggataaatttggcatatcatgtcataactgtattcatcattgcatatcatgccccgtttgttttaattccaaaagttatctttactctgtaaaagaaattggtagtttgccctaacttttcaggacggtatcttttcaggttgagattgtg

SEQ ID NO: 50538 - DNA, 217 bp, Ricinus communis
  Intron number 2 from transcript 29986.m001599 (locus 29986 .t000015) derived from phytozome v7.0 (chr-ID 29986; pos 9 4056 to 94272)
ttgagaaagctaaggagaagtgcaccagtaaatcggtgattatttttcactgcttgctttagtaaccattttttcatatcttcttcttcttttttaattaatttacgtttctggttgactcgacttttcacctggaactgaatttatatatgttttatttggaaatcaatcaaaaaactgttctcctgactgtcagttatacacacactgcaggtga

SEQ ID NO: 50539 - DNA, 780 bp, Ricinus communis
  Intron number 2 from transcript 30078.m002300 (locus 30078 .t000093) derived from phytozome v7.0 (chr-ID 30078; pos 5 85599 to 586378)
tccagctctttcgtggtgacacgatcttgattaaggtttttaatttttaattcttctacttcttggcttggattattgttctgggttgttattggatttctgattatgtgtttctatactctgttctaatgttcatttggattaggatcgagatttagggttttgcgtagtttgttaattgttgtacagaagatccaagaactggattttctttatgttatagatattatggtatatgaagctatgtttttatctgactgagggtttgatcacctatctgctttttaatggtacactgtgctggtttgctttgtttcatgtttaacttgggcactgattggccgctttttaaattggaattggcttttatagggaacttatactgttaaggttgcttgtgttcagcttgtgaagtgggtttgcttcttatttggttgtgtgaatgttttatggagattatgatatatgaagctgtttctcaatgattgtggtttagctactgcctatacggaaaattactactaaaatattgttggtctgcttatttcaaagttcaactaaagcattgaatgaaggctgtttactagacttcaaaaagaaatcgccttctgtgttggtcttaatattgttaatcttgcttgtattaagcttgtgaatgcttttaattaattactgccttaagaatgttataaacccattttgcttatttgctgagtgtattgctgtgttgctttgtcatgtttagggaaagaaaaggaaggatactatctgcattgccct

SEQ ID NO: 50540 - DNA, 563 bp, Ricinus communis
  Intron number 4 from transcript 30026.m001448 (locus 30026 .t000012) derived from phytozome v7.0 (chr-ID 30026; pos 8 3862 to 84424)
tttggtatccaagaacacattgatcttggtatcaagtgagtttcatttactttatttattttattatgttgacaatgtaaatgctctgtttgttttgtagtgattataattatattattattagttcaattgttgcttctacaagttaactattgtttgtttggttagactttaatacgtttatttgagcttaacacttatttctgcatgtcaagaaatatgcacatttcaacgtgggtgttggattgaactacttaactcaatcacttctgcggcctgtacacttagttttttgttgattgatgtctgtctttaaagtatggacaatcatggacattgttttttggactgcatttacttgagtaattaatttatgctcggtgaaattgaattgtagcactggccacaatgaattctatttgattcacatacttgtgctgtttatatgatcattttccactaagcgctgacaagtgtacttcagtactctgagattttagataattttcaacaatgctatcttcaatctgattgatatgttttcttgaaaacccttgtcaggt

SEQ ID NO: 50541 - DNA, 587 bp, Ricinus communis
  Intron number 1 from transcript 30065.m001160 (locus 30065 .t000025) derived from phytozome v7.0 (chr-ID 30065; pos 8 29841 to 830427)
ggtaaatagaaaacaagttaaatttattttttttctgaatacctgatgggttctgcatggtaaaattcttttatgctgcaaaccttgaaagattttgtcaaatctgtcgattcccgattcatagaatgtcttgtttcttcttttgtgcctttgatttgtggcttttggtaattatattctgcaacttgtttctaactttatttatctcacctattctgtgtaggattaggagccatgaactggattcagcgtaaaatctatctctataatgtcacttttggtctctatatgttggattggtgggagcgttgccttttcagtatccttttctcttctcttctttttctttttgttctttgattgcttggatttggattctatcattcgacttgtgggcacattatgctgcaatttttctgtttgtatagctttgtaatactttatagtatttagtagacaaatggaagttattaagagtattataatactatttaatatattttaggaatttttctctaactttggggttaatcatgtaattatgttttgatttccttaatttaccagatactttggtggtcgttttg

SEQ ID NO: 50542 - DNA, 655 bp, Ricinus communis
  Intron number 2 from transcript 30065.m001160 (locus 30065 .t000025) derived from phytozome v7.0 (chr-ID 30065; pos 8 30462 to 831116)
tgactgaggtcagcaagaggtatgaaggaaacttttgtcttagttggtataattgaactgttggattttggaactcatagaacttttactgatttacagattttcttgctaggtatttagcttgtcttctgcagtgtaggacttattataatagtacttttacatattcttattatttctttgtatatttagtttctttaatattgtttttattatttatttaatgattcagcgaggttagaattatatttctttcttatgaaagtttgtgttgttcgggaggcaacgtggtcaaagaatggagtattccaattctgatgtgattatcttgttttcctgatattttgaaatgaagagaggttgagaaaagataagtgataaaaaacaatccatgctaacctgacgagaattaaatactataagctagaaggtagaaataaaaaaaatccatgtttttctgctgaatggtattttctatcttccatatgaatgcttttgttttttgaaatagctaacatgctgacatgcccttccttttttcttaattcttttgaatttggcttttatttagcttgcattctctcagagctaaactacaaaaggaataagttttcttataggttcaaatttagtcttattgtaggaggaggttaca

SEQ ID NO: 50543 - DNA, 761 bp, Ricinus communis
  Intron number 1 from transcript 30128.m008914 (locus 30128 .t000375) derived from phytozome v7.0 (chr-ID 30128; pos 1 686247 to 1687007 reverse strand)
ggttttgagcctttctggttgcaaccccagaagaggtaagagttctttgtcgtcttttttttttttttcttctggtttctatgacttttggtaatcttgcgatgattttttaacgacttttcgcttcaaagtttctgccttttgatttaggatagttgattgtatactactatttggagtttcttcggttgatttatgcatttttgtttctagtttcctgtttatgtttttgggttgatgatctgtgggatgttgaattattcttgattgacaatgttaatatctgataatttagtcttcttaagctaatcttgtgcaccaatttggcaatcctattgattttgaagttcttatattattttccttataggtgtttttacacttccagtagttttttgtacttcaatttgactgtagtgataccttttcttttctattacataattgttcagaaagttcaaacgtgccaagttttattttggtgatagaattcagaacttgcaagagcttggagcatagaaattctgttctgtgattattttactggtgctgatttcaatttttgattatttttgtgtctaattttatgtcttcccttgtagaggggcatgaattatgcaatgttgttttatgagtaatccaatgttgtgaaactgaggatcactattttccttttttatactttttctctctttgactttctaagctttctttccaaataaaacctgcactagggatctgctttaagtccatttagcact

SEQ ID NO: 50544 - DNA, 895 bp, Ricinus communis
  Intron number 2 from transcript 29848.m004675 (locus 29848 .t000231) derived from phytozome v7.0 (chr-ID 29848; pos 1 273039 to 1273933)
gacgctgattttaaagaaggtggacaaagaaactggtaatttgtaattcatttctcccttcatttctttttttttttttttaattattgttgctgagctttttttggctgataaataaaacaaaaaagaagtattttaaaagaaatgaaatgcaagaactcgattgaattgatttcttgcacgtgatttattccaaatatgacatttatacttacgcttgggcttattgcgatggttgatggagttagtttaagaaatatcgagaagatggtgaaacaagagcagcaattgtaaaccaaaataatcgttgttattttctctctttcccaatttttgggaatattacttgttcgatgtgtaatttctaattccccatcattaaatagaatgtatttttttgtttttctttttagaacttattctttaattattctggagcaggttactgaacttccaagtagtgtagtgttcctaagatgattaaaggagaaaacttttaatcttattgagttgcagcttaataggcattccattgtctagattattttgattatgttgtgtttgtcttattcagtcacgctagtttgaattcctataactctgtttctttgaacttaagttcaaatttcgacaaccaattgatacagatgaactattagtgatgtggaaaagactctcgttgggatacaattcactagtttcctgttcttttatgaccttgaaaacaaggctgactggtttgaacttctaaatgtaaatgataaagtgcttaacacgtgcaaatatgtcatgctcatgtctttgctgcattttctttgattccttctttgacagtttgtttccctttttgctcttatcaggatacaagttctattcaacagtggtatagctacag

SEQ ID NO: 50545 - DNA, 548 bp, Ricinus communis
  Intron number 1 from transcript 29929.m004621 (locus 29929 .t000124) derived from phytozome v7.0 (chr-ID 29929; pos 6 97266 to 697813 reverse strand)
ttgggagattggttgacattggagcagctcctgaggtatgctggcatatattcttgttgtaccgtaatcaataactggaaaactgaagtagaaagatattatctaattgtttaagctcaaatagccaacttatgaaccttacacacatgagaatcaactgataagatgtgaattgagtttaaatttcaaagacatagatattaaagtaggtcttattagatgatatttctgtcattagacatttgaataatgtgtttatctggatgattttttctctaaagactgtactgtttttttctattattattatttttaatgtgtggttctatatttcttctaggtctaagattatgaagttggttttggtggtaaggttcgaggaacatgcactggagctaccttggtttcgaatgcttttcaatattttggtcagtgactggctgaatatggtggtgtttcctgtacaaatatgtctagttgtgctttcaattgatcaaatttataatttagcaggattgcccaaaagaagatttctgtggctgtggcga

SEQ ID NO: 50546 - DNA, 327 bp, Ricinus communis
  Intron number 2 from transcript 30048.m000319 (locus 30048 .t000013) derived from phytozome v7.0 (chr-ID 30048; pos 2 70359 to 270685 reverse strand)
aatatccaagctttgttttatttcttttgacaaaggtatatacatatatattttttattttattttttcctatgtcttcgttttatccgcattatgatattgtctatctaattgttttaatctacatattgctctactatacattgtttatattatcttatgctagtatgtattgtgctgtataatgttcttgttgtgaccagttagatctggtgtttgattggtatacaacatgaaacggttttttttattttttatgatatgttcggttctatgattatttttgcatttgttggcggattttcctgatgggattcgtatgcagaa

SEQ ID NO: 50547 - DNA, 962 bp, Ricinus communis
  Intron number 1 from transcript 30138.m003886 (locus 30138 .t000060) derived from phytozome v7.0 (chr-ID 30138; pos 4 56683 to 457644 reverse strand)
aggtgagtaagcttagcatttaatcctggcgtttctttttttctctgtttttcttttgaaagcttttttagtacattgttgaactggttttgattaattatatagaaatagaggtcaggtaattttaacattgttctttaacttagtaggaatagagaatttacaagttacaacatttttgggacatcttaatagatattacgatccaagtatcataaagatatatatttgttcggttgtctttatgacctatgatgaatatactggatgattaataacctaatgcccattatgttagtaagggcctagtctcactgtaaatatgaagtgatgaaaagatgatttagtagaaaatgcattaggagtagtttcatggtaataatatctgaacggtcttaatcacttatgtagttcaatgccattttgatatataatgatgtggcaaaggtgtaagtttgaaagtcttagcaagtatcctatttgcaagataatttaaagctttggacctcgtctctcctagttggagagaaattatctcttaccttccattgcacattctcttcctgtatttgtttataaaactagggtttcttgaggaagttatgcatgccttaaaaaatgctcattttccattgtggctttcatattgaatactaaatgatccaaatggtataagaaagtatctgtaatatctaaatttggtatggtatcattttcaaaatggtcttcttcagtttgaaaagaactatattttttttcctcatatttttgtttgaatgaacaatgccctcatggttaagtttctaagactgcatgcctggaagtgcagatagctgcctgttaagttagaatgtgttcttatgaaatagaatgaagaagaacatttatgtatcttctatttctacataattatcccctctgtttcaggctaggatacacaggttcttggaaaagacaaagaa

SEQ ID NO: 50548 - DNA, 499 bp, Ricinus communis
  Intron number 1 from transcript 29908.m006020 (locus 29908 .t000071) derived from phytozome v7.0 (chr-ID 29908; pos 1 136508 to 1137006 reverse strand)
cgacgactgcgagcagcttcgaaaggccttctcaggttctctctctattcttacattactctttttcttgcttctcttttttatttaaagaaaaaaaaattggtcctgtcatatgctgctaatcagatctttgtttttattcttttgatttgatgtggatgatcggctatttatgttgatcttcgagttcgttgatgatgctaatatcttttgatctgtattccttgaagaatgatgattgtataagtttaactctgaaatttgtgtttatggatttaatcgaactctagatctttaccaaccaagcttatagttaattgttaagattgctgcgattaattttttagaagcccttttgaaaattaaagtcaaagaacatgaaatcatttaatttcatcggcaaactctgtgtgatgatataaatgtgtcatttaaatttcatattgcgttctgtctgagtaatttaattgagcgataaatcatgcaggttggggtacaa

SEQ ID NO: 50549 - DNA, 345 bp, Ricinus communis
  Intron number 1 from transcript 30073.m002286 (locus 30073 .t000096) derived from phytozome v7.0 (chr-ID 30073; pos 6 56024 to 656368)
gagaaaaaggcttcaaggttacacttatatatttaagcttggtgtacttccatggatattcaaagacccactcagacactatatataaccagagcttctcctctttttctcaagatcgatcataattaatcttgtttaaggtttgtgttgcttcactttcttcattttaataaatcctagatcaaatattacaactaaataactaaattagcaactccataagattctttttttttttttctttttgctatatcttggcttaattaataagaacttcaagaaagtgtagaaatacatcattgattgatcagtttctttttttcttatttcagttttggtgcagga

SEQ ID NO: 50550 - DNA, 600 bp, Ricinus communis
  Intron number 1 from transcript 30084.m000186 (locus 30084 .t000011) derived from phytozome v7.0 (chr-ID 30084; pos 9 6281 to 96880 reverse strand)
cctaggtttgtctaattctaattaatacccttttcttcaaaatgtgatctcttaattacccaaatgagaaaaatgtgatctttgaaaacccaaaccacaaaaaattgatgcttccgaaacccaaatgaagaaaaattgtgatcttttgagaagccaagaaaaataatgtgatctcttacttttcttttgaatgcttaattttggtggttaattggttgatgagatcctgagataagcccagttgtatttcactgtttgatatgtattatatttttatgtttgtttgtttctttttgcctgtgctaattttataatctcttatgtgaatatatttcttgggctgtttccatttttctggttatttgtttttctatctctcttcttgttggttgttagagctttaaaatagaagattggatcaagaaatttctaaacagagaccaaaaaagaagtctttttcaagtgtctttgtgaagtggcatatgattcttctgtttgattttggttttactgtttgttatttagattggacattgagttgggttcttacgaatgttaatgtttatgttttacgcagtgacacttcagtaggtgttggac

SEQ ID NO: 50551 - DNA, 580 bp, Ricinus communis
  Intron number 4 from transcript 29994.m000456 (locus 29994 .t000018) derived from phytozome v7.0 (chr-ID 29994; pos 1 56052 to 156631 reverse strand)
aggtattaggcaacgcttttcagttaatgtctaagtgctagttcttattttccatatatatgtggtgaatttgtatgtgttaacgtataaggttcttttattagattaatcttctaggaaccttttatatctgtgctcctgctgtatccttaaagacacgaaacattatgcgtcctttcgccaccctagccaacttttctcctcgccttgctgccatctcacctattaagagctgaaaactgcaggctgcatgcacggtgtttctcttttttcttttttatccaggactatgaaccaaaaaatatacaagtacggaatatcacacgctcactcttttcatcaaaccactgcaaattataggttaaacagccacaaagttgcttcttcttttttgtttctccttgttgatccaaatctaagccttaaatgtattgaattattacaatacatatatcttttgtgcaaagctgagattttaagtttgatttaatgccttctgattattagtggagttcctgctattcttctgtttcttttcttgcctagaattgttatactggattttggcattgagttcaga

SEQ ID NO: 50552 - DNA, 1044 bp, Ricinus communis
  Intron number 3 from transcript 30073.m002214 (locus 30073 .t000024) derived from phytozome v7.0 (chr-ID 30073; pos 1 66715 to 167758 reverse strand)
agaatcctgcagccaatctacaagcacttttaggggtaagattgcttaattctcatacaagcgctttaatatacttctgtttaatttcaatgctatgagaaaggaaatggagttttttcccaaggcctggatcttttctcttatttattgcctgatttttaatgttgaatatggtccttatatctactttgttggttcctttccttaatacctgaatggttcttaagtggcattgtgttcagacatctcctagacttggcaatggttttgccctcttcttgctacttgttataattctgagcgcatgttggcttggttttctgtttcctcggtcattatgaatcataaaccattaggaacaaaaaggatgaggcagatgaagatggagtccagtgtatcctattactactcatatgagacaaatacagtggtaaatcccaatccaccaacggggttatatttccttatataatgcattacactctagttcattgctatgactaactagggaaatgtgggctgaaaggggattttgtgtggtaaggttagtgttctgatctctcctttgttatgaccaagtagcctagttcattgcttgatttaagattgggaatgcgttaccttggtgttgaaggggtttctgcacggtaaggttagcctgctgatctcttgtttactatcctggttcttactgtgagttgctatgttcaataattcaaaagacatatatcttcttttttcccagtagcttctgaaatagttgaaacaggtctgagagctagctccaatatattggtaaaagtattatgaccattgttgtaagttgtaacaagttttctgaccatcatgatggaaaatgttgcagaaattgttgctctatcatttgtatgcaatgaatgatatttcttcatgtctagtagtatatagttcccttcggttccgcaatgattctcattttctcagaagaggaagggagaggagcagccatcttctttcatcttttattgctcacagcctacttgaaactctcagattgtgatcttg

SEQ ID NO: 50553 - DNA, 409 bp, Ricinus communis
  Intron number 1 from transcript 30045.m000481 (locus 30045 .t000013) derived from phytozome v7.0 (chr-ID 30045; pos 3 18537 to 318945)
agaattagccgtgctctgataagtgttttaagaattgtagctatttagtattagtaggattaggaatatcattttaacttcgaagtcatttaaactagtcctaaaatcttcttttgggtttagaaacctttattgctaatttttatgtgtgtttctttttctttttgtcatgtgttttgagtattgatagttatattgttttaaaagcttgctagtacaagttttatcagtttttctaaaatttttaagatttttgcgctgtctgtcgagtgcgcgctttgcacctaggctctaggattcctttgcacccttgtgcgccttgcccttttaatattcgataacaatatctatactttatttactaatatagaattatataaacaggtatatcaggtaggtttagggggga

SEQ ID NO: 50554 - DNA, 1011 bp, Ricinus communis
  Intron number 1 from transcript 29823.m000222 (locus 29823 .t000014) derived from phytozome v7.0 (chr-ID 29823; pos 2 22156 to 223166 reverse strand)
cctcctttcgatctcaatcaggttcgtaatgctcaacgttttcttttatgagataaactttaatctgatttcatagatatattggaaatgtgttagtaaatgagagattattagatggattctgtctgctacgttggtggttggtcggaaacaaaccatgttaaaagtgttttctctaaatttgcatagcttaataggacgtgtctcattttgttattcacatgtgcacgtgtcctaaaaggtcttaagtgctgtctatctgtgcaactttgctaattcatttcttgaagtgtattttgaattggaaatctcaaaactccatctcttatggaaatggaagggcttaatttttataaggttaaatacataaatgatttttagaatctatcatgtttttagaattggcctctcaaactcaattgtggtgcaattgaactttctaatttttgttttgttatttgtaaattattacataacagtcgtttgatgcgtcttctctattactatctaaaaatacattatgaaaaattttattatatgagaataatttaaaaaaatcattaaaaaaatggatatcatcactttcgtaattatagtcagttatgctgttaactttcgtcgctcttgtattttcgcctagacttatcagtggtgcagactcctccacctatcgtcgctttcatgctgcctccttcgcctgccctttctctcgtgctttctcctctgttttccatcgctctcggcatcagttagaatataattattttattacttatgttagtgaatgatatataaataacaatccagatacccatttgaatcaaactgaagtttaagaggccaattgcagaaatatgacaagatcataggtccatttatatatttagcctttcttataaaaatgcactttctaattttatagaataaattaaataaatgaaaagtgcagtgataatgtttattaacttatatgcaggtgatatcaacacttgcaattggaagggtaattcg

SEQ ID NO: 50555 - DNA, 921 bp, Ricinus communis
  Intron number 2 from transcript 30128.m008730 (locus 30128 .t000191) derived from phytozome v7.0 (chr-ID 30128; pos 7 21629 to 722549)
gtgcctggttcctacaagagcaggtaatgaatatgcatatacctgcacatatttacgtaatagatatgtatatttttgttgacagcaaaacaattttttttattcattgtaagcgaggggaaagagcacaataagttgatgaaaacccctccttagaattaagcagcaagggtacagagcatggacaaaatcccaggcttctacgcactaaaaaacatcaataaaacagagccacagctaacactattacagcagctaacacataggattaaggccggtacacaggacaggaagagagttttgcagtataatgtaccatcatcctgaatggtcgttcagttcacataaaacagcaccataaacagcaccagcaaccatgagattcacagcatgcatttgtttgcacagaactgcagactaaagcacgagacatacctgtgtagcaggaacacacccaaatagaaataaacttaatcaaaccaccacttaaattgagtgcttaagaggttgcaataatatcttccgcacgtgtcactccttgcttttctctttttaatccttctgaactctatctttactgtgttttctttccttttttcaatatatttatactatgttatgtttgctgcactaattgaatagaaaaaagataagaaactaaaaaaagaaaacgggaagaaaaaaagagcattaagatatggaaatattcaccttgctcgagagcaagaaatgtagatgatgccctaagtcaagatattgatttggtgcactagtaatgagctctatagctagggttttgagtccaagcacttagttagagcgcaatcaacgaaaaatgaaaaacgagtactgacttagagtgtggtatatttacgaaatgataactggaggggattttcttgcattgtcaggattgagaag

SEQ ID NO: 50556 - DNA, 822 bp, Ricinus communis
  Intron number 3 from transcript 30055.m001595 (locus 30055 .t000065) derived from phytozome v7.0 (chr-ID 30055; pos 3 50183 to 351004)
aaccggcgtaatacaggtttgtcgaatgcatcttgagttatttttactcttaatgacgtaaatgtatgggctttagagattagttttagctaaatgttattatttggaatgctattgaatgtggtttcaaatccttgtccttttctttactgattgactgttaatctataaatgcaagaccaaagttgctttgctccgtttatttaattcactttattccctttatttataaagtatccttgtcttttgatttctagtaagtcctcatctttatgcattgaagaaaagattagatgcttcagtcctgattcgacgtcttagtacaatatgtaacgttgctcactatttagtagaatcatctgagaaatgctagataatctatctgtaattattgtgtatttttgacaaccaaatatgccttgttgtagttttttagttacctccattctctgagagacatgtacaactagttttctactcctttttacttgtgagtaattgaaatgtcattatcttgaatatgatgaggtaatatcagctagatgatgagatcaaacaaatatcaactcacagaagaatccattatgtttgacaagttaatatgatataagttaaggttctattgaattgattatttggtattatgagtgaactctttgatgtagtttttatatcttaaacatgtaatgtcaatgtttgttactaggctttagttccgttctaaatttttcacaagtgattatgagtttgtttgtatgcataagctctattatgttggtgcaagcagataatttggttgaaaatcttttgggggattttgag

SEQ ID NO: 50557 - DNA, 580 bp, Ricinus communis
  Intron number 1 from transcript 30072.m000952 (locus 30072 .t000026) derived from phytozome v7.0 (chr-ID 30072; pos 1 97180 to 197759)
ctgataacccacctacttcttctgtttcttcaacggtacatacatacaactcttttcttttttaattacggattatgcattttcagtgcacgtatttgattggattatttattttggtagttctatgctagaactagaggcttccggtttctttgcatacatatatattttggaacggaagtccatttttctgtacaagctttccagtttaggttaagaacacagattttatattcatccacttgataatgaatgctgtataaaacactaataggtctctttattagtggcaacttttatatttttcaactgtcaaaataggagcaaaattattgtgtgtaatgtgcttgagttctgcatttccacattttaatgaccatatgctaggctggagggttgaataaatgcattcttctgtttccatattttttaagtgcagcatagaggttcttgaatatgggaacattatgcacatacttacagacatgcttgtgtcaaatataatacataatgtatggttctgatatattagcattctccttcagccaccaccaactatatctccagttggaccagctta

SEQ ID NO: 50558 - DNA, 932 bp, Ricinus communis
  Intron number 1 from transcript 30131.m007131 (locus 30131 .t000282) derived from phytozome v7.0 (chr-ID 30131; pos 1 723890 to 1724821 reverse strand)
aagctgctctttgtcgctcttgtgacgagaaggtattatttattttatcttctttttaagtctgagcttaatctgaaagatgtttaatgataataattaaagtaaaacaattaattagaccttactttttagttgatcgaattgaaactactcgttcagttactgattgggtttaatcatatccgtttatattttgcttcttgaactgaaatcttttttaagtataatctgataatcatcattacgtttttgaactttgaattttttagatgatgtcgatgttatctttgattgaatattcactgtattttatatcaattaaagcaaattggacgtttattatcgttgttattgtcttctttcttaggctattttggttcagaatctgactctagttttttttgcttggagagatgagtgagttatggtaaatggggaggaatagctacttgcatgctgtatagcttgttcatgaagcaaaaactcgcctatataacagtctaagtgtgtacttgtccaagccttttattgtagaggagactctatatttacttcaccaactctctacagatgtatggctcgtgtggttttcttgccaacagaatcttgaggatcctaatttgcctgaacttgattacgtctacctttgcgcttccattattagacagtgaattcactcgtcttaattatagacacgttcaagactgcgaccttgattaacaattatcatgtattgccttagtgtgcatcttcttgaaaaatgatagaatcaggcatttgagggatttatttaatagctataacttgtggattttatttaatagtttgagtttcccaactttagtcaagttattattttgctctatcatgtaatcttttttatgttgtgctggagttgcaggtccatttgtgtaacaagctagctagtcggc

SEQ ID NO: 50559 - DNA, 609 bp, Ricinus communis
  Intron number 1 from transcript 29827.m002592 (locus 29827 .t000065) derived from phytozome v7.0 (chr-ID 29827; pos 3 55795 to 356403)
gaattaaatctggtccgcattttagatgggaaaagtgtagcaaaccagtagccttaggaatcattctcaatttatagtagaagaaaattggtgaggtaggattgttgacgagcgtcgtactgtgaaatagttggtttgtgacaagagtcactaaatgtctccggaagtgtagcaaacaacagttggttttgtgaatactgtgcagtgctttgaagcatccaccatcaccatggaatgataaattcaaataattatattactactcggccagcctaacatttcttgttttgagaagggccttggttggagaaataatgatttgatgagatggatccataaacaaagtaaaacaatgatttcctgtttccttagatgcacttctgggtagatctattggttggcgatcttaatattttgacactctctctctctctctctctctctctctctctcatatgtacatgtgcacgtggacacaaacggttgtggccctttggttttgtgctgtactcttttgaagttagtatttgtataaagggttatgttacgttgacattttttcatgattttgtagcaagccagtgatccctgtgaacctacgctcagctc

SEQ ID NO: 50560 - DNA, 948 bp, Ricinus communis
  Intron number 1 from transcript 30089.m000988 (locus 30089 .t000002) derived from phytozome v7.0 (chr-ID 30089; pos 8 8104 to 89051 reverse strand)
ggaagctttcagcctcttcgacaaggacggcggtctcttcttttagatctctcctttctcttactctctgattttatttcttcagatctaggatctatattattattattattattattattcttgttttcattttcatttgtgcttttgttctgtttatttgctcgatcttttggtattcgttgttattttgaagcttgtggtgttgactttcatgaggactcttgttttcatttcttctttctgatgctacgattttttcatttttttggtgggcatgttttgtttttttctgaaatctcgagttaattatttatggattcaatatttttggagatatggggctggagatatccggatcatatatattttatgttaaaaaatgatggatctgaaattggtatctaatcttattgtcctgaatatcgtttaagaacacctgaggttttcacattccttgaaacatttgtttgatgtaaaattttccattttgtttcgtcattaagaatgcactcgtaatgattttgagcaattattgagaatgattgtcataagaaatatatactaaatttttggataatttatatatagttggtgcagttgtttgcttgttttcatgagtgattattgggagtggtctgtgaattaatttggacattgatatttttgttttaatgcgcaggtctactttttcatacatttatatgatatctttggctatttccatgttgaattgcccatcttgttgccttcgtttgagcctttgtggcgttgtacttattgtgttgtttcattgggatcacaatgtttcttagcaactctttgttcttctgtgattttaccagctatgctttgtaaattatgttgctgactctgtatgtatcttatttaaattggctttgatatataattgcaggctgcatcaccactaaggaacttgggactgtg

SEQ ID NO: 50561 - DNA, 339 bp, Ricinus communis
  Intron number 1 from transcript 29869.m001144 (locus 29869 .t000009) derived from phytozome v7.0 (chr-ID 29869; pos 1 20093 to 120431)
gagggctggaggggtggtagggacagtaggttattcattttggtggccccttttgagtcaaataattaggctaattcaattggcatctggaataatttatttttcttctacaccagtattattctgcttttacctgtttctatgaaaggttctaatgcatcaccggattcattggtttgctatttgagatttatgagcattacttcttagatggtaattacaacattgatgatgattataaggatgacaattgtgataagggtgatattttgttggcagttgtgatgatgcatatttgattctgatttagttgatttacacttcttgtgttcagctgaa

SEQ ID NO: 50562 - DNA, 999 bp, Ricinus communis
  Intron number 1 from transcript 29966.m000222 (locus 29966 .t000003) derived from phytozome v7.0 (chr-ID 29966; pos 5 5120 to 56118)
aaggtcccctctcaacttcctgatctttcaagcaggtacttttctttcacttctcatctttgataactttgcttttttttttttttgtttctctttcccccctgattttcttgcttttaggcatctgggtgtttcttgttgtgcttagatctatggttagctttgtttataatcaatgatttctgtgatcaagatcttgtctttgcttgataattaactttcggtcgtttttcctctatttgggtctttatttcttttctgtgattagtttagctttgtgcattttcttgtagctgacttgatgaatgactgattctttgagtgtggtccttgaacctttttgcttgtttgaatttcttcttgttcttttattacaaaaaaaaaaaaaagaagaaaataatttcctaatttaatcctggacttttttttttcgacaaagattgtttactgaggcagctgtcttttggtacctgatcttgttcaaattcttttttcagtatctttttatgaagttctgcatgcagctttttcattgtgtcatttctttttccgagaaataattaatacctgatttttgattggagtgttttcacttatgaatttgtgcttttgacctattttgaattaaattaaaatgtgtagtaatgatctttgtgtattaaagctgtgttgtcatggtagagtttatatcgctagtttgtatatcctgatcagtgctctgaaacacttaatctagcgtttgagttgaataaaattggattttgttatgctagcactctgttgtttcttcaatcttgtaaaccagataatagatttcacatataccccctaacatcactctttttggttttttgggaattttttaaaagttatttatcacattagttcatgtggatgcaaatgttctttgtatatctctatttattatcatgatgttaacaaagttcatcattgctactgacagattgtgataaaaacacgaattggactgcccactgc

SEQ ID NO: 50563 - DNA, 766 bp, Ricinus communis
  Intron number 1 from transcript 29929.m004664 (locus 29929 .t000167) derived from phytozome v7.0 (chr-ID 29929; pos 1 018903 to 1019668)
acgcagctagtgaggttctaaccgaggcgcgtctattgctggttgaaaactatttccaaaccccctcttcggccttggcttgtccttgcgctgtcgagaatttctggaagggctccctttggggtaaagtcctacaattcctagtacttgaaaagttttatgtccttctctatatttagtcatatgtttacagaaacatatttagatttttcatttattgaaaccttacataattatatttttataatcatctgcatgttcatgacattaattaagattgtattttatataatctatatatcacttgtgaaagttagatatttattgagtttaaatctctttaatgaaaatttaccagtttataactagtgagagtaagtgatagaaaatgaaaaatgacataaaattaatttcaattcgcgttccaaaaagattaaaccagaattttttaactttgtggtaaatagcactgctaaaaagggcattttacttgtggtactttcccagtaatctgatccaacggttgtcgatccacttaatcaaatactttaccatttagttccaccttcatttcgaattcctctctcttccggacaccatcgctctcttcggcgtgatctgaacatactcttttatctccgtcacttcaattcctccgagtacaaattaggattttccctgtcacttcagttccttacaaatttaaattaggtttttccgcaatttatcataattattttaatcttattttttgattattgtgtag

SEQ ID NO: 50564 - DNA, 971 bp, Ricinus communis
  Intron number 4 from transcript 29877.m000484 (locus 29877 .t000022) derived from phytozome v7.0 (chr-ID 29877; pos 1 81477 to 182447)
cggggcgaaagcttggaagatttggtctgttgaaagtatgtatgtggtttctttttacattgcagctactcatttgtgcatagcaaggctttcccaatgctgaccatgttaaataataaaaaataggataggattctctcatagtcgtttggcgcaccactagtatattgtctcgagttaggtcacttgtcatgcttgtatatatgaagagcactctacgccctaaaggtctttagtcttaacctggctacagaatcgcaatatgtcttgtgagtatgatggcaatctcaaagtttcaataatgtattatgcattataacttgaggaaggactgaaagagatggtagcagaagcatgctagagcaggatttatatagaaaggagatatatggaagatagtgatatcttttagaagtttggcaggaaaaggatcgtaaaagatgccagaaagcaaaagaaagaaactacaaagtctagatgggtgcacttttctatagtatattactgagtgttagagttacctgaattagagagatccggagaggtttagttagtgagaggcataggaaggatgtctagagttaatggacatgtgtaggctacatttctctagcaacaatggtcaagagaatacttaattttacaaaatctaggtggcttgagacagttgatccttttgctgcgtgacttgatcttaatgtttgtttggaaatttgtgttcgtgttcagaaagagttttgggttcacaatgcccatcaaccaaggtcaagaggtgaataaattttccttcttgacgggtgtccttccaagcccaccaaaccaaacctctctaaatgtcctctttgatggttgattggtttttgtgaaaggtctttaatgtttcgtataagattacttttcatgttatttagtaatttataaaatgttgttatgcaggaactacgcgtcaactgtggttttgggggcattgt

SEQ ID NO: 50565 - DNA, 309 bp, Ricinus communis
  Intron number 1 from transcript 30076.m004466 (locus 30076 .t000030) derived from phytozome v7.0 (chr-ID 30076; pos 1 63459 to 163767)
tttgaaatgtgagtagctatttgcaacatctccgttccggttaagtttttctttcacatgtttgctgttattcacttgcactaatttggtcaaggtcattgcacgcttggcaggttcttgttcaaattttggttataattagtcttaatttgagcacataaaagcaaagataaaattgggttgtgcttttgtcttgtaccttttcttttcttggtaacaaacgcacaaaaggaaagtatcaattaatataaaattctgtttcttggacttaaacgttgacagcctgcatcaagaacggattggaagcaa

SEQ ID NO: 50566 - DNA, 449 bp, Ricinus communis
  Intron number 1 from transcript 30138.m003942 (locus 30138 .t000116) derived from phytozome v7.0 (chr-ID 30138; pos 8 20235 to 820683)
cagccggtacgctgtttccttgcttataatttactttcagttgctgatggatggacagacatcaacttatttggatacaaaacctcgaatcttgaaattgctgatatgttaaacttttgttgctttcacttgttttatcaaatggggagactaggaagttgaggctgttgaactctttcttgtgtcatattttctagtacgtctaattaaactgaaactggattctctcgctttgatcataatcatcttaagtttcttgaatcagaattttaaatttgacttgatgtatcttcttggcttttgcgtgctggtctcttctagttttgtttcaggaaactagaaacgtgaatatttgaatctttgctcaaactgggttcatcattgactctgtactgctataatttgtactagtttttgactgctcaggtttcatttactggctgaatttg

SEQ ID NO: 50567 - DNA, 551 bp, Ricinus communis
  Intron number 1 from transcript 30147.m013921 (locus 30147 .t000192) derived from phytozome v7.0 (chr-ID 30147; pos 3 357292 to 3357842 reverse strand)
ttcaaggttggtgccttctccctcctccttttttgttccctctctctggatgtctaagtacaactatttgaattagtttaagcagtgttaagttcagttttggtttgctacttgctagtttgctcagacaacgttttggaagagcaaaaattgaagaaaaatttaaccttgtatataaaatcattgaggtcaatagttatataggtgacatggagatcaagaatacatgtttcttgactgattaatttgcatggggataggcttaccactcaccactttcataaaagttaatcacgaacagagaggaaatgaattcttttctgccaattaactctaatatattactcgttctggttgagctctcgagatgaaaaggaactccagcatataaattatgatattttagtctcatgttttctgctttcattatctgccaaaatgaataaatacacatgtatttgttgcaaactagaattatttttataaaacctttttgatcaattgatgtttttgccgttgatattttaagttatggcttttaattccagctg

SEQ ID NO: 50568 - DNA, 708 bp, Ricinus communis
  Intron number 4 from transcript 30073.m002237 (locus 30073 .t000047) derived from phytozome v7.0 (chr-ID 30073; pos 3 37270 to 337977 reverse strand)
tagctggcgtttccagattaagttatataaatcaggtaataagcttaatcactttacatttttcttctctttctgacatttcttctggtcaatcagggattgtgatgtattcttcttttttgatttccttttgggaaagtgaaggaaaagtcggttgcttagcacaatgtgttatgattctccttttagtttaggagttatatgaattattagcttgaagaaacatagtagcttgtagtaccaagtgatttgagaaatttaagtagtaaaggagctattttacttgcagtctaggaattgattgggtaactgctcttgtttgtctttcaagaatttggtttttcttttgaactttcatatgaaagtaaccttattttattttctgtttttagccttttcttttagtagtttgtgtgtaggccttttgaaaattttagaaaaagacgcctataaaatttctgttgaagttcttagtttagatttattttattttttaatttttaaccatgtggccatttttctgttgttacagaaggacaaaattgttttacaactatggagattaaataagtatttagatgtagatatttttctgcataactgctggaatgtataaaattttaatggtgttcaacatctttctcctgctgtcatgtaacattctgttttgcagctgctgcggagacatcgcagggtgactgtgaacca

SEQ ID NO: 50569 - DNA, 387 bp, Ricinus communis
  Intron number 1 from transcript 29950.m001172 (locus 29950 .t000056) derived from phytozome v7.0 (chr-ID 29950; pos 3 18696 to 319082 reverse strand)
agtttcaagtatgaaagttctaaactttcttttcaattttgaccttaatttgacattttggtttaacttttctgcccaatcgtgttgttgactttgatttttcttctggattcttattttatgtttatcttatgttattggaaaattcttcttatgtataaaatttggtccttttgctgtgttctacttgagtatccgatatgatcccagtttatattatttaaaagatcaaagctcaaatcagcccattgatcaattagtgcttacaattatttgatattggtttcagcaatcatattctgattaattgtcttgatcttcctgttgtacccttttatttcctgagatgttttttttcttttcttttattgtagaattggtataagg

SEQ ID NO: 50570 - DNA, 425 bp, Ricinus communis
  Intron number 2 from transcript 29885.m000144 (locus 29885 .t000008) derived from phytozome v7.0 (chr-ID 29885; pos 5 4007 to 54431)
cttacacctggagcggcaaggtatattttcttctcttcctatttgtaaatgcattttgttcttttgatggttgattttgatcaataactgcttttagtggtattgctattgctgttgctgttgtagttttactttttttttttttactgtcattttaatggagagaattaggggaattcactatatgtttttgatatatatgttttcttttctattttaccaaactgatttttcgttttttagtggatgagctcacagtaattccttattatttcttttaatatgctagtattctttttataaaaaaaaaattaaaagaaaaattatgctttattgttttgatgatatcttacttgctattgtgctgtctgaaatttttttcccttacaggatcctgagggcctttttccctgtatccttggtca

SEQ ID NO: 50571 - DNA, 647 bp, Ricinus communis
  Intron number 1 from transcript 30099.m001719 (locus 30099 .t000098) derived from phytozome v7.0 (chr-ID 30099; pos 5 22406 to 523052)
gtgaacttccttttacacttgaaactgggtatgtatgtctgtttctttaaaattattttttttcctctgtgcccattcattttctgtcatttgcccaggaaagcagagattcttcatgtcaagaacacaaattcttgaaaacccaattgcccaaatatgtaatttgcgtgattacgaaatatccatgaaatcaaagaaaagagaaagttttcaatgttcgttctgtcttttagttttccatgttcttatctatgagcataacattggcagcatgatttttctcttttatagccatggacgacaagtcgtctgctaattgatagccaacgtttgtgtgttgtaaagtgatgagcagttttattaggattttctttttttgaattttatgctttatgctctttttcatttcaaactgtaatattatttttaactgtaatttttatttcttttaaagaaattttttgtttttctttttaaatcaatggaggccagttctcctttttcttttgcaattaatatttagtacactacagaatcatagaattaaaacgcttaaaattgatgttcttttcctcccttttcatgcacagaaaattaacgttctcttgtttgaattttttaggtacatatctgtagggccagcagag

SEQ ID NO: 50572 - DNA, 266 bp, Ricinus communis
  Intron number 1 from transcript 30146.m003553 (locus 30146 .t000130) derived from phytozome v7.0 (chr-ID 30146; pos 9 68288 to 968553 reverse strand)
ccattcattataggtatatatgcacattacatttatatacatacccttgtaatcgagatgcagcatttcttgattttttcttgaagtttataaaaagatcaccagaaaagaaagacgaaccacttaaagctgcaatcttttcttttttttaaatcgtttcttgtttacccttttgagtttggttgcattttcttgatagtggagtgctttggatcttggtttcttgaacggttatttatttaattatttattttgtaatacagcaa

SEQ ID NO: 50573 - DNA, 502 bp, Ricinus communis
  Intron number 2 from transcript 30000.m000374 (locus 30000 .t000004) derived from phytozome v7.0 (chr-ID 30000; pos 3 2407 to 32908)
gactctgttgagctcttgcttgatacttgcccagagtaagtactatattctgaagttaatctgggagttcttatagggtaataaataaaactgtattttggaaaatgaaaatgacttgccattattcttcacttctattggtttatcagattttgccatacattacttgctcatggataactggacggcatgaagactttaattcatcttgcatttgtttccgagcttttgtttggtatggaaattaagatgtggtcagaaaagcatccaaacaagcaaaaaggagatgtgtgtatattctcttttcctttgttgttaaaattggtggtatttctttatccataaccagctttttcaggcattgtccaagtgaaaaatccattttgatccttagtattgttagatagcaaattgtatagcatcaaaaactgatgacttccagagtattcagcttatctctctataattttcacttttttggtttccagattttttaattctc

SEQ ID NO: 50574 - DNA, 393 bp, Ricinus communis
  Intron number 2 from transcript 29844.m003301 (locus 29844 .t000147) derived from phytozome v7.0 (chr-ID 29844; pos 8 64354 to 864746)
ggcgtgtctttcttggagggagagtataggcactggtactatactattattacccttcttgatctccttctattctcttcaaaaagctttcgatatattcatattgctgcttacactctcctttatacaagcatcttctttagctttttaggttatgttaattgttgcaacggaatcttgcttttctttttttgaatgtttgagcgttaaagtaaaaggaaatacccagtaatcattgtcgccactggatcaaaattaagacttcgtactaaaaaacaaaacttaactgccctttacctgcttttttttttttttttttcttcttttgaatttgtttattatgtaatccttttcttttttaatcttttaaatatgcagaacaactaatagcag

SEQ ID NO: 50575 - DNA, 382 bp, Ricinus communis
  Intron number 2 from transcript 29883.m002002 (locus 29883 .t000057) derived from phytozome v7.0 (chr-ID 29883; pos 4 15690 to 416071 reverse strand)
acttgtctacttttgtaagaacttcatttttattttttttaactttaatatcagttttgtactctgtgtttggttgctaaacagagaaaagaaaaagggagagagaatcccagatttgacaaactcaaattaatgaaattaacttctaatcaactgaaagataaaaatttgagatttttatcaatctcttggaggtagtgattgatgataaatagagtactttcaaaataactacttaggttagttcatgtattgtattaatgttattcagcagtgctaaattacatttgtctgcggatatttacggttggttgaatgacgattcagttttgatcctatttgtttaggtgcacaagtataagacagatactgtaatacttaa

SEQ ID NO: 50576 - DNA, 201 bp, Ricinus communis
  Intron number 1 from transcript 29883.m002002 (locus 29883 .t000057) derived from phytozome v7.0 (chr-ID 29883; pos 4 16075 to 416275 reverse strand)
tgtttccactaggctcagaaattttactccaggtaattttctttgcatacatttcaatgtattcttgtttatgaatattattttgatgattgaaacagaactttctaatctaaactataaatcacttgatttgattaataatgtgtttgttggttgatctttgatgtgaatctgttttggcagggaagcaagagtttgctg

SEQ ID NO: 50577 - DNA, 557 bp, Ricinus communis
  Intron number 1 from transcript 29940.m000399 (locus 29940 .t000004) derived from phytozome v7.0 (chr-ID 29940; pos 2 23067 to 223623 reverse strand)
cgagattcgctgtccaagagcacaacaagaagcaggtccctttttctttgatttccattcttttcggttttcttattcaagtcttgctctttcatttgctttattaagtggtaatatttattgtggtgatatgggtttgttgatatatgtaattatttaagggagtttagctgtttctctgtttcagtgaattttcttttcgacgaatcttaattaggacatcacttaaattgctatttgactcaataattcagaaattaattgtctgcaataccttgcattgttcatatctcttagttgcctaatttcaattactcatttattctttgctataatcgtatgaattcaactttgttttgctttatttgtttccttggcacctgttttgctgataaattctgggttgcatttcattattgacagaattaaaaaaaaaaaaaacaatggcagatccataggttgttgttttcgtcgtggtctagaattattgatttgtggtcagtttgaaatttgtctgcaacgtcttgatgcgtataatgatgctgaattactacaga

SEQ ID NO: 50578 - DNA, 596 bp, Ricinus communis
  Intron number 1 from transcript 29838.m001653 (locus 29838 .t000023) derived from phytozome v7.0 (chr-ID 29838; pos 1 51582 to 152177)
aaggtatactttctcccattctctctattttgttgggtttggttttgggtttctgtttgtttcctcaggaaatccatgatctttattataatgggtttggttttaggttctgtttgttttctgaggaaatcaagaatgtaatgaattctttcgttctatatgtagtttatttggagattggttttaactatgctgaaactgtttttctttttcttatccagttctgttagacttgggaatttagtgtacttcatgtttctattaactaaaaattagtagttgatacttgggattttatttttcttttctccaatcacaagcaaacagaagagtgtgagtatgtgttttttctttattttttcttttttaccattttgtatttgggggttgatgatctgtttgatttaattttgttaggggaggcttagttgtcttgttgattaacaacctgtatgagttgtgttgtgtgatctgtttatatatgtacttattggcaaaatttagcagctcaagtgagttttattttctctaatattactctttttcccctaacgaatacagattttgtttgcaaatcgaaatcaatcattgtctaa

SEQ ID NO: 50579 - DNA, 942 bp, Ricinus communis
  Intron number 1 from transcript 29945.m000087 (locus 29945 .t000002) derived from phytozome v7.0 (chr-ID 29945; pos 2 1692 to 22633)
acactccttctcgcccctcttgtcggcgtttactcgtatttccctttcttcgtcttcttctccttttcatttatcttttaatagttattgtgttttgttaaatttgaatttgaaaaccctaataatattacctggatcttctttttattttctaatgagattctcatttcttgtatgattttagggattataggttactatcgggcttgattgctgttttccccagattttagggttttatatatcgagttgaattgaataccttccagtcaaatccctaacgcaattaattacctatatgatctgtgattatttgttgaagtaaatttgctgtttttttttggtaattcgtgcttattttattttagttcactatgctgtaatgtttatgatttgtaatgaccatttttgagtactcataacttttaaaggaacctatatggaactacatagatacatacccgttatttcatggaccgctagagaccattattgagtgctcgaggtgctgccaaccgactattgttgggggttattggttgcttgtgacttccacagttttttttttttttttcttgtgaattttgtttcccgataagactacaacggaaagatgaagagttcttatttgccaaactttctcacggaaacagatgatggtaatcatctcaaattactccagacacaaatatgttcgagcttattcccagtgttgcaagtaaaaataagtaacggagaatgattagatttttcgtggagattgttttcattatgtaatgaaaactataactgcataatgacctgagaacgtgtctgtatgtgaaatatttaacttatgctgtgcagttttcttatcattagttgagctaataatgtttctctgctccatgttttgtaatcattgcaggtacgtgcagaactaccaggaaaaggagaagttgg

SEQ ID NO: 50580 - DNA, 506 bp, Ricinus communis
  Intron number 2 from transcript 30131.m007091 (locus 30131 .t000242) derived from phytozome v7.0 (chr-ID 30131; pos 1 459812 to 1460317 reverse strand)
aacatgtaagaccttactgttaatattgttgttatcattattatatttgttttcttttaataaaagatctacacaattagataattctccccttctgttattttattatttctgaagtgaattaacatgatataccatttagaaaaagatatataatgttcacccaatagcaatggagttgtctccggaactctaagatctcgagtttatatattctactgttaatcattttgacataaatgaaaacataaatttagttaataaattcatattgttttacccttatatcagatttttgttggaattcttattgtttctgtttttatttgttataaattcatgttgttctatactatgtgttttataaaagtagtactcttcaatttgtcttaatcaataattatattgcaggcagaagattacttttgatagtaacacagtctttagtggaaatggaaagttctgatagctgtaaaatttggcaggaactgggggcttcttggacc

SEQ ID NO: 50581 - DNA, 171 bp, Ricinus communis
  Intron number 1 from transcript 29912.m005301 (locus 29912 .t000027) derived from phytozome v7.0 (chr-ID 29912; pos 1 73719 to 173889 reverse strand)
aaatactctgttagcattattaaattttataggctataaattttcagtttgttgactcatcacatctcaaatcaaatcttattcttgttcgaagtatatctgcccttttcttctatgactaatgtgatttcgttttgcaggcaacagcagttaatattatagtaggttctc

SEQ ID NO: 50582 - DNA, 872 bp, Ricinus communis
  Intron number 3 from transcript 30146.m003584 (locus 30146 .t000161) derived from phytozome v7.0 (chr-ID 30146; pos 1 158889 to 1159760 reverse strand)
aagttcaatttgaggataagttatttacattgcaggttatttctttcgactactttatttatttatttattttactaatttacttttatttattaattctctggcatttgatctgttgtatgcacatacatactagggaatatgtattgatgggaattgaaaacgaaggtattcttcccctatactagacgaatatagaaaaaggaaatgtgatgaattcatagtttgaagcatgttttctcattaactgccacatcttaattaagtgaaattactagaaattttcagtaagttcgaatagaagcaaagaatgctggagaattagcctgttggtataccaaagaccaaaaatctggaatgcttaatgtgtataaaagatattcctgaatcgaatggagcgaaattcacctagaatgctatgtaaggtatcaagttaaatatattgaagcatgagaataattaaacaacaatgatcaaatgatcgaatgaagaattaaagtcttgctggctataactggcatttgcagtatgccttgtccactggaacgactttctagtttggtatgattgctggtcaaaattgttagagttggtccaagcagttgggtttgtagttttgagttgatcgcagaatgtagcaaactaatatatatcaaatctggatagtttgaaaagtacaaagactgttgcttgaacatattaaatttgaaccaacaaatttagatgcaatattatatactgcaaggtcagcataacaaaagattatgtcttcttaatggatcgctcatttggatgaagtaatatgaacaagttatctttgggcctcaaagttgagtggaattttctgagccttgttgttcatctatacagat

SEQ ID NO: 50583 - DNA, 336 bp, Ricinus communis
  Intron number 1 from transcript 30146.m003584 (locus 30146 .t000161) derived from phytozome v7.0 (chr-ID 30146; pos 1 159933 to 1160268 reverse strand)
ctccttaaggtcataattctcggtgacagcgggtattttcttcttcttcttcttcatcatcatcatcttcttcttattttcttagtattctttttgaatttacctctcgccctctctttcagaatttaatcgtcgttttgaatcttagtttatttgtatcgttttagatattattgagagcggtagccgcaattaatcttgataatcgtgtttttttgttttaaaaaaaattttaatgttaatgagttttatatataatttttgttttcctctttaattgatatgtttttctttgtttgtttatgataatttggcagggtagggaagacatcattg

SEQ ID NO: 50584 - DNA, 791 bp, Ricinus communis
  Intron number 1 from transcript 30146.m003432 (locus 30146 .t000009) derived from phytozome v7.0 (chr-ID 30146; pos 7 0312 to 71102 reverse strand)
tattgttaaatctctcgagtccactcttgctactggtaaattttcttgttttgttttgttagtttttgcttttagggttttctgatttggggatttttgtgactggagttttaaaaaagtttggatttgggttggttttatgagaaataagtgatgtcaatttcataatctcaaagctttaaacgatttttttttttttttatcgttattgtagcattatattatgtggatgttgcttgattgggatcatctgtcttataggttgcatgtttaggcaattagaagaggagcttttttttttccgtaaaatctttggctcaggtgtttgtgtttcttctgtccttgaaacttctttcttaggttatcgttaatgcttttagagtaaattatggtaatttttccagaattgtgtcttttgataataattgacaggataaatttgttttcgatggcctaatgaggactatctgtgctactcctgcatgtttaaagaagcttagcttttaggtttatgtgtttggtgtttctttggtctttgagattctcttctttggaatactgtaaatggttctaaagtatgaaaaagtgattgtatgaaaaccctgatccagctagccgtgctgattttttacccttgggatctgtcataagaaagaaagtgtctgtcgttttgctcagtgttgctttataattttgtgctgagtttgcaatgatagggtttaggcttgtttaagagtggccgcattgctaacttaatgaattatctgttggatgcaggcaatttacagaag

SEQ ID NO: 50585 - DNA, 699 bp, Ricinus communis
  Intron number 1 from transcript 30146.m003514 (locus 30146 .t000091) derived from phytozome v7.0 (chr-ID 30146; pos 6 88226 to 688924 reverse strand)
aggttcttgagaagatttaggaagagaattgataagtaagtattttctttacccattcttcttttctttctctgctttatttgtcataataggcttttaccaaattaaaaataaataaataaatctatggcaatataaatgattggatttgattttcttgatttgttccattcgtacgactaagttattgttttgtaatgcttaattagtcatttgcttgtctcattcactttccatgaaattgaagtttcatacttactttccttgggtcttacttatttgaattaaataaaaaaattttagaaaccccattttatatattatcatatttagtatcagactaagcccatgaatacgatatttggtatcaaaaggcagaagaacaattttttctttttttttttgttctttggtctttccttactcaaaatagtattaaataatgcaatattaagctaattattcatgtttagccacaacatattataatctactttatttttatctttctaattatcaataaatccaagattagaaattaatcgcccacaatatcctaacaaactatttcattatccgaatcatctaattcgacccgagaaaattattttatttaatctaaactaaatttttattaatctttgatatttctttgtaattgcagggtcggaatcaggcttccaactgtggaagttagat

SEQ ID NO: 50586 - DNA, 567 bp, Ricinus communis
  Intron number 2 from transcript 29822.m003407 (locus 29822 .t000082) derived from phytozome v7.0 (chr-ID 29822; pos 4 26029 to 426595 reverse strand)
gtgatagcttcttgtcttctgctaacaaaaggtgtgcgttaactgcttttgaacaatctcttacgttaaattgatacatgtttaagatgttttcagtactctgcttggagagattattttgtttctcattcggttccttgttatggttgaattctcaaacaacgttatataaattttgagattatgtgttgagaaagaaaaatgggaaggaaaagagaagaggattttatttatatcttggttgatgtgaacttaagtaaatgggagatgatatatgtaattcaatcttattcttttcttttcccttttcaagtcttgagctaggtagttttactttttgttaaggtaagtttaggagcactgtttctacagttttctctatcatgatatatctaaaactttacaattctccaagagtaattttgtttagctggtgtcattgttatcttaaatttttttgttcccgacattctgagaattcattgtttgtgaagttagtctagcataatcttacgatttgagcattatgttgatttgattgactgccactgtccaggtatcgaggaa

SEQ ID NO: 50587 - DNA, 688 bp, Ricinus communis
  Intron number 1 from transcript 30075.m001170 (locus 30075 .t000037) derived from phytozome v7.0 (chr-ID 30075; pos 2 81035 to 281722 reverse strand)
gctttagaaaaggtaggctttagctttctttccttagattattgccattgattttgccagctgctgcttgcatctgctgccttatgtttgagatgttaacatatctatcaatgtcaatattaaatatcagatacaaatttgacataataacatgtccatcactgaagtttatcattttaatattctttctcttgtattcagtaatgagggaagtcacacactcacttctagacaccatttacatgtgtttgaaattaattttgttagaaccatctaaacttctattgtatttgctttgcttttttttttttaatataattttttaatttattctgaaatcaagtttcaattcttaatgtggcaagctcatgtgtattgggaggcccaatcacagaattccaaatcctaatttagccattcaacttcagctttactcttgtagttcttcggagtggtcaatatacactttcttttttccttcttctttctgattccaggatatatgaaatatttatttattaatttgagtcctttttttttcttcctttttttcttggttgtgcagaagtttaagtgatttacctaaagaaagatgtggattgtttttccttcatctctatttttttcattttatttatttgtttttggtgcagctaggcatcaatcctgcagctgataatccaactga

SEQ ID NO: 50588 - DNA, 470 bp, Ricinus communis
  Intron number 2 from transcript 30028.m000243 (locus 30028 .t000001) derived from phytozome v7.0 (chr-ID 30028; pos 6 752 to 7221 reverse strand)
tcaaggcaaaagagattgagaagttgagcgctttggtaaaaaaaaaaaaaaaaacaattagcattgcccttggcagtcgaggctgacagttttggtttttagcctaacagctaattacttaatcatgcattcaactgctatatcatttaatgttgacatgttgtgcttggtcctttatgactggttactgagggcagctcttctgtaaaggggaaacatatgatgtggaaagatggggaaaacagaaacaaaaagtggagcacttgtacagtgaatggatggggcttttgcttatggttcatggctgactcaaattcatgattggcaaaagattgtgttgtcaacatgtaatcattatcttctcttgttaagggacagaattgtaaaatgatttgaagagtctgtgcacatggatcttttctttttctactgtagggatcattgctcatcattcattcaactgcaggata

SEQ ID NO: 50589 - DNA, 579 bp, Ricinus communis
  Intron number 1 from transcript 30028.m000243 (locus 30028 .t000001) derived from phytozome v7.0 (chr-ID 30028; pos 7 189 to 7767 reverse strand)
aggctcaacaaatcttatttctggtttcttaacaagttattctattatctttagaagtcttaaattttattaattattgttgaatcttgttcttaatccttgttagatgagaatatattattatttcataatttgtgcaaaagtttagagatacctttaaggattaggagtctaaaagtcttttaggttttaaagattagccaactcccattgaaatagctaggcttgtagtagtttctgttcagtgttcagattcattaaaataaagatctcctgcatattgttgcctacagtttgcctccgggtgtgactcctaaatctctaagtgtcgactcttagaaaaaggttttttcttttcctgtctattttctttccttttgtttcatttctggatttttggataaatcaaacctggaactcagattttgcctttaattttccgtcaaaatcaatgtagaacaggttatccaaatctgtcctacatcagtaggtgctaagttccagaatcttggggtagaagttgatgtgaacttgttttaaatagaatcaaggcaaaagagattgagaagttgagcgctt

SEQ ID NO: 50590 - DNA, 890 bp, Ricinus communis
  Intron number 1 from transcript 29825.m000332 (locus 29825 .t000020) derived from phytozome v7.0 (chr-ID 29825; pos 1 59756 to 160645 reverse strand)
ttgccggtgctgccctcgcttatactcttggaaaggtacaatatatttatactttttgtccttttcattctttttacaattcctttgctggcaagtgaaaatataaaatcaaactcattagtattaacattcaagataggttttatttattatcattattagtgaattctttcactagtttttttattcaaattttctttttaagttaatttttttggttgcggtttttgtgggattttggaatactttattagctttttagcttgcttgtttccttttttttttttaaagtgctaagaaagttcatgcatttggaatggctttgtgttgtcctgtcgtaatgttatatctaatctcttaagaaggtgaaatgagattgtggattgtttaatgacgcaatttccacaaaaagcatgtgtgggtagggccaaataatgtgaaatttgtggtttcttgagcaaaattctggctctatgttggcagatttataattgtttactttaaaagtttatagcttttcggcaaatgtgttggtagatttagaaactcataccaaatccatatgctatgttcatgtagttgaataaatttcaagctatcagattgacacaggatattaaaaaattaatactgtacttgtttataatgatcattagcatactggaaattggatggttggcttgttaataaatttcataaatcatttggacagatgcagaagagattatattatggcatgtctgattttgactgtgttttggcttttttattgattaaaatgtgaagcaccactgaaccagtctttatatattcaaaaagagttcaccctggacttggaaatatgctttaactaaaaggttgggctttcactttctcatactaattgcagg

SEQ ID NO: 50591 - DNA, 421 bp, Ricinus communis
  Intron number 2 from transcript 29851.m002490 (locus 29851 .t000132) derived from phytozome v7.0 (chr-ID 29851; pos 8 00942 to 801362 reverse strand)
tcaatctccagaattgggagacattaaaggatagggtatgattgttttgtgtgcatgaagaaaatcttaagccagttgttgtctacaagcatgacttactttggttttcgatttcagaacaaatcaagcttagtcgatgagttaagatgattgaaatcataagacctgccctggcctgattctgaaagctcgcccatacaaaatgaattactattctgtttgtttttgcttgttctgtaaatataaatgataaatgttcatatcttcatgatattttctcatgtgtcttcctctagtttcggtcatcttctctgaatttagaaattgagagtgcaaattttctttaacagggtacctttgatggctttaatcctttatttaaaattcaatatctaagcaaacttcaattaaccatatgcag

SEQ ID NO: 50592 - DNA, 467 bp, Ricinus communis
  Intron number 1 from transcript 30068.m002561 (locus 30068 .t000051) derived from phytozome v7.0 (chr-ID 30068; pos 2 99810 to 300276 reverse strand)
ggtatttcctcttttagatctgaccttttcttttccctcatttgatctttcttggcttttccttccatttcttgtaaaactcatgccattgccagtttatcactgtttcttgaagtggctttgcttcaaagtcttgtgggattttggattttaattgcgagtttttatttttagcccatattagaatctctctgttagcaattcgtaatggtttatggttgaagtaagaatttaatatttctgcggttaaattattctgtagggaatgtgagcttgatctctttgttattattgtagatcatctttttctgtgttgtttctttaaggttctgtggtgaaaaaccttttgatgtgttaacattgcaggagtagtatctgtttgtatttaacaacttcttaacttctttctgagaggagctaattgaattgatttgtggaaacagctggggattggttgcagggtccat

SEQ ID NO: 50593 - DNA, 373 bp, Ricinus communis
  Intron number 3 from transcript 29848.m004621 (locus 29848 .t000177) derived from phytozome v7.0 (chr-ID 29848; pos 1 005092 to 1005464)
tgaaactggagatcttcttctaccctgcattgaaggtactctactcccctgatgttcatttctggagaatgtgttctttgaattgaactttgtacatatggcaatggagacttttgatgctttgatattagcttggctcaattcttcagtgcttgattttcgataaaagaaggtttttttactttgaaatgtagattcaatgtgtccaactgtcttttgcctagagggaaatatcacacgtagatccatatggttgagtatataacggcagttgtgtgtctaaataattccactcagtagtctcagtttctcatgatgtctgtaatcaccctctccttttgttttaatactgctcagctgctcttaatttggg

SEQ ID NO: 50594 - DNA, 819 bp, Ricinus communis
  Intron number 1 from transcript 29851.m002384 (locus 29851 .t000026) derived from phytozome v7.0 (chr-ID 29851; pos 1 42610 to 143428)
atcttttgcactcctcctgtattcaagaaagcaaggtatctcacattaaaagcatgcagattatccataatctaaactcaaaaagaaaaaaagacgaaaattgaattatcagactacgaaacccagaaagaaatttctaaaattcacaccttcagaagactctggactaattgacaagcatgtgcccatttgaattttctttttgacagattcccagtgaaccctgaatttttttgaacttgattaattcccagaaaatactgatctcttaaccctgtaatcaaagagaactgcttgaacttcacgattttcaagagcaacttctcggaattctgatgaagacaagtctgtcctacggatggagctacttgtatcaagaagaaaacttgctttttagtggcaaaaattagggttttgcctaaaattgatagttgaaaggggaaaggcctgaaatctattttaagcatgtagaatattcttggtaactgtgggtttattgttaagggactttgagcacaatgatacaatacatgcaggttcttttgcaggttcatgtttcattttccagaggatgtctcaagttatgtgtgaattaacgttaattgggttttgcatgaaaaattatttctcttgttttccataatgcttggctcctcttttttgttgttgttgttgtttataatgcaaattaactgattatatgtcttcattttgtaaattatttcatgcttttttttttctttttggttgatattaattgttatgtgcataatggcgtctccagactgcagtagtgctgctacaaggaggggaggagct

SEQ ID NO: 50595 - DNA, 996 bp, Ricinus communis
  Intron number 1 from transcript 30008.m000814 (locus 30008 .t000030) derived from phytozome v7.0 (chr-ID 30008; pos 1 54104 to 155099)
ggagttgatttctgttcttggatccatttcttctggtaagagaaaagttggtttcttgttcttttagtatagtgtatttattattgaagtttgctcctttctctataaatacttattttaatactttcttcttggaaggatttctgatggttaattaattgttatttgtggattgtccttataaagttgtacaagagaaaaagatttgatcttttgcttctatttaatgcttttctttcaacaattttaaggtattcttttatattaaatttctgaagaaatgaactttaggaacccaaatgggggaagagaggagagagttactatgtgtgagtggagttgaattaacgtgaggcagtttgattgattgaagctggagttatgttttgcaattatttattttaatgagtttgagcaaccccatcaatttttttcagcatgtgtatgatttgatgagttaccatatgtattctccgacctctgagaaaaatgcaatctaagacttcttttccttcatgtgtgatttagttcctatttgctttttgcttcttccatgtcactattaccagtcttaacttgttctttctagataactttgtgatttctacttggtaattatgggatgttcttcattatcttaagtccttaacttcttgtttcagataagaaacatagtaaaatcaactagggaaactactttgtgctttacttgctgtattcgagtccaacatgggtgcttgtacttcacctttttcatgttatctctccgcgtagtttcttaacaactcgtgttgatctctctctatctttctaattgatgtaacacttgcttatattctgatgtgaaatatatgatgcttgacttttttctcacacatgcttccttttgcaattatttatgccaaccactcattgcccttttcagattcttttatgatatggatagtaagagacttatctaatatgatggctttcgtgtttagttgggtacagaag

SEQ ID NO: 50596 - DNA, 1002 bp, Ricinus communis
  Intron number 1 from transcript 30138.m003974 (locus 30138 .t000148) derived from phytozome v7.0 (chr-ID 30138; pos 1 042875 to 1043876 reverse strand)
agcaggcagtggaaggcacttccattctcaaagtaatcactgaacttagtcgttaagtttatgcaacaggttctagtttgagaaaaattttaatggaattattgttctaatgctgcttaatgatcttgaaagtttacagagtttcttcctataagggctagtttttcccataaagaagagatgcatttgtttgttttgttttaaaagtttgaaaagcatccttttctatttacttcattcttatgtttcttgctaaggaaatctgaagttatgtatttacttgatataaagcagattgcatgtccactgccatcatatgtttgctatatttacttgtactttatttagttgccaccactaacctaatgaaaagccaaaattgtcataattatcttattctcaaaaacatgttatgacttgtgaattcctgaaccacaggtagacccaaaagtatagtttctttttccatcttctctgaggcagcatctataatttttagtttttgtcatttattctataggtaaaccaaaataataaaccatagacttggaaacaagtgtaaacttgcatcctagttctatttgcactaaaatgaatggatttaaagattctgaacattgctaaattgttattagaggtgtctctttccttctctcagctgtagttgtagcttacatatgtttagtgcaatatagttttgcaaaaatctcttaccattgacgcattagctagtactgtacatggtctgtgtgtattattgtgtttatgcacacatgtatagtctagtttgtgatccattacactgtttagatactttgcaattgttgcgttggttattgtttctaatacttgatacttcgtatattttccaagactaattaataactgtaacttaaatctggcctattccttctcctctcatcaggtccgctcgatcaaacatatttattctgtttgggtatttcagttggcatagcttcttcactcttagctagtagaaga

SEQ ID NO: 50597 - DNA, 685 bp, Ricinus communis
  Intron number 1 from transcript 30074.m001372 (locus 30074 .t000039) derived from phytozome v7.0 (chr-ID 30074; pos 2 95619 to 296303 reverse strand)
aggctaagcttagagaggccgatctccgtaggcaggtacatatgcgtgtattgctttttttctttttgtggttttgatccatttaagacttcgaattcgatagtttttaattaggttttcatttactctctgtattctctcatcagtcgcaagcaaaattttgaattgataatgatagtacataaaaagataataaaaatttgtttgcttgttgcactatgtggttacttgtagcatatgcatttcgtagtgtttggaaaagctgaacctgcaacaattcaatgcaattcaactaaatcctatttagttcaatttttcatgattgggaaggccatagttcttaaaattcatatctttcaacttgatcttgggttttataggcattttgaaagaaatggaatcatgccacaaacatgattttgcaataattcaattcttggacatgattgattccgaacaaggcctttacaagcaagctaattggtttctttttatgctttggtaccttaatttaaagatttgctgaagagtgcaccaaatgctgttattttatgctttaatatcttaattccaagatcaatagaatagtgcttttggcatgataataattgtcttatctattatgagattttctgttccatgatgtataggctaagaggcaaagaccagagtatctgaggcagag

SEQ ID NO: 50598 - DNA, 707 bp, Ricinus communis
  Intron number 1 from transcript 29991.m000660 (locus 29991 .t000042) derived from phytozome v7.0 (chr-ID 29991; pos 3 08719 to 309425 reverse strand)
agttaagagacacacctggtctcggtatgttttctttcttgtattttctggtttaattttttgattggttattatgttcgattttggtgttcgaggatatgggtttctttccttattgaaaaaagatttgatttttatagtttttgtatcgttatacttctctctaggagtttatcattctgtgttagagtgaaccgatattgatagcttttattaataatttaaattggtcatgctggtttggggtattatgcgagccgataattttaatttgacagaaagtttgatcctaaattagctacatttatttgtttatttattggctgtgctggcagttagaaactttattttaagactattttaaaggtttttatagagtagtacttaatctttaggtgtttatatgttgtgcaagagtgagaagagatttattattttattgatattggtctatgcttgtttggtatttgccttagaggtattacgagaaaaaaacgaattttattttgaaagaaagaatggtgctaaattagctatattttctattgacatataaagattattatttttttttgttgatcaagtagttgcttattgacatgagtacaaatattagtttttaaaagacttgatgctgcattggtttgttgatatatttaaattggcttatgtttgttggataatgttttcagttcccattggtctat

SEQ ID NO: 50599 - DNA, 1058 bp, Ricinus communis
  Intron number 1 from transcript 29848.m004713 (locus 29848 .t000269) derived from phytozome v7.0 (chr-ID 29848; pos 1 609840 to 1610897 reverse strand)
tcctctctctgctacctctgatctcgcctctggtatctgtttagtttacttttcttattatttcttctttagaactaaaagattttttttcttttggttactgttttttttcttctttttactagatgtttttgttcttgttctttagtgatatgtttcttattttttctaatctgaagtgggttgtgaattgcaatccagtaaaatgaaagctttttatccttactccaatagtttgcagttaatgtaggaatgtgcttttctattttcttcttttcccttttccctctttcttagtgggtgattaatttagtttctttttgtatttgaatgtgtgaaatgtctttgtgctatgtttgtttatagagtagtagtgattttcacttggtgatgtaaaaagattgctcttttcaagtggtagtggagctggtgtctttgtttataggttagttcttagtgaggttagttacggagttggtacatgtcgtaggttttagttctttctcttttcttttgtcttattaacgaattcttcctaataagtaagttcaatttgctccggcttgcaatttctttttccatatttagtttcttgtggttgatgggtttttgccaatatgttcttttctgctgtttttctcaagttgcctatagaagaatgaagatggttaaatgtaattatacatgtacagtttcttttttccttttggaagttccttaatacaacttgaactttattaatcaaccttctttttgctaatgatcagagaaagaaaagcaccacttttcctacttagccacttgtgcgtgcttcttctacagatatgagatgttttatgtttcttttcttttgatggggctctttccatctatattatctctattaatggacattattgatcttgaattgtacttgtgattataatagttgaacatttgtattgcttaaagattacctgtgtttttctagtttgagattctagccattgagattgaagtttgatttctcattaactttaatagaaaggcaggctggaaatcatcttgaggggattcca

SEQ ID NO: 50600 - DNA, 518 bp, Ricinus communis
  Intron number 2 from transcript 30116.m000384 (locus 30116 .t000015) derived from phytozome v7.0 (chr-ID 30116; pos 1 88716 to 189233)
ggattcaaggtaaccgtttcagtttattaggtaagaatatggagagttttgagtctataaaagaacttcagttcactttgctctttgttcacattaatctgtatgatctcctttcttccataaagttcctttactatgtcagtcttataattaagccagtacttttctttaatgaaaactattcagtgagaatctttacattgttacagtaaacatagttaaagtaaatggaagtgagattttaggaggtaaaatataatttttaattttaatttgtttgaattgaccgcaaatggaagttctcgatccaccgatttggtaggttgaattctgaaagtggttttgaacgattcttaaatatcttaaaaaaatcttaccttcttctcagacagaagtccttaaaaatcttgaaaaacttctatccaaacaggtggtggttaacccaactgatcaaattcttatacatggtactgttgtctgcaggtgaaacccaaggaagcttgtggaagacaagtgta

SEQ ID NO: 50601 - DNA, 519 bp, Ricinus communis
  Intron number 1 from transcript 29957.m001402 (locus 29957 .t000011) derived from phytozome v7.0 (chr-ID 29957; pos 2 21057 to 221575)
agggagtggttactagtgagaattttaccaattgatgttgttgtgtataagctaacattctctcctaagcttttgatcagatattagaaagaaactttttgatttttattcttatagtatcttcgaagttctaatagagatgtcaatgccatatttaataaatctacaaatcaataaatggttgctttttggctgtctagtttttccaaattgtataaaaataaatgatggaatatgacttttaagaaccacagaacattagcttcctattccctatcccaacctctttgtttcctcttctgaaattgtttggcaactgagctactgcatatagggtattgatgtctacaacatgttatatatcttaagactgttattcccaggatttccattttgttttcctttcctcttctgctaacttttcccaccagtaaatttgtttttcgatttccatttttatgtatattagttacatgctttacagagaatccaaaagagaaggaaaaggaagtcgaggaa

SEQ ID NO: 50602 - DNA, 717 bp, Ricinus communis
  Intron number 3 from transcript 29950.m001126 (locus 29950 .t000010) derived from phytozome v7.0 (chr-ID 29950; pos 7 5955 to 76671 reverse strand)
acagttcgcgtggtgtactttccactttttctcaggtttgttgctcataaagttgtcatcttattaatcaaaacagaaatgatggaagcaatttatatctgtctgtgggtatatatattgataaataatggaaacgacatttttgttatgatactttaagctggcatgggaagtggatggtcatcaatagtttttcttagtgattcaatcaagacttagtaaattcagggaagtgctaaagctttttggcttgggtggtggattaactagaattcacgttttgggtggtttgcctcaacaatcaatatggttgtaattgggcctaagagtttttggattatgaaactaactaaaagtgcaaaatcactatgatgtggataagatatggttgaaatgttcatgaacttctctaaattaatgccagcattaatgtaaaaggagaggatagactgtgggtggaaggagagaagctggtagggtacatataagttgaagctctaaggagtacatgaaattaccatatggtgaatgaaaattgtacatcccatcaaaatctgagttaattaacattgagaaactaatggtatataaaatggtagcccttttggtctggcttttcttgttgcacactggtctcaacttgattgcagcattttttgcttgggctacatcttccctgcttgctgacttttagtaattgctttcatgaacagaagc

SEQ ID NO: 50603 - DNA, 374 bp, Ricinus communis
  Intron number 1 from transcript 29838.m001723 (locus 29838 .t000093) derived from phytozome v7.0 (chr-ID 29838; pos 4 92631 to 493004 reverse strand)
atccaaggtggctccgtttctgttgggtctgacaagtataaatctggaatttgtaatgattttggtgcatcaagcaactccatttttggttaattgtttctatcaagttaccccaaaaaagaaaatgttgttacaagggtataagcacactgcattcaactattcaatttctctttcttttccagacacttcctgccatattagaaattgaaaagttctagtccgggtgctaacatatgtatgacattttctacaccgattgcaatctttttatttgtttttcttatcctttgggtgggtgtctttctgtactttgattcactggagcgtatgtgacaggtgcaagctgtgctgttacttctgggaggggctga

SEQ ID NO: 50604 - DNA, 610 bp, Ricinus communis
  Intron number 1 from transcript 29904.m002978 (locus 29904 .t000092) derived from phytozome v7.0 (chr-ID 29904; pos 6 09769 to 610378)
aacatatacaacacaaacagtcaaaaagggtaaaagagaaaaacccaacacatccctttttgtttcacccatttcaccacattaatcattgctcgagcacaagcaaaaaagaaaaacaactctaagtgggtggccatgaattatgattgacacacacacacacacacacacctgcttctaatatccaaccatcttttcccaacctgaatacccaatacaatacaaccccacctattataaaatatataaataaaagatactataaggtcatcccctttctttgatgcaaagcaaaaacaaaacccccataattaatcatttggagataaccacacaccactttcaacaacattacttactatacattctctccattcatttcatttttgttttgatccggttatcaatcctttgctcgcataactttcaagatactggccgtagaatcaagaaaacgaaatcaatctttatatagataaagaaaagagtttaaccttattgactgtactcctggcggcctcagggcagaataggtgcacagctctagtgtgctcttgctatgtaccttcttcaaggaactatagcaacagaggggaagaaaacagcaaca

SEQ ID NO: 50605 - DNA, 159 bp, Ricinus communis
  Intron number 2 from transcript 30063.m001430 (locus 30063 .t000034) derived from phytozome v7.0 (chr-ID 30063; pos 4 07459 to 407617 reverse strand)
ctcctgccgtgtccgtattgcactcaatctcaaaggtaattatcctttttcttctttctttgttcttaatttgaaatcatctgtttttctttttttgagtattcagttccattaatttttgcaggtatcagttaccaatatatacccgttaacttggtc

SEQ ID NO: 50606 - DNA, 642 bp, Ricinus communis
  Intron number 1 from transcript 30008.m000803 (locus 30008 .t000019) derived from phytozome v7.0 (chr-ID 30008; pos 9 7463 to 98104 reverse strand)
gtactcctgagcttgttgaggtatattatatatcttacaacatgagctgattgttttgttaatttataatatctgatggctaattagtgcagtattttaggataattatcatatgtgtagcaggactgattagtgaagaagtttttctaattgaattagcctcattagcaagaaagttcaggccttacactagctttgtctagtgatttttattgtaattctaatgtctgattgagctggattgctttgattttggaagtcctggaatgttaataaacaatgtaaagtgcttttctagaagcagattttcttggaaaatctatgaaaatgcaagcattcaacttggcaatagcatgtatgcaaatattgattgattggtggagagaaccctagtatccttcggaagttctctaaagggtacaaaagtatgtgtttgcatttatatggtattgagtgacaattttgatagtcatatatgaagtgcaataaggttaatgaaatgcttcctaatgactgaaatcttagtccaatattctgacatgccattttaactcgttaccttcttaactagagacaatgccgtactaaacaatgtgaatgtttctaggttctttacgacagagatacaggaagaagcagagg

SEQ ID NO: 50607 - DNA, 873 bp, Ricinus communis
  Intron number 1 from transcript 30009.m000821 (locus 30009 .t000001) derived from phytozome v7.0 (chr-ID 30009; pos 3 09202 to 310074)
gaggattggggtaagtctccctctctctttctcctctcttttttttttgaattaaagatggcaagtctatttgtattatttctatgcaaattcagtgatatcgatgcattcttagtgtaattctatacttgggtgcattttagggttttacagtctagtcaactgattctttcggctagaggttttgctgtaagctgaaattaaattcctagtcacgaagataactgtaaaaattaattgaaatagcagtagaatacatgagacaagtaggctgttccccgcaatgatctttctttgattgggttaagtgtatgcattatattttagtgaatctttgatcttggagctgttccctttccaagttcagttctgatagttgatatattaattacctttctgcttttaatatagaatatcttgatagaatggcgatgtgttgaccaaactagcactaagtgatattaaacttattcttgtgaattcaaatccccatgtgggtttgctcatgcagttggtcagaattattattaattgtaaattacacggtacatataaaagctgattaaactgaaagaactggacaaagtttaagagtagatttaaagttttggtacttttaatttttattttattttattatctgggtttatgaatatattcagaaaaagagtaaggaattttatgtccaatgctatattctgcaacttgtggattgtgattatgatatttaatcctctccaaacttcacaatcatgccttatgcaataagcttcctctgcattcttatttggagctaatttcatttaatttgacaaaagatcttggtctgctgtttcagaggacgaacaaattccacctctcattttaaaggag

SEQ ID NO: 50608 - DNA, 859 bp, Ricinus communis
  Intron number 1 from transcript 29841.m002748 (locus 29841 .t000012) derived from phytozome v7.0 (chr-ID 29841; pos 9 9036 to 99894)
tgctctggagaagctttttggctgctttggcatcggtaagttctttcatttctgctctatgtctactagtctttctaggttttgcagtgatgacatgaaaccttgacatacaagtatctaacataggttaaattcattacaagccatgcaaaaatagttagatttttttccaatgaatataatctgaaatattttctttttccaacgaataataatttgaaaatcaaacaggcgcatgtcgagtttaaaaaatctcagttcttgcaatacgaaaacagacaatccaataaattgcattattgtgttggtgtagaaaaaagttactacatacttgaagctttagcaacccaataaaatagaagaaaatagcactcgtaataattctgctaagactctgcaccacagcatggaaagtgggcctttcttttgctccttccctgaatgatttccaaatgaaaaaaagaaaaaaatcaacaagaaaattaaattccagaaagaaaagggaccgaacaaataaggtgaaaagggtaacaaaaaacattggccatcatttgatggcatgcactaaaattcacgcgcgaaacaaggtacccccacccccacctagccagaaattattaatggtagacagagtatagtggcatatcttcgcacaatgttcatatactatagattaggaacgatctgtatgatgttgaattaatataataattacatgcatggactttgtaaacttcttaaatatatattctcaaaaaaaattatatatttatgctcaaagtaagactaagacagaaatgaagggaaaaaagaattgggttaataatgggaaatgtgtgaacaggcaaagctttgaaag

SEQ ID NO: 50609 - DNA, 674 bp, Ricinus communis
  Intron number 1 from transcript 30131.m007075 (locus 30131 .t000226) derived from phytozome v7.0 (chr-ID 30131; pos 1 336133 to 1336806)
caagaaaggtctctttttttcctctctctaaatttgtaacatatcatatatatctttctatccatttttggagccgtcctcttaggggcctcaggattttagaaatcttcagtcttcgcttccttatatacttacccttctttttctctcatggttcctttcattcttgccaattggtataatctctttctcttcttcttcttccactaaactcatccagttcttgcattttcttcatcatctttagctacccttgttgttaatatgcttctgaatttgtatacttttttatcattcagcatgtaaactcttaaatacatttgtttcttctggagaatttaatttggttttgtttcatacatttttgtaggctggctagcatgaaatgtagtttcattttgcaatgttttatgcattggttttgatgtgcaagttcttaacatgccaatattattgcatagggtcagaatgtacatgcaagtgagccattgtttagtatttctgttgcaatgacttttctcattagaaactcggatgctttaactttttttagttttgatgttttgaagtgctactgcaaggacgcgtttgtttcactttggatcttttattttcttggatctctttatatggttgcaggcatataagtctttattaaggagcaatattttttg

SEQ ID NO: 50610 - DNA, 735 bp, Ricinus communis
  Intron number 1 from transcript 29986.m001630 (locus 29986 .t000046) derived from phytozome v7.0 (chr-ID 29986; pos 2 87418 to 288152)
agccattgaccgctctcctcacccttctcatcagagttagttacctcctcctctgctcatgtttcttggtatttgcaaaatgaaccacttgatgcgtaatttcttgttaactttcagagtacatcttttccagttttttgttgatgtgcatttaggagaattcttatctagcagtagagtttctttcttctttgcatagattttagatttttgttctttgatgcttaattaggtacacagaaatggaaaaaaaaaaagaaaatagaatccatcttttttagaattttaattagaataagaggagctctaacacagtaattcacccaaacaggtaagaataacagtagtgcactgctgctctctagcaggatagccatcgcaattgttgaattgattatggatagaggaaaaacgggcgtggtcagaaataattatcatttctcaatttaactgttaaaaattcatttctttttgtatctaaggtgttcatctggaatgtcttcactatatagtcttttcttaaactcagtacttttccattcccaaccttgaaccaaacgggtcctacaggttttcgcttgtccctgatgcttggaaccagtggcatcttcgctactctttgtatgataatatatatggctaattaaggatgtaaaaagactagtatgatgcggaaccaaaactaaatagcaacaagtgctaaagaaaatctttatttgggtactctttcagttg

SEQ ID NO: 50611 - DNA, 387 bp, Ricinus communis
  Intron number 1 from transcript 29889.m003349 (locus 29889 .t000115) derived from phytozome v7.0 (chr-ID 29889; pos 5 45413 to 545799 reverse strand)
tgaagaactttctcctgtatacattgcagttacaggtaacttttgattaagaatttatctatttgtagtgttagttctttttttttttttcttgtttcttttttgttttgtttttccttgttactcttcaaaaggtattgattattctgtagtgtgcatggtttggtgcttcaaactctattgagaaaaatccttttatctccaaaaagtagtagctcattattcagtgggtataatgatatcataccatgtcatatcgtatagcagcatatccttgatgcaactttacttcttcaatatcaatcctttaacttctttattgaaaaaattaattttttcctatggttggtagagttgggagaagacagtggactgctacagtcctgg

SEQ ID NO: 50612 - DNA, 1006 bp, Ricinus communis
  Intron number 3 from transcript 30068.m002554 (locus 30068 .t000044) derived from phytozome v7.0 (chr-ID 30068; pos 2 62104 to 263109)
aggacggtagattcttaattactttcgcttgccattatttgatttattgctgagaaatactttttactgcataatcttttattagaatcagactatcaaacaattgtctatgcttcttgtgttttattttttcttttcttaaatggtagtatagactaacagtgttcttgacatattttcacattgtaagaatggacctatgcttcttgtgtttttactatccttattaatagtctttactataaaaatatctaaaattatgatctctggtggcgaatcttgtaattgtagttcctgtatgtatctaatttatgcattgaaaactcttggctgtccatgtcattagagataggagctgttaactcttgttttcatgttttcttggctatgcatgaaagacatgccagcaatactgtctgtgtagccaaacattttagtttgtgaaatttatacaacgtgaatacacagcacaagttaatctgtggcttcataaaattcatgtggaaattgtttgaagcttaagtattgctttgtcttcaactgcaattatattcagtttcaattgtaggcatataatttcatttttgtggtcgaattaaagttgagctcatttgaggagagaaagggtcaatcctggtctatagagggagtatggtctgggcttaggccgtgttgtagaattgtgttatttcacaatgtgtccaatagttagttaatttgcaagcggatgatagttctgaacgtcattactattcctgatcatttaaaaccgattcctgattgagttattaagaacaatatatagggatgaaaaagtaagcatttgtgaactgtgaagtatgattattgtcctcaaaatagattgttcagctgcattcctgatcagcttcatgtgtaacctgttgttaaaagatatttatggatggtgtaaaagggggctcttactagatgcttctcgtgtttattggcagattgtcatctatctgaggagactgttcaaaaggtt

SEQ ID NO: 50613 - DNA, 525 bp, Ricinus communis
  Intron number 1 from transcript 30055.m001609 (locus 30055 .t000079) derived from phytozome v7.0 (chr-ID 30055; pos 4 04165 to 404689 reverse strand)
acactcccgccactcttggtatgtcttttctttttctttctttaacttcagtttaagttttttcagcttatactttgcttggagccataaatataatgatgcctcaggacactctttgaattcttcatgattactgtagtgaaagaggcaataaacatgctgcatgcataatggcttggggtgggcaacagagtgagcaataggagttagcaggatgacaaattattggttaatttggttcaattactttcacaactgattcagtttggttttaggatgtgaagaacatagctttctggttcatttcttttaaaaattcagtttctgattctaaactcgttcctcgtctctcgttgttggattgttcgatccattcaggttccttgtttccatggctcctactatttcttcctttattctctctctaaaaattaattgctaggttgagttactctcttggattcttcatggtagcctatcatcgatgcagataaggctgagaagttattggcagaggcagctagt

SEQ ID NO: 50614 - DNA, 241 bp, Ricinus communis
  Intron number 1 from transcript 29830.m001390 (locus 29830 .t000007) derived from phytozome v7.0 (chr-ID 29830; pos 7 8670 to 78910)
gcttgctctcagcagcagcaatattccaatctcaagtgggctttcttttctttttctttttttctgtttttctctttttgattttgctattttcttgttctggtgatctgttttatggaagatcaaatcttttggtatcattctttaatggggtttcttgattggattaatgaacaaggttgttttccttgatggtgtgtttgcagggaagattgaagactctgaaaagggagtttcaaaa

SEQ ID NO: 50615 - DNA, 886 bp, Ricinus communis
  Intron number 1 from transcript 29912.m005487 (locus 29912 .t000213) derived from phytozome v7.0 (chr-ID 29912; pos 1 395960 to 1396845)
ctcaagttccctacttggatttttcaggtaaatcttatgcttttcttttttcttttcctcattatgcttggcgatgaagaagggaagatacttcataggaaaagaaagagagttcaagggagaaaagaaatacatctacctttctatatttagttacaataatcattaaaataaagggagaaaaattagaattttaatttttattaaaccatagaaaaaaaataaataattaatttttttatgagttcaaatatattttacactttaaattggaatataattaatttcaactttcataagaggaatggaaaagaattatttctcttttatttttctttttctctaaaaaattttaattgccaaatataattagaattaacttattttctattttattccctttccttttgattaccttctattattgcataatgcaaatttttatggcacttctaaaatcctgcatatatacaattaaatatttgatattgtctttccttttctttatattctaattatcattggctttctttttctaaaagaaatagaaagctgaggtttaatacaaataagaaatttttattaattatattaaattagaacaatacctttcctaagtaaatatgaaaagtttttatttaggcttgatttatatatcataatttataggaaaatgatacgtacatacgagtattttatattttatatttaaatgattaacacatgctttattatttaaaattaatgaatatgcattatcaatttggtgtatctatgaaaatatagaccaaggctagacaataatttctttgttatatattatcttttaaactctttgtttttttttacttcacagggagaagatttaggatagggaaggtggaaa

SEQ ID NO: 50616 - DNA, 933 bp, Ricinus communis
  Intron number 1 from transcript 30138.m003983 (locus 30138 .t000157) derived from phytozome v7.0 (chr-ID 30138; pos 1 129615 to 1130547 reverse strand)
ttagagaggtacaaaaagaagaaagaaaaactttcatctttctttctttctttccttctttctttctttttcctaataaagcattatcagtatcaagattaacccatcaaataatgtcaaagaaatgatgttatggtctgtcgttccttcacaaaaagaaattacggtatgttgttcatttgcaatatagtttccattttaggttttgggtgtccattaatgcaatactatcaaacatttgttagaaagactgaatctcagttaggtggatatatatataaactaggtttaagtggttagtgtgatgtgaaaaagcaaaagaattaagacaaaaggcacgtaaagctgcactattctttaggatttagtttgtaatatctcaggagaagcagcgtttatagcttttgaataggcagtcactaactaaatgcacaagaataattagttagacgcttttgttgattaattaaactgatttaatgtgagaaattctattcaccaaaaagttcaaaagaaagtgacccaattgatccaaaaattcaagagcattaaatagacagattgacagagaaaaagaaaaactttggaatcgaatcttcagattcagacccactagcaaaaatgtcctctatatatatatatatacaaaatctcttggctattttcaccccattatcgtctaaatataaaatattattaacttttataaccgaaaataaattatttttgcaataaagaaataagctattttctgcagaacaaatggagcctaattataaagtacttcttattaaaaaaaggatctcctttagccatcaaatttttaatttctaattttgatactggagaaatatttctttttttttttttatcgagattttgatgggtgaccatgcagcaagaagtgggaatactcacacacgcattggcgga

SEQ ID NO: 50617 - DNA, 697 bp, Ricinus communis
  Intron number 2 from transcript 30099.m001630 (locus 30099 .t000009) derived from phytozome v7.0 (chr-ID 30099; pos 4 6457 to 47153)
cttttccagattccggttctttttgaaggttagtcttggagttttggaatttacatttcaatttttgtttcttttctttttctttaattttgattatatcgagtacttttgacttatgaatatcttcttggaaagtcaataatttagtcgaattgaattgtaattagtcaattctcttgtttggaaagttcatagttgaataacaggcatgttggaaaaaaatgtcaaggattcaattcattcaaactcttaagcgtgactgtataataagagaaatgaatgaactttgaggaagacgacgaagaagaaagaaaatgcagaagagagaattatgactttatttagtacaatgaaggatgcttaagctttgtagaatttaacaacgtttaattgaagaatcttgaatattaaaattagtggtttctcaatgtaataatatactcatgttgaatatgcaatatatccttcttttttctttttttttctgatttgtgttggtactgaacgatttggtttgtcatatttagaatgcagtttaagttcactagaatatgctactaacttaagcagaagtaatggcagaatcatcttaatgactggatacttctcgccttgtgcctatagaaatgcatgctttgtagtcaatttacccgttgaactgcattttcttcaggcaccattgcagataacatacgat

SEQ ID NO: 50618 - DNA, 784 bp, Ricinus communis
  Intron number 1 from transcript 30146.m003601 (locus 30146 .t000178) derived from phytozome v7.0 (chr-ID 30146; pos 1 239654 to 1240437 reverse strand)
attgtttcattgcggtaatgatctttctttcttgttcttgtttatttgtaatggatttattgtttcttggttttattttatctgttttttggtaaagttgtggtctttagtttgttaactttgtgtattagtatctcagttctttataaaattgatgtgggttttgttgttattggtggttattatgagatttttagccttttgttattgatcttgaggtgggtttttgatttggtgatgtagtgcaatcttacttgttatttatggggttttcttttggttcttgaagttttttacttaactatgagaataatgtcttagtcttcgtgaaactgatgtgggttttgttattgacatttcttgtaaaacatgtaggatcttgttgatcatgaagtggattttcagtttctagggttttgccggtgtttccttttgataattttctttattagttctgttggtatcgatgtgataaaagaaagtttctgttactaacgtagtctagactattttttgacagttctgtgaacattgattgaactttctctgatgtaaaagttgaggtttccattccaataagagtttggttcagttccagttttgtagtgcttctggcgtcaaaatctatctgcttctgatagagttcttctggatttgtacctaattttgataatttctcgattctcatgtattgttatgtatttttttggtttgttgcgcctgtgctgctttcacttgcaattttgatttagttgctgtgcaatgagttttctgcagggttgtg

SEQ ID NO: 50619 - DNA, 928 bp, Ricinus communis
  Intron number 1 from transcript 29917.m002022 (locus 29917 .t000091) derived from phytozome v7.0 (chr-ID 29917; pos 6 50548 to 651475)
gaactgtggttttggttaataagcctaaaggtgagttaatagtgcttttctgttaatggctgaataaatttggaatcaaatctttgggatgtgtagtttagttcagattttggaatataagaaatttggccttaggttaatatgtaatctaatgtgcatgacactttagagtatgcataaactgcaaagggcctagtacaaaggtaaacgcactatagtcaccactgttgaagttggcttttaaaaatagtgtgtgcattatttggagctaataatactgtgctttgaggtcctgcaactaactgttgtttaccttgtgcatttgtctgaggactggatgttgaatgagaattggcaatatacatttctgccagtgatttgataaattccatgattggtcacacacataattcatatagcaactagcctagtatttaaaaaaaaaatatcacactagactttgatgagttgagaattctgtactagaatctgttcctgtttggtataatgtgatgaaggtttttatctatttaaagatgcagttcctcaaaattttaatgcaccaaaagatgatagaaaatattagtcattagtcagcagcaagtgttgccagttaaggaaaatagacttcagctctggtaggattctgtacagcctattattcttgtttctactatatattttcaagaaattcataatgtaccccttggttacttgagaattagctatactgtttatcaactgaacttagcaccaatggcaatctagttgggataaactaaatcaatccattctgcttggtttagggctacatttccatatacctaaagtccaattttcttggacattaaaagtaaaataacattatctcaaatcttcaactataatctttatgtccaagaagtaatgttatgatatttcaatcagg

SEQ ID NO: 50620 - DNA, 1048 bp, Ricinus communis
  Intron number 1 from transcript 29895.m000311 (locus 29895 .t000005) derived from phytozome v7.0 (chr-ID 29895; pos 4 2476 to 43523)
tggagcaacaaaagtggtattcaaccgtctctacggtatgccccccttttgctttatttaaagcatttctttggttttgtagttattctctttagcttgcttcattagacataataaaaaatttctgattagtatgtgaatatgtaacttatatccttggacagtaatggtttctatcaaattgcattatatatgatttctttctcagtttcatctgttttcatcttcctttttatttcattcttttagtaagttaaaacctttgatattcttaggaagataacagatgtcatgattgtgctacataaaaccctttgcaatttctttaagtggattaaaaatgttgattatatactgcttctgtcaaagttgcctgctcaaaaagaaactctgaacttttgttagtaatcacaactgaaagtccacagattcacgtccttaagaattagagaattctccttccatatgatgggtcacgaattcattgataatgtattgctgggttaaggaaataaaggaaaatatatctgcagagtgaaaaaacagaggaaacgttcccccctattctgttttgttcttatagtgctcagttgctataaggaaaagatactatatctgcacgatatatgaggtgcattaccaaaagtttttcattgaaaatctaacatgcgcactgacactgaaacagagatgataacaaacacaaataagtgctgaggcctgagtgcttcaagctttttatgttgtttttggaccttctgtcaaatctcagtttgcaaagtttgaattatgttccaagatgctggaaataaatattgccatgggatagctcatttttgtatcaaatgatgtaaatatttgagaatcagcttgttttggcatcaaaggagtaatgccattgctttatatttggtttttttcagcattgtttactttctctatttatgatattctttttatggatattatgttaatatgttcttttctttcatttctttctgttgacccctcagatcctgtatctctagttcgtgatcacaacatcaaa

SEQ ID NO: 50621 - DNA, 1009 bp, Ricinus communis
  Intron number 2 from transcript 30108.m000235 (locus 30108 .t000002) derived from phytozome v7.0 (chr-ID 30108; pos 1 1206 to 12214)
tgttgatattgagaatcagtattacaattccaaaggttttttcttaatttatttattaacagattttgataaatttcttctttattttagatatatattttgtatataaataagtgttgtttagttacttaaaattgtttgattgtagttactttttactttcttttatacatgttaggttgatattgcagatttttaatttatactagtagagtaatcaaagttatgggcattttcctcttttttttttttatttaatttataaacttattcttttcatttgcatttcatcaaatcatttattttctgtggggaaagatttagggggtaagataccccttgcttagtaagtaaactgtaacatctactactggatcaaacaaaattttatattatataacatatactatttgaaacaattcatcgagacttgttataaaaataattcaatcaaatttaaagtttaaacaaagttttctgctacgatcactattgttttcttttttgaatgttgttaaggatttaggtctaatggaatgagattatttcttatgtgactttcctaggaatttattttgaggcaaaatattattaaattattttggtgattaaaagcatctcttaggacaaagacgtatcttgttgtgactttctttttaatatgtttttcaatttatgatctgtttttttgctgtaccacttttctatgtaatcgtattatttcagctggactacttccatataatctttattttcattaagtcgctttattgagttaatctatgttctgcaatttggatcttatgattatgtataattagttaactaccaactagttataataaattttaactaaagttttgttgaaaatgtctgctgtcagatttatgatgggaactttgcatttttttgtcttcacttcattctttatttatttgctaacttgtaattcctttttttttttctttaaaaaggtttggtcgaaacagacccagaagcagcacttgca

SEQ ID NO: 50622 - DNA, 718 bp, Ricinus communis
  Intron number 1 from transcript 30131.m007140 (locus 30131 .t000291) derived from phytozome v7.0 (chr-ID 30131; pos 1 799871 to 1800588 reverse strand)
cttcctgggcgccgctgccgctctcgtcttctcttgtaactcatttctctttattcctttttctggtgttgaatttgttttcttttttagatctcactgtctaaaccagtcaatttttaaatttatttgttgtgtcttggtttttgggtaactaatggatgattgaattatatctgattgtttgtatggatctgatttcattcgattacatggctttattaatgatcttgttttgattttatgccaataggacaaagatttgatgattcacaagtctcataatcttaattagtgaaggttttatatattgctactgatgtatgtttaatagatctttttagttttttttattttttaatccatcaatatttaatcatgcgttcttttagtttattaagattaggtttagttgattggtattttttccaaactatttaaaattgacaacccagatcactttttggttaaacattgtagtcaagtgctttatagagcataaatatcagggataaaaaaaagtcaaaagtctttggtattgatatcaatgctttttcttttttggctaagattaggtttaatgaagtgaattttagtcttaaactagttaaaattgacaacccaagttattttcttgttaacacattggacttagggagcactaaaaataaaggcttaaatcttcttggcgtaaacattttcttttatcggatgtttaggt

SEQ ID NO: 50623 - DNA, 939 bp, Ricinus communis
  Intron number 1 from transcript 29851.m002407 (locus 29851 .t000049) derived from phytozome v7.0 (chr-ID 29851; pos 2 81850 to 282788 reverse strand)
acttctctagctttattcgccagctcaatacatatgtaagtaatcattattgctgtgtttatatgatcattatgtatattgctgtgtcaattcatcctgcacagtatctctgctagttaataatgctgatgacccttgtaatctaatgcaatttccagccattccggatattctttgtgttcagattatgcatcaggttctgattttgggtgatgaaatttttgttcatatataaatatttacatggtttgatttgaagacgatgccattgatgatgttagctagctagacgctaattttgaagttagaatcagttgcattgcaccgattcaaatcaaatatttgtaatcttcaagttgactgcttcgggaattcagtttccaaagtatatttatataaatgctatataatttctaggacatggatgatgatctcgttagtcaagatttaaaaattgctaaatatttgactcagaatctcagatttttatttttatcaagtcaaaataagcacactttggatattgcatgtgaactactagctagacttttatatcacaccatttcctagggaaaaaagaattatatttcctgagtttcattataattctttatatatgatattaattaagcattaagcacgcatgctaattaaataatggattcttttacaatcttatggtatttgtcagttatgcccaaacttgattggagttatcagatggcattttcacttcaaatatgagacttttctagatgcttaaatataagccagtatctaataattaggtcagtagtgggtacttggtaatgactataaataacacagttaggaccagtgtatatttgaatgtatctttttttatgcgtttcatggacatatatacccaaaattaatattgcaggggttcaagaaaacatcgtcgaagctgtgggagtt

SEQ ID NO: 50624 - DNA, 998 bp, Ricinus communis
  Intron number 1 from transcript 29912.m005517 (locus 29912 .t000243) derived from phytozome v7.0 (chr-ID 29912; pos 1 572822 to 1573819)
aacgaaaccctgttgtaagatccatttattgattatgtattttgtaatgtaaaagtctttgctttctttttagtttttttttttttttcttacagaagtttgttttgttgtattttctatgaggttgttcaaaaggatgttcttttaggggtggattatgaaaaagaaaggacctcgtcagatttttgttgaatttcggtcaatgggttttgcggttcttttaatcaatttcttttttgctgtacttgtgtttgaaattggatctattttgttgcttgttacaccccttggctgtacttctagaaccagtctttgctaaaatttgatgggtctgcatcttttctttaattctctttttatgggagagaattgtgatggccacacgttaatccaattttgttttcttcatgattcttttcatttagcatgcacatctgatatgtttattgagatagagtatagttggatttagacttcaaacagtaaacaattaggaaaatgcagtttccagcgtcatcattgaggatgctagatcgattatgaatatttggggatgggcgaattgacgttgtttttcatttgatttctcgtaatttatggagaatctggaaatggcatatttaggataaccttgtatagtttatctatagatggatgtctacaagaatggtaaaaggaattgactagctgaatggtttgtagaaatgtggagggattagggtgggtccttagatgagcaggttgaagatagttacttacaaacttgtggcatcagtttaattgcgagaggaaggaagaagtttcttgaacctcatctacctttatcagaatattatttgttgttttgtatcttttctccaatctttgccgaagttaaagtgataattgaatgcaaaatgtgacattgtgtaataagagttaacataaagagcatgtatgttcctgcttagttgcttctttttcatagtaagttataagttcatttgttttaactgcag

SEQ ID NO: 50625 - DNA, 790 bp, Ricinus communis
  Intron number 1 from transcript 29908.m006160 (locus 29908 .t000211) derived from phytozome v7.0 (chr-ID 29908; pos 2 77059 to 277848)
acgactctacccagaagtctcagcagcctttgcaagtaaatccagttttgtttgcttgatctgttttcaatttttgagctaaatcttgtacgaattcggtttaccctacatatgggttttggttcattggccttattttttttatttttgttgttgtttgttttgcataattgagcgtatattttgaggtcgtctattttgtttgtcaatttcaatttggtgagatgaggttacccttttgttgtggttcagatgtatttgctttcgtgctgggttcttatgtatattttggtatggttgatttgtgtagcttcagtattctgattgaatgtcccacttgaatgatggttatttaatttagaaagtgaataagtgggtgagagatttagatgattgttaagtgagaatatggcaggcggtacttttgtgaatttgttggctattattgaaagtttaggcttggagtgaattatgagctgaaagtttagcaggagatgccatcttgattgttggcattctgagttggataataattaacattttcaatctcaaaaggcaagccgcaagcaatcctgataaacattaaccattcttcctaaatcgaatagactggttttactacaggattgtgaatgtctcatttacgaggcatgcttagtcattgataatttctacaatgtcttgagtgaatcagctacatggcatatctctgctatattcttttgttttcatatttatagtcttattcttttcaggtggcaaagcgcttggagaagttcaaaactaccat

SEQ ID NO: 50626 - DNA, 967 bp, Ricinus communis
  Intron number 1 from transcript 30146.m003498 (locus 30146 .t000075) derived from phytozome v7.0 (chr-ID 30146; pos 4 87944 to 488910 reverse strand)
caatcaaaattcaaactgtcttcagaggatatttggtaagccggttttaaaatatcagcgcattaactctttttgtttttctttttccctataatattgttttcctgggtggggttgagatttattatgttcaaaagtttattttctcatctgggtattttcagattcttgtagtaagatttatgtgtttttcttgcactgtagtaaaatgttcctacacatgtcagttttgcacattgtaagtagtggtataaatgtttttcttgatttttacttttatgtctgctctactaaagggtaatgaaacagtacatatgcttttgagatggatattacatagtattagatttcatctatagttactttttctaaaatcttacccacatgttttctctcaaaagctggaaacacagattcaaatgttaatttatgtatttttaacttttgggttgccatagcaatacaacttgcttttggtttgttctatgaaagtactctatactttttcttacctttgtatctgctgaagaaagtagattcgaatgttaatgaaacagtgtatgtttttgggtcaatgtgaggtacatttgttttcaaccctttttattgacttaggaatcaaaatttgaacctattttccctgtttatctgttggtccctcctctttgcactgaaatttttgaatttgaaaaaatcttgccttttgagttgggctttggttggcagtcttttccatattactgcatctattaggcaataatttcctacttcaaactggtgccttctttttcacttctgtatgttctgctttttctgatctatgagctccataaccaagctgtagagtttcctatcatcatttgtttgactgtgaattttgaaagcaattctttacaatttaaaataagtttagtgttggttaactatctcaggctaggaaagctcttcgagcattgaaaggattggt

SEQ ID NO: 50627 - DNA, 523 bp, Ricinus communis
  Intron number 1 from transcript 30071.m000428 (locus 30071 .t000004) derived from phytozome v7.0 (chr-ID 30071; pos 2 0713 to 21235)
gtgacagagaaaggctgctgcattttgatcattctgtaagttactctctcactttctctttgcttgtctaccgagaaagttgttatttggaaggaaaatgaaaagaaaagattacatttttgttttgctttattaggtttactttgatttaatattagcagttataaagtaacttaatctggttgattttcgactctaccctttatttttggttaacaaatcttccgattgtatcatgttttctcatttactgcaatttttttatttgtttttttcgtaaaggttgcatcttggttaggttagttgattggttgattactagttacaattaacaagaatatgagttatctataattcttttttgggttaagaagagtttgtgatcgacagttttaatgtgttttggcgtggtttatgacatttcacgatttgatttgttatgttattggagattcctaaatatttatttggaaagagaggatctccgtgtctaatagtcatttcatgatttttcaggtgagaa

SEQ ID NO: 50628 - DNA, 604 bp, Ricinus communis
  Intron number 3 from transcript 30071.m000428 (locus 30071 .t000004) derived from phytozome v7.0 (chr-ID 30071; pos 2 1608 to 22211)
gggctggtagagggtttacccttgaagagctcaaggtttgtttgttgtttttgaattttcttatctgtagagttttttcatattgtagttttctaatgttatttcttacatagttacatgccttgttttttgtatgatgttgcatcatggttcttattctttcatatgtgcttttgaagccagttgttatcctacatatactcctaatcagtggctacaactcactttgtcttgtgcattatgatggtgtttctcagtttcatttttttttttgtacatcgttggaaggattcttaattcagcttagtcggaacagaagtttcttatgggcagaactatgttaatggcgtgcatctattatttcattatagaattggcatgtctctgaagtggatatttgaatactaattttctgccatattagttcaaagtatcagtcaattctcattgaaccttgtgtttttattttctttccctttataaatcactttaattgatgtctctctgttaaatctttgtatggaatctgctttaacatattatcattgatcaacatcttttcttatcaggctgcaggtattcctaagaaacttgcccctacaat

SEQ ID NO: 50629 - DNA, 526 bp, Ricinus communis
  Intron number 2 from transcript 29838.m001694 (locus 29838 .t000064) derived from phytozome v7.0 (chr-ID 29838; pos 3 91518 to 392043)
ttgacacagatagtgagtaacttaactttatgcgtaacactatgtttggttggaaagaaggaattgatacgtaaagaaaagaaacgaaacaaaacgtaaggaaatgaaattaatttaactgtattttaatttgggtgcttggatgaataaaagaaataaagagataagaatataaatttactcgttttttactttttcttcacaaattggagagaaatgagaattttaagaggttttattcttaattttttgtttttatctttttttttttcgaaaacccacttgtaacttctgaacaaccaaattgatttttttcttcttttcttttcttgggaaatattggtttataatttctttgatttcttttgtactagctaaaaaatggattaaaaaagaaaatatttcatttattttcttttcctttgtgcaattattgcaccaaataatgtaattgtctttctccttcttctttttttctcctaacaattttcatctattctgtaattttccatttgttacaggagga

SEQ ID NO: 50630 - DNA, 363 bp, Ricinus communis
  Intron number 1 from transcript 30111.m000714 (locus 30111 .t000017) derived from phytozome v7.0 (chr-ID 30111; pos 1 17399 to 117761 reverse strand)
atcaattcgattgccacatcatcaacgaagacctggtacccgtcaatttcttatcataattcccatttttaattttgttatgattagtgatttaatttctttttttagcttaaaccctaatttaataaaccaatagatttctatcttacttatgagggcttttcttcttttccatagaagtagagctattttgaattgggtgatatatttaatatagtgaaagtgtaaaacagatggattttaaaggaattattacttcaattcaatttaaaaccctaatttttgaaccaatagatattatttggggattctgttttgaagtttggtggtgttgaaaatgattggattttgcataggtttgtg

SEQ ID NO: 50631 - DNA, 855 bp, Ricinus communis
  Intron number 3 from transcript 29950.m001133 (locus 29950 .t000017) derived from phytozome v7.0 (chr-ID 29950; pos 1 02572 to 103426 reverse strand)
cttttacctcttgaaagatttcttccacaaccaaagtatgtttattgtcctttttctttttcagtgcaactccttgttttattggattgaatgtgaactatctgtcatgtttgcaatgcttgtattttgtaaagaccctgcttgtatttttggtggaattaagaacttcgcacatcattttgtttgtttggttatgaaatctatgtatggtacgcaagattactggtagtagtttgagcaacgcgacactaaccatcaactagtaattgagagtctagcatttttttgcaaaggacgtctacccgggtgttattttcatgttctgttttcctctcttttctatgatcagttgtaaaccttttatgttgacaagtttttgagcagtcaagcatttacaatttggttgcattttgaagatgactattctttttccatccgtgatattggggatgaattaaggatattttgttcagggtgactcctgaaggttctgtgcacatttcttttatctctgtagttgcatttaaaaagtgttagagctgtcaaagaaattgactggcagtggttaaaatacgggattgctgatttcagttatgatgcatcagtttccaactcttttctgcatagtatattcattcaactgttactgtcttcaactttatgtatgtccaatgcttctgcattgcaccagtcagtcacattaatccttgcgggcttctctcaacagtcaaaacacttctcatagtatatggtgttattattctggatttgtttggaagttgtgcctgtttaaatcatattataattgttataattgcaggggacaggcacaagctggaggcagaggcggtggcc

SEQ ID NO: 50632 - DNA, 881 bp, Ricinus communis
  Intron number 1 from transcript 29851.m002378 (locus 29851 .t000020) derived from phytozome v7.0 (chr-ID 29851; pos 1 00268 to 101148)
ggctacggttggtacattaacatctctctatgttttcagtttcatctcttttgttgtttgtccgatctgcttaattttcagtagtcagaaattttctatccttttgtttctaattgttctgtttattagttaaaagccatcaatggagttcttaggtttttgttgttatgagtacaatgtggttcttaggcttctctgactagcgaccatttcattaggggataaagggaatatcaggattcgatctccaacttgcataagcctgacttaacttactgactgaatggtgttagtgggaatttttgcgaaaagaaacatgatgagtatagaaatgccaaaattttttccaggtaatttcttttatatcgagtagtaagagaattggtctttacttaatttgagataaattaggtgggaggttggattattattggacaatgggctatgatttcaggtgaacttagtttttgtaaaaaccagtcatttcacaaatgttggattgcatgctgaaattgcatattccttgtctttttgtgcttatactcctgattcacttagttgcaaaggttttctcctatttcaacaacatagaggaggctctcttggggctttttccctttatctaaaaagaaaaggtagaagacttgtttattcatcctcgtttacttttgaatgtttcatagttcatagaagaaaaaagttcttatacttacaaatatcatgactttcaactgagaggagggttgcagcttttgttcctgtactaaattcacttgagacaaacttgtatacaaatgttaatgcctattgtcgctgaagactatctgtttttgagtacagttctaatttctggtattaaatgtgtacttgtcattctgcag

SEQ ID NO: 50633 - DNA, 545 bp, Ricinus communis
  Intron number 1 from transcript 30138.m003912 (locus 30138 .t000086) derived from phytozome v7.0 (chr-ID 30138; pos 5 90807 to 591351)
tccctaaacgcgaccaggtattctacgtgcttataagagttccgtttaattacaattgacaccaagctgatagctcagcttccttattgtattactcgattgattaaagggaacctcgatcctaggcaaactagaaagcagctaaccaataattagtgaagattgttcttgaaaggctcaacttttgctaaaatagtaataagaggctttgagttttcggttttccctttgcaattaaaagattttagggcacacatgtagatggcaagcatgtcaagattaacatctcaaactatcccattagccacaatctttaggtaatgtttctttaattttgataatctcgtaggtctcaagtagaagcatccaaatcctagttgaaatgaatatgcgtgatagaatagaatcatatgctttaataattttccttgaagatgatgttatgataaaagaaaaatgcatcactctatatgccaatatcatatactaataacatatattacttcttaggtttatcatctgtttggaaacaccacggtggaacc

SEQ ID NO: 50634 - DNA, 448 bp, Ricinus communis
  Intron number 1 from transcript 30146.m003517 (locus 30146 .t000094) derived from phytozome v7.0 (chr-ID 30146; pos 7 23415 to 723862)
ggttctccttctgagttcacacttgctgaggtacaataaaactcagtcctgttcttttttgtattttaattttatggggtgttaatttattttatctggtctatcattttcaccttcatattcttcaaatttgtatacttcaaaagctcaaaatttcttgcttattttcggtgcttttgtgtatcatcgttatccatcattatttttctttaattggtttctctttgatgttatgctaattaggtgattaatggtttctcacagaaactaattcataggcgctggtattttatgttaaatgtaacttgaggataaaatagacagttctaccaaatagatagagaattgaattgaatgtcattagttaccccttttagtttctttttttttttttttcttttttttagtgttagctaacttgcttgtttactttgcgttttgttggaag

SEQ ID NO: 50635 - DNA, 1020 bp, Ricinus communis
  Intron number 1 from transcript 29897.m000361 (locus 29897 .t000007) derived from phytozome v7.0 (chr-ID 29897; pos 1 73839 to 174858 reverse strand)
ctgaaaaagtaatttcagaacgctttgtaagttcatgttctcaaattttaaacttggacattgaaattttacctatttgtttgtttttagctttttatcttttccttttctaagtggggaggattggctgtgcacataaattatcctacaaattattcaacaaagccacatttgatgagcagtttagcacaagaattaccaaatatgagcaaccgttgaagaaacgatacgtcgtacgtagagggcatatgtgcaaaattccttttttaaccttcctcctttattatggttgcagaaattaattaacttaccagaaaccaaaactgccgtttttttcaaaactttgacaaaggaatccattccactgtgaccgtcgatctgaatatgcgaatcggtaataaaagtaattcaaataaaaacgcaaacaaaaagaaactagccgttacggctcacaaattcaaatgcacaacactaagttgcccgtttgttttttcattaaagaggaagagaaacaaatctcttcttcttcgtcctcgaaaatacctgcaaaatcagtagaagccattctctctctttcaaaactcctctctctctctctcggatactgcattgttcttatcctgagatttctgtgagtattgttgttgtttattgaatttatttccttaatatcgaagctcatgatctttccttatgtatactggaaaggattaaacttaccaagtgatttatcttctgtttcttcctttcccttcttagatttccttgcgattgaattatggttggttgatttctttatttgagacgattgcttaatctggacctggtactgcttatcgaaattgtagatacttgatttttagttttcctttttttctttttctttccctattctttctcgtgctgttatgttaagttttcagcagcttagttgaattttacagtcatctaatgaatgtgtacctcatcattttgttgggtgtagataaagagagaaattaaagaactgaggcgccagag

SEQ ID NO: 50636 - DNA, 675 bp, Ricinus communis
  Intron number 1 from transcript 30128.m008857 (locus 30128 .t000318) derived from phytozome v7.0 (chr-ID 30128; pos 1 363665 to 1364339 reverse strand)
tctgatcaatcttcctcccactcttactcttccaggttcttagagttgtaaaccctaaatcaatctcttatcttttttcatgtcttttcttcttttattatctgaactttttttctttataatttattaagttgtttcacttgactctcttggattttgattcttttgcacgttttcgttttttcttggatataaagtttgtttctttgagctcaatttgatatggaatttgaaaaattagattctgaattgaagctgttggtcttgtttggaaaattaaatttcgccatttctttttgccatgatttcattttatttctttcgaccaaacattagaattcgcttaataaacttaaaagcatttgaatttgtgcatttttatttcaattatttgaatctgtgcatttttagagtttagaatttctaaatactatgaatgtcatcaatcttgttatgaagatgcgactagagcataggcagacttagaaggtggcttcctgttgccaggctttttgaaaattacgaaccagactgaattttcattcactttttgatagaatttctataagtgggtaaatatatggcatgtggagtagaggcctggtaggaagtgttattagtttctctgtcttttctcctaacatcttgcgtctttcttgagtttctgcagaagtg

SEQ ID NO: 50637 - DNA, 679 bp, Ricinus communis
  Intron number 2 from transcript 30063.m001417 (locus 30063 .t000021) derived from phytozome v7.0 (chr-ID 30063; pos 2 33570 to 234248 reverse strand)
gcttgccacagcacgaaactgaacgatatcagaaggtatatatatgcagctctctctgtaaagatgttcaaataggtaccaggaagaattagaatgagttcttcttttgaattgcgtttgatcactgttttctttttgcctgtcaccatgattcctatgctctcataaaatatcccaaaatgggtacacttacagaccttaaaacttccattatcctctttaattcctcactcttcacactaaccctagttgttctttagacttagtaatgattcaaaagtttcttataaggtgcaaataaagattctgaaacatatataaagtacaaattacaagaggataatgtactgacagttgagagagcttccaatcttgttggtgtttaaatgttttttctcatccaccaagaaaatttatagcagcatgcatgaatttctttaattctgtgacgaccccccaccccattaaagtcccgcctgtatgtattgaatactactttactgtgcttctcataactatagataactgcaaccgatgtcgttgctcattgtcgagccattattttctttgtcagttggtttgttttcttcttacagtttttcattcatggccaacttattcatttcctgaatttcatttctcaggctgagatatcactttgccgtgtgtacaagagagc

SEQ ID NO: 50638 - DNA, 570 bp, Ricinus communis
  Intron number 2 from transcript 29920.m000100 (locus 29920 .t000001) derived from phytozome v7.0 (chr-ID 29920; pos 1 169 to 1738 reverse strand)
tctccctcacagaacccattggagttctaagtttggtaagttcagaatttcttgaactgataacaatttattctattattttcagtttttatttttataaaaaatctgagttgaataggttgtttctagcttattaaggttgatctatagataattagtggctcattgagtttgtgcctttgttgaggaaaagaattttgcaaagcacatttccacttgttgcttctgcacaagatcggttgttcaatgcaatgggccccatagtgggatgtccatcctaatgaatagctaagatttcacacttgtaaacaaaaacaactgtagctctgagggccaacaataatttttaacttggctgtctattgagtcaaaaagaaaaaatagtagggcaactggcagttggtaaagtttagtagtgtccttcaggagctacgcattttttgtgcatttgtttgttatataactgatgaagtggtttgaatatgtccgtcgtcttaggtagacttttgtggcatatgactagatttctctttcaacaggaagtatttgataaagaccgtttcaaggcag

SEQ ID NO: 50639 - DNA, 479 bp, Ricinus communis
  Intron number 1 from transcript 29920.m000100 (locus 29920 .t000001) derived from phytozome v7.0 (chr-ID 29920; pos 1 765 to 2243 reverse strand)
tagtggtcaagctggggaatcaggtgattctattaagctctatgattccttttcttgtcctgttttatagatgatttatcaattctctattcttagatgcgaaggcctgttgcctcatgatcataaatgcagtgaatttggttactttagaggatacaatgtggttagtttgtgatagacttgttaaataagaccatgttgtttcccttaggaggatgattggctgcattagtatcctgctaaatgaccaagtctccttatcatttcatattatttctcatcatagatctctctcaactagcacgcgtctggtgtgagcccaagttcttgggctcttgcttttacgatatcttttctttgcagcttttgcttcacgatttgacttgaggacaaatgattgttttgctcttctgttattgaagttattcatatctcttgtaccagactttgaagacaaaagttattaacagttgccttaa

SEQ ID NO: 50640 - DNA, 667 bp, Ricinus communis
  Intron number 1 from transcript 30076.m004593 (locus 30076 .t000157) derived from phytozome v7.0 (chr-ID 30076; pos 1 021844 to 1022510)
catatagggatccaaacgttagattaaattatacacttatacacttaatttaattcttaacttgtttctaaaattacaagaaacatctataattagctacaatatcataattacgaattaaatcaacacaattctattgagattctaaattcagtaacacaaatataatatataaaacatagcttgatccatggcttgcttaatgttaattccttaagcgtaattgttcttccctctaaccttcttgctttaaatagcctcttttaatggtgcaaaatttagcctttttttttatggtgatttttttttaagcaattctcaaaagaaaaaaaacgtgcttaataatcctacaattttattattatatgaatagtgtaatgagctttattgtataatttaataaaggtagagacaaaggcattatcccaatgttctaatttataattaactaataaccattatattagttcatttaatactaaaccagatatttaattatgggtcattaatataagattataataataataatcttacattcaagtgctaattcttggaattttcttgggatctcatagaggtttttgattaattgcaaaaccctatagggattctctcctttttttttttggcttggttaggttttctttttctagctctgtctatt

SEQ ID NO: 50641 - DNA, 634 bp, Ricinus communis
  Intron number 1 from transcript 29983.m003170 (locus 29983 .t000069) derived from phytozome v7.0 (chr-ID 29983; pos 3 92089 to 392722 reverse strand)
gaaaaatcatccagaaaaagagaagctcttttgcagtaattcttatcccacaatatcttcaatttttaaggaaatttcatggattatcacattttgaaataattagcatcgatcacattttgatcaaatcataaactaagatttaatcttttttctctcgattaattcattgtgcgaattattaattcaattccattatgtgccaatattctattaaattaataactattgcatcatattgttctaaaggcactaccactatatattatggagttattttatatgatttttttataaattgtccatctgactagaaagagttgcatgtataggtttaaggaagaagctaaagaaaagcgtatacataacttggggactttttaatttcaaatacttttcctttttacaaatatatatatatattatcaaaattcagtatattcgcataaagccattatttttagtgatgcattgcataagcctaatattgaggcttcacaatggtaaaagcatatggtttcattaagtaattaaaaaatctaaactgttgtatagtatctttttgaattttagttaattcattaacacgattacctagttcttttgcttttgcaggcggtatctaaacatttcc

SEQ ID NO: 50642 - DNA, 804 bp, Ricinus communis
  Intron number 2 from transcript 30131.m007020 (locus 30131 .t000171) derived from phytozome v7.0 (chr-ID 30131; pos 1 030307 to 1031110 reverse strand)
ttcaggtattcatctctctctcaaaatatttggcgtcaaacaagtcgtcaacagtcttgtattgcaattgtttacgttttagatcggcgtcggtcgccgcgtgcggttgttttcttttgaccgtattacgactttttagaaaaatttatttgaataatctctttgttaatttttttttctgaaaaaataaaaagaaaaagaaaaaagttgccattttttagtggttccttaattaaaccctggaagcctaaaatcatttctaaaaataacctgaatttcagggtaaaatctaaagagcaaaagcaaattacgatttcctccctaagtcttaacttacttatttttttgtccctttcattaaaaaaattgaatgaattcttaacttttgaaaatataaagactctaattcttccattatattttaaatcattctctttcaaaataaactcatattttaattcctcacattttatatgaagtaaaatcttagttccacaatgtttgactttttaaatattaaaaagcatttagagaaaaaaataggaccagttaagaaataattgtgcttgcactaagttttttttttccttttcttttctctgttgtgtaagaaatcagttagtttatgtgggaagacgttgaactgattgtgtttgtgttttggttggggacttatgggttatttcttttttctattgggaaaacatatatatagaaataaaagaatggagctgaatgagacaaaaaaaacaaagacaagaaagagtgaaaaaacgaagtgtcgttttttgtaggtgaccaaag

SEQ ID NO: 50643 - DNA, 151 bp, Ricinus communis
  Intron number 1 from transcript 29848.m004597 (locus 29848 .t000153) derived from phytozome v7.0 (chr-ID 29848; pos 8 87181 to 887331)
ctccccagcaagtaagtttcttcattccttttttttttttttttcttttttcttttgggttaatgaaatttcccatttaaagatttgagttttatattttataatcttattggtgagcggttgatttaggtgcatattactcaaggtgatt

SEQ ID NO: 50644 - DNA, 834 bp, Ricinus communis
  Intron number 1 from transcript 29932.m000611 (locus 29932 .t000022) derived from phytozome v7.0 (chr-ID 29932; pos 2 26439 to 227272 reverse strand)
cagggccttggtgctgagattggtatgtgaatatttcttttttcaatataaattctcttaatggaaattaaatttattattgtaaatgtttatagatatatgtataaagagttgacttcattccaagatctggaacactatagttctaagtctgcttttatggccttgttttgaataagtcatttgcaaagagcacaattggattgaatctttgcaaaatcatgttattctcgacataatttcctctttttttctaaataaatacttcttttgggttgaaaaaattgatttctagcaactgttgcctttcctatcatgagaattgattaaatagaattgaattttatttaattcttgcaatatgattaagaattcaattgaacattctcgcaaaatcatgtcacttttggcatgatgtttcatttatttatctaatttttaaagttgaaagacatgaattctaccaactttacgtttccaaacttgataatcaactaaatagattgcatttaaatttagttctttcatttttagaccttccatacactcgttggaattattgtcggaacactttgaggattttattcccccctctccctccttaattgctgctttgctatgtatacatgagttcgtaataaagcttgtcatgtggacatatttttgtttgtgtgtgattgagagaaaagggggttcgggcaggattagaatgtagaagactgacctttatcaatttgttttatttgatacccagtatctagctctttcatgtaagccatgtttacttatgttcgtgcagctaaaaatctcattcttgctggcgtcaagtctgtg

SEQ ID NO: 50645 - DNA, 624 bp, Ricinus communis
  Intron number 1 from transcript 30063.m001423 (locus 30063 .t000027) derived from phytozome v7.0 (chr-ID 30063; pos 3 06209 to 306832 reverse strand)
ttgtaacatagcagctgtaactaatactgctgattgtaagtttcctattattggtattatctgttttcttggttggcttaattattactatcttgcccatatctcaataatatttgatgtattggtttatgcttttgtagctttcatttgatgaaaactttgtatgttatgttgaataaaatttaaggccttatataactgattatggaataaccagacagtgatgattctaaatcactgcttttgaatatatacatgtttattgcttaaattactaattgaattagctaaatctggcttttattgtgttttattttggaagtgtacaatttctggagcctggaatgatatcatagttggtcaagtcttagggaagaagaacttctgatttaggatgtactagtttcatgtctgaaaatgctcacaattttaggtatatagtaaattatgggactcttaagtatgttctgaaagttctttcattaagtactgcaaatttcagatttacttagatttctaatctattatagatcttatatgtatatatggaaagcttaagacatagatgagttcattgatgtgaactatttctttttcctgatcctgatgcagctagtgctttga

SEQ ID NO: 50646 - DNA, 692 bp, Ricinus communis
  Intron number 2 from transcript 30122.m000342 (locus 30122 .t000002) derived from phytozome v7.0 (chr-ID 30122; pos 6 6238 to 66929 reverse strand)
agtttgggatctcaattgaagtcaaagagcaagtaagtttattactgtagctacccattttgttagatctatagcttaaagatagatttgcaaattgaggtgactgttattttttttacttttcacaatgtaattggtatttattcagtttcattatataaatgtgagttagggatttcagatgctctttgattgcataatataatgatttgatagcaacagctagaaataagcattattttcttgcatgtttttgttacataatagtgcttctataaactttaagtattttgttactggagcctgtaaagaggcttactactagtaatttcttctgataggtaataaattctttgacaacagaaggtgtttgttgatctgtctcactgaagaatatgttgacaaagatgatagggaaattatattctgtctactggctgactgtcttatccaatacattaagtgtggtgaggatgtgttttgggattattaatgacagcaagggtttactttgggaatgtttcatggcaagcaattttgctttgaacatctgatgactgaaatccgtattagtagttcaatgtttctgtaggacagtaacttggtctgttgatttttctgtttccaagattttctgcaaattcctgtcttatttctataattttgttattgatccatttcaggttgagcta

SEQ ID NO: 50647 - DNA, 671 bp, Ricinus communis
  Intron number 1 from transcript 29889.m003354 (locus 29889 .t000120) derived from phytozome v7.0 (chr-ID 29889; pos 5 97308 to 597978 reverse strand)
acttcaattctgagattggtaccacggttagttttacttaattccacttccttttcttttctttgcttttctttttttctcttttgaattttatatgtggatattgtattaactttgctttcttttgtggttctttgaggttggtatccaccagaagttagagtattattattttattcttttcgaatttgagaagctgaagtgaaaaaatttgtaggattgtgtatttattgaaaggaacattcttgctctgagttatggtggaatttgctttttttttttttttttctttctgtatttgatagtcaatttggtatttgaagttggaactttctgcaagactggcaatgtgtttgtagttggattagatgatttctttcatttaattataattttcttttgggaatgaatcttgtggaatcaaatcgatttcttgcaacattatgccaattttcgtattattccaattctttcaaaatgtcttatttttcaactgtaaaaaaaattacattctagcggttttcccaacatgagaactggcttccatcgctaaatttttcaaacaaggggcataaaaagattgaaaaatttcaaccttcagttgtatgttgagggagtattttgatggtcgtgtgtgtaccttttgtgatcaggtcaagggcacagttttt

SEQ ID NO: 50648 - DNA, 548 bp, Ricinus communis
  Intron number 3 from transcript 30147.m013908 (locus 30147 .t000179) derived from phytozome v7.0 (chr-ID 30147; pos 3 265016 to 3265563 reverse strand)
aggttagtataaggttaagaacgttagttaagttttcgattagctgcagctcaataatggtactgaaagaaatagaaaacagtgaacttactatttcagaattgagagctagtttaccgttataatgttgaggcaaaatctttcatatgtttttttcttttgtttggcgggttatacttttactagaaattctatacatcatttggcacagaaaattcccattctttcactcatttagttgttcctagaaccctatattaaaaaggctagttttcaccagaatggcaaattttcatttttttgatgcaaaatttaacagctcaaatttaagttagcaaagaagaaacaaggaaaaaaagaaaaaggagctggctatgagcagacgtactggttaaagtcagttttgtattatagagtactctgccatatgtcataggcattattacaaaggaagtaactactgaaagtgttaaacttgtgcttatgcttatagcaatacctagtattgagacaagttcttgtcttacagcacgcagttgtatttgtta

SEQ ID NO: 50649 - DNA, 1063 bp, Ricinus communis
  Intron number 2 from transcript 30128.m008838 (locus 30128 .t000299) derived from phytozome v7.0 (chr-ID 30128; pos 1 293757 to 1294819)
ttgaggaagattgccttggattgactctcggtcatgtaaggtttcctccttcttacgcattcgtatattatagaataagctcagagagtggaattcctcctctttaaatatttgaattttctacgggaagtcgaatgctcttttagaaagagaagtcaaggaagaaggatttgtccactaggaaacaagaagtgcgcatactgttcgtctccttttccaagcactgctcttcgttttcaacagttacatttgcatgtaagagagtcctctatttttctctttccagttctgttgctgaaagaattgtagctaacgatgtttatagtactgatattgtaatgcagatcatgatcttctgggacatcatgctctctttgcagaacatacagcagcagtatcatcagtacacgattcgaattttgataatcattcaggggtttttctctagttaggattttgaaaaagaatattaattattttagaatgaaattttataaaatttctttttcagggtagtgtgaaaaggaatttcccatttaaggtgattttggatgatttttgctgagacggagagagtgagctctgttgactagcaaacagaagctgtcttcccgttggaccgaccggcggacagcttctgtccactggataaaggttatatttttttaaaaaaaattatacacaaaatttacaagttttttggaataagtttttcaggattaaatattaaatgttttacaagtttattgttcaaattttttttctttatataattaataattttaattattataaatttataagtgatatgtttcattgaaaaattatatttttctactaaagtattttttaaaatttaaatatattttaattgtaattgattttattaatttcttttaattctaatatcttatttatctctaatttctttctctctttttaatatctctgagtatcttaaaatcacactaaaaccggaaaatttaccctaaaataagacttatttattttgaaaaccttaaattaagaaaaagcccggcccttcagtacctggtgagcttcc

SEQ ID NO: 50650 - DNA, 593 bp, Ricinus communis
  Intron number 1 from transcript 29822.m003439 (locus 29822 .t000114) derived from phytozome v7.0 (chr-ID 29822; pos 6 03684 to 604276 reverse strand)
cattggtaactggaccttggtgcctaaaaaagcaggtttttctttttgagttccttttcatgttatttgaagttcaaagctttttctgagttcttgtttcagcttcatatatttttctgtttgcttgtttaagtgcaggactgaacagatgtggaaagagttgtaggctaaggtggactaattacttgaggcctgatctaaagcacgataacttcactcctcaagaagaagaacttattattaattttcataaagctataggtagcaggttggtttccacttcttgtcattttattcacatttcctggcccttttttaatatatatataactacctttgagcaaatgggggatgagatcagctataattctttcagtcttaatttgtccatcaccattttcttaataataattaatttgtccatgaccacttttgtagcttaactcgattgttcgtggcacaggtggtccttaattgcacagcagctgcctggaagaacagacaatgatgtcaagaactattggaatactaagctgaagaagaaacttacaaaggtaggaattgatcctgtaacccataagcctttctcacag

SEQ ID NO: 50651 - DNA, 870 bp, Ricinus communis
  Intron number 1 from transcript 29889.m003246 (locus 29889 .t000012) derived from phytozome v7.0 (chr-ID 29889; pos 4 3315 to 44184 reverse strand)
gcttcgtctgccctgggacaacaaaggaaggttagtttcttttcttttttttcttcttcttcttttcttttcccccttagttctgtgtctttaagttatgattttcgggatttttgtttctggatttttctgatgtgggcattttgatgctttaaggcggggatctttgtgtgtggctattttagaagctaaagagtttatgcccttttttggttctgattcttcattacattttctttcagaggacatttatcaatttattttttcccaggttcattaatgatctaattgtgaagtttagaattaggatctgattcgaaaatgggagcagagagtaagtgataaaagattggaaacttagtgattgtagaaagttttagatcttcagtgtagcatacccagtatggttgaccaaattgtcactatgattgtatatttgagttggtgctgtatcagttgtctctcatgatgtatcattttcattttgatctatgcaggactcagctccaatatatctagctattttttgctatatttcttattagtcttatgcatgttctctaattcttaaggagaatttctctcttcttgttgaatcattataattggaaaatgaaattgagcacagaagaaaattgtatgttccactagcttgttcagattataactttgtttctgtttagattttatcagctgccaaagctatttttacatcttggagcagttactctctctgctttaaccaattataatctgaaatagaagatcacatgatctttttgctgttattggaggtttatattcttaaattctgtgtttctacacctactgattgtcatctttctttattttttgggttttctaggcaat

SEQ ID NO: 50652 - DNA, 434 bp, Ricinus communis
  Intron number 1 from transcript 29904.m002889 (locus 29904 .t000003) derived from phytozome v7.0 (chr-ID 29904; pos 2 5853 to 26286)
cactcaataaatcccctggtggccgccgctttgttgtaatttttctgtctctctgtggaagcatgtttatattattgagcaattgtattattctgttgttctatgcatagttatcgataaagtagggcttgaattttacgccctctgtttttttcttaaaaaaatttgcaaggagttaatgtttatgcaactgctctttgtatgtctttcctgcaacgcacagaaaagaatgtgtataatttgaatttattattagtttataagggagggtatttcagataatgcttggtatcgttgaatgaataattgcttgatattttatttatatggtatgctgttttgtttacttttctctataattgcttgacttgttttttccttgttttctttctcctccagttcaagtctttgtctcagagaatagtagaaattga

SEQ ID NO: 50653 - DNA, 768 bp, Ricinus communis
  Intron number 3 from transcript 29841.m002822 (locus 29841 .t000086) derived from phytozome v7.0 (chr-ID 29841; pos 5 19535 to 520302 reverse strand)
ggtcagcattacctagagcttcaggctttgataaggtaaggtaattcctgctttagttcaccatatggatacaatctttttggtatttctattgcttgaggatctgaagtatgtgaggatttaaatacttgatcttttgcattttcagtttaattgtgttaattgatggaatgtagctcactagtttcagtgttatccttttagaacatagtatactagaacatgaaatagtgattgaatttcctagtgtcaggtgtttggactgtttttgtttttctgattgcagcatgctcttaagaaattgaaagcatgaaatcaaatcactttgacaacacttatagagaattaaacgtattcaaagagacgttgaaattaatgattctcaaactatcagaaaaaattgtttacaggggcaggtcatcagttttgagaaacacatagtttctgttccagagttgcaagaatattggtatgcttgatggtgagaaagtaacaggaactggatgcatgtttcatcacacattacaagagaaagtatatcgttttggttggattgactagcaatcatgtgtaatgtagcagatgctataaatccaggacatacttttccctgtgtagtaacttttggcattgtatcaaaagaaattcaataaatgagttgtttatgcacctttgctaagtcttttaaaggagtgacttacagagtgttatattacatgtggtttcttctgtgcgatgtgatttaacacttgattggaatataggaaa

SEQ ID NO: 50654 - DNA, 874 bp, Ricinus communis
  Intron number 2 from transcript 29912.m005311 (locus 29912 .t000037) derived from phytozome v7.0 (chr-ID 29912; pos 2 43640 to 244513 reverse strand)
ttttaaccatcataggcagaggggcttttggagaggttgggtgcataaatgcatcgtacatgatgaatgtagctttgttttgatgattgtcataattatagttctacaattcaaaactgtgaaactttgtccatgtattgtgctgcaagacataggatctatgaacagatacattagtggtagtaggtgagaaaaggtaaggtcaaggtagtgatggagcaaggactcttagcttatctggtataaggagcaacacttggctccaacctcatgctaatcaactttacactagatatactgttataaaattaaactctttcctagggttcagtaaacttgagtctgtccctttacctttgtttcttggggaaacacataacactatgtcatggtcatcaacgtgagtagagattgttgtaccaaacatcttgcgaatgggtactgtcaccattatcaacctaagaacttattccttctttggggctttattaagaataaaatttttctacattatatatccctcttagtgtaaatgattatgcctcagacaagtctactttatgaggactaacaaagaaagaacagagggtaaggaagttgcaaaatgagtcttgtggtagatggtggaagagatgcaaattggttctagcaagagctttttaaaatgaattcttgttctctttctttctttcccatattccgctacccattcatgtagttaattatttgttccttgatatattatactagttcttgtattggtttttatacatcgaagcatcttttctgcattttttagtggtagaatatcaggatgcttatgtgtttgtatgctacaggtaaggttgtgtcaggagaagaagtctgggaacat

SEQ ID NO: 50655 - DNA, 812 bp, Ricinus communis
  Intron number 1 from transcript 30128.m008695 (locus 30128 .t000156) derived from phytozome v7.0 (chr-ID 30128; pos 5 64468 to 565279)
aaagcaaggtacttttctttttattcttcttctctacttaattctttctctttttgtatgtaatcaactcgtgtagagatcaaagatggagtctttttgatgggtatgtgttagtttttaagaagatgctaaaaactacaaaatcagctggttttagtctgtggatttggtgccaactgtggtgtattgattggttttgtgttgtgagtttattgtgaaaagaatgtgagtttgggttattgttatggtttttcatcacgaatgtgtttatgctaattaatctctttttcctctttccgggttacttgagagttggagtttttatttttggctccatcaagatgttcaagcttgtcggtcagtttttgggttttacttcttttggagtggttctattttttgagtttttcgattgtaataaaagatcttgttgtaggatttgatgacagggttcttattggctgtttaatttctttttccgaagttttgatttggttgtcaaaaggttgaatttgctgtatttgtcttttgctgtaggattaatttgactcgtataatatgatttgattatgactaattatattgcttgttggggtattgttgttgactttgtgctaccttgtagaatatctattaattcagttttggggttcccagcctttgtatgttcgtcttgttattaagtctgtatataatgcatttaatcaactgtaatgcaaagaggtttgttctgagaaattagtgtttattgttcatgccattctgttacacgctgtgttaatttgagaagtgattgtttcttttatgcatag

SEQ ID NO: 50656 - DNA, 615 bp, Ricinus communis
  Intron number 1 from transcript 30131.m007035 (locus 30131 .t000186) derived from phytozome v7.0 (chr-ID 30131; pos 1 127348 to 1127962 reverse strand)
aacccgccaaggtgctacctgtttctttgtattcttctttagattttgtttttgggtatctaagtttagttgcagatgctgggtgtaaggttgtattcttttttttttgttttgatgatgtttttgtatgattttggagggtgtacggaactttgaaattctctctcttacatcttgaagatgaattttgaagaaaaaagtttgctctttccgctctttgcaagttattctttttctttttttcttttttttcccatgctgttctgttgctgagagatcaagggaaagatggatgaaaagaaaagaaaaagaaaagtcaatttttagttacttatgaaattatgcaacttcaattacttctttttttattattcttaaaactttaatttttctgaattttcttggcaaccccaatagagactcaggacttctatctcttagtcaaacttactaaattcttctcaacataagcaattttttaaattctttaatgaatcaaaagatcgagagggtttgacttgcctgtttcttttctttttttccttctcagttgtgttcatggtatataaattctaatttaattgcttcttgcttgcagagttgtgattgacaacg

SEQ ID NO: 50657 - DNA, 403 bp, Ricinus communis
  Intron number 2 from transcript 29869.m001181 (locus 29869 .t000046) derived from phytozome v7.0 (chr-ID 29869; pos 5 19090 to 519492 reverse strand)
ggtaatgatccaactaactaagtatagatatacgtactgccttttcttcgtacgtgacgtttcactgatttgcatcaaactaaatgcagggtagttgctgcctccgtggttacaggccaaggtggactcggtccttaaaggccagagggaaacagtaagtaaatggaatgctcccacatgcagatatagaactcaggttgacaagtacagggagcttctttccttgtcaactgcacttatccttatgcttcctatttcttttcttttttattttatttgatttagctgttagatattggcaacatgaggttgaaacactataaattagaaactgtagaagcaattctttagtagtatggtcaaattaaattcaaataaaggtgtgtgctgtgcagcggagagc

SEQ ID NO: 50658 - DNA, 624 bp, Ricinus communis
  Intron number 1 from transcript 29942.m000731 (locus 29942 .t000004) derived from phytozome v7.0 (chr-ID 29942; pos 7 0017 to 70640 reverse strand)
acattctgtcctgcagatctcttcacgccagtcaggttccttttcttttcttgtcttgttttaaaacctttctctttggttctttattggtttattttacaattgcttacacaggtttgaaagaaattgttaacccattttaaaattttgcaagagaaagaaagaaagcaaccttttttcttttaaaagctttcctatgtgaattttctctttctctccaatccaaatgatcaattcatttcaaagtgaattcatttcctcgatgggaagtctaaaatgcaagaattcagttgggttgtatactatttagtcaaaattctcgtagtatttgcccaaattcaattctgtcaacttgaaaaatacaaggcatcgtgaaggaaatgaattcctgccacgagtgacatgattttacgagaattgaattgaaatgcacttactagttcaatggccaagctacagagatgaccagtgaaagatacttgtgttttgatttataaactcatttgtaagcaaatatatgttctgttaaatgggcttatttgttatttatgcttttatgcggtcaaccactacattccccacattttgtgtgtggcagggagtccacttgcgtgtggtgggagt

SEQ ID NO: 50659 - DNA, 1006 bp, Ricinus communis
  Intron number 1 from transcript 30138.m003846 (locus 30138 .t000020) derived from phytozome v7.0 (chr-ID 30138; pos 1 65293 to 166298 reverse strand)
ggttgggttgagtttgctatcacctctgctaacaggtattatacacacacacacagaattcattctcgttctcctcctcctcctcattcttttcttgctttattgcctttgtttttgcttttcaattaccttcccgctccagaactaaacctcgagttgaagtctctgagtctcgcatcctaggcagatctgcatgaaattacaagaaaatatttgtttttcgagagtcggaccagataacaacaaaagtagaatacctctactgcatccctaccgaaaaagaagaaagaataccgtaattttactttattgtattttgtttacagagtattcataattacattgcaggaaaagtagaatacccatatttaaattaaattctctaaatggatgattgctattttctggaccaaacccgccaagttcaacgtcgtacatatagtatatttaataaaataatattaaaaaagttaatagatgaagtttggattacatatggcaatcgatctccttttgttatcagaacgtatagtaagcagtagttaaatacattcatgaatttttttattttatttttttaaaatttgtgtggctgatctggcgcaaaaaaaatagtccaccactgcatggtgttgcttatcaaagttcacttaaaatgcagagggacagagtttaatgcatgccagtgactatttatgtttcatttatgccctatcagatttttttgttttgacttggttacaaatccaaatttccaagtttctgagattgaagcagtcaaagattaagatcatatttgacttgcattgaacattaaaattgaatccataatttaagcaaatgcttcttagaaatattatttatttaatatttgtataagtaatattgttgttttataaactgttgttgggttaaagccaaaagttgtatgattcctcaggttacattaatgatcagctaaataatcgtaaatttgtactgtgataatatttaggaacaggaagct

SEQ ID NO: 50660 - DNA, 374 bp, Ricinus communis
  Intron number 1 from transcript 29983.m003197 (locus 29983 .t000096) derived from phytozome v7.0 (chr-ID 29983; pos 5 63105 to 563478)
aggtaatcttttgcttccgagcttttatttcttgaaataaattatgggttttttcttcttaattttcaattttcttgttttagaattgggtttgttttctttttctttgttcttgatttgcattatatataccctgtttttctctgatttggtcgttggatcttggcaattgatgcttgagaattggagagtacttatttgatttaatctctcgagttttgagccttcctatttgtgggtatttcttggatttagtttcttgattgtatttaccatcaaattagtcccaaatctttgtcagattgaattctaatcatgaatcctaaaagtcaatctttttctttcaggaagctaaagaccaaaaaagatcataa

SEQ ID NO: 50661 - DNA, 997 bp, Ricinus communis
  Intron number 1 from transcript 30138.m003897 (locus 30138 .t000071) derived from phytozome v7.0 (chr-ID 30138; pos 5 11971 to 512967 reverse strand)
actctggtgggtttctttcagatctcgcagtctgggtgagttctttgccgccatttcatttaattttttttgcttttctgttttgggtttgtttaaggtcgttttttttaaaaaaaaaataattgtatacattagattcaatttctgagatgtgagaacattctttttgattatagaatcttgaatccttaattttttattttctttatccgtttgtgttttagcctttcaggggtaatgtaagctagtgttgaatgtgcatgtttgcctcaaggttgatggatgttatctgtttttatttttcttacaaaaaatattttggtttagctactaaagttagcctttctatgaccttcctggattcaattaagtcctttctttgcattttcttagtagtagaagttacttttggacgtttcttgaattagttgataccgatgcattaatgcttggtaaagcttcataaccggagctgggtatatactaggttctttgattgctcaagaaaaactaatgggtatggaacaaattgtcttgaagcattcacatgacaacgcgtctttttttctttaaacaaatagatctatgatcttgagttattcagcaactgttatttagcctttgacttgcgatattactatttgctatgtaagatctcttcacaatcgactgatattggtactatcttctgtttcttttttcagatacttctgattatccagtagtgtagaaatggcttattgaaaggagcattgagactgaaatctttttcctgggtctgtgattttgtcggttatgatttcttctttttgagttgtggctggagtttctatttgaggctactatttaatgattgatactgaatcatactatttgctgctaaataaatcacatttggctttggtgtttggcgctttcctgggagggaagaagctctcttccttcttcgccgcctgtctcaccggccacatagactagaggactcctgttccatttc

SEQ ID NO: 50662 - DNA, 473 bp, Ricinus communis
  Intron number 2 from transcript 29908.m006074 (locus 29908 .t000125) derived from phytozome v7.0 (chr-ID 29908; pos 1 468416 to 1468888 reverse strand)
ttagctgttcaaaaggtcagttcttttttaattttatgcattctactttaggtcttagttacaattgccttctggggtatttacttacttgaggaagttggttaatctcaatcaaaaattttatggtgattgtgtgaaaaacttttaaagcttgtttatgtagccccacattctcttctcatttttcatttacatgtggataataccattatagtaacttaggctcttaaaaatgacatgtagtttgatgttacaaaatttcagtttggcgttaacattcataaaagttgtgacttttgtctttaaactagggttgattgcgattgtgggtctagagtcatatagcacattggtttggcataaacatcgtagataaagaaaattaggaagaaggtaaaagctagtttgcttctcagtttatctaattggaacttccagatatcaggaagttgaacggcttcgtggagaaagga

SEQ ID NO: 50663 - DNA, 1028 bp, Ricinus communis
  Intron number 2 from transcript 30122.m000348 (locus 30122 .t000008) derived from phytozome v7.0 (chr-ID 30122; pos 2 59147 to 260174 reverse strand)
ttgagcttgtaggtgagtacggatcaacgaaatcaataagaagttaagcggtgttgtcaaagattaaggaggcaaagtgtaagaggcaatttttgaagcattttttgctatacgccctgggtatttttctccgccctgcacagaatgtccaaaataacaagtacaaaatatttaagaacataaaagataaggtagaaaaatcacatcaatgaacacattgtcaaaacctaatgatgtagtgatatgccaactttttagagctttgagttaatctccttaagaagatgaatcctctgcccactaaaatgacaatgaagtagacttaattctatgttacttgattaagaggtggaagcaacaaatgtcaaagtgtactgcagaatcaacatataatactacagttctagcttaatataaaaaataattcactacatggactgtatatattatatattataaatgagtactatgaatataggacccaactaaaacaatatgatcatgaaagctttgtattaatatgtattatgtatagcaaataatattagaattaatttattttatgtcgtagtagtagcttcataaaaacatacaagagaactataatttttaaatgtttctttcaatgccatgatatgaaagtagagtcaattccataatctgcatcgtcagaaaatgtactgcaaatgatacctatcatatcgcagctaccactgaatgatatgatgcattggctcttttgtactgtaaatattaaatttatataatgtaatagtcaagtcattgaatggttaatctctttatatataggtaccatccaacggataagaaagttttcaataacatttttctttagtatatgcactttctcaataaaaaaattaagaaaatggcttgcaattaaagaggttaaatatgatattcaaaaagttttgttacttttcctgctaatcttcaactataactaaatgtttctgtttaaaaaagtcacaggattctttagagtccctttccgtatttctccaaca

SEQ ID NO: 50664 - DNA, 395 bp, Ricinus communis
  Intron number 1 from transcript 29854.m001125 (locus 29854 .t000036) derived from phytozome v7.0 (chr-ID 29854; pos 8 85942 to 886336 reverse strand)
tgttgttgttgttcgttttttggaatttttcataggtatgcaatttgggttctctttgtttttatgttttatttgttaggttttagctcatttctgctattctattggaaaaaaaaactagaataccaatatgttatttacattttttgttgtttctcttgatatattggattgaatgggatgcttcttctgatgggttctcttgttttctttgtttctttctttggttttgaatcatttttggcatcattgatgatgcgcctataatttaagtatcattggtcatagtttaattgtttgtttgtttaccttctgggccttatcttaatgacttctattaatggttctgttctttgtcagggatagatttaatcgagtttggtgattcgtgcaag

SEQ ID NO: 50665 - DNA, 576 bp, Ricinus communis
  Intron number 1 from transcript 30146.m003441 (locus 30146 .t000018) derived from phytozome v7.0 (chr-ID 30146; pos 1 26822 to 127397 reverse strand)
ttaccaagccatgtgagttcctgggtccttatttctttttatttcttattttaaattttttctcatgaatgaacatattttgcttgagattatcttacttaatttatcatataaacaatgagtgtgcctttggttaatgctctggtaagtttctggatcctgattggtttgggatatgcattttacctgatataatccttaggcaataaaacacagccttggctcttcaagcggtgcacctaatgagtttttgtatatcctttcttccaatcttgaggagttacattggacactttggtgtgatcttggataaaattagtatcattttagttccttgatctactacaggaatagtttttttctagattattattaatcaagatggtttggaaattgctatcatcttcacttttttttatctattggaaaacagtcaaattagcttgcactttgcaaaattcctggattatgtcgtaggatcttctgactggtttgctaaatactcgtttaggcttcattttttgataaatacctcttcctttttgcattcttttgctgttaggttacaagtgattc

SEQ ID NO: 50666 - DNA, 305 bp, Ricinus communis
  Intron number 3 from transcript 29841.m002799 (locus 29841 .t000063) derived from phytozome v7.0 (chr-ID 29841; pos 4 28845 to 429149 reverse strand)
ttatcaggtttgtaaaagtgtttctggcagtaccgccgcaaaagttactgtgttggattttttttttttttctttgttcttttttccttttgaagtgcagcggcaaagatttctaattgatacaacatggcatttgattaacattattgttatgactatttttcacttcatctagctaaaatggaagagcaatgagccttttcacttcggctgttaggtaaagataggaaggtagacatcgtatattgtcctttgatatattctgactctataaacactctgctcttttttaaggctggagttgg

SEQ ID NO: 50667 - DNA, 224 bp, Ricinus communis
  Intron number 1 from transcript 30074.m001360 (locus 30074 .t000027) derived from phytozome v7.0 (chr-ID 30074; pos 1 80817 to 181040 reverse strand)
gtaacttctaattgtagagacaactcatttcttttttgtttttcttttaattggttacttgaatgaattgtgccaatccttatttaccattcacctctatttcgatgacattattttttctgtcaattattctatgaataaatcaagattcaaatcctgatatcagaagaattctcaaaatttcagtagcgccatccatcagaatactggcaattccaccagcc

SEQ ID NO: 50668 - DNA, 314 bp, Ricinus communis
  Intron number 2 from transcript 30068.m002569 (locus 30068 .t000059) derived from phytozome v7.0 (chr-ID 30068; pos 3 30301 to 330614)
ttgtgggtctttttgtcttaattccacttagaaaggtatatacctagtctatgttttcttctaaattttaaaatacaattaaactatttgaaggtttttaaaccagtaacagcatcttgaatcttgatggatctttatagtttttagttgatttttgaatatttggtctgacaaagttttgctagaagtttattaattgtctcaaaaacaaaaaaggaaaaagaagatgatgattgtaagatgttgcaactagtgtgaaaaaagaagaaaaaaaagggctacattattcatcgtgagttgttgttatacagatc

SEQ ID NO: 50669 - DNA, 564 bp, Ricinus communis
  Intron number 2 from transcript 29981.m000593 (locus 29981 .t000022) derived from phytozome v7.0 (chr-ID 29981; pos 1 76346 to 176909)
tcattgaccagaaccgagtatgtagttgtttatacgcatttctctaatcaatcgttaaccgggttatgagttatgtacctgtctttttcgaataattagagttttagctatgattaatcaaactgtgatatgcttaattaatttgcttagagcagctgtattattcttttacatgttaatgggatgctgcttggactttgtttcattgttcttaaattttagaaaatatagaactgaactaaaacaatttagcaagtagttctgcaaatttaataaataatgaagtgtattaggaattttttgctgattagcttctaagtaaatttttgtgtggggttatataaagttattaaatgcttatgtaagatttgcttaaattgtatttttgtatagccttacctgagataatgttttattttcttttctgacaagtgttcgtatatgaatcattttgtatgacagtgctcattttgtgttggagggtcttaattaattgttttttgtgttttgtttgttggtaattttattgagaagtttttggatggttgtcacaggctcttgttg

SEQ ID NO: 50670 - DNA, 1043 bp, Ricinus communis
  Intron number 1 from transcript 29904.m002990 (locus 29904 .t000104) derived from phytozome v7.0 (chr-ID 29904; pos 7 19888 to 720930 reverse strand)
tcatttattgccatcggtaggcctttcttttcttattcatttacttgaggattatcttatgttattgactgcttgataggttgctagttcttaccttgtatttgttaaaaaaagattattctttttgatgattttgatttgatttctaaggagtcttgatttgtttgttttttctcttagattctttttatggtggtaatttgatccattgtgtttaataataatgggtttatgcaatttttgagaaataattagggaaaaagcatgaaatgaatttgtttttttggtttatggggttgtttgttacttatttttgtttagttgaattgtgtctttttggatcttgtagtgattcggaatattttgttgattggaagtgcttctaaaggatttttggtactatattaagtggatatgattgaagatctgactggtctttattctgattttagtatctatcgatattattattcatttttgtacatgtgatatgttctttcattttaatgcttaaaaagatagtttctttaactataaacataaaacataatatgttatctgcaattatttcataagagaagtgatgcaggagatgtaaagttacaaaagtcaatagcaattgttgtagttcatgtttatagttacttggtagttaattgattaattcatgttggcataatgggtttttttgagactcttcctttggccttactttattggttaaacctttgaagctggtttcttgtctttaaggatcgctaaggcagtgagactggatggatgctaattactgttgcaagacggtttttttttttcttaccttattctgttttgttgttgattagtgtttatgtgagacatcactacaatagtggtccttttacaaattattaatctgtgctgttgttgtcttatttaatgctgtacctgctgagcaaattttcccttggcaaggatttgtttaagaggtctaacatacaacatgtgaaatgtgatattgtttcacaggccagactcatcgacaccaattgaagaaacaataa

SEQ ID NO: 50671 - DNA, 983 bp, Ricinus communis
  Intron number 2 from transcript 29912.m005413 (locus 29912 .t000139) derived from phytozome v7.0 (chr-ID 29912; pos 7 02182 to 703164 reverse strand)
aaggtttcattcaacaagtaagtcgctatgcttttcacatgtccctttatgctgcatgagtgttgttaaatgtccatcatatttgaaggctagactccacaattttgttcagtctgaaagtctgaattatccttgtcatttgggtacctttctttgtagtatcatcaaaattgtgcaaggtaagtagagttttgaatattacaacccattgtttaaactaatttatgcaatagtattaggtttccaccttcgtggaaagctactattttactgagagtttgagactatggaaggaagttagacagatcaaaagaatagccttgttgcaacctgtaagcgctcatgctgacacttcaagaatgaagtctgccatcataatatcaccaattgaagaaatgatggatattattacaatctatttcaacatggaattatggtgctatatatggatgctcaaaagtcattgtagaacaaaatggtgttatttttgtcttaacttagaacacatcgttactttcagtaacttgcagaatgcaagtaccttttgttttggagatgtggatttagagtaaattatataaactctgtcattgaactttactaagtgatcacacttaaatgaagatctttagggactgtttatgatatagtggatcacaaagctaccgtttgtaaaaagtatctacctctatggggttgcctgatcattttacttgttgattgattctaaatttgttctatcactgaatgttcttgaaaaccttttccatattctggggacagcttctaccactttaagacctccacgaaaagtgacttttccgacatgtatatgactaccatttattttttccctttcatatttaaaaatgcctttgtttcttgtttctaaatgacgtatcaatgcctttcatcactgcttcagttttattaacttattctctggctggcatcatcagatttgatttctcaaactcatacat

SEQ ID NO: 50672 - DNA, 444 bp, Ricinus communis
  Intron number 1 from transcript 29912.m005413 (locus 29912 .t000139) derived from phytozome v7.0 (chr-ID 29912; pos 7 03234 to 703677 reverse strand)
gttgtcttgataacccacaaaaagctcgagataaagtaagattctcttttcttttttaagtttgattttatctcgttctcggttactacttgtgtttgggttagtgctttaacagttttagttggtggtgttactgataaacatagaggacgtatggactcagtcttttatgttgaatgctctttattccagtcttcggttgttattaatcaattatcacttgaacgtcttaatattaccaaaaatgtagagacctagttttaatgactcaaattttttgtattaattatatctcttaaattagtgttttgtagtttcggcagtaattgtgtttgtgagagaaaggaaaataaacttaaaggctccatctctttttatgctacatggtccttttgccagttttgtattgtaattcttatttgagaagatggtaaacttttttag

SEQ ID NO: 50673 - DNA, 215 bp, Ricinus communis
  Intron number 1 from transcript 30115.m001188 (locus 30115 .t000014) derived from phytozome v7.0 (chr-ID 30115; pos 1 03791 to 104005)
acagattgctgagatagtcaacaagggttcaataagtaagcatttacgtatttaattgtgtatataacaaggttttaatgtacattccttttctcttttcttcctgaaataaacagaaagttctttataattcaataagatgatatcacgagagcttatatattttgattcggtgttcttttatggtgtagcttgtgcagcaagtggtgcggttt

SEQ ID NO: 50674 - DNA, 833 bp, Ricinus communis
  Intron number 3 from transcript 29844.m003313 (locus 29844 .t000159) derived from phytozome v7.0 (chr-ID 29844; pos 9 39840 to 940672 reverse strand)
gttttggtccattgctttgttggaaaatccagaaggtgatttatctctctccacctaggtcacttgcattctaggactctgttcttattctgctgctaaactaatctcacacattaagagaaggtaaaaagtgatctcagacatcaaaaagcaatagagtggccctctcaggaattccttcttaactgatattagctcaagaatagtggtaaaatgacatcacactgagaggcttacaatatttcagttctacactgatcagtttattgtgcacctaatacttagttttgattggccctgttcttgcaccttagagttcacttgtggttcactgttgaattacaattgtggtaatctccactttaacatgtaatgttaatgggtacttgcaaataacatcaactgtgggtgagaatggtaaagaaaagaattgagcatggaaggatttagtggtgatacatgttggagcaggtttgctgcgatataaattttcagtagagatgtcaaaagggtgagcttcttttggtcagaacctagaaaatagctgataaattatcttctttctttgcagtttttcattttacctgttcatattcatttaatgctctaagaacttccttaaagccatgcctcttatgattttcttttagcactttatatgaccatgcattttccgatcgaaagattattcctgtccacaaataatatgctgctaattattatattatttgtgtattctaatttggaaacagcatgtaatcttccagttgtaatgaattaatttcactttacttgttctgcctgtcagtgtgacaattgtggttgcctatctg

SEQ ID NO: 50675 - DNA, 786 bp, Ricinus communis
  Intron number 1 from transcript 30142.m000630 (locus 30142 .t000004) derived from phytozome v7.0 (chr-ID 30142; pos 2 6806 to 27591 reverse strand)
aaaccgtactttctctagatctgtttcttcttcaggtacgccttttctgtttctctttcttttttttttggttcgatttcaattttttttttttgctttttcttttttgatattttattcgtttgcatacataatattatttgctcttcgattttgttagacgaaacaccggatcggttaatagtttcctttgatattgttatttgataggaattttttttcttttgaaattaattattcgtttgattgggttaaattttgattttttgagttttggaatcggaaacagaaagaaatcgagctgttgactttttttatttttattctaggattattgctttcttcgctgccaaaagctagggtttgttaaaatcagaaggaatgatgattttggtaatttgagaggctttatatgatccttaaatcatatttaaaattgtttatttacggtaaataatatttatttatttttttgtttacttgtgtatagaaaattaagattgcgagggtttattttatgtgcttggatgcctttcgcagcctttcgcagaacaagaacttgattttgcacaagttgtttaataattaggtcaactttttgtagtggttaatgcatgtaataatgtgttttgaaaagcaactatatgaataccaaagaaacaatgggattgtgtgaatgcaactatgacaaaaacaaaaaggggctcctaagaaagaagttttagccatgtattatctccattttacactttttgtggttgattacttcttggttttgtcagggga

SEQ ID NO: 50676 - DNA, 536 bp, Ricinus communis
  Intron number 1 from transcript 29912.m005344 (locus 29912 .t000070) derived from phytozome v7.0 (chr-ID 29912; pos 7 56735 to 757270 reverse strand)
tggtggcaattggattggcttgcccagcaaagcaggtctgttgtctgtttctcttttctcttttacttctttaattccttcgagtatgtttccttttttttttgtttcaaaatatcaaagaacaagcttcattatttcttcagcttgaaggtgtgagttaaatttatgttttaggcctgaggagatgcggcaagagctgtcgtttgaggtggttgaattatctgagacctgacatcaagcatggagattttactgaagaagaagacaacattatttgtactctgtatagtaacataggaagcaggtaagtttatgctttctcagcttttaatgaatgggtgctcattaatccttgataattaggtttcttttatttttataatttattattataattttctctttttgttgctgttgttgtttctcttggattaggtggtcttttatagcttcacagctgccaggaagaacagacaatgatgtgaagaactactggaatactaaattaaagaaaaagcttttttcaggcaagatta

SEQ ID NO: 50677 - DNA, 842 bp, Ricinus communis
  Intron number 1 from transcript 30064.m000500 (locus 30064 .t000022) derived from phytozome v7.0 (chr-ID 30064; pos 1 69105 to 169946)
tatctaaaataagggtacctagataactactccgatacctaaattagatatttaagtaagggattaggcagtgttttaagagttaagttagcattacttgacaaatgagatttgactgggtgcctatatactttaacttgatggttaagctagttgagaatggtctccagtttaattttctcggatgtggctattgtgagttagacccaatctttacttaattatgttaattatctcttagccatctttagatcataatctattggcaatctgtaccatagtttgtgataaatacctatctgctgctgatggatagctgtttaggagtcttgttttggaaggaaaaacaaaagtccaaatccttaagtgtgactattttgttccataatttgttcaatctttaagtgttaatgtagaatatctgtgacataattaaataaaaaaaaaaactcaatgttcctacaaaacttaatgggtcttagatttacaacaagattttccatttgtcgactttcccttgtttttttaatgtgtttctgctaatctcataaaaccaatggatgaacctgatgacattggcaccttactgcacaaagtaatgatcagctttatgagattcacccttaccaaatgcacagaaagcctccctttgcatctctttaacttataccagttgatttcccacaacaaagatattctattctttcactacattctgaagtcttgaaaaccgcacataacacaacacacaaaccatcttattttctaggcacattcttcaatcacaccagtttcaaccccttaacatccctgcaatttcttttaactagaaatctgtaggc

SEQ ID NO: 50678 - DNA, 628 bp, Ricinus communis
  Intron number 1 from transcript 30094.m000676 (locus 30094 .t000012) derived from phytozome v7.0 (chr-ID 30094; pos 1 45239 to 145866 reverse strand)
gtatctcaactcccctggtggccaagtcactgctggttcactttccattaaccctttatctttttattattattatttacttattattgttataattactatgattttctttttcttttcttttttttccatctggacccattttatgaatcttattatgtaattggattgaattggagtgagagctcttttctttttatgctattgttatgtgctacttgtgtttgtgaaaatttcattaaaaagaagttgagaaaatatgagattgtcttttgattttggcgcatgttaatgacttcattacattgctcaagttttgttattattgtttaagcttgcaatgttaacagttcatcttattcgtttaatttcagctattgtaattttgtggtggtcatgatgaacttttcaaatgttgccataattttgaaattacccttagctgtttcgttattaatatttttttgcatgtcaaatattccattgcgccgattagaatctagtcctaatctaatttcagctgactatttatattcagcatttgaagggttttggatgatcttctatctctgagatattatgatgataatgttgattgttctattcttttctacaggtcttgctattt

SEQ ID NO: 50679 - DNA, 802 bp, Ricinus communis
  Intron number 1 from transcript 29904.m002967 (locus 29904 .t000081) derived from phytozome v7.0 (chr-ID 29904; pos 5 53447 to 554248 reverse strand)
ctgaagagtatatcagcagaaccaccttgcaattagtaagttctcttgctcttatgttatttatctctgtttggttgccgagtttagtgcttttttaatcattatatttaagttaatctggaggaactttagctctttatttgaatcgatcttgtcatggattagaacttgttcgtttctatttttttaaatgatgtgctgcagcttttgaaatatctagagctgtttagcatgatttggagttcacttgactgacaagaactagattcatacaggttcaaattgttttttttttttctttttccaattcttagacttcttttataagacaatgcaagtggtaaattcttttctttatcgatatggcttggcataatgaaacttctcttggattttcagagtaaaaccaggttatagttttgtttcacattaaacttaaaatttcatgtggtactataacgtattaaatattgagatattctgttgtcttaagttaagcttccgcgatggcatcagtttgatatcttcttcaagtttatattgattaggtgcatacttttagaagattactggaagatgtttgaaaatagatatatgatctaaacatcctctaggaaatcttgggttggtaggtagtgctagtgcattatgtgtgggattattattgtacctctgaaatggtcacttgattttagctaaacaatgttgtcttgattttagtctatttacccaaacatttatttatttattttttattttcctgttttgtagtttgattttgatagtgctgccccgccaaaac

SEQ ID NO: 50680 - DNA, 574 bp, Ricinus communis
  Intron number 1 from transcript 30063.m001419 (locus 30063 .t000023) derived from phytozome v7.0 (chr-ID 30063; pos 2 74279 to 274852)
cttggactgacttggattactgcaagtctagacaggtgggtgcctgaattcctacttcttctttatgtttttatagtcaattggttaatgattgttttgatgatcaatgaaattgctccttttggtgattaacaaaaagaaaagaaaaaataacagaaaatataaatatgaatagtgttttcattagctcttttgatccattcttgcatatatatcttttgacgtagtgtaatttcttagtaccatcagattttcaacactttcattttcttgttaggtgcatactcagcattaaggttttactttttttttttttttttcttgtttttcgagaaagcacccttttagatgttgcaaagtgagctattttatgaccaaaacatactaatccacttcaacaatggatttgaattgagtttgttcagtattctcaagatttatactattcttaatagggaagatatataacacaatagtgacaggtatacaatgacttggggttttatgttaatagagtatcagctgagatttgggtttctgtgctttcttggctgtctgtttggcttcggcagaa

SEQ ID NO: 50681 - DNA, 235 bp, Ricinus communis
  Intron number 1 from transcript 29927.m000603 (locus 29927 .t000013) derived from phytozome v7.0 (chr-ID 29927; pos 1 30498 to 130732)
aagagaaattcaaagaaactgttcataagtactcttctctataatttttttttttccattaattgtcactatatttatatatttagttctcttgggatatatcagttctcttggaatttagtgaaggttttttttgttaatctttttatcaaaatgtttgttaagagtttttgtgtttgtttgattataattggtggtgtgaagactggagcaagaatcaggatttttcttcaac

SEQ ID NO: 50682 - DNA, 798 bp, Ricinus communis
  Intron number 2 from transcript 30110.m000729 (locus 30110 .t000019) derived from phytozome v7.0 (chr-ID 30110; pos 5 91795 to 592592)
agaggacaaagtactgcctcacttctaaggtatacttgcatttttattatttttctgttatggtcctgcttaaaaacgaacaagaaaaacattgaaataaggaattacatcccttgttttgatggtatgaatacattcaaaaggaagccaataccgaattaattggctaatgatgtaagcctaacagaactttcaaaatgactaagcaaaggtaaccaaatttaccctcgtctagttcatatagtaatggccacaatttgtctgcaagtgcaactggggtaacattaacataggatgtgcaaaatggcctacttatctctgttcttatttataaggaaaaaagaaatgtggatgctacagctcatagatggaaactagatttgtctgaatatatctagttgggactactcatgcgtgagccattttataataattggtagcctgaagaatcaggagtgtaaagagagatgagccttttgctttttgaatatggacttgtctaactaaaagttggcttctacttgcaaaacagaaaaagcaagagatacatgtaataaaaaaacagaagaaaaattaaaaaagggttaaccaaatatggtctgcaattttatgacaaaatgagatgaaagttataataattataataactgaattaaggcatgtactaaattagttcagtgagagtattgttttagtttctcattaatttttgggcaagattgttaatatagtttatgaattggaattgttttaaaaattgcagatctccgttgaagtgatactagctattccaccctt

SEQ ID NO: 50683 - DNA, 827 bp, Ricinus communis
  Intron number 1 from transcript 29951.m000143 (locus 29951 .t000003) derived from phytozome v7.0 (chr-ID 29951; pos 7 8636 to 79462)
aaggtttacttggtgacatttggtactctactcaggttcgtgtcttcctcttgcttcactctctctctctctctctatatatatatatatatacacacgcacacatgtattaacagcataaaactagctatggtacatctacgagatatataatcacagtttcttaatattttcccaaccaagtacgattatggattcagactaatcagcatgatcagttttgtttaaaatgtgagccccatgaaattattttcattgggttaccatatcaaattaagacttttgcactgtgacctttttaatacaggatgtgttatcttggaataataggatggactaaagaaaaaacaaaaaaaagatatgcaactaaatgtttggcatctggaatttagttcagtgatctcgttgcacttcgacgagatcactttaaaaggtatccaaatccaaaactcattaagcttattaaaaattgagttcatattagaaaaaaaaaaaaaaaaaaaaaaaaaagaaaaagtatagagtccaactattgaaaattgtttaattattatgaaataagttacttcacctgaagaaaaaagaattgtaaaaaagagtaaaattgattaaagaaactagtaaagcccattaacaaattaactgtagtaaattggtaaatgtctaaatttaatctagtttcagattattttagtaatttgattgaataaaataccttaaccttatttagcagctggctttaatcattatctgcggaatgagttatattagcactagttataattctgttttgtggtatttgcaggaagcagttgttaatcctccat

SEQ ID NO: 50684 - DNA, 621 bp, Ricinus communis
  Intron number 1 from transcript 29841.m002858 (locus 29841 .t000122) derived from phytozome v7.0 (chr-ID 29841; pos 7 67621 to 768241)
tactggcaagagttttgctgttggggatatcctatgtaagtcttgattttgcctcttcttgctataaatatattgtatgttcaccatcatcaacattcttttctacagtcttttatagtcacatattatgcacatacttacatattcataataatgtgaaagttagaatttcaggtttcttctgctaattttcaaatcctgatttccaaaattgaagttttaaattttaattaactacaattgctactgaagtgtatggaattgagattaaacttaatttttgaaagaatgtatgtaaataaggacagaagagccataaatcaaagtcacatatatgattagaaaggaaaaaaaaaaaaaaagcaaagtcttaaactctccagtattagtgtggctttttgctgctctgagtcgaaattatccacaagtcacttttataattgtaaagaagaaaaaattagttaaatttgtcatcttttttattttttcaactttgactttaatagtttttccataattctaaaaatgttcaatggaacaagaattacattaattaatatcttttttttttctgctccttttttcttttatcagcattcaacttcgccaccactgcacacg

SEQ ID NO: 50685 - DNA, 716 bp, Ricinus communis
  Intron number 2 from transcript 30076.m004467 (locus 30076 .t000031) derived from phytozome v7.0 (chr-ID 30076; pos 1 66679 to 167394)
acttattttcttttgtgtttgccttttcaatcgaggtatgcacttctttcattcttttttaatcctgtcttttcattcaaagttcatgtctgttattactagttcattgaatagtaaacttctaatctttttcttttctgggttttcgtgccatctgcgcgaatcccatcagctcacacgtgttatcttgtatgctttttccaacttttgggtgtcttttctttttttatctgctttggcttggattcaaagtatttgaatcgctgcttttcatcggtctttccgacatgatagctagtaaaccgtttgttttggagatgttattacacaattattttggtaaagaaaatcaactaataatgccaagtcttttcccaatgtggaagacaggggattcaccttttttttttttttttttttgctgtcgagacaaaaatgatttattgaagtgatagcttttgatataattgatgccgtttctataggtggatattatatgatatatctttgatgctgaaggatcagcagcaaaatacgtaatttagctataatgaattcgaagattgataatgccttgatctggggactttgcttaattgattttgagccatgatttacattttctagttgagctttttgaatcctattaaaattcttggagagttcaaaaattaaatgagtggacatcataatagttttatatcttttaattgcag

SEQ ID NO: 50686 - DNA, 743 bp, Ricinus communis
  Intron number 4 from transcript 30101.m000379 (locus 30101 .t000011) derived from phytozome v7.0 (chr-ID 30101; pos 1 23059 to 123801)
ggaaggtaaatttatggtcttagcaatttgatgaagatcctgtatacaaattttcctgagaaaaagtcgagtttatgttttttctttgtgaggttatactgctgctggacctagagaagaaaatgaacaaagcatgctctaaattgctgttagctcaaatcaatgagcaataacctggatcctaatttatctgtagcctattctaatagaattcatcattctgtgcttcactatgtataataatagttttggtctacaatttctcaaccacagtcttgcatatgaaattcaatttctcacagaaaagaggtttaactacagtctaatcaagcaattagctggtcgttttatgctgggcgatggaaagttgatgatggtgaagttaccctgtgcttatgtttggaacagggctttatctcctgatcttgtagtaatgtcatctgtttttgccagttgtttgagtgtaattgaaccaagatgactgtccaatccttgttgatgtccttctacgaattttaggacaattttgcacttttcttcactttccagttaagtaattcataagttaactaattagattgacagtttttgaactcttctatatttgacttttcatgttttgagtttagactgttcaaagctttcttagcagtagttaggaatttttccatttggttattttgaggtaacctttatccttttgataaatttgatctggattcaggtaccagacattattgaca

SEQ ID NO: 50687 - DNA, 545 bp, Ricinus communis
  Intron number 1 from transcript 30146.m003578 (locus 30146 .t000155) derived from phytozome v7.0 (chr-ID 30146; pos 1 119197 to 1119741)
ctagcagaccttacaaagctgagattattgtcaaggtatgccaattatagctctgctattatttgtttatcaacttttacttcttttaatgtctttttggggttttagctctagcttaagtgggacttaaaaagagagaaaaaaaaaaaaaaaaaggaaaagaatgggattgttggtaaaatgctttataaaggaactctggtctctgccttgactcaattgcttatcatacaatttgactgtgtccatcgcctggaacctgaaaccactgatttgaatatggatttgtttcaattacttgccgcagaatgcaaatgaacttgattgaaaatctcaagctttagccatttgatggtatgttaaatatatacctttggccttttgagaagattttaattcttgtgacggtgtcttgttccaattcagcatttgcacagatgtcaattaccaacgaaaagttttatttagcttatgatttctcccttgggactcattgctaatgtgaaaatgtcactacttgcagagcttgtccgtaagtaacctct

SEQ ID NO: 50688 - DNA, 484 bp, Ricinus communis
  Intron number 2 from transcript 29844.m003243 (locus 29844 .t000089) derived from phytozome v7.0 (chr-ID 29844; pos 5 98504 to 598987 reverse strand)
acattattttggtccgactagaactccattgtctggtaggtgtgaagaagatgttggctaacataaagtagtgcttactgcttagattcaatgttaaagagtatatatatatatatataacatggaaatctaatcctgtatagttgtatgtgtgacattgaccactttcgctgaatggattctccattagaatttccttattgggctgcaaatatagtcttccatttgtaatccattagtctgtttttgttgccatcttccctttctgatgagttttagtggttaggattaggtttgccttcatttctggcccttttttttgagttatagaaattgcacgtatctgaataaaaagaaaagaaaaggaacctgtatggataactaccggaatagttatatctatgattattaaattttatatttatcaatcttaattttcatttttatttctgtccatggttggtgaaggtaagaagggttcttc

SEQ ID NO: 50689 - DNA, 733 bp, Ricinus communis
  Intron number 2 from transcript 30064.m000491 (locus 30064 .t000013) derived from phytozome v7.0 (chr-ID 30064; pos 8 9367 to 90099 reverse strand)
gccatcggtaagcattttattgcaagaactctattttagttcatgacatgtttggttctcttaattattactagtttttctgtaataaattagactatggatgtgtctcaaggttggcggtctttctcaaggcctttaaatgtgttaaaattttttgtaggtatatatgtcttcaatccatagttgttagtacggcttgctgaacttcaattatcatttcaacttgtagtaacattgtgagctgtttttatttgaattatgcaacttgtctgtgtctttctgacataagagttatgatttatttgatggagagttgatcctactactgggttgataccagacaatatatgtggccactaaatgccacgatgaatagaaagttctagcttctcttagtctgattgatttagttaaaagtagaaaaacaaagaccagaacataaatgaagctttacaagcaagaattttctaagtctctaaggaatggaagtcccaacaatgagaaaaggaaatatgaacaagagataagtaaataaataagtagataatttaattaggaaaacaagatgaaaatgtttaaattggtataagagaaagtgaaggaaaacaagagcagcaagagcagccttaggtgcttcttcttttttcttttttgccatcgtaagattaaaatgtttaaattgttatctgaaatggttgacttttctgccactacagtgttggaatttcttatt

SEQ ID NO: 50690 - DNA, 661 bp, Ricinus communis
  Intron number 1 from transcript 30064.m000491 (locus 30064 .t000013) derived from phytozome v7.0 (chr-ID 30064; pos 9 0119 to 90779 reverse strand)
aaaccgaagccgcatctcaggtccatttccaattattatagttttctttttcctcgcacgtttcagtttcgtttggttgccgagaaaataaacaacaaatagaaaatcaatataagtccaagagtttcgtaaggtttttgtctatcaatacaagataagccaaaaaaaaataaacgtaaagacgaaatttaaatgcttatttccttctatatattctttcacaaaaaattgaaatgaaaacaaatgaattgattaatgctaattgtatttaattcgatatcaatagcgaatctagtagaccaggtttacttaattgtttgattctgtcttgaatgcgaatttaattttttttttttggtgtaactcacagaagcaatgtagtttattatctaatctttcttttagctgatcaagtgtgcttacataaatgtagctttgcaaaagttttctcagttgaactgatacatgtaaaggactctaaatcaagttaggaatgtacatcaggatggttctatattctgttatgctaattacggctttaattgccagaatttttaatttttttctttgctgtttataactgaattatctgttctgtatatgtttctctggattcataattgtaggctaatcaatagtttttatctaaatgcaggtctat

SEQ ID NO: 50691 - DNA, 636 bp, Ricinus communis
  Intron number 1 from transcript 29877.m000487 (locus 29877 .t000025) derived from phytozome v7.0 (chr-ID 29877; pos 1 96406 to 197041)
ctctaagctcaatagcacccagcagtgcattgaaagtatccttttttctttgtccttttcttttctttacttattcaataattatttgccttcttgtgtaactcgtctcctatttatttttgtgcacacgaaagtaatgcttagcaatttgtttgttttctggaaagaaactcggagatatcttaaggcatgttggagtccttataatttggataaataaaatagatgttaattggttttctaaatgttgttagttgcttttatcttacattcgtagtttccaatctagcccttaccaaattgaagttgcttctcccactcagatgtagcatttttgatgaaaaggtgagagtgacatgatcactttaagctctagttcatgggaatacttttgactctctgagtcatatttttcttcttccttttccaatctgaaagccaatcaactgcttatgtgtaagctccatgcttgatgtgttttaagttggtacttctctgcatttgtcttttaagttggagtaccagctttgaagattcttcttcttccattctataaattgattctttgttcaagtatgttcttcttgactctatcacgtagctttgtcacattggtgcatatttcaccgaagcaaa

SEQ ID NO: 50692 - DNA, 835 bp, Ricinus communis
  Intron number 1 from transcript 29863.m001097 (locus 29863 .t000057) derived from phytozome v7.0 (chr-ID 29863; pos 3 92780 to 393614 reverse strand)
ctcaacaacgaaaggtcagctaaattaatatacatatagtatatatattttctgaacttttcattaataatctgtcaaataggcattttttattatattgctgtgttagttatcaagtgcatggtaggaaagttctaataggagcatacatgtagcatttaaagaatctatgatgttttcttatagtaaatgaaatcttattgacattggatggaatagtttccaaatttgactgcttaattaagaaagtatgcattttctgggtgaatcatacaggccaaaggcatcaataataacttcttaattataaactaatacgaggatattcaagttatcctttttcagctaaggatttgaatattaatgaacatggtgtttctctcatgttctatggtctttgcttttcattgattgaagtttaagtatgttgtactataaataatgtagctaaagtaaacaaactaaaagggaagagtagaaaacaagatgtgataattgtcatgagaaatgggtctattccttggagccacatcatttatcattgtagacaggagtacttctaattatagtttttctggtccactgcttttttatgtttaagcacatggtaatcccaaaacagttctgaaaaagaaaaattataacctagactcaaaactgtaatatacactccaaggaagattgtctattatttcagattattgggaagtgcttgcttttgagatttctcatcaatgttactattttataaggtttctttctagcaacatatattttcttcaagttttgatatacatactgtatcttctgcctgtgcaggcacaaattactgcct

SEQ ID NO: 50693 - DNA, 190 bp, Ricinus communis
  Intron number 1 from transcript 29970.m001029 (locus 29970 .t000058) derived from phytozome v7.0 (chr-ID 29970; pos 4 23551 to 423740)
cccaactctgtatgtttttctatatatttttttttacttggtagctttatgactataatgacctgatctcatatgctcttcccctttaatcaaagaaagggaagcgtgagagaaaagaggaaaagagaaaaagaaaatcaaaaatattaatttgtaataatttaatatttttaattaaaattcaggcatt

SEQ ID NO: 50694 - DNA, 619 bp, Ricinus communis
  Intron number 2 from transcript 30068.m002657 (locus 30068 .t000147) derived from phytozome v7.0 (chr-ID 30068; pos 9 35976 to 936594)
gagattatacagccgggctgtgtgttgccttctatgtaagtcattgatctttatttttatatatggtgtttttattcaattttttcatttctatatatagcacagtagctaatatctacatgtttttatgtatgaaattttgtattcaataagaaggtgaaaagttcaaaacgtaaaacccagtattccttttcgttatgatctttgaattctttaacggatgccttttgtttttttaggtttaattgaataactgtctttgtttttttgtgctttcggtttagtttgtttctcatgatttttcttctcttttttttcttttaaaaaaaaaaaggaaaatggaatcaaccctaattcatgtccttttttttagtaagatgcttaattttccttagtggaaaactaattatatttacttgccttcataaattttttcctataaagtcctatcttctatgtggctgaactgtgtaaatacaactagtataaagagcgacatttatttttattctttgggaaaaaaatatggaaaaggagaataaaagaatcgctgtgaatgattgtgtagttgctatgttgtggatgcagacatcaaaccaagaggcgttcgagaagaccc

SEQ ID NO: 50695 - DNA, 425 bp, Ricinus communis
  Intron number 1 from transcript 29932.m000603 (locus 29932 .t000014) derived from phytozome v7.0 (chr-ID 29932; pos 1 11199 to 111623)
aggtgggttttcttgtcttctccttctttagtatcttatagttctattctgttctgcatttctgtgttttctgctgttagatgttaacgtcattttaaatgcttctctaaattttcagactttacatgccaatatatgaacacgtgaaaattaagtagaagcaataattcaatcttccttgaaggataaaggttgatttgttttttttggattagaatgatacacttttattagaataattttgggaaggccaatttctaattgtatcattggagtatgtcgattgctatgccagttttatttattctttgtcattcaaattatactatttctcttgaagtcttcagttttatactttacctggtaagctaatgctggttttattggcagattgtttccttgattattgaggcccttgcttggtg

SEQ ID NO: 50696 - DNA, 504 bp, Ricinus communis
  Intron number 1 from transcript 29827.m002625 (locus 29827 .t000098) derived from phytozome v7.0 (chr-ID 29827; pos 5 36715 to 537218 reverse strand)
gatcaggtcttctcatctgggcttctcttttgatttgtgatttttaaaaactttattttgataatgagttttatgtttcttttttaatctttttaatttctgggttcatgaattgtgtcaggttgatttagattattttaaagtctcacctttctgggatcctatgccctgtaataatttgagtactaaatgttgtttgctaaagaagttgaaaagggatatattacatcttttattttgtaaattttcataattgtttttggatggatgcaactccaattggtagctcttgtgtttttatatatttggatttgcactcacaaattttggtgattttagaacataagggtaagagcttttacaatccgttcatacttaagtaggcagaatgtgaactagaaaatgtctcatcttggatatcgttgttgttggttgtaactagatataatattctattgctcaatgacaggggtatatagtccttaacagaccctgggcctttgt

SEQ ID NO: 50697 - DNA, 924 bp, Ricinus communis
  Intron number 2 from transcript 29983.m003128 (locus 29983 .t000027) derived from phytozome v7.0 (chr-ID 29983; pos 1 46101 to 147024)
tcccctaccaccagacgctttcggtgcacctataggtaaattggttaatctttatttttttttttaaatttcttttctggttaaactttgtagaactaattcattattggtatttataggaataatttggtgcaatagaagatacagctacacgactgttgctccatagtcttgtttatgattttatcagagttatatccttcccccagttgcactcttacatgcattttcatttttgattattcttcctaaatagtataattcatagagcacctctttcttggtcaatattctaatgttttgatgtatgaagaaactgtactgcttccttaatgcctaaaatatgaacaacctatgacatactattttaaatattattatcactatcatcactaatactagagtagttttcttcttcttactattacaaatagtgttcaagttttctcattgatggacataaaatgccctaaagtttggctggagattagacatctcatgttgacatgagtaccttgtgcagcagtgctgagcaggtccttaaaattaatgttactcagttgggttttgaccgagtgacattgtgattatgagataccctttccagtactctgagcataaactagggctattattttaagttctggtgctaggcccttagaacacggtgtttcagttgttcacatgaataataaattcatgcttttcaatttactgcaattataaactctctttttgtttcatatggaatgccatgctgcctttaacttgacatatcaattattgttctttttacttgctttagtttgtgtccatctctatatgccagcatttgataacgtgctgaggttgaaatctggtgatatgttctatgtgatactaggaacagctacggtgggccagcagaagcagcctggacggcct

SEQ ID NO: 50698 - DNA, 705 bp, Ricinus communis
  Intron number 2 from transcript 30003.m000334 (locus 30003 .t000015) derived from phytozome v7.0 (chr-ID 30003; pos 9 4886 to 95590 reverse strand)
ttatattcgaggatccgaattcgttgaatcaggtaattggaaagttcattgctattagtttgtttgacctaattttgtattgttaaggagtttgtgtgtaacccatctggtttaatagttggaccaattagtcaattcgtgcgaagctgaatgtttttgatcaaaagagtaaaggatttgatttgatttttcaagtattattttaagcactaaatctattttggatgtacactattctgagctcataaaacttttgaagtgaaaagacattgcctggattgggttttagtttaatattaatgaaaaatgaaagctttaatggatattaattatgaagtaaattatggttgtgttgagtttacttatcttcgatagtttttgtggcactgctcggtgcagtgttgaaagtactttacaatcaagtttgggtgcttggactctgaagatgagaatatcaaagtttgaattggctgttaactagttagtcctcctttatctagacgggactccagttggagaatttatctccttgcaattttgtggactttaaagtaaatgcttgcagaataaagatgttatcgtcctttttaagattataaaagtattgattgttataaccttgtagataattcatttgtaactttttgagacttgttatggttttcattgaacttgactattctttttctgttttttacaggttcc

SEQ ID NO: 50699 - DNA, 767 bp, Ricinus communis
  Intron number 1 from transcript 29827.m002601 (locus 29827 .t000074) derived from phytozome v7.0 (chr-ID 29827; pos 3 98813 to 399579 reverse strand)
cacttctcccgaggctctcaaattttcctgtttcggtaaattttgcttctttcgttccctcctttctccattgcccaatttcaattttcttcttttaatttttttttttgttatagttgctgtttctttgcttttaccttctcttttcttgttcctcttgaaatgggtttttgcggttttatcatgcttttcttgatcctcattttctcttctttttctggaattcaattagaatacactaagcatctgcttagtgtattctaattgaattctgctttatgcttagtgtattctaattgaattctgctttatgtggctgcatttcgctatgtcataatgaaaagatgaattcaatatgcatttctttgattagggcaatattattatgtgaatatgtatcaaacatgggtcacttataacacacagatcaattattgttgaatggttttctagtaatctgttttttgtactgaacataatttactgaatatcattgtttatttgttttctttttgatattttcattgaaaattagtggtcagataggtcaattctctagttgattgattctgttttgtagctagatgttggtcatgtcaaaattttgtggctttgcaattgttttagttgccttttacttcgactattagctgatgtaatagtgtcgtagaataagttcacccaaaagcttaaacatttactatcagatttggttttagcaaattctcaagttaattaaattgttcttttgttcagaagaggaaaca

SEQ ID NO: 50700 - DNA, 403 bp, Ricinus communis
  Intron number 1 from transcript 30128.m009037 (locus 30128 .t000498) derived from phytozome v7.0 (chr-ID 30128; pos 2 294667 to 2295069)
tggctccgctggacgagcttgctcaggcttctcaggtacaccttatctgttttcttttcttttctgttttttctttttaagaaaatttttatgaccttgttagatttgtttgtggatatgatatgatttgtgatagagaatcattttgtatgtttttttttgctagtgaagtggcataaacaaacaggcatcctgcgaaaagtattgaaatgatcattttctcacacttttttaattgaattaattagcaattgttattgcttaataatggaacatcttttagaactactagattggagcaatgattatgaaagctattttttgactttatagctatgcttttagtttctcatattattgttttttgtgatgatctgctgattagtttatttttcatcaggac

SEQ ID NO: 50701 - DNA, 291 bp, Ricinus communis
  Intron number 2 from transcript 30128.m009037 (locus 30128 .t000498) derived from phytozome v7.0 (chr-ID 30128; pos 2 295105 to 2295395)
ttcagcagctgctgcaactgctaatagttcttttggtaatgctcttctttatgctttttttcttaattatatatatatatatatatatgaaaaagtactttgaattctcatttctgtcttttcacgacaccaatcatggaaaaatattattattaatgtttaccattaagctacattgtttttaaattgttaactttaaattttgtttttcatagaaagaaaaaaattaatttttcagagatttatagcatgttcttattttaattcattgctctcagaaatctcagaagc

SEQ ID NO: 50702 - DNA, 645 bp, Ricinus communis
  Intron number 1 from transcript 29912.m005353 (locus 29912 .t000079) derived from phytozome v7.0 (chr-ID 29912; pos 8 26842 to 827486)
acagaactgcagcttcacgccttagggctctcaaggttagttcttgccttttctaaactcttaattttgaagttactatgtcgttaagattcgatgttgtctatcatgatcgtcgcacatttggcattacttattattggtattattatttcctgtttaatctgctattacgtgattgcttcagtgctagatctgtttaattcagtgacattttaaaaaaataaaattgttaagtgaaataatttgatattgatttgtttggtaattaaaaatatgagaaatggataaacataagaatatacgtttgtttatcatattacaaacattagcagaaggtgttactatatcacagtgttcggaaagtctaaaaaatgcaaatattcgattttattggattttgtttagttaattctaatgtctgggaagatcgtagttgctataagtaaatgtctggaaaggcattttgaaagaaatgaaaacatgccgcaagtgacatgattttataagaattcaatttgaattgaagtcttgcaaatgatttaatcctaacgaggcctataggttagaagtttattggagtacaaaatgagctattgaactgtgtgaacaggatcgtacagtctgtaggttgcctgccagatttgc

SEQ ID NO: 50703 - DNA, 915 bp, Ricinus communis
  Intron number 1 from transcript 30073.m002276 (locus 30073 .t000086) derived from phytozome v7.0 (chr-ID 30073; pos 6 04421 to 605335 reverse strand)
tgggtatactcttcctttctctttttgtagttttgatgtttttgggtcttattcttatttggtatgcaagtacatgtatatggcggtgggtttcttttcttcttctgatatctttagttttttgtttgtgtttgcttgtgcgcgttcttattgttattggatttccaaattttcagatagttggttgatttgtatgagagattgtttgaaagaaagttatagaattggatttctattttaatattggtctggaagtagttataagtgattgtgctggcttcttggggatggaaagctctcaccttgattgaactgataatgaaagacgaagagattaactattgaaggaatacttatttgatctgaagatcaaaatctgtgtgtcattatcttagtctagaatttagatagatgatttagtgtattgctatgaacttaggggtttagagttttggtgaataattatgggttattttattctctctttgaatctcgagttatagaactggcttgtaccaagcttctgaattgccatcagtggaaattgggatgtgaaatcactcacgagttgattaatgcttttctgaaggtagtctaaaaaatttctgaagtacctctttgagctttttgatggagcctgatggtctatatggaatctcaagcagatggatctgcaatactctgaagttttacatgtctgttatctagtatttgatttaagtaattataagggggacgaaattcatacatgctaatgttgactttataagtgccgtacatactttatctgactcttcatggaaaatcaacctttgataaagatgaaataatatcttcttcgaggtttgtgttgtatttagatttatttatgaaaatgcaggattggtagcttggttgctcaattttgctaaggga

SEQ ID NO: 50704 - DNA, 591 bp, Ricinus communis
  Intron number 1 from transcript 29908.m006236 (locus 29908 .t000287) derived from phytozome v7.0 (chr-ID 29908; pos 1 814485 to 1815075)
tttgtcagtttgctggcgacgtcgtcagtggtaaggttagttttgtcacgtcaattttgcttttctctgtttattatttatttattttatggatttttaacagccagcgcatccaacttgggtgtgtttggaaagtttaaaaccgcaacaattgaattgaattgagttctgctcattcaattattgtgctcggtaagcacataattggcagagtccaaatttttaaactcaaaaaacttatgtttcgtaagtatataaatagaagaattcgtttcaatgaaacttcttaatcaattctcatgttttgctaacactttcgaaaagccattttcttgcgtatgatttattcaaaataatgccaaaatcaaggcattttgaaagatatgaaattatgaaagaaatgacatgattttccaatgattcaattcatttgaactgttgcgcatgtgttattccatacaagtaattctcaatgcatgccaattatttgatgttaagttttcaactgtacttgattgtttgtttgactcagttttttttctttccattgatacagattaagcccccgaattcaccagaaggccgttttac

SEQ ID NO: 50705 - DNA, 732 bp, Ricinus communis
  Intron number 1 from transcript 30024.m001685 (locus 30024 .t000002) derived from phytozome v7.0 (chr-ID 30024; pos 1 4609 to 15340)
agagtatttggttaagttcaggtaatttcctgtatttgaactgtagatagaatttttgcttatttcctctgtggcaatagtgacaaagttgggaatttcaagcttcttgtgccttttacagattgactgagacatacttttgtgatatgcttattaattatttagattctttgttgaaattttgaatttgtaatctaattatctattcattttttgcttttctgattggctgctgaagtgtggcatgaaaaagtattgctggcttagactgttgcttcccaatcttgtttggaatataggtgcttttggtttctttttagttgtaaattgttaggaaaaaaatgtttatgtctcttcctttctctttgttcttttgaatctttaaggtttttgaatcttaaagccatcagggttcagatagggttttgatttggggtatgatttatcactttatacaaatgtgagatgtggttgctctcttgcatgcttgctgccttttccatcaccaatattggttcatttgaggattttcacttttgaactctcaggattttagtgggtttctaaagctgggttattggaagaaagtttgatcttttgagagattgcaaaaaagttttctgcagaacatcaacaatttaaggtctacttttctttctgttgcgtctgtaggagcatgatcggcagtcttctaattttgattattgccattcctgcaggataagggattgt

SEQ ID NO: 50706 - DNA, 847 bp, Ricinus communis
  Intron number 2 from transcript 30024.m001685 (locus 30024 .t000002) derived from phytozome v7.0 (chr-ID 30024; pos 1 5421 to 16267)
tgcagcagagcttgctcttctctgatagtcttaaggtgctctttcttaacttttatttgttggtccctcatctgcaggaaacttatattttaaatttcatgataaaagatggtattttttaattgtgtgtatactatagcatatatttgctagtctaatcaactacttatgctgattgattccatcattcaagattatacttgtacaatctgcttctaaaattcttactttggactatttctttataggagtgtaattgagtcaatctagttgtcagctcttcagattttactaacaaaatgcacatgagcctagtcaagtatttaattttctttatataattttaaatgttatttgaattttaaattaacatttaaatgacaagattttatgtttactgatttatacgagatacataaaattctactgccaatttcagcttactcaagatcaattgaaaatttgacttaaaatcttttaataataaagtcaattagagttgagcatgagtatcttacgaattgagctcaagtattagaaacaaaacttgaaaatttagtaaagtttcgagccttgagttcttgaattgactcaagtttgagtagtttttacttgaaccagcttgatatagtcacgattctctcaaggttcttgagcaattgttactaatatgtatcctttcacactgttcaccctttaagaattttgatattcttcatttgacttattggcagaaattttgcatgttacaataagataacctatatagggttttggcacatcattttctttgttgcatccatatatttcaggatttgaagaatctgagaacacagttatattcagc

SEQ ID NO: 50707 - DNA, 939 bp, Ricinus communis
  Intron number 1 from transcript 29869.m001161 (locus 29869 .t000026) derived from phytozome v7.0 (chr-ID 29869; pos 2 55709 to 256647 reverse strand)
acaattacctcgtttttatcctgactcgcgccgaggtacccgctttttcatttttggattgtttgcttatgggttttatttggattattttgattttgtgttttggttagtgggttttggttggattgcttgattgtggagttagtgttattttgttggaaactttggctttttgaaggcttttatgagcagggtttatgaagttttacatagataggagtcatttactgccatatatttaaatttccatgagcaaaaatagtggttaagtgattgttttaatcaaaaggaagatttaatgctttttttttttcttttttctttttggaaatcgctccgtgcttgagtttaagatattgattgtatatgtaactgaaaatgctatttcaaaaattctgaaaaagttcagccatgacacaggaaggatacaccttacagaatatgtgattcttatagttgtttaattgcatattcatattataaaaaactcaatatacatgataatctgaaattattttgttcaaaatgaaacaatcattgactaagtttcatttactggaatttaggctacccattcaatagcttccggaaattagaaaagaaatgatcaagattttaaggtcatttatgaggcatgttgattcaattattgccttttccttccataaacaaaagtatatagctatgctactacggaacccatgagatatttaattggatgccatttcaaggatgctacttgtcttgcatattagcttgcccttcatgattaaacaaaatactccaaatgtggttcatcatatggagacacatgtgaccttgctgtattatgccatgcctggaattttaaaacaaattgatccagccacgccttagacattgtaattattggtaattgtaacagggtaaatccgtggagattcgacaagccgctggtct

SEQ ID NO: 50708 - DNA, 708 bp, Ricinus communis
  Intron number 1 from transcript 30076.m004679 (locus 30076 .t000243) derived from phytozome v7.0 (chr-ID 30076; pos 1 568202 to 1568909 reverse strand)
ttggaaatcttgcttattgcatacccaggatcaaggtatccaaagtttgcttcttttgattattttgatcttgctttgaatttttttaaactatttatttatttacattttttttttctgctgagaacgaagaaatctgtgtaagtttgtttctttttgtgcttatgaagtgattagaaagtttttagatttcattggtgggtttatgtggtcttagatccagcttgcctgctaaagttctaatattcactttgttgcgaaagattgagtagattggatcatgtgacttcatttttctttaatcttcaagttatgtgcttttttctgtcttcaggggatgaagtattgggtttttattttttggttttgggacattttcattaatgcccggttgtcttgtatctgtctactgattttgttaacaatgtatctagggtacctgaaccaaaagagtaattgggcaaagaagttttccttcttgtttttcgaatattgtgtttgaaaagccctcaagtcatctgctcaaacatgaacctcatagaaattatatcaatatttttgttttcttaagttctgtaatctttgtgttgtattttcattttaaaaaaattgatcaattatatagcttctgcatattgtaatgttgatggacttcttcttttggttaattcaggcaggaaatctcttaaaatatcgtggccttcatta

SEQ ID NO: 50709 - DNA, 826 bp, Ricinus communis
  Intron number 1 from transcript 29929.m004564 (locus 29929 .t000067) derived from phytozome v7.0 (chr-ID 29929; pos 3 84354 to 385179 reverse strand)
aaacatcgaatccctcgtcaagtctgtgtaccaaggtctatttcttttttactcctcctccattttccgtttgctttgctggattattttctctttttttcccttcaaattaatacgaggtttcgggtcgggttgacccattttggtagtttgctttttttcttattattttttttcaaaaaagaggtccggttaggtccgtcttatggcgggtactaaaactggtgtagaaggaaagaaaagaattattgaatttataagatttttataatcagttgtatcttgcttttgtgaaatatgaaatagtattttatttatgtactttttaatttctgaagcttaagcttgtgctttactaggaaattaaaaagacgggacaactaaactgagttgtgtcattattccttcatgagttaacacgggaactaattagtttcaactaaagttgtagctgtggtacccaactggatatgcacatgtattttgagctttttctgtatcttcggttttctttttttttttttgaatgaggatagtgatgtttcgtggaccacttatttgtttcatttctttttactagtacaaaaagttgtcttttttttttcttttttgtctatgttttctttttaaacagcggctatgcaatttaactatcataaatagaatgtaaaaattagacaatggttatttgagatgtctagcaaagtgattgataaatgacgtgaaagaaatggaactatattgtcatacttgcataatggtgacacttggcttggctatgcttattgtgtataactgctaactgctggtgattttgctattccag

SEQ ID NO: 50710 - DNA, 738 bp, Ricinus communis
  Intron number 3 from transcript 29904.m002971 (locus 29904 .t000085) derived from phytozome v7.0 (chr-ID 29904; pos 5 66959 to 567696 reverse strand)
aggtgagctagtcatgagacttcaattatcttttaaacaattattagcatgatgatggttatattcatctacacgaccgccatagatgatgattgagcagataatgcaagtactgtggctatatatagaaagaactcacttttgatatcctagaaaatcctttttaataattacaaatattgaacgtcttatgaatcactccaacttgttcatctttagtatcaagtacaaaaagatgctagtttcttgagatggcactatgtacttgaggaaataaatccatccagcctgcctatatgcttagttatccttcaaggggtctaacctaatcatattcataataagaatacaaactttacttgttgcatgtgcactctgaaaaataggttgaaacgtccagatttcgttgtaaacgttatccaaagaagaatgttttagcattccgtcttgctggaaccttgttattgtaactattgagacaactagaaaatttgggtattgacatattgtcattgtttagtatcatgggctattgtttcgagctattattattgaaaaaaaaaaaaacatcagtaattgtcctatcagttaccatcataaatttcattgcagatttggttatggcggctcttcaacgaagatatgtagaaaattcggatccatgctgactaatactaacttccttatctacttgtgtatgcagggttttacaaacgctgtaaaaaggcctgtccgaat

SEQ ID NO: 50711 - DNA, 794 bp, Ricinus communis
  Intron number 1 from transcript 30115.m001197 (locus 30115 .t000023) derived from phytozome v7.0 (chr-ID 30115; pos 1 60219 to 161012 reverse strand)
cttttcatattagatccgctaatcaaaactcccctgtaagttctttccttatgaggtttctttcttttaatttctcttttactgttgatatactaatactatcaggttaaaaactttgattagttagttaatttcttaaattggttattgtggatgtggtatttcttttgttaaaatatagtgcgacactcattgttaattctgcatagggggatggtctttaatttatttaggaggcatgttgctatgagcaaacgcctttaccgcttgattcactggcttggtttttatgtgttgatattttgttttcttggttcacaggaaagttccaaaaattcccgtcttttgcagctttcctacttctcttggctaatacgcatgatgcatatttgccttagttgctgcaaattgtattcacatatcctaactgttagagatatttgtgccaaattctagtgctcaagtagcaccacgggggtgtaaaaaatgaagtcacgccttcactgaatactgaaacgctagtgccaaaataactttagtgagtcctagctaccccagtgcagcaatttctgtttgattgggcgttatgaattgctgtcattactagatttaaatgaaatggggaaaaaaaagaagaagctgatatgacattatgagtgatataaactgcaacgatgacttcaattttaccaattataaagacaaaggggaactcttcttatttaatgcactttgttgtattgatatgatgtttatcaggtggatttcatactggggagttggctacattgcaa

SEQ ID NO: 50712 - DNA, 580 bp, Ricinus communis
  Intron number 2 from transcript 30143.m001223 (locus 30143 .t000062) derived from phytozome v7.0 (chr-ID 30143; pos 4 87703 to 488282)
cagtacaactaggtatattgtgcttcccaaatcagaaattagattaattttatcttctggaagtaattttcaggatttcatttagcttacttgtgcagtgcttttctgttggagctactgttaagaaatacaccttcttgaatatgctaattggaggctattatttgaatataagtatgatagaccctagtcataaaaactcaaaacagtgaatcaaaagtttcaagctgcttcttacaacagctctaacagcagtataaataatacaaacttcaatgcccaaagaggctaataaagataaaaaaaaaactctgttgtccatggggaagtcatcttgggaagataatcaaggtctaactgaggtcagcatggaatgctgatgatacgtgacaatcttgtcgatttgctaccagattttgttggtttagtagttatgctgcatgatatagccttttacttctgttatgatgtctattgagtattgcatctgagcgcacaaataaatcagtttgttggttgtcctaagagttggtctgaaaaacttgtacgaatcttactattgacatcctgtttgcagcat

SEQ ID NO: 50713 - DNA, 864 bp, Ricinus communis
  Intron number 1 from transcript 30147.m013874 (locus 30147 .t000145) derived from phytozome v7.0 (chr-ID 30147; pos 3 056458 to 3057321 reverse strand)
gatagttagtatctcttctgccgcctttcttttcagaaaaaagatttattttttaacagcattttctactgaattaaaattcaaatttgtgttagtgttttgatttaaaaattgtttggacaagtgacaactagaaagagaaaaaaaaaagaatgaaaattttcatttgatcacaagaatgatcttagtgtttggtagataagtgtaattttgagggctcatttcccttccgtgttctggtaaataatggttgttaggactttattacgacagttctctgttggaaattgtaaataattgagagttttttcatgtaaggggcacaatatgagtctgttctctgtatgatctcaggtgaaactcattttgtttttattcctacgcaattaattagtttgttctgaacacagttgttttttgaactgattaaatttctgtgctgcataagcggaattgtctgattcatttactccgaatttcgaacttctaaggggacgcactattttaatcacctatggctgtatatcttgtaagtgtaggatttttattacttcaagttttgacaattatgattgcttctccacataaatgtcaatggttggagataatttgccataatttggtcgatattcagtttctattgtcacccaaacaactccccagatttggttcagctggcccacacagttatatttcctcttggatatctgcttcattcgttgatgtaagttgcacacagcctacatggtggtgcctacttgtagaattatcaatttaggcatcactcatacatgaaaactagatcatgtcacatttgctatgcatgcagggaaaattcttcttactctttcactgcacggaaaa

SEQ ID NO: 50714 - DNA, 510 bp, Ricinus communis
  Intron number 1 from transcript 29822.m003519 (locus 29822 .t000194) derived from phytozome v7.0 (chr-ID 29822; pos 1 201212 to 1201721 reverse strand)
taataaagaagctctcaagatcagtgtttggcaaggtttgtgctattattatttatgtaactttttttaaaagcttgcagtattctctagttgaaaagtatggctagttgctttctctttagaagaatttcatgtattattcaagttttcaggttcttaaactggtcaaattgcgctcggagcatttgctgatgtttgagtaacagtttagttcttgctattagtgttttttggagttgatactagcatcattgttatctagctaaagtctgtaattgtagttggcaagtttaagtgtcattttaattttgatttttcataatttaagtaagtctgcagttccgaatgaattgtaaccagaacagttatgatttgtaagttgagtgattgagcgataactttaagtgaatttgtctttaaacagacattctgctgagtttgaatgtatgatattacttcattcttggtatgctcttgttcttacctattgtttaaaacttaaaacaggtg

SEQ ID NO: 50715 - DNA, 265 bp, Ricinus communis
  Intron number 1 from transcript 30073.m002193 (locus 30073 .t000003) derived from phytozome v7.0 (chr-ID 30073; pos 1 2037 to 12301)
cgtttaaaggtatctttctctcttattcttctttgttttgtttttaaaaactagggcaaatacagtaatttgcttttcctaattcttgaagtatttgcaattattctccttgaatttgaataatgtatactgaaacttatacaatttattacttaattgttggtggctgttgctgttgtttttatttttagtattatcatttcaagagttactttttcaagatagagttaaatgtgtctggttttcaattttaatcaggaggaat

SEQ ID NO: 50716 - DNA, 658 bp, Ricinus communis
  Intron number 1 from transcript 29970.m001027 (locus 29970 .t000056) derived from phytozome v7.0 (chr-ID 29970; pos 4 03106 to 403763 reverse strand)
atctctgcttctccaaggtatcaaccttcatcatttaatttttacgtacgtgagctcagaattattaacctaaaaaacttgtcggtacagttctaatggtctttgcctaatcatttctgcacaaaagggcttgattaatttacaagccaattgccgcttctgcaatcaggcataaaagtttgtgcagaaaaacttcattgtaaactgtttgaacttccaagtggttcagacagacgtcatcaactataaatagaagtaacaactatttttctatataaataatagtctacctattatcattgtggtatctttcaatagactttctaggaattaattaattaacttctaatatattttaatgttcttgtgcttttcatttctaatgccagtaaagtttatacttttataatgctagttgaaatttgatctaattgttttatatgattttataatataataggatcttcgcatttgtgggtcagattataatgctagtgactaggcgtctttgttattgggtcggttcttaagaatttgattatctttttcactaaaaagcagcagattttttagtgttagtgataaaagaggagatattgagcaatgattcagctgagttttgcttttgaatcatgttttttttttttcaggtatttga

SEQ ID NO: 50717 - DNA, 781 bp, Ricinus communis
  Intron number 2 from transcript 29994.m000443 (locus 29994 .t000005) derived from phytozome v7.0 (chr-ID 29994; pos 4 2999 to 43779)
ttcagtctcccaaaactgaggaatcttcctctgaggtataatccaccttcatttcactctttcttttctttcttttttttttttcttagatttcttgaattcactgtttggcttctgagaaatcttgggctattgagatggagaattttataaaacccaagacttgtctaatcttttgtagacttaagcaagttagtggtttgtaaattgttgaacaattggctatattgtattcttacttggtaatcataaccaagaaaccaattgtagcagaccaactgagcgtactgcagaattctggataattctaactcgtttctttaggcattgtttggaatatatcatatccaagcgttcagtttaattgtgttctatcaaaatcatgtcagctttttcatgatttcgtttctatcaaactatcttttttatttgtccgtgtgcccctgcgtgtgcatatctgtgtgttccgtcagttgaaagaattgagttctagcaactatggactttccaaacacaataactgatttcttgcattgttagacttcccaagcaaacttccataatgttgatattagaaagaaactcaaattttaaaactgacattctatacgttctttgaaattcttagagcccacagtgcaggaaacctacatggacacctttaggagttatgcttcttaattttgtctttttaagtttatgaaattgcttttggtttttctgttcttttttcccctgtttgacagttggaaccagcagaccctgatttctacaagatagg

SEQ ID NO: 50718 - DNA, 734 bp, Ricinus communis
  Intron number 1 from transcript 30128.m008601 (locus 30128 .t000062) derived from phytozome v7.0 (chr-ID 30128; pos 4 4758 to 45491)
ttccaagagtgaaactgggtaatcaaggatttgaggtaaaccaaaatatctataattccttgtctttccttcttctgcacttttaatttcttcacctcatttattaatgttattgatcaagattccgagtaactaactaattgcataatacccttaataatcttttatctatcagggaaatgttaatactagtcgttatgatccatgttatctttcatattttcaacctgttagtttccttttgccttttcttcttttttgtttatacgttattaatctttatggttactcatttggcaactgtgatatttttacttctttgtgggttacttctacgggattattcagttattagaattaagacccagatatagaataccaatttttccccccaaaatttaagatagcagaagcacataacatttaactccatggaaaagcttataccagtgatttgtgctcaatatgttagttgaaattcctcactttgtgaaagtatgtggatgacctcctatgaatcatatgtaaagcaaaggaaaacaaaggatagcaagtttttccccatttatgcactcagttatagtcaccagcctatcctcaaatgataacgacacctggctatttatgagaaaacaagaatcaaagcatctttgcaagggaaacttgcatttacgttctcataattctgttgtctgatataaatctgactttcaggtgtcaaagttaggctttgg

SEQ ID NO: 50719 - DNA, 546 bp, Ricinus communis
  Intron number 2 from transcript 30128.m008601 (locus 30128 .t000062) derived from phytozome v7.0 (chr-ID 30128; pos 4 5623 to 46168)
aagtcttagttgggaaggcaagcttccaactgtttcttctgtttaaagtttctgtctgactcttttgatttcaatgatttggatggttgcaaagaaacatatactgcattatgtttgattatttctaaatgtggaaaaggtgccaaaagatttcaatctttgcttggcatcatcaagctacccaaggtgttgcttctgaaaaggttgtgctcatctaatagaacttttgaaatataccaatggttccatcttgaaatatgaattgcaatcatgggttcatttgtggcctgaaacactatagttttatcattatagtacttaatcaaaacaaaatatgttattgacaggcaggtctgtctagaaatagtggaaacaatatacacaagctagaaatatgttgcttcagcatgtgcttaaagtagaaggaatgtagtttgacataaaacatcaagttttatttatgttgttaatcagtgtatgaactgctagtctatgatactcgtgtttgcaggcactaaagcaattgcctagagaaaagatccagtt

SEQ ID NO: 50720 - DNA, 975 bp, Ricinus communis
  Intron number 1 from transcript 30025.m000585 (locus 30025 .t000013) derived from phytozome v7.0 (chr-ID 30025; pos 1 13971 to 114945 reverse strand)
aaggttttgtatacaaatagttagctcagcagataggaatatgagtttagcttggtctatgatgcgattttttggcgcttgtatcaatggtggaatttatatttcctagttctagcaaattaattttttaggagggtacgctattatgtgaacagttcatgagaacttaatgatcataaaatttttataatatatttgctgcagtaatggttccttgttttgatttgaatggtaacagtactatctgtgcgtgcatctttattcatccttcctaaaaatgattattctattttcagttacaaatgagggattgagatattgcatctactgccaggctaagcctatggatgccaaattattctaatacttagtggtagtaagataattagtgggctatttagtacctttattattttgaatgtgatagaaatagtcaaactgttattttgaaaattcaagttgagagattttatatagatcttccacgctagcccctatctaaaagtagcctagcacttcaattcaacagaacaaaaatattttcctctataataatgtctgaattgcagataaccaatgaatttcagtctcagatttaactttatctcttccctttatgaagcctgtcgaggattaggcttcttttatgacaccaaccatggtatctctaagaacttgtttgatcgaaatgtattctcttgaagcaaatctttaggcttcctgtggattccaaactcgagcttccatcatcatgcttgaaaacctacatttcatagcctctccttatttcaggaagctgcaagtgtctggactaggtttctgctctactgctaagagttcttttgataaaggcagtggtcaataaaaatttaaattcaggtgaagtttctttaaatgacctaagttttatttattgttactgtattttcctttactgcagttttgatatttgtttcaagtgccttacgcgtattc

SEQ ID NO: 50721 - DNA, 811 bp, Ricinus communis
  Intron number 1 from transcript 29993.m001057 (locus 29993 .t000026) derived from phytozome v7.0 (chr-ID 29993; pos 5 91842 to 592652 reverse strand)
ctggtgaacagagtaatataaaaaaattgctctttttttgtttgtttgtttgtttctatttttgaaatttatgctcgcagaattgttttggtgttaatattttagcttaggattatttggatagtaatctctttggtttactaatattagcattaattttgcaaaaattatcattaaaaaaaatgatccaataaactatcttcaattcattatggctattttggctcacttataaaattaattctataacctactaacttgattgtcaaattttaacagttatcctgcttttcatttaactcaactgaagaagaacatgaatccttgccatcagattattcttctatattaaaataatggttaacagagaaaatggggcaggcacttaggcttttttgcatttcagtcaatattatccggaagataaaacataggtagtttagaagaccaaatttgatttcataacaaactagatgtcatgtgatgaaatctgtacttgccagaggcttacaacagctgccatatgctttaagcaatgcatttctcttttctgtccaattggaggtgtttagaagagttgtggataatatcttgttatctcaggaattgttggcaagtttgtgccctcctctaagaattccatgcattgaatttgatctgttataaaaatacatatatacatgacatgtatggcatatattttttcaggttgaatatttactgtataagctgcattaccttgtctctaattatggattttgattctgaaatttctacctttcggtgtattcatgttggtttctaggaactg

SEQ ID NO: 50722 - DNA, 413 bp, Ricinus communis
  Intron number 2 from transcript 30072.m000949 (locus 30072 .t000023) derived from phytozome v7.0 (chr-ID 30072; pos 1 84149 to 184561 reverse strand)
tggtaattgaattctttctattttctttaattttaatttttgggttcttattggtttcttctaattggttattagtaaagttaattgtttcttaaaaaaaaattgtttaatagtaaaattaaaagatttgtttagtaattttttgtttttaggattgattagtgataagtcttcaattatcttgaatttgattcttgggtttgattggtttattgtattttgttaaagtgaaaagtttctcctttgattttctgttattataaggagttacaagtgctaaatctttaattttgttgaatttgattattggctattggttggtgtcttgtgattggttactagttaagttaaaagtttttgtcgtgatattctttttattttttaggggttataagcgtttctttagacggtca

SEQ ID NO: 50723 - DNA, 491 bp, Ricinus communis
  Intron number 1 from transcript 30055.m001633 (locus 30055 .t000103) derived from phytozome v7.0 (chr-ID 30055; pos 5 19973 to 520463 reverse strand)
ctcatctcaccctcgttgacccgtaagccttttcttcttctttctttctgtttttcttttcttaattcttttatatcctaatactttctattgcaacataagttttctgtttttatttgcatggtcaaccgtgacatgtttgatactgtgtacatctgattattgatttctatgaaaagctcttcttaccagtactataaaaataaccaaccgtcttgtaattgataaaatattcaagatccgatgatgataattcaaaaagaaaaagaaaagtgcaatacattactttagccaattgcaaaaatctctataagctcttcgtctctgcaattagtgtttttgctgttcttatgttgtttgaggttaaacaaatccgataagttttgggatcaatttcctctacttattttctttcatcaaattctctttttatcgttaatggtcctaacttaatataatattgaatccaggaaggagtacttcgagattac

SEQ ID NO: 50724 - DNA, 439 bp, Ricinus communis
  Intron number 2 from transcript 29983.m003161 (locus 29983 .t000060) derived from phytozome v7.0 (chr-ID 29983; pos 3 42672 to 343110)
acgatcccagatttctcaagatttggctcctttatgtaattactttcactcttactctttaaaactgtaaatttctgcttttagtctgcacctggacttggtagcttttcttaccccttgtttggtacaaatgtgcgagaactcaattcacttgatagttctttcaaatgccttcttttctctaacctgaaagaattgagttctagcaactatctactcaccagacatgagaatttggctagacagaattcaactgaattgaatttttacactagtggtttgatttttataatttgcttaatatttattaatagattgtaatgtgcttgtatatatgtgctagattaatttagtttattcaataagtatgctgtgggagtgtggaggtagattattaatgatttatacttcttttgctggttgctgtagttggaaggta

SEQ ID NO: 50725 - DNA, 616 bp, Ricinus communis
  Intron number 1 from transcript 29842.m003695 (locus 29842 .t000192) derived from phytozome v7.0 (chr-ID 29842; pos 9 53099 to 953714)
aaattttcgtggtggacaaggtattaatacatctgcttaccttgtctgctacatatactataaagctgtctacttgttttgttggttttccgaatgctgttatgtcaccatcttaatgtgtttctcttcttgccatgattccttgaattcacttgcttttatttcttatccaacttttgaactcaattattaggctcaataaacacatactcttgcatctcaattaattttgacctgcctcctttttaatttgcacctattatttcatggtttggccttatattgatgtatcttgttttcaccaactattcttctcacgcttctttcctcaacggagaatagcacctaccttatttattgctgatatgataatttattgctgatatgataacaacctattgccataatttcatcatcattctgtttgatgcatctatcggaatttttatgtaaattgcatgacttgccatcaaatattcttgtataattccctcattttgattataacttttgcttttctcagctctagtttatattttacttgcatcagtgtggtgaatttctgccgtatctgtttgcagaaaattcttgcgtgtttctcaggaagattcagaag

SEQ ID NO: 50726 - DNA, 463 bp, Ricinus communis
  Intron number 1 from transcript 29844.m003213 (locus 29844 .t000059) derived from phytozome v7.0 (chr-ID 29844; pos 4 03445 to 403907 reverse strand)
ttgactaaactttccgtttgtcatttttctataaggtaagtaagcatttatctttttttatttatgtttttgaattgtgatttaagtttataagctaggttgttgttattattattgttattatctttttttatttatgtttgtcattttaagtttataagctaggttgttgttattattattgttcttattcgcttttgaggttgggttattacctattggaataggtattgattaggtggcattcgaaatgaagaaaaattactttctttatttcatatcagtaaaaataaaaaaatttaaaatccaacagcaaatgcttacaggtcttagtggctatgtgttctttatgaatcaaatttactgatttaagtggttattatgggtttatcagtattcttaacgaaaatttgaatgttgttgtgcagatacctccctccagaaattggctgtttaaataagt

SEQ ID NO: 50727 - DNA, 689 bp, Ricinus communis
  Intron number 3 from transcript 30005.m001303 (locus 30005 .t000069) derived from phytozome v7.0 (chr-ID 30005; pos 4 53015 to 453703 reverse strand)
gaagggttcctatcttcatctaagaatactgcactgtatggattgcctattattcaattttctttgttttccctctttgatgagagttgtcgctctagcatttacctctttacttggaattataattcgattccctttttcttttccttattcctttggtatatttatataaaaattcatgctgatagcttcatccagaaaaaagaaactatttaatttatagaaagttactgcattgagtactttattaatctgtcaaatttccagtttagtctaaagtttctccctgatgctgcatttatcattattgttccacattacagtcttcttcagaaaaaggaactaaagatcctgtttctatttaagatttaaatgctccatctcattaacttttagcatgagaggttttcttctgctgcagataacgtctgtttgaggttgtagatctccttgataatcaaatcaatttattgcaagtttccttgtgttaagatactggaacatcacatgaatggagttaatactattacttctagcatttaataaaatgatgtaagattgtatatgaatttctggaggtcagattcagttgcatcatggtaaatactggattttgtataactaacatgagtttcttcacacttgttgcttcaggttgaagcggtctaggaagttccagcctgaagata

SEQ ID NO: 50728 - DNA, 416 bp, Ricinus communis
  Intron number 2 from transcript 30005.m001303 (locus 30005 .t000069) derived from phytozome v7.0 (chr-ID 30005; pos 4 53766 to 454181 reverse strand)
agcttcgcagcatcgaaaagcaggtttctatttgtaattttttctttcttttcttttcttttctctttttttttccttaaagttttttgatttggagatttggaatattattaattattgtaactaagacgatttaattttatttgggtctgtcacattgcctacgaagtttgattctttaaagtaattagttcaaaattaggttgaatttatctgggttttcctttttcatctctagctagcaatttggtgcattgatgtatgtttttctttagtctcaggggttagtgccattagtaaagcacatggcacttttgagctaaaaaatttacttctatcttttgtttgatgatgaatggttccttttgtataattctaaacggacagcatacttcctttccttaatcttcaggtct

SEQ ID NO: 50729 - DNA, 889 bp, Ricinus communis
  Intron number 2 from transcript 29852.m002024 (locus 29852 .t000043) derived from phytozome v7.0 (chr-ID 29852; pos 1 488818 to 1489706 reverse strand)
actggaattaaactaaactttttgaagatcataaggtgggtgatcatgttacgctaactactctttctagtttggtgggatccgtggttaaacggacccaccgagaccaacgagttgtttattttggaatgcacgggggcttgggaaccaacgtgcatgtaatgagcttaagggttttattcgatttgaagctcacaaaattgtgtttatttatgaaacattgctacgtgaccctcgaagtgatttactcaagaaacagttagactttcaaggttgttttctagtgccaacaataggaagaagtagcaatttgatgttgctttagaaggactttgatgtttctattgtctcctatagccaaggatatattgatgctttcattgtttctagtgatttgtgttagtggttcactggtttttacggtgcccctaatcatgctgaccgtgtacattcatgggaattacttcaccgtctaaagtcatttatggaagatttgccttgggttatctgtggtgattttaaatgaaatgttgtatggtgtagaagaaaaaggtagggatcctattctgtccaaatgataaaatttaggcaagttcttgatgattgtcttttatcagacttaggatgtctttgggccataatttacatgaaaaaagcaaatttgtggaggatgttggtttatgagaggttggataggtgtgtctgcaatactggttttcgtgctatctttctatattctcatgtatgaaatctagggtatcatttatctaatcattgagtaatttgtctccatttctgggatctttaaaattcggtccctttggctgttcaaagtcgtttttattttgagtcagcttggcttctagatctggagtgcaggaggtattct

SEQ ID NO: 50730 - DNA, 711 bp, Ricinus communis
  Intron number 1 from transcript 30027.m000842 (locus 30027 .t000035) derived from phytozome v7.0 (chr-ID 30027; pos 3 03689 to 304399 reverse strand)
ttgcagttctgatcgctgaagtaggcgattcttttttaacctttcttgagcagcattttctttggtgttcaaagagaaaaagaaaacaaatgtagatatgaaatggttcttgtttgcttaagaaatctttgttatgttgatatcgtaatcttgcctttgattgttggagtttgaagagtataattaacgctgtttggctgattagaaaatggggaatatataatacatgaatccctgagtttcattatggtttctttgttaccataaaagtcttggcagctttttttagcttctcgtctcatgaaagattaggacggtacaatcttgtttggttactaagaaagcatagagaaagaaaatttgtatttttcattaaaataatcaggaattcaactcttgtgtttctttctggcctgtggaaagaaacgttttcaagacttcgcgtttataattttatataaacaactgaaagaaaattaaaaaatgcaatgacagactgagtatgctttaatttcttctcttaatggtgatctttagatttaatccgatttttctgaagtacatatactgattcttgaatgggataattcctgtttgcttggaaggaaaatgtaccagtctttttccttttctcttatcaatatttgggaccttttctattccattccgtatattatttacaaatttgaaatctgttgcagatttcaaatc

SEQ ID NO: 50731 - DNA, 648 bp, Ricinus communis
  Intron number 1 from transcript 29841.m002779 (locus 29841 .t000043) derived from phytozome v7.0 (chr-ID 29841; pos 3 12845 to 313492)
tcttgtatcccttgtcagatcgcttctcatcatctgtacgttttgttatttattttcttttaattgattttcatttctttgataattcttaagcttttgcttcttttttttttttaaagaacaaattagatttgttgtttgtgtttggttttgtatgaatcaaactgaatttatgaatttaacattttttatgttgagatttaggagttgaaaagcacaggtttgattataagtgaactacaaaattttaagttgcagtgactaagcttatatttaatcactttgtgttttctataagcaacataaattgtagtgatttcatttaatcactttgcattttactgaacctcatattgttttgctgaaaaattctcagtgtcgtacttgtgcgttagggaagaaggcgcttttgtgaagttactcttattaattaacaagcactgaaaaccgtcaaatagaatgattgctttttcttttttcacattcttgtagaataatcttttagcaattgcgttttcgagcttgcagaaaacatagttgaacagatgggtcctctgtattcttatctttcaaaagtttatattaatatttttgcatcttaattttgtgcttatttgttgctgtcttatgtttacaggtgtttatttg

SEQ ID NO: 50732 - DNA, 866 bp, Ricinus communis
  Intron number 1 from transcript 30065.m001166 (locus 30065 .t000031) derived from phytozome v7.0 (chr-ID 30065; pos 9 48260 to 949125 reverse strand)
aagcctttagtgccctcaaacaagtatgtatgtgctctactttgttaaattttggcatataattggtaatgatgttactaatcttgttcttgattttcttaattctggtattatgccttctagtcttaatcacacttttattactcttatttctaaagttaaggttcctgaatctttaaaggatctctgtcctattagtctatgtaatattctttataagatcatatccaaagtcattgttaataggttaaatgtggttctttctttaatcattaatctgtctcaaagtgcttttgttcctggtaggctcattacagataatacaagtgttgcttttgagctttttcataccatgaaacacatgattaagggtaaaaaaaaggtgtatttacattgaaactttatatgagtaaggcttatgatcgtgttgagtggtcttatattgacaaaattatgaccaagatgtctttcccgaatcattttataaagctaatattctcttgtctttcttttgtttccttttcattcttgattaataagcgccttaaaggttttttagaatcaacaagaggtcttcgacaagaggatccgattttgccctatttgtttctcttatatgcagaaggattattcgcaatgataaggaaagtagaaagaaccaaacgcataaatggagttcgggtttgcaggcagagtctaattgtatcctatatcttttttactgataataatattatctttgctaaagtcaatgcagttgagttccagaagctgaaggcaatccttcaagcatatgagatagaatcatgtcaatttgttaactttgaacagacagaaatttcttttagtagcaatactcaagggca

SEQ ID NO: 50733 - DNA, 260 bp, Ricinus communis
  Intron number 1 from transcript 30131.m007183 (locus 30131 .t000334) derived from phytozome v7.0 (chr-ID 30131; pos 2 082882 to 2083141)
caaaggctcctacagtcgtggcctccttcgttgtagttacccatttctctctatctctgttcacagaagcttttctttattctctgcagtgacttgttagtcactgacaagcttcttatgttttcttcttttaaaaaaaaagaaacatggaatcttgtgatgattttgtgacgttggctattggtacgttctaatttatttgatgatgtttgattgaatttgaagcaactgaggtaactaaggagtcggtgaagggaatt

SEQ ID NO: 50734 - DNA, 716 bp, Ricinus communis
  Intron number 3 from transcript 30068.m002563 (locus 30068 .t000053) derived from phytozome v7.0 (chr-ID 30068; pos 3 03697 to 304412 reverse strand)
gaggtgctaaattctgtctgcttttgacaaatctaagtttattatgattgttcatgttatagatggtctagaaactgctgtttgatttcatctctagatgcctgagactttactaatgaagactgatgattgtttttttagcatatattttgattgtatgtgaaggtcaaagtttaaaagatgacggtgcactaagcaatgaccttaaagccttctaaaaccttaagcataatgcttatgggtccttcctattctatgtttgttatttgactttttattccttttgcattttacttcattcacatcccacagccacattccaatagtatctgcttcaagtgtgaatgttggataccactagtaattgtttcagtttcagcacaagggtgaatgtggtgtatgcttattagttgagcttgagcacaagggcacgttcggaatgttaacattcgtttttttgggcattcagttaaaaacttaaactttaaaattgattattttattgacaaatgttatttatttaaaaatgttaggctatcacctggcatagtcaggcatatgctgcccatactatgagtatttcgcagatagtttatctcttctttcttagattcttggtcctataggttatgctgtatactgataattaagtccatctttatccatgttcccccttcttttgggaacactctgtttctaatttctgcaggcgatcg

SEQ ID NO: 50735 - DNA, 633 bp, Ricinus communis
  Intron number 2 from transcript 29917.m001994 (locus 29917 .t000063) derived from phytozome v7.0 (chr-ID 29917; pos 4 13347 to 413979)
ttattgctctgaagaaaattaatatttttgaaaaggtccgcatctcccattatgatttgtccttgtttttttttgcaaatgtcttagtatgaagagttaatttatgctttagtttttttcttggttataggtaggtacattttgcagtcctcttcatttcctatcatattttcagtacctgttaaaggttatgaatgtacagggttagtttaattatatctttggctttgatttttgccacggtgtggaagcatgcagttcgttatatgagtagtgatgagaaatgacttttcatttagtctattaaaatcaaagaaatctgttagtgcttatacagttgtgcactccttgttatccataaagagaagcattgtagaattccactccatatgaactaagcaccactatctatcttcaataagaccaccgtccccaatttataatctaagcctgtatgcccagtacctatacttgaatcatatgcagtgacactggcagcataattttattgtaggaattctactgtagaagtaccacaagtaaaagatgccatttattttccttttgactaacatgctcgatcttgttcttttattaggagaaaagacagcagctccttactgagattcggac

SEQ ID NO: 50736 - DNA, 992 bp, Ricinus communis
  Intron number 2 from transcript 29864.m001501 (locus 29864 .t000077) derived from phytozome v7.0 (chr-ID 29864; pos 1 123616 to 1124607)
aatccaaagttttctcctgtggctggatatcactggtacgtatgttatatagtttttggaaagtaaatcaaatgcaagaatttaattcaattttaattttattaagtcaattctcatagttgatttgattgaattcaattctttcaactaaaaaataaaaatataattgacattattttggaagaattcgattcagttggattcttgctcgtgatttattccaacaattagtagcagttgctagaattcgattttttcaatttaaagccaacaaaatagctaaaaagtaatagaaaaaggtatttcgggagaaatgagattgtgctaaaactgacatgcttttgaattgaattctgcaaatgattaagtccaatttcctctttgttatttgaaatgaagaaggaaagtgaaaaggttgagtcaggttacctgtttttatttttattttgttagctaattattttctcttgttgctgcttgtgcaggtttgatggagatgggtatgtaaaattcaatttttctggttataacagtacaacacattatagttagaatattattgtttcattttttgcagggttttaggaaatagaatcaggttataccacttcactttttgtttatgcagtattatttttgcgtttatgaagtcttatataccttagctaatgcactatcaaccaattgctttatattcctaaactggaaaataaatttctatatgctgcattttgtacagcaattaattggaacaaagtgttgctgctaataattaaaattttcatatatgatttctgattgatctctttttctcgtgttagaagtcgtatgatgcaccttattttttctattttgcagttttgcaaacctggtaattgtttttggattttgagagttggatgttgctttgatttgatcaagaacatagttgttaagatataaagttaaggttcttgcaagtttatttcttttttcatcaaataatttgcagc

SEQ ID NO: 50737 - DNA, 896 bp, Ricinus communis
  Intron number 1 from transcript 30131.m007241 (locus 30131 .t000392) derived from phytozome v7.0 (chr-ID 30131; pos 2 430385 to 2431280)
gactgcgacttgccgaggtaaccttttatattcctcgtgttccgtgcaaatgtttattcgggctccaaatcttgacaatgtctgaacatgttaacgtatattcatatatttttggaatttaaagtggctctttgggattttccagcttcttttgagttgtattgcataaaaaaaaaagggaaaaggaaaagctcactatcaatgtcatgattaaatgctagaaatcatccttcagtagtgcctcattcttttgacaatgagaggtgatgccttttatgttgtaaaacgattgagagttcaaacaattaaaacaccactgagttactttggtttgagggtgatgtaaggctgtcatgcgtagaggtgaaacgtctacatctaatgatgacataatcgcaaattattagtaaaatagaataccagaagaaacaattttacaactatttgcttggcaatgagtaccgcaacgttgctctcttcacacttccatgttcattttcttggattggtagcttatctttattattattaagataaataataaagcattaaaactagtgttgtcagttgtcgctatattttgcttatgaaagtaacatgaactcagtgaaactgtcttttgtcaggttttggaaataaatcaatcacacctgcatcacaagtaattaataggtgtccccagcacatgtttcttcttattacaaggaaaaagaaacactctaatctctattattgtaatttttgaaaccttaattcactggacattgcgtacgatatggaaagtagcaaggagtacctaaattttctgattaattataccagtctcttttactataccgtattacattaaaacctgaaggtcattaatttatttcctgatgtacatttcaggtttg
